United States Patent Application Publication US 2026/0103690 A1 - sequence listing, part 69

SEQ ID NO: 337353 - protein, 337 aa, unidentified
MSTIHILGIDLGKHCFHAVGNNHTGKDVIRRKFSRSQLLRFLSVLEPTIIAFEACGGAHWLARKCEAYGHRVRLIPPQYVKPYVKGNKNDFIDAAAIAEAASRPSMRFVSAKSEEAQVIAAIHRVRDGYIKERTACMSRIGAILLEFGLSFPKGHAKMKALFQWLAEQDIKLPPGLVAELLSIHEHYKYLNEQVSTQDRKLKAITENNENAELLKSIPGIGDLTATLCVANISSPSNFGGGREMAAWLGLVPRQYSTGGKSKLLGMSKRGNKHLRALFIHGARSVLSRIETTGIVFGDWLVNLRATKPFNVVVVALVNKLARIAWAVLYHRQAFKAV

SEQ ID NO: 337354 - protein, 410 aa, unidentified
MIKENYIYVGIDLHKETHTAVMIDCYNQKLGEITFPNRPAAFPKLVTKVKKCNTDGKEVVYGLENAYGYGRALAVWLIDKGYLVKDVNTAISHRQAKHRGAMYRKSDSDDAKAIALATLNMLDKLPDACPNDAYWSLGQLVHRRDNIMKQRTRLVNQLHEQLCIAYPSYKQFFNDISRPTALYFWEHYPSRKYLKGKSVEDLRAELVPVSHNKCSTKTCEKILDAVASDKVKNNNFQDARDMVTLSIVSDIQHYDKQLVEVDKMLEQMYKMLGCTLTTIPGVNVITAVKILAEIGDIKRFSNANKLAQFAGIAPLHLSSSGKGKDVATKQGNRRLQATIYFLAIQMVQVSSKGTPRNSVVRAYYEKRKAEGKTSQQALICISRRLISIIYGMLKHGTEYRMPVVESAGEK

SEQ ID NO: 337355 - protein, 322 aa, unidentified
MNKYRETFGVDISKDVFDVYGSTSGHSQYKNDEKGFKNFLKNLPDDILVVMEATGYYHYRLAQFLYKSEITVSVVNPLSIKRFIQMKLAKVKTDKSDAKAICEYGLVNRVPLYTALTDVQSECLQLFRTLDNYIKHRTATKNKMHGEEALGIPSPFTYRSLRRNKKHYDIEIKAIETKILSLVKKDQQHQLTLLTSIPGIGEKTALFLIVVTDGFSKFENASQLCSYVGITPTIRESGSCVRGRARISKVGNRKLRNLLFLCSFNACKHNKACRELYERIVSKGKSKKLALIAVSNKLLKQCFAIAKSGRPYDETYVSVLTR

SEQ ID NO: 337356 - protein, 387 aa, unidentified
MRTVSGLDVHKDSIFMCILDEQGKKIEEKFGVSTREIKKLSAVLKSHYVSEVCMESTGIYWMPIWRLLEKDFHLRLVNPQFLKQLPGRKSDVKDAEWIATVLLKELVRDSFVPDGDIQCLRQYGRRINEINKDLVRSQQRIDMILQRCNLRLSNYVSDIKSKSYLKVVQALIQGETSSEVLVKLIHGRTVNRHGKNVIQDALEGSVNQSDRDLLHQYTEVFDVLQMQKQQCIDSMVQLCQESYNEAFFILLSIPGIKALSAAIIISEIGDNMELFATSAALVSWAGLRPRNDESAGKIKSRKITHGNKYLRKALMECGWGASRTKESVFYRRFWHLRNMKKHHNAAIVAIARQLLTIIWTLLSRQENFDKEYHLKKQHLLLPLTNSM

SEQ ID NO: 337357 - protein, 384 aa, unidentified
MKVVCGLDVHKDSVFCCILCANGEKIQHKFGVLTEELVTLRDLMVSEGVEECAMESTSIYWIPIWRVLEGSVKLHLVNPYFIKQLPGKKSDVNDAEWIATCLSKELIASSFVPDDKIQRLRQYDRRIFDLNASISRNLVKLDQCIQRCNIRISNYISTTDSKGYRSIVKLISQGVTDAEVLVKELHGRTINRHGRETLVKALTGVVSETDIDIIKQLVEEIELQQRHKDEAQEKMTELCMECFPEELENLQTIPGVKERSATSIIAEIGTDMTHFQTPKKLVSWVGLRPRNEESAGKIKARGITHGNRFVRKTMIECSWGAARMKDSFFAEFSYRQCIERRKNKMKVQVAIARKILVAVWYVLSQGTQYIKPTDHYTATDMTAV

SEQ ID NO: 337358 - protein, 343 aa, unidentified
MKCNLVSIDLAKNIFQLCGFDSKNTILFNKKVKRSDLILELTKIEPTNIAMEACYSSNPWGRRIEALGHTVFLIPPFAVKPFVIGNKNDHNDAIAIGEAFSRPRVRFVNVKTVEQQDIQSLTKIKDLMTKQKTAISNQLRGLLAEYGLVMPKTTAALTNMIPAFLEDAENELSPVSRSFIHRQLENLRHITEQIEEVKLELTELVKDKDDYQRLLTIPGVGPIIAATLMGTVSDPNSFKNGRQFAAWLGLTPSQYSSGDINRMGCITKRGNSDLRRLIIHGARSVLNWCENKEDELSCWLKKIKQRLPGNKAAVALANKLARIIWRILAKKEVFNVSLACHGT

SEQ ID NO: 337359 - protein, 341 aa, unidentified
MGRSVGVDLHKNSFTVCFYESEERYTFKTYRVSRVGLAAFRKQLQAADELAVESTGNTAFFVREIAASVKRVRIVNPVQFKVIANSVKKTDTIDALTIARFLSRDLIPEVRMRSKEESQRSSLIGTRDKFVKLRTALKNKLHNILNANGIVSQPEMVSSEKGLEQILGVPLEPSYRFEVELLVTEIRHLNEAVKKLDEELRHQGQQLPGHQNLTSIKGISDTGATIFLTAIGNLADFKDEKALASYFGIVPRVYQSNQTCHYGRITKRGNKIARTTLVQSTLVAIRYSPYLRAFYEQVKARRGSGKAIIATSRKLLGIIYNTLKHNWVFEDFTTFKLATSS

SEQ ID NO: 337360 - protein, 360 aa, unidentified
MIGTMTWAAMDVHARSTYAASMDVMTGELCRQRFDTGAVEPVVGWLAGLPGPVRCCYEAGPTGFGLYRAAVAAGVDCQVIAPSKTPRPSGDRNKSDRRDTDLLLRQLMAGALTPITVPSATFEAARDLSRAREQIRLDLMRCRHRLSKLLLRHGRVWDRSTWTHAHRQWLSGQTFAHQNTELAFIDNLAACDGLTARKAALEERLSWVATDPEFWPIVSRLRAFRGVDTLSALILLLEVTDFARFPRAVQLGSWLGLVPSRQQSGESDVHGSITKTGSKYARRILVEAAWHYARAPGVGRSLYERQEGLPDHVLQIASRAQHRLYRIHKRMRERRKPGNVITVACARELACFLWAAATAP

SEQ ID NO: 337361 - protein, 410 aa, unidentified
MRIIALDVHRSFAQTAILENGKLRDAGKIDLEYSRLLRFARKLKPDDEIVIEATGNTSAIVRVLLPFVGRVVIANPILVRAIAWAKVKTDKIDAAVLAKLHASGFLPEVWMPDEETEARRRVVAERTQLVSQMTRLKNRIQSVLHANLIPPYKGVLFSQRGRAWLEAQPLAEDQRRVIVRHAGELDRLGAELAEVDKSLAQAALEEPRVKRLMTITGVNSTVAMSVLAAIGDIHRFSSPEKLVSYFGLNPRVRQSGDKPAYHGRITKQGRAHARSMLVEAAWVISGAPGPLRAFFIRIRDKRGKHVAAVATARKLAVIIWHILSKDEDYTWNRPALLQWKLRKLELKAGHPSRRGGRQKGSAAAYSNKSVRDSERETIANAEDEYRRFVATWKLQSPKERLGATNEVRRS

SEQ ID NO: 337362 - protein, 352 aa, unidentified
MKEYIGCDSHQRYSVFVRVNEGGQAGAAERVENDRATIRQYLRRLPAGSAVAVEASGGWYWLVDEIEGAGLIAKLTDPKEAKQRMRSRNKTDEIDARGLAYLLYDERLPEVWIPPAELRDLRGLLRTRLSMRRVTTSLKNRISAAIRRYGLREDECSDLFAGTGRVHLSSYIGWLPLQTRFAAQEEWALLDETEKRIKRLEDRIADRIGKVGWVRMLKSLPGVGDILGATLWLEIGDVKRFHSAEHLASYAGLTPTVFSSGGKTHMGPTPKSANHYLKWAFVEAASATIRQKNKYAFTHVGRVYERIKKQKCSAKAKVAVGRHLAEASYWILTRKQFYREPAPALVASSKNG

SEQ ID NO: 337363 - protein, 399 aa, unidentified
MKNEIVVGIDPHSDSLGGVIMHEHNILSEFSIPNCSKVHTDRLISEAENFAKQFSAQTVFAIETTNVFWRPVFSYLKRLGKTVFTVNSLQTKNARGTKMRKTKTDIIDAKNIVAVYQQDNAHQTNFPEGVLFDLREITRLYSWLVNLQSRFLDRIYGYLFQVFPEIFSVFKKKSVNSNTVLTLLEQELLHPENLKNTRIDKLTNVLVSASSGHFNRETTQKLKELAKTSFGIPEGKQGFTTCLKTLSKLYQHFDNLLKTLEVETIEPLLSTVSHPFSSLKGLGTMQTASFVSELGNPKNFQNADDVVAFFGYDPSISQSGKRSGQGKHISKCGTKYGRETMYLAAGSCMLNNPVLKKKYKKLKTKRFWKDAKSILAADLIKICYVMYRDNVPFDPNKIH

SEQ ID NO: 337364 - protein, 400 aa, unidentified
MLSIGIDVSKGKSTVCGMKPGGEIVYTPFEVQHTREGMSELVSLLRSSGEEVRAVLESTGSYHCPVVTALLENGIFVSVVNSLRMKRFCSQSIRKVKTDRIDAMQIALYGLAYWQELQPTRLPEDTYRELQLLARQYYQMTSMLIKAKVDFNAICDQVLPGMQELMNDHAGRHKLSDFVLRYCHTTHILEMGETRFRKDYCKWAEKKGYRNCERMAVLIFATAQNGIPVLPNAPSTQIVITEAIRVLHTVEASRDAILTQMQALAKTLPEYSLVREMPCIGDTLAPRLIAEIGDVRRFHSKRALIAYAGIDAPPYQSGKFCANNRHISKRGNRYLRKTGYEVMQSYVMHKPANDPIFTFIEKKRGEGKSGKLAMVAGLNKFLRVYYGKVTELYRSLPAIE

SEQ ID NO: 337365 - protein, 416 aa, unidentified
MAKASGKVCVRLPHPSGNGRRLTRVWDVPAMTNAIVELAEELAGLDVQRVVLEATSDYWRPFFYLLEARGLEVWLVNAHDVKQVPGRPKSDKLDAVWLAKLNERGMLRPSFVPPAEIRALRDYTRLRADLVAERTRHKQRVEKLLEDALIKLSSVADDLLGVSGRAMLEALISGERDPVVLAGLAKGTLRHKHADLVQALTGRFDAHHAELARVLLDQVDTLGAKVDRLTARINELLAEIPAAAAPQGPDGGAGLGVIDRLDEVTGIGQAAAQAIVAEVGLDMAQFPSDRHLVSWAKLSPRTAQSGPRARSGPVGKGNTYLRSALSQAALSAATTNTFLGQRYRRMAKRRGKPRALVAVARSILVIVWHLLDDPTARFTDLGADYYERRTDNQRRTRDLVRQLQALGHNVTLSPAA

SEQ ID NO: 337366 - protein, 407 aa, unidentified
MLWGGGVDIASIVRYEPMELPMQTLNDFSRSLIALEPASTLIAVIEMSLSSWLVAGIVPSIERQPLKKLAVDESALLRLLHRWRDEAEKAGCRIERIVVAFEAGRDGFWLARWLKGHSIEAHVIHAASVAVSREHRRAKTDRLDAELLKRAFLGWLRGERDHCKVVAIPTLNEEDAKRPSRERQSLVGEQSRIVNRMKAALTRLGIRGFNPKLKRAAGRLDSLRTPEGEPIPPNTLAELRRDMERRRLISNQIRQIEEGRLKYFEQAPNDGPHAMVRLLARVIGVGIETADMLVHEVLSRNMHDRRAIARYAGLTGSPDESGRKRREKGLARSGNGRVRRGMIQLAWRFLTYQKESALAQWYRTRTENALGARKPMIVALARKLLIALWRFVRQGVVPDGIVLRPAQ

SEQ ID NO: 337367 - protein, 343 aa, unidentified
MGEVSTIGLDIAKSVFQIHGVDAGGAVVIRKRISRAKLLEFFATLPTCLVGIEACPSAHYWSRRLQGLGHTVRLMPPSYVKAYVKRGKNDANDAAAICEAVTRPSMRFVATKSEQQQSGLMLHRSRQLLVCQRTMLSNAMRGHMAELGIISAKGRNGTAELLEIIADEQDDRIPAAARFSLNVLARQYAAIRAETVAIERRIHAWHRSSEESRRLEEIPGVGPIVATALMAEVGDWKTFSSGRSLAAWIGLVPRQHSSGGKERLGRISKQGNRHLRWLLVAGAMAVIRYARQHGTKRPWLARLMDRRPIKVAAVALANKIARMAWAMMVRGERFKEPKLLPAA

SEQ ID NO: 337368 - protein, 329 aa, unidentified
MKVQHIIGTDLSKKSIDLVCHLLNTHIQIENSITGFKDLLQWFKQQKINLSETMIVMEHTGLYSYCFESFLHKHQIAFCKVNALAIKRSIGLVRGKTDKLDAARIAAYGYEKKDKLAIDVPASEALKRLQLLHSTRERLVRHRASLTCAIKEYKHIGIADKDVLMQTQLQLIKNFDKQIEKLMTEIETIINEDQSLKQNFHLLQSIKGVGKVVTLAVIIKTHNFTRFANARKFACFCGTAPFPHDSGTSIRKKSRVSHLADKQMKSLLDLSAKSAIQYDKELREYYLKRTEGGKSKMSTINVVRNKILYRMFAVIKRQTPFLENYLQAA

SEQ ID NO: 337369 - protein, 383 aa, unidentified
MSLASPADAVDYDATLIMAVETSNKSWVVAAHVPGLGHIKAKQTIGPTAEALATSIEGYRRRAAASGRAIDRVIVVYEAGYGGFWLARWLTARGIDVHVIQPSSVPVERRKRRAKSDKIDADLLLRTLLAWLRGEPRVCTMVAIPEEAEEDARRPSREREELIRERIMLTNRIGAILATLGIDDYNPLRRDRRVRLEALRTALDHPLPEHARAKIVRIIERLELVLSQIAALESQRDAVLEDEAPEEAKRMIKALVLLRSIGAQSATVLVYEAFIRRFANGKALGCYAGLTGTPFNSGGSEREQGISKAGNRRLRAAMGELAWLWLRYQPESALAKWFRERLAGAKGRLKKVLLVALARKLLIALWRYATDGVIPEGAVLKPA

SEQ ID NO: 337370 - protein, 346 aa, unidentified
MTHSTTVGVDLAKNVIQVSVVSGRGKELSNRSLTRRKFAEFLGKQKPSLVAFEACATSHYWARAAERNSHVARIIPAKFVAPFRQGHKTDSNDALAVAEAARRPNIKEAPMKTVEQQGLQAIHRSRQLLVQESTALSNHLRGLLMEFGIVIPKGFASLLKAVPEILEDGENELPDLYRPTLHRMYNRLLELREDIEAMTKEVERLAKAHPICSKLMALEGIGPIGAVLLYATMGSGAAFAGSREFAAYLGLAPRQYSSGGKTNIVGLSKKIGNSRLRSVLILGARAYVYKLNEPKSSKDKWLKANIERNGECRAAIALANKNVRTAWAMVTQGTEYQRRAQLEMAA

SEQ ID NO: 337371 - protein, 336 aa, unidentified
MEQLEAVVGIDVSKKKLDVALLLNGKMKSKVLDNGPAGYQALLGWLQKHQVPLAALPVCMEATGVYYERLALALHAAGLKVSVVNPACIKGFGHSENIRNKNDAVDAGLIARYCRAMAPTVWTPPPLAQRQLRAWTLRLESLKEIRQQEENRLEALTVSGMDDVASHVQQHITWLSDEMKKLAEQIGDHIDRHPGLKHDADLITSIPGIGMATAARVLGQIGDLRRFDDAKAFAAFLGVTPRQRLSGSSIKGRTMMSRTGNSALRAALYMPSLVARRHNPVLRRFAERLLGTGMAKKAVIGAVMHKLAHLIYGVIHTDKPFDINHLSKGLAIQDGI

SEQ ID NO: 337372 - protein, 351 aa, unidentified
MKTTTLVKTETQARIAQLKLGVDWHADHFRVVRMCDGQSPQPAQRFTPASFLPFVQKQLTLAEGVFVVYEAGPGGFHLHRQLTALGVTAFVVHPQKLDPQHKGVVTDKTDARELTLNLDRYLRGNLRAMSVVRVPSPAEEQRRALARQREQLRRERQRLAAQGRSLCLTQGLRLRGEWWKAQLTLPDWLETRLAVWRQLIQAVETLLEDLTKEVEALAPKERPKGLGPLTLGLLIAELCDWTRFKNRKQIGSYTGLCGGVSSSGQSHCDLSITKAGNARVRWALIELAWRMVQFQPHSKAVQRWRHLLLNPKAAARQKKRALVALARQLAVDIWRWQTGKVTPEQLGWVMV

SEQ ID NO: 337373 - protein, 420 aa, unidentified
MTSPNVIPADAVLVAIDIAKVRNEVLIEAPGHKRRRRLPVLNTRAEHDRLIEILQAYDRPVVCGFEATGNYHRPIAWRLAEAGFEVRLVSSLALARTREALHNSWDKNDPKDAQVILHMLRIQATQRYHDPLRAGINDVQELSKTHEAIARAKTEIQHRILTHYLPLYFPEIDRFRGNSRSDWFFAFLDAFPTPASITALTKEEFVKAAWDVVGRKVSKTQILMDIYETARTSIGLPLPLDAPAIRMFRMVIAEARSLIRQRNEIEAQADELLRHSQDYQLLRQIPGIGPINALTIIAEAGDLRRFHHHRQFLKFCGLDLSTQQSGQYRGQTRLSKFGNARLRRTLWIAGQVAIRQRENGFRHKFERYIARDRDNPDLRRKAMTAITAKMARVVHAVVKGGSDYRPFVEGRVPGGRTSVS

SEQ ID NO: 337374 - protein, 345 aa, unidentified
MPIVGGFDIHRKQITFDYPGTVTGEIKRGQIAPADRARLRVWLTRFAGRDDAAFAVEGCTGWRYVAEELAFAGIAAHVAEPADTAFARGRKRHAKTDKTDSRHLRELLAEGRLPECWIPPSRILECRALLECYHDLRAEHTAWVQRIHAVFFHQGAPALGEAALRTGRDLQALHAAAAAHLSPAGQLQVATALDVLATLEAHLDMLRHRLLDAARHLTGARVLAERLYGVGPATALAITCWLGGGGRFSSSRKAVRFAGLDVTVYSSDSKRSPGRLSRQGPPVLRWVVYEAGKTHARASAPDHRYYAQVKERKDSKRAAISEARKILRQACHILTELGDDALTAA

SEQ ID NO: 337375 - protein, 360 aa, unidentified
MKKAFNRMSYKGKTVCVGIDVHKKTYSVVAVVEGEVVKKWRTPANPGTLADQLLRYFFEAKIKTVYEAGFSGFVLHRHLEKAGIESIVVNPASIEVAVNNRVKTDKRDALKMATLLEAGRLKGIRIPTEEEEQGRLLTRTRQQLVEQRTSLKNQIRMKFHQMGLIDVEDERALTHQFVAELLEKSKSPELQIVVCALQNVWKSIDLEIKKIELKLKEQAQQDQNESTYRSAPGIGFLAARVLSNELGNMSHFDNERQLFSYTGLTPSEYSSGETTCKGHITRQGNSRVRHILNQAAWQAISKDLDLKKFFERLYPKTGKKKAIVAVARKLIGRLRAAFRKGVLYQLNPVTPKSVAVLATD

SEQ ID NO: 337376 - protein, 368 aa, unidentified
MPSMQLRRDDVIVGVDTHKDQHVAVVLDGLGGTLGELSIPATADGYDELLAFAISHLGSEGRLQGFGVEGTGSYGVGLARFLRRYGQRVHEVHRPPRKGERRLSGKSDAIDALHAARQVLAGLCTAVPKTATGSVESLRLLKIARDTAVKARTTAMITLKATLVTAGDELRAELEPLTDFKLIEACAALTSAASLATPHAAMAHVLGSLARRWVQLHEEIKVHSRHLKTLTKALAPRLVQAVGVGLDIAAEMLVTAGDNTDRVRSEAAFAKLCGACPIPAGSGKTNGRHRLNRGGNRQANAALYRAVIVRMRWHQPTIDYVTRRTAEGLSKREIIRCLKRYLAREIYHLLPEPAGVLNAGDEPLEKAA

SEQ ID NO: 337377 - protein, 409 aa, unidentified
MPYRIAGIDVHKKKLAVVVADIEVEDEYQFERRWYGSNPEQLRVLVQWLIEQQVEEVVLESTAQYWKPLWSALERYWKPTCQKREGAGKMSGTLHLAQALSNRGRRGRKKDFRDAERLVKRLVSQELTLSFVPAAEQRLWRTLTRTRYQRRRDRVRLQNQLEALLEEAHIKLSSLVSDLFGVSARRMLHALAEGETDPTALAALAHQRLRATAAELRDALGACTELNPVYRRVVKMALVDLQLIEQQIDQLDQEIASLLREHQDAVQRLAEVPGLGVDSAQQIIAEVGAKAETFASAKNLVSWVGACPGEEESAGVNRSKRSPKGNRQMRRILHQAANAAVKHKGSIFEIVYRRLVVRLGHNKTIGAIAHRLCRLIWIILHNRVRYEERGPTVCEKAKRVRTSRMIRTL

SEQ ID NO: 337378 - protein, 352 aa, unidentified
MYYVGLDLHRKYITGCALDSQGAVVATERRLPPVLETVLGWLAAVGQPAAVALEATLYWAWLHDRLTAAGYQVAVAHPQQVKLICHARCKTDPVDARKLADLLRTDLLPAIWIPDAETRARRTLLRGRAWVVRTRTRVKARIQAYLAAENERVPVSDLFSRGGRAWLVTVALPPAVRQQVDRLLALVAQLDVAIAEQDRAVRELARATPEAERLQTIPGIGPFGALLLLAEIGTIARFGSSHELAAYAGLVPSTRSSGGKTAHGSVGPAGSAWLKWLFVEAVQTLKRQPGPVRQHYERLLRAKGKQKATVAAARKLCCYVYWMMKEGRSYDDWLRQRQQREVRPIQAVASVA

SEQ ID NO: 337379 - protein, 402 aa, unidentified
MNCVGIDVSKGKSMIAVMRPFGEVVVSPFEVRHTANELSELAGLLKSLDGETRVVMESTGNYHAPVAWLLHDAGLYVSVVNAMLVHDYGNNSLRRAKTDKKDAIKLANYGLDHWLTLPRYVPEEDTRLMLKACYRQYQQYSKVQTMLKNNLISLLDTTFPDANRLFTSPPRDDGREKWIDFVATFWHRECVCDLSEKAFAAKYQKWCKKYGYNFSEGKALDIYAAARGRFGVMPKTDTAKLLVEQAISQLRATSSALAALKQEMQSLAASLPEYPVVMEMFGVGPTLGPQLMAEIGDVRRFHSKKALVAFAGIDAPPYQSGQIDVRSRSISKRGSASLRRTLFLVMGVLLQCAPMDEPVYQFMNKKRSEGKPYRVYMMASANKFLRIYYASVKAYLDSLEHD

SEQ ID NO: 337380 - protein, 344 aa, unidentified
MHYVGVDLHKEQSWFYVSDHEGKRLISKSITNSDEELKRIFDSIPKPFKLGVEATRNWYFFVDLAEQYAEEVKLANSFELKAFAKRNKKTDKIDAKLICDVLRMGYLPTVNIPPKPIREIRELIRYRISLVYERTFNINRLKNTLGKLGMECNGDLTTYKQLDKIKTEGLPAIYETVIQGHKDRIRFLTEKIRHMKMHLEETFQEDQEIINLISIPGLSYLSAAIVKSEIVDVNNFASFNRLCSYAGLAPRVSQSANKDIHGPLSKNRRKLLQWILLEVTPHFIKASPEKKSKFDELAKRKNYNIAKVALARELLKMIYVVLKEKRKYYSKKIRSTAGVALHGV

SEQ ID NO: 337381 - protein, 427 aa, unidentified
MPHRIAGIDVHKRMLAVVVSDVEVADEYQFERRQFGSNPAQLRALAEWLLEQQVQEVVMESTAQYWQPVWGALEQYWKPPCQKSEGARPRSGSLPLAPAQSNRARRGRKRDFLDAERLVRRFVANELVLSFVPDPEQRLWRTLMRRKYQMTRNRVPLQNQLEALLEEAHLKLSSLVSDLLGASARRMLRALADGETNAVALAALADYRLQATPAQLQDALGACAGLDPTYRRLLSMALEELQLLEKQIGQLEQEMADRLRPHQDAVQRLAEVPGLGADSAQQILAEVGATAATFPSEGDLASWVGACPGDEESAGKSYSHRSPKGNRQMRRLLNQAANAAVKLKGSIFALLYRRYVTRLGHNVTIGIIAHRLCRLIWKILHQGIRYEERGPAASEQSKRQRARRMIRELRSLGYRVELPNPQPAVPA

SEQ ID NO: 337382 - protein, 293 aa, unidentified
MFIGIDVHKRYSQIAVLDKNGEIVEEVRVENANLDDFAQRYTGSKAALEATSNYYHIHDTLSAYLDVTVANPGELKLISDSDKKTDRVDAKQLARMLRLGSVPESYVPTDEVRQARALVRGRQKLVENRTEYANKIHGLLSDHGITREVKPLSVEGREFRQELSLPAPWDALLESYLELIQVLTKQIESLEAEIEERAESLKETQFLMTIPGVSYFTALTIYAELGEIDRFDRAKEVVSYFGLNPIIRESGDSRLREASRSEDQDESGGCSFKRRIVRFIRAKTSTSAGFTTG

SEQ ID NO: 337383 - protein, 326 aa, unidentified
MKNIIGIDVSKDRFDVYCKTTKEYTSYSSDASDIDKLAEYCQKQEPELVVMEATGGYEFKMASVLMAKGLPVSIVNPGRVKEFAKSLGILAKTDKICARKISLFAEAVKPRQNSQIDEQRREIKELTVRREQLVKMRTAEKNRLDKAFEKTTLNSIKSTIDFLERQINDLDKTISELIEKVPRLKKKTEILTSIPGVGEKTASMLVAAMPELGTLNRRQIAMLVGVAPINRDSGKMRGKRATGGGRKGVRDKLFMPALTIVRFNPALKCFYERLVEKGKPKKVALTATMRKLVCIMNTMLQNETFWQNKLLRGEAGFGAEPQEKSI

SEQ ID NO: 337384 - protein, 409 aa, unidentified
MLDNHFQYFVGIDWGSERHRVCLMNREGRTLAERWIEHSGDSLAELADWLRQQTSDSASALAAAIESPRGAVVETLLEHGFAVFSINPKQLDRFRDRYWPAGAKDDRRDAFVLADALRTDMHCFRLVKLDEPVMIRLRELSRLDDELAQEQNRAVNRLREQFHRFFPQLLQLCQSAEEPWLWDLFESAPWPAKAARLTEARIARILREHRIRRITAAEVRAVLKTKPLTLAPGAAEAAIEHALLLLPRLRLLLQQRTDLARRIGALLDELATPAEGRQEHRDAAILLSLPGLGRKVAATMLSEASQAIAERDYHALRCYSGTAPITKQSGKKKIVIMRRSANERLRNALYHWARTSVVWDQVSKKAYAMLRARGHSHGRALRSMADRWLKVLTSMLSTRTLFDPQRRPA

SEQ ID NO: 337385 - protein, 459 aa, unidentified
MEVTYTHCAGLDVHKKTVVACMFTSDEAGNKRKEVRTFGTMTANLLALSDWLKSQQVTHVAMESTGEFWKPVYNILEGNFELLVVNARHIKNVPGRKTDVKDAEWIADLLRHGLLRGSFIPEREQRDLRDLTRQRTNLVEDRARVVNRLQKVNEWSNIKLSAVVSDITGVSARAMLNAIVEDRLAPEAMAALARGQLRHKREELAQALTGIVGEHHRFMLAQALVHIDFLDEQIAQFDREIATRMAAPGDDGQPPAAPGAEDGSEPLEGEPVNGNCGESGESGEVLAALPPLSWAEAVVLLDTMPGVSPRTAELMLAEFGCDMRRFPTAAHLASWAKLSPGNNQSADKNYSGAIGHGNRWLRSALVQAAWAAIRVKDSYLGAFYHRLAGRRGAKRAIVAVAHRMLIAAYHMLSRHEPFHDLGATYWDERNKGRIVNRSKRRIEQFGYQVILLAPEPAVA

SEQ ID NO: 337386 - protein, 420 aa, unidentified
MHNSTAYKMAQLPPNVLRVGIDPHKHDHAAVIMTAQAQVLAKFKVQNLRPGFESLLARCDQVSQQHGGLSYVFAIEAGAHYWRNLAQFLTDKGKDYHIINPFTLKRQRDGDDLVRRKNDYRDAQMAADLLGQGRYTWTTLPQGRYAELRAAFLWQQRLVADGARLKQELICALDGLFPEFQTVFKSVDGETALALLSIYPDPAQLAATPVADIIARLRTIFGGQRLSWGKIRAVHALAQTTVGLRDSAPSLSLVVQSLVNRLYDLMSERQQAEDHLMEILQRCPESRYLLSIHGLGAINAAGLLAHIGDISHFSSVKQLPKLAGIIPTEDSSAGHTVGAPHISKKGRPNFRLVLYRSALGLLRHNDVFKQYVTRLTERGAHSHPLKKKEAIVAAMNKLLRIVYAMLTKQEMFAPDRQLIS

SEQ ID NO: 337387 - protein, 403 aa, unidentified
MKHVIAFDISMGKSYMVVYNALKKCQLEKEIAHNRPGFMDLKKLIDDLIEGYDEQPHIVFESTGVYSRTLERFMQENNYSYCLLNPLEAKLQCDSLRIHKTDRSDAHRLALTHFTHERRIETDSNDVYRQLKRLSRHYSELDDELSVTRSRLHKVVQETFPELENIFTTKSELFLNVVQLYPHPDLVLNHSKTIIKNRILANTNKRMAVNKAEEKAVELMEAAKQSYPAASSTDVVCDQVRVYAKRFQELLLQKEQCISKMELIAERLEEYSIIRSIPAIGANTAVRIIAEIGSIQRFDNNRQLNAYTGIDIRRYQSGKFIAKDKINKRGNKHLRKIMYLTVQNMIRQRRFGGNHIVEYYDKLKRQPYNKCHKVASIACVNKLLKTIFFLVTHNQNYDYRLAP

SEQ ID NO: 337388 - protein, 384 aa, unidentified
MNKHNILFIGLDTHKVSTEVAHVEEQRGAKPTHFGKIKTTKAAITKLARQYQSKYPHATLHFVYEAGPCGYWIYRLLTSLGHCCYVVAPSLIPKKPGVQVKTDKRDALKLAKLLKDEELTPIYVPESEDEAIRDLSRARETTMKDLKDAKYQLKALFLRNNITCKVNDNWSLQHLRWLTELVLPHPSQQIVLQEMIHTITERIQREKRLTNELFHQIKQWRFYPVVKALQAIRGIRMLAATGIVAELGDLRRFDQPRKLMSYLGLVSKENSSGDNRRLGSITKCGNGRARRLLVQGAHTYKHNANISTELQKRQEGLPKEITDIAWQAQLRLCRRYNRLMNRGKHRNVVVISIAREMAAYIWAIAREVVISPVNTRLRISRVPA

SEQ ID NO: 337389 - protein, 344 aa, unidentified
MQIAVLGIDLGKNSCSVVGLDSTGAVIKRRRMRPENLVAFTETLPACIVAMEACCGAHHLGRTMSSQGHQVRLMSPEYVRPYVKAQKNDDRDAEAIAEAATRPTMRFVELKSESQLDVQTLHRARDRLVGERTALINQLRAVLLERGVTIPQGRRKLEQHLDAMMASDDDHSLSPRVRRLIDDMRAEWLELDRRIAAFDDEFAAYARSDADARRLATIPGIGVLNATALLAAIGDGQTFARGRDLAAWLGLVPRQVTTGGKPRLVGITKRGNKYLRKLLIHGARAALPSLATSATPLGGWLRALMQRVHKNAAVVALANKLARIVWVVLRRGEEFNATAVTATA

SEQ ID NO: 337390 - protein, 430 aa, unidentified
MKQYELLHSLFVGIDVSMKENVVHAMPFSPEDHPGHAHLRFSAPNTPAGSVGIVEKVSDFLKFYPDVIQVVIALEATSVYSFHLATFLSVAHFNGHIPAIVYSVNPKEIHAYKKTFTDVGKDDYVDAMVIADYARSNKIRSRPWKGPELLGLRVLTRLRFRIAKLMGIVKNSTGNSIYLECSGLMTGENPFCNVWTTTCQELLTTFQGPDEILSLSDEELLNFITEKGHGRFSHPLDVVEKVKKAARNSYRLDKRVYEPLTSGLSVSFFIIHSLEAAIKKLDKSIETMAKSFSSDSYQILLSIDGVGPVIAGGLLAEIGDIKRFKTDDALAKYIGLTWRGKQSGQSESPVKHLSKAGDVYLRYYVLLATGQIINYSAKYREAYERIRSRKTLFPHRAALNLVARKIVRLIFTLLDKHQLYSDNKVMVTLE

SEQ ID NO: 337391 - protein, 356 aa, unidentified
MQGRETSINNTFLHQGWQMTTIGIDVGAKELVVAVRHKQATKIINGYPNTASGITKIRALCEKYLKYGPVRIAMEATGVYYLDAAISLSENKQFEIIVANPRATKAFSSAIMDRTKTDKVDSQMLALFAEKMDYPLWQRPSSSLIALRCYSRTIHSLTEDKARVHNHLHALSFSKETPLNVIELVKSNIAFLEQIIAKAKEEVIAVIHANENLNQSFALLQTIKGCGETSAIQILAEVSFIPEGLSHKQWVAYAGLDPRQYQSGTSVNKKPQISKAGNRYLRKALFMPALSASTHDPYVRQYMNHLVENRGLRKIQAVVAVMRKLLHAIHGMLLRNKPFDNTRFFGAQKLVSVAVA

SEQ ID NO: 337392 - protein, 309 aa, unidentified
MATSSYVGIDVSKDRLDIAVLGEKQVWQVENTCKGIDELVHWMQEMQPELIVVEATGGYQRGVVDALFHVRLAVAVVNPARVRQFARACGLLAKTDKLDAQVLAVFGQRVQPKRYEGKSEAEKQLSALLVRRKQLEEMLKAEQNRLRTIAPSLRGSVERIIALLKEEKKRLEEQIEQFLNEQKAWQEQREILSSAPGVGKVTTATLLADLPELGKMDRQKIAALVGVAPMNYDSGRKRGYRKTKGGRTDVRSVLYMATLVATRHNPVIRAQYQHLQKRGKLKKVALTACMRKFLTILNAMMRDQQPFRA

SEQ ID NO: 337393 - protein, 333 aa, unidentified
MESQSQRHVGIDVSKDRLDVAVGSEGELWQVSNDSAGHSELLERLSEVKPALIVLEASGGYEAVVAGVLWDAGHPVAVVNPRQVRDFARGMGKLAKTDQIDARVLAMFGEKVPIEVRAPLDAEARELQTMVVRRRQLVEMLTMEKNRRPLVPSGRARKSLDKHIAWLEEAVRRASDDIDQTVRQSPLWREKEDLLRSVKGIGPVSARTILVELPELGRLNRKQIAALVGVAPFNRDSGRFKGQRTIAGGRSHVRTVLYMAAVTAARHNPLIRPLYQRLIAAGKKKKVAIVACIRKLLTILTAMVRDNVHFTGAPHPGLRPTAATAGRGGKISL

SEQ ID NO: 337394 - protein, 305 aa, unidentified
MYYSGIDLHSDNCYITTIDDTGAVIKRQRVENDNKHVLDYFNSLLGSHQAVVESTTGWYWLNDLLQDNGIELVLAHAKYLKTISYAKVKTDKVDSQTLAILLRQGLIPRAHKISSDLRGLRDTMRIRLRLVQQRSACLLRLNSIQMKFNGSVPDPYRFQLAVLEHTKDTFTSQILALEKSLHPVLIPNDDIQRLLNIPGIGKLSAFIIYLEIDGIERFASDKHFVSYCRLVPAADNSNRSVHHRSSKDGNKYLKIAFSDAAVHAIQYYPEYKRFYQKLARRSNEATARTVVAKCRFTASRSLYFY

SEQ ID NO: 337395 - protein, 347 aa, unidentified
MTLTSMYYVGLDVHKHTVSYCVKSVEGSVVQEGTAVATRAALTAWAERLPGPGSGAREATLFTGWIYDHLQPWAQQLKVAHPAMLKAIAASKKKNDRMDARKIADLLRGDLLPECYMAPRALRELRRVLRYRNLVVRQAVRMKNKISGLLLETGTPHSQQRLHGRQYFQELLASLEGVPDSVVELLRLTRCSWEAFHRMEQKLTAGRCQDPALAERVARLMSLPGVGPITALTWALEVGEPERFARLGQAVSYCGLCRAQRESGGHTQRGPLSKQCNKHLQSILIEAAKLAPRWSPRLAELYARELQRGHRNRAPLAVARKRVAYLLAVDRRGRAFEDRAPAQPKAA

SEQ ID NO: 337396 - protein, 386 aa, unidentified
MIEAVIERCAGIDVGKKFLVVCVMSGSLEAEPKTEIRKFGTIVAELEHLRDWLIQEGCSHAVMESTGSYWKPVFNILEDSVELKSCWRMPTINRRGHKTDPNDSRWLAHLLRHGMIRPSFIPERAIRELRDLTRRRRQLVGERARERNRIQKILEDANVKLGDVLSDVLGLSGRLMIDALLEGRLQAEEIAQLAQRKAKQKIPDLIAALQRNRLTNHHRFLLRHALRHLDFLAEEIEALNIEIRSRLTTEQFRQKHALLQSIPGIQEEASAAILAEVGPNMAQFPSDAHLASWAGLCPGNHESAGVRKTGRTNRGNNWLRSILTQCAWAASNKKNSMLQSFYFSLSSRCGRKRAIVALGHRLLRVIYHVLLRDQPYQEANMRPLSA

SEQ ID NO: 337397 - protein, 347 aa, unidentified
MRFYTNPHQFYCGIDLHARSMYVCILSHDGETLLHRNMQAAPEPFLKAVAPYREGLIVAVECMFTWYWLADLCAREGIAFVLGHALYMKAIHGGKAKNDKIDSHKIATLLRGGMLPQAYVYPAEMRGTRDLLRRRTHLVRKRAELLSHVQNTNSQYNLPDIGKKIAYKSNRAGVAERFHDPAVQKTIEVDLALITYYDELLRDLELSILKTAKQHDAHTLYLLQTIPGIGKILSLVLLYEIYDIGRFPSVQDFASYARLVKCSKESAGKRVGTSGKKIGNAHLKWAFSEAATLFLRNNPNGQKLLTRLEKKHGKGKALTILAHKVARAVYYMLKRKTAFDMDIFLHA

SEQ ID NO: 337398 - protein, 353 aa, unidentified
MRTYYVGMDVHRATIAMVVLNGAGKVVEQLVVETSATRVRSYLKQLQGRVYVTFEEGTQAQWLYDVVQPLVTEVIVCDPRHNKLLKAGHKSDRIDAQKLAELLRNGALKAVDHRDHGVRALKELVRNYDCLVSDTTRVMNRLKAMFRRQAIACSGHEVYRQDRREVWLAKLRERGAKERASSLYRQLAALKALRHEAKLAMVREARRRAAYVWLMSVPRLGAVSVAQLLAVVGTPYRFRTKRQFWSYVGLAVVTRSTADMEVVAGVLRRSRRPVATRGLNRNHNHLLKRVFKTAATSACQSEPFKQHYERRLQQGMDPALARLSVARQLSAITLSLWKRGEKFQAERMKRQAA

SEQ ID NO: 337399 - protein, 343 aa, unidentified
MSISMIGLDTSKSVFQIHGVNEAGKAELKRKVRRSDLIAFFEKQERCTVVMEACGAAHHWARILMGLGHTVKLIAPAAVKPFVKKGKKNDAADAAAICEAAARPDVKFVPVKTVAQQGVLALHTARALLVKQQTMLANAIRGLATEFGHVVPKGLHNLEPLVALVAADDAMPAQARQAIAELYKRFGELAKGIQSCEVEIVKHARNDAMARRLATIPGIGPITASLIAATVVDISRFKTARQFAAWLGLVPRQNSTGGKTRLGRITKAGNREIRKLLVLGATSMLGHAEGWHSVLGGWLRNILQRRPVRLATVALANKMARIAWSVMTRNEVYRPAGGVAAKA

SEQ ID NO: 337400 - protein, 353 aa, unidentified
MDRYLGLDSHAASCTLAVIGPSGKRLKSMVVETNGAALVEAVRSIPGRRHLCLEEGELSAWLYELLAPHVAELVVTVPKARRGSKDDERDAWSRAEELRIGAIETRVYKAPAHLAALKNAARAYRMAVQDVTRVKNRLKSVLRSRGILADSGVYDPERRSRWLKELPMVHRRLADWLGEELDRLEPLRHKAEEWLLAEARTHPIIRTLSTAPGMGPIRTALLVAVVVNPTRFRTRRPFWSYGGLGIVTRSSSDWVRDRSGRWVRAEVQQTRGLSRKRQPLLKAIFKGAATTVIAQMPNHPLCLDYHRRLQAGMKPNLAKLTLARQIAATVLSMWKHQEEYDPQRHTGVINRAG

SEQ ID NO: 337401 - protein, 311 aa, unidentified
MAPSVYVGIDVAKAWLDVATLPPVLAPVQYANDSAGSARLVRALEAVGPALIVLEATGGYETAVASALALAGLPVAVVNPRQVRDFAKALGQLAKTDALDAGVLALFAERIRPTPRALPDEAHTELLALVTRRQQLLDMLIAERNRLAMARPSTKRSLDEHIRWLQARIRDTEELLQAALKRSPIWRAQEQLLRSVPGIGPQTASRLLVSLPELGRLSGRAIAKLVGVAPLNVDSGQHRGHRQIWGGRAPVRSALYMATLVAVRHNPTLRRYYQHLRGLGKPPKVALIAAMRKLLVILNAMIKHQQPWQPA

SEQ ID NO: 337402 - protein, 343 aa, unidentified
MNSTTIAVDVAKSVFEVAVSEQPGEVRERQRLSRERFRRFLAERPPATVLMEACGSAHHWARQAQALGHRAVLVPPHVVRPYVLRNKTDRTDTKGLLEAFRNEDVRPVPVKSETQQALAALHRLRSMWLAARTVRINTVRGLLREFGLIMPIGAHHVVPHVATLLEDADSAVPGLLRPALADATTDIREIEARRRAIEHQLESVASENVVVRQLRTIPGIGLLTATALVATVGDVARFPSGRHFASYLGLTPREASTALRRRLGAISKRGDTYVRMLLIHGARSVLCHAKTKTAPPPDRLRAWALQVERLRGHNKAAVALANKLARIVWAVWRHGQDYRMPVV

SEQ ID NO: 337403 - protein, 362 aa, unidentified
MNPFAFSNDLSGFQKLLDCLKDFSLDELLIGMESTAHYAENLASFLFTRGFKLCIINPIQTASLRKSSIRKTKTDSIDTFLIIKALSLNHFRLFTQHDFDSMQLKSLCRFRQKLMKVRTKVKIQLVSYVDLLFSELQFFFKSGIHIKACYALLKEEPNPDKIASMHLTRLSNLLKKTSKGHFGKQHAIALKELAAQSVGIKNDTLSLQILQSINQIELFSSQLDEVEKLINQIMDNMDSVIKTIPGIGNLNGAMIIGEIGDITRFEKPCQLLAYAGLDPSVFQSGKFTASRTRMSKRGSKILRYALINAAWQTTLVNQTFRDYYNLKISQGRGHYSALGHVAHKLVRVIHKMMTDNVEFNLD

SEQ ID NO: 337404 - protein, 337 aa, unidentified
MDYFAGLDISMDETHVCVLDREGQVIYESKSASTAQAIADELAKAPSCRRIVFETGRMAPILFHGLSRLGLPVVCVESRQAYRALKSLATHKTDRNDARGLAHLARTGFFKPVHVKSLSAHAVRSLIIARKKLVGQRVTLENQIRGLAVVFGVRLPRALTIAFIDQALKASEGVAGLSAAMRGLIAARTAVMTAVAAIDVDMRRMARASGACRRLMTIPGVGQLTALAFVAAIDDPSRIRRSRDVGAYLGLVPRRYQSGEVDYVGGISKCGDRRVRTLLYEAANVMLTRYNGQLKLKEWAFAIARRSTMRKARIALARRLAIIMHAMLRDGTEFEAA

SEQ ID NO: 337405 - protein, 422 aa, unidentified
MLEETQETEEIIQRVAALDVGKAELTCCVRVPGQGSSGRRAQEVRTYKTMTRSLLVLVDRLAELGVTRVVMEATSDYWRGAFYLLEAHGFEAWLVNARDVKHLPGRPKTDTLDAVWLCKLAERQMLRPSFVPPRPTRQLRQVTRYRADLVAARTAEKQRVEKLLEDAQIKLSVVASDIFGVSGRAMLTALIAGERDPKRLAQLARARLRAKLSLLEEAFSGFFTDQHAFLLGKMLARVDALDADLAELDAKLQALIAPLAGAVERLDEIPGVGQLAAHLLIAEIGTDMTRFPTAGHLVSWAKFAPGVKESAGKRKGRGSTGHGNPYLARVLGEAAVAASKTDTFLGERYRRIARRRGKRRAIVAVGRSILVIVWHLLSDPSARFQDLGAGFYDTRINAEHAKRNHIRQLEALGYKVTLQPAA

SEQ ID NO: 337406 - protein, 410 aa, unidentified
MSNSLLVGIDVSLNDNKVRILHPDGTSLSKFVVANSVPGAKSLSKKVVGIAEKNGFDNIVIGLESTSVYGDPLVYFLKQDVSVNRFNTKIHVLNPTQVNKFKMFYPDLPKTDDIDAWIIAEHLRFGRINKEVYMDDRYKALQKLTRARFHTVQNLAREKNWFLNNLFLKFSSLAQEKIFSDRFGATASSIIEEFFSVDEISYMPIEDLAEFINKKGKGHFQNPEEVAAAVQKAARSSYRLPKTVTDSVNQVLAVSFVAMKAYKEQLKIFDKAIEEQFKLIPNTLTSVKGIGPVYAAGIVAEIGDIHRFKDHAALAKFAGIAWTKYQSGNFTAANTHLIKSGNRYLRYYIMEAANKVRMHDPEFKRFYDLKYSQTPKTPHKRALALTARKFVRLVYALLHSNRLYTPPKGE

SEQ ID NO: 337407 - protein, 370 aa, unidentified
MKEPITSYIGLDIHKESIAMAIADADRAAPRFIGTINPVPAELCKAMRRVCTKESTLVVYEAGPCGYGWVRYLRKQGWACDVIAPSRITRKPSEKRIKTDRRDALLLARESRSGNLTSIVVPDERDEAIRDLVRAREDARIARHRVRLQIQAMMLRHGRHYQGKSSWTQAHDRHLSTIRFEHPAQELAFNEYRLASKEACERVERITQALRVQCEDWRMNPVVKALMCLKGFDFVAAVTFVAEMGDLSRFAHPRALMAYLGLVPSEFSTGKTRRQGEITKSGNKHARRILVEAAWGNRFKAQVTRCLEVRQEGQPRIIRDISWKAQQRLSKRWRSLSMGRKLAQNKICVAIARELAGFIWDVARHVKLSP

SEQ ID NO: 337408 - protein, 352 aa, unidentified
MEIIALDAHKRYSQACVQKEDGRVLCEERISHGKGRIAEFLGRWTAGSAVALETVGNWYWIVDEIEQAGMKPQLVHAHKAKLMLGSVNKTDKLDARGLNRLQRAGTLPTVWIPPGEVRDHRELPRTRMVFANARTRLKNRIHSVFDKYGLQTDFDGIADIFGRRGREQVALSIKKLPSETRYTMRCMLGELDMVESRIVRIQKRMKKVFSKTEQVRRLMTLPGVGFILAVVIVNEIGEISRFATPQRLASYAGTVPRVHSSGGHTRYGKLRNDVNHYLKWAYSEAGNSTAVNHKRFPLRHTSRLYRRIREKKGHAKAVGAVGRHLAEASFWVLTRNEDYKEPEARSVSPTAV

SEQ ID NO: 337409 - protein, 414 aa, unidentified
MEQIHDRVAGLDVHRDVVVACARVPGARGGTVTEKERFQTTTGALARLAGWLADRYVTLVAMEATGVYWKPVYYALEDSFEVWLCNAHHVKNVPGRKTDMSDAEWLADVAAHGMIRPSFVPPPAIRELRELTRYRKTQTDARVAEIQRLEKVLQDAGVKLTSVASKVLTQSGRLMVEALIDGQRDPAELANLAKGKLRPKISELTEALNAHFGAHHAVAAARILAHVDFLDATIKALTEQIDVRTKPYQAARELLMPVPGFDRLTIDTVIAETGADMSKFPGPGHLAKWAGICPGNHESAGKRRRVGVTPGNPWLRRALVEAARAAARTKGSYFGAQYRQIAKRRGPNKAAVAVAHSLSDLIWHMLSTGEVYHDVGDGYFQRRRDPERETRRLVAQLEQLGFQVALTTLQDPAA

SEQ ID NO: 337410 - protein, 465 aa, unidentified
MSKLRKRNRARSSQGETRPFEGMRQVHPHAAGVDIGAHEIVACVPDGDDQQIVRTCGTDTVDLQTLADWFVDRGIQTVAMASTGVYWIPLCEELEARGLPCCLISAQSIKRVPGRKSDVLDCQWIQPLHSYGLRAASCRPAADLVALRTLLRHRAQLLEQRAPHVLHMQQALLQMHIPLSQALRDLTGDTGQRLIRAMVAGARAPQHWAALRNDRCKKDAHEIAMALTGTWREEHLFVLTQALALFDFSTTQLSACDAQVEHAFAVITPHVESTAAASVPARAAVPPRRKPHSPSKNAPEGNTRAHILRITGVDLVAVHGMSDSLAPTIVAEIGTDMSQWPDDTHLCSWLGLAPNNDISGGKVLKSRTMKHRNRAAQAFRMAAQSVIRSHCAFGAFYRRLTGRLGPAQALVATAHKIARTVYHMLKHRVPYYDIGAAEYNKRFREREMHSLQKKAAKLGYKLSPG

SEQ ID NO: 337411 - protein, 346 aa, unidentified
MMLIGCDYHPSWQQISWLDTATGETGEKKLEHASGEAEKFYRGLPGPALIGMESTGNCQWFVEMATTAGHDVWIGDAAKIRACDVRAQKHDRRDAALILKLLMEGRFPRIWTPSGEQKDLRQLLIHRYKLVRIRAQVKNELQHLAMNQGVTKKRKLWSKAGEKVLRELPLKPWASRRREDLFKVREMLNGQVDLLDQAVVEAAEKNEKARLLMTQPGVGPITSMAFVLTMGDVNRFQRGKQVASYLGLIPREYSSGGHRRYGPISKQGSRFMRMLLVEAAQNAVRYDPGFRNEYLHRCHTKAKGVAKVAAARKLAIRLYWMLRTKTGYPEVVRVESSSRVPLVSAS

SEQ ID NO: 337412 - protein, 273 aa, unidentified
MAAGEKIIGIDLGKHSFHLHAQDATGRMVFRKKLSRPQLLRTLANVPSCRVVMEACAGSHWLARQLAGMGHEPRLISPQLVRPFVAGNKNDFGDAQAICEAACRPSMRFVSPRNEAQQTVSAMHRLRERWVRERTATVNQIHGFLLEFGISLPRGAALMSRLPTVLDHETLPPRLVGLVVRLRAQVHYLEEQLRQVEQDLKASLREDDKSRRLLEIPGIGPITASALAVELGDARQFANARQFAASIGLVPRQYSTGGKPTLLIEERGPASPS

SEQ ID NO: 337413 - protein, 356 aa, unidentified
MSQKVDSSPAVIGIDIGKNSFHIIGQNQRGAIVLRQKWSRGQVEARLANLPPCRIGMEACVGAHHLSRTLKALGHDARLMPAKYVRPYSKGQKNDYRDAEAIAEAVQRPTMKFVATKTADQLDLQALHRVRERFVGQRTGIINQIRAFMLERGIAVRQGLRFLRAELPGILATRSDALSPRMLRILEDLAGDWRRLDERIEGLSSEIEALARQDKGCERLMTVPGIGPIISSAMVAAIGTGDAFLKGRDFGAWLGLVPKQLSTGDRTILGSISKRGNRYLRSLFVQAAWVVLVKIGPKHWDRYGLKSWIEAARKRLHHNVLAIALANKLARIAWAVLNKERAFECVKTEETASRPA

SEQ ID NO: 337414 - protein, 342 aa, unidentified
MEHYAGIDVSLEQSSVCVVDATGQILREAKVASEPEALVGFLHQLGVAVTQIGLEAGPLSQWLHAGLTAAGFEAVLLETRHVKAALSAMVVKTDRKDARGIAQLLRMGWYRPVHRKSPAAQEVRALLVGRKLLQAKLRDVELSIRGILRGFGLKVGEVSKGRFAARINELVAGHEMLETVIGAMLQAREGLQREFMRLHRRMLTIVRGDAVCRRLMTAPGVGALVAVTFKTAVDDPERFRTAKAVGAHFGLTPKRYQSGETDVSGGISKVGDAMVRTALYEAANAMLARTVRVSALKRWALEVARRRGTKRAKVALARKLAGVLHRMWANGTDFRWGKEAAA

SEQ ID NO: 337415 - protein, 408 aa, unidentified
MEVLHVRCAGLDVHKDSVIACVRCVSPPKHHEVRSFGTTTTELLALSEWLDSHGCTHVAMEATGVYWKPVWHVLEEAFELVLANAQHIRNVPGRKTDVSDAAWIADLLAHGLIRSSFVPPASIQALRDLTRTRKQLVREQAQHVLRVQKVLEDANVKLDSVLSNVIGKSGRAMLDAIVAGESDPERLADLAQGSARAKRAAIIESLRGHITPHHRAMLRLHLGLIDALHAALEEVDASVGKALESIQVNSQLLTTMPGVSDIVASVLVAEIGTDMSRFATPARLISWAGLCPRNDESAGKRRSTRLRKGGPWLKTTLVTAAWAAVRTKGSYLRAQFLRLKARRGPKKAIIAVAASMLTAAFFMLRDGVEYNDLGANYFEQRDRTKTIGRLVRRLRDLGCEIELKPEPA

SEQ ID NO: 337416 - protein, 483 aa, unidentified
MHETQERIDRKDERLALGNIPHKGETPMSQTYFLGVDPGKKNLTCCLLRDRQGAMVLKPADFPTTRQGFESLLAELQKHLKAGDRLLAGVEASASLDDNIMAFFASLKAQDWALKLMRVDAAQVARFSGARPIRGQTDKTDSKRVARFVASYAGELHSFEHDPKAQAMLRLVNDRAHLVQDRVVWCNRLQDRLVLSFPEFTSVLPDPAGALGLATLKTVATAREAAGKRARTLARIKPPTARSQALGSERAEALVKAAKSSVASANEPSDAQTIRFHAGQLETLDARIAEIEKQLKNYSTKDLRETPEETPSAQEGPENNETNHDRAIPLSKQIRLADSLPGFAAVGASVLVLRVRGITRYDCSEALAAQLGVCPDRVETGTSLKTSHLTYRGDRLTRSTLYLLTLAATRSDLAMTFHKWRHIRAGMTPKQAVCACMNRMVGWLYAVVTSQQPYDKNRSVENARKQHPRLWEEFRKSREEKAA

SEQ ID NO: 337417 - protein, 436 aa, unidentified
MSNNGMPMIHPHAAGIDIGTQNLHVSTDGITVKVFSTFTESMLELVNYLKEESIQTVAMEATGVLWMPLYDVLESFGFEVYLVNGRHVSNIPAQKSDFKDSRWLQKIHSYGLLRGSFIPSEEIRELRTYVRQRENLIDSSSQSIQMMQKAFEKMNIKLHNVISDIKGKSGILIIEAILRGERNVNTLVGLCESSILKTKAKEVKLSLQGTYKKDNVFLLKQAYESYKFSQGQIKMCDVEIDLLLTRITDDYPKPPASPPSTSRHNQPEITNFHEKMVQMTNGRDATVLPGLSDKTILKLVSELGTDLSKWPSEQHFASWLGLSPRKNQSGKMNRNKRASAKTIAGQIFRESAYSIANSKYIALKGFYNRLKSKHGYKIAIKATARKISVLFYRFMVHGLDYVEKGLKEYEEQYKQRTFKSMIKKAQAIGYELVAIT

SEQ ID NO: 337418 - protein, 402 aa, unidentified
MIDSEAVELVGKGVRGGKRLAFSTASHPGSPQANCPQIHSRRVFRRISTIIPWDTKPAGEQVAVRRILTFNPNGCLGLGARIDARMGMSESKVEVFVGIDVCKSTLDVRIEPPGEVFQVDNDDAGIRALCTHLSELAPTLIVMEATGGLETRAAGELAARGLCVAVVNARQVREFAKATGQLAKTDRIDAGVVCSFARAIRPAARPMKEALTAELDDLVTRRRQLVEMRVQETLRLQGASKVQAKSLKAHIVWLNKRIKSIETDLGTRLRSSDAWRVKDDVLLSIPGVGEITSRSMLSRCPEIGQLNRREIAKLVGIAPLNNDSGKYRGQRHIWGGRADVRSVLYMAAVSAKRCNPVIKALAERLKRAGKAPKVVIVACMRKLLTIMNAMIRSNTPWNPKIA

SEQ ID NO: 337419 - protein, 332 aa, unidentified
MNMHPQGGVANHDQRPNAGIDVCKQHLDVCLNTLEVRVANDANGWDELTAKLEAAQVDLVALEATGGYERGLVCALQSAGIAVARLNPRQARDFAKSMGVLAKTDQVDARTLRDFADVLARHKDRAKYITPVLDERRQALAELMTRRRQLVDMRVAEGNHLEHAGKLTARSIASVLKTLDKQLAAIDSEIDDHMGQHFKEQRTLLDSVKGVGPVTILTLTAALPELGILGRRQISKLVGVAPLADDSGPRKGKRRIWGGRANVRAVVYMAALVAIRHNPVINVFHSRLIAAGKPKKVAIVACMRKLLTILNAMLRDQALWNAAKHLQVTKST

SEQ ID NO: 337420 - protein, 352 aa, unidentified
MLIIGCDFHPGFQQVAIFDNRTGEIQEKRLQHRAEAEQFYRSLAGQEVLVGMEACGHYPWFERLLAELGYELWLGDAAEIRARVVRKQKTDRRDAEHVLELLRTGRFPRIWVPSLEVRDVRQLLVHRHKQVQARTRTKNQLHALALSQGVQKKRKLWTEAGRAELEKLELLPYAAIRRERLLETLDRLEAEIAALNRQVEAEVQQRPAAVRLMTHPGVGPVTALAMVLTLGPAERFASGRKVGSYFGLIPSEHSSGGRQQLGHISKQGSSFLRFLLVEAGQSAARYDAELGRFYRRLAVRKHRGLAKVAVARKLATRLYRMLRENWNYAQLCKAVVQVSPSHSVEGRQKPSA

SEQ ID NO: 337421 - protein, 337 aa, unidentified
MNNSVIGLDIAKNIFHMYTFVDNKPKKKKLKRAELLAFFANYPVSLIGIEACGGAHHWARELIKLGHEVILLNARYVKSFVVGNKNDFNDAEGIFDAVTRPNKRTVMIKTIEQQDIQLVHKVRQGLVSKRTALVNQIRGLLSERGIIIPQGINQVRKELPLILEDAENDLTVMAREVFAEQYEKFAALDKEIKTQDQRISALCNSNALSRRFLDVPGVGPMTASIVASDIGNGKGYLSSRDYAASLGVVPGQHSSGGKQVYLGISKRGNRYIRTLLIHGARAVLKNCHNKKDKLSLWLQALIERRGFNKAAVALANKNARILWAMATRDKEYDGCLV

SEQ ID NO: 337422 - protein, 302 aa, unidentified
MKITRVGVDLAKNVFQVHGMNRAGRCVWKRQLKRSNWLQVLTETLEPGCEIGMEACGGSHHWARELRSRGFVVKLVSPQFVKPFVKSQKNDVNDAEAVCEAISRPSMRYVPIKTAEQQDLQAMHRIRDTLMRHRKAKANQIRGLVAEYGIVAPKTIVPLRRAIPDWLEDAENGLSDNFRALLFGLWEDFQQLEQRVKDIDRQIEAVSNTNADAKRLKQLRGVGPLVSTALVAQFGDGRQFTRGRQAAASIGVTPRHAGTGGKNLIYGITKRGDPYLRSILIHGARAVVSQAKRRDDALSRWV

SEQ ID NO: 337423 - protein, 344 aa, unidentified
MKITTLGIDLAKNVFQIHGVDALGKVIVKKQLKRDQLAAYLVNLPPCLIGMEACGGAHHWARKLMGFGHTVRLMAPQFVKPYVKTNKNDAADAEAICEAVARPNMRFVPIKDVGQQSVLSLHRVRQGFVGARTAQANQIRGLLAEFGVIVPQGIAHLYTRVPELIEDGSNEMTGSFRLLVQRLLEHLKALDKQVDEMEAQIVQWHKHSQASLKLAAVPGIGPITASALVASLGDAKNFENGRQVSAWLGLVPKQHSSGGKEKLLKISKRGDTYLRTLLIHGARSVLYREQSKADSCSWVKGVATRRHHNIAAVALANKNARIVWALLTREKAFDAKHVSLRVAA

SEQ ID NO: 337424 - protein, 351 aa, unidentified
MDIIGCDLHTRYQNVAWMEAETGEIRSRRLEHENGEARAFYLSRPRGTVVGIEATFPALWFERLLAECGHELWVGDAARIRASEVRQQKTDTRDAEHLLDLLQAGRFPRIWVPAAAERDLRQLLVHRSKLVRMRTAVKNQLHALAISQGVCRKGRLWSERGRAELASLALLPWASRRRQALLEWLDQLQGPLAELDRAVAEAAQQREAAVRLMTHPGVGPVVGLAFALTLGPVERFPNSRKLVSYLGLNPREHSSGGRQRLGAISKQGNTMLRWLLVEAAQTAARYDPELRRTYQRLKLRRVSGVAKVAIARRLAVRLYWMLRARVDYAQLVRMSGSPSSAVVPPRAGSKL

SEQ ID NO: 337425 - protein, 349 aa, unidentified
MIVIGIDPHKQTHTAVAIDKATGQVLAEITVRARRQGFERLVEWSRHLDRQRLFAIEDGRHVSGHLERYLISRGERSVRVPPRLMGEARRADRVRGKSDPIDATAVARAALAHPDLPAATLAGPEREVGLLAAHREQMVNERTAIQSKLRWLLHDIDPDLAPGPRTLDRFATLDRLQTRLRELAPTADVRICLDLVARCREITVRANELERELAPLVDATTPELVQIPGCAVLTAAKIVAETAQIGRFPTEGHFARYAGTAPVPASSGAVHRHRFNRRGNRQLNAALHRIAVTQLRIHQPAKDYVAKKRSEGMSKTEAIRALKRRLSRVVFKTMTSVNRPTDGLIAAVA

SEQ ID NO: 337426 - protein, 369 aa, unidentified
MQIRENYLYVGMDLHKDTHTAVLVNCWNEKLDVMVIENKPSEFSKLAKRVNKKANTLGLSPIYGLENAYGYGRSLAVWLIERGYTVKDVNPSLAYDQRKSAPMMKKNDEHDAYCVATVLINQLHTLPDAKPEDNHWTLSQLVNRRDTLVKDGIRLKNGLHEQVSVAYPSYHKFFCDIDRKTALYFWKNYPSPLHLKNKSAEELTLELKEIASNFSRSKAQLIIDCVQNDGDTIRDYQESRDFIAQSLVRSLEQQNKEIALIDTEIEKMLRYFDCKLTTIPGVSIATASKLIAEIGDIRRFPSADKLARYAGIAPIKFSSGGKGKEQSSKQGNRELHGLFYFLAFSMVTVPRTGKAESACILRLLSAENQ

SEQ ID NO: 337427 - protein, 358 aa, unidentified
MPLLSRRFVGIDLGKRTYELRLFDRSGSVTGWNGTTAPDGRKSLYARLLPTDKVAVEVCALAFIIADEIAESVGCEVVILNASKLAIIYRTTKKTDKEDALKLARLIKIYQNEDLPIVHPPSNQEIYRRRLLAEHRQLKQDKTRCINRLHALFVHSGITSIAKKDLAGRKRRTASVELLSGFLKESALRILDSLSLLDSQIKIIEDQIDTIASQNERIQSVQTIPGVGPVTATAFVSYVNADNFSNLSQVASFLGLVPKIDCSSSINRYGSITKCGNSYLRSLLIQASWALVRSPSGGYLKDQYLYMTKTKGKSKKKAIVAIARKLSQFMFAILKSAQPYQPRRFVSTSSLAAMALSG

SEQ ID NO: 337428 - protein, 343 aa, unidentified
MPTTIAGFEELLAFCLAFVGSAGRLIGFGVEGTGSYGVGLARYLRNHGHDVHEIARPARAAERRLAGKNDTIDAEHAARQLLAGHGLSTPKTADGAVETIRLVKIAYDGAVQARTTAMITLKATLATGSEALRAELETLTDHKLILACAALEGPTPLPPVRRGAPAVVVPGDPDVAMRHVLSSMAKRWLALHEEAKAHAASLKALTAAAAPQLVEAVGVGYDTAAQMLITAGDNTNRIKSEAAFAKMCGACPIPAGSGKTNSRHRLYRGGNRQANAALYRVVIVRMRWHQPTIDYVARRTAEGMSKREIIRCLKRYLARELFRLLPAPDAIAKPVNGELEIAA

SEQ ID NO: 337429 - protein, 398 aa, unidentified
MTESSDYESVQVFIGVDVGKDTHHAVAVNRSGKRLFDKALPNDENKLRSLISDLKQHGQILLVVDQPATIGALPVAVARSEGVLVGYLPGLAMRRIADLHAGEAKTDARDAAIIAEAARTLPHALRTLKLADEHIAELSMLCGFDDDLAAQTTQASNRIRGLLTQIHPALERVLGPRLDHPAVLDLLQRYPSPEKLASLGEKKLATQLCKLAPRLGKRLAADIIQALTEQTVVVPGTNAAVVVLPRLALQLITLRKQRDEVALEVEQRVLAHPLYPVLTSMPGVGVRTAARLLTEVACRAFASAAHLAAYAGLAPVTRRSGSSIRGEHPSRRGNKTLKRALFLSAFAALRDPISRAYYTRKMSQGKRHNQALIALARRRCDVLFAMMRDGTFYTPTAS

SEQ ID NO: 337430 - protein, 469 aa, unidentified
MGKIIRKKAQSKTGKSGLVAIQPNVAGIDIGSRQMHVCGPEDTKGEAPLAVFDTTTAGIEACAQWLKQLGVRSVAMESTGVYWIAPFELLESAGFEVLLVDTRPLSRVPGRKTDASDCAWIQTLHRCGLLQGCYRPAENISQLRTIVRMKAVLVAEQADWLRRMQKCLDQINVRVHHAVAQLNGTTGLAIVRAIVAGQRDPVKLAELRDPRCQKSQAQIAEHLRGHWRSDHLFNLEQALEMYDMLSAKLEVYERQIEKRMKELMAPGSENKQAPPLPNPQRTKAMKRRKQEGKRQELYRMVGADLTAIDGVGVETAEVLVTEYGTDLSKFATEKQFISHLQLAPHQAISGGKQLPKRPRRTKGTRAGRALRTAAVALSRSATALGAYYRRISRTKGATIAVFATARKIGTIIYRLLRWGHAYVDEGQQAYEARFQAMRLRSLAVSAGQLGMQLIPKPEPQLVDPAGGLR

SEQ ID NO: 337431 - protein, 466 aa, unidentified
MESNRLFMGIDVSKGYADFVILTSKRALFEKGFQLDDNLEGHKILEEIIDELTAQGYSVICGVENTGGYERNWIQLLRKLSKSNKKTEAYKLNPKAVKHQIQSLLRRTIDDTVSADGIAMYMANNYEIFKQNWANSTNQSKAQTNGQQVVGMICGLTKQQTMKKNQLEKMLYHTFPEILPYMKNSTPLWVYRFLTKYPSSQAAKRAKLKGIIAIKGISETKAKSLKEKANNSVASSAGDAPEMIVAQHCKGIVQLMGEIEMFKNVLIDQYKNSDEVKLLTSAKGVAEWSATAFIVEIGDIPRFETSDQLAAFYGVNPCFKQSGDGKFQVKMSKQGSARMRALLYLIAHNLHTHNEYFKTLYQKYAAKNKKHRVIMGILMHKALRVLWGMLKNKTAFDPKIDIKNQEKNLQLEPVALISKKARRLQELTIEAPISRSNSKKRKAMLEPQSSIIEEHARSSKHSLVQK

SEQ ID NO: 337432 - protein, 425 aa, unidentified
MSKTNIEIAAFIGLDWADQKHVLTLHEAESDQRQRFTLDQTPEALQSWIQQLGNRFAGRPVAIAVEQKRGALIYALMHVDFLRLYPVNPQTLAQFRKAFYPSGAKDDPIDAELLLEILMTHRQHLRVWVPDDALTRSIQLLTEDRRGLVDERTALTNQLTAALKAYYPQAVEWFGDLHTARACAFLQRWPSLQELKRATPSSIRKFYKAQGYRGEDKLEQLMANIKKAQPLTQDAAVLLAGSMKVHALAIQIPLLTESIQRYDQQIESLFDQHDDSTLFSSFPGAGASLAPRLLAAFGSDRGRFEFAAEMQQLSGIAPVTEKSGTGIWIHWRLACSKFLRQTFHEFAGHSILESDWARACYDQLRKRGKSHHAALRSLAFKWIRIIFRCWKTRTPYDETVYCKTLKLRRSPLAADLPADEKLALT

SEQ ID NO: 337433 - protein, 337 aa, unidentified
MIVIGVDVHKHSLSAVAVDEVGRQLDALETSDVAELISWSKRVGRRRLWALEDCRHVTRGLERMLQRERQRLVRVPPRLTAPERRRGRVRGKSDLIDALAVARAALREPVLDSPRPEEARLRELKLLVDHRDDLVDERRRAQQRLRWHLHELDPTLRVPLGALDRAVWLERLSRQLARREQTTQVRIARELISRCRALTRSILDLDRELHSRTTAIAPRLLELPGCAALTAAKLLCEIGPIDRFRSDAQLARHAGVAPLDASSGKHQRHRLDRGGNRQLNCALHRIAVTQGRVHGPAKAYLERKQAEGKTRREALRCLKRQLARTVYTTLKSEPLLT

SEQ ID NO: 337434 - protein, 342 aa, unidentified
MKIIGCDFHPSFQQIAMVDTETGEHEKKRLTPSEAVLFYSQLQGPVVIGMEASGNTLWFERLLADLKHQVRLGDASKIRAMEVRKQKTDRRDAELLLKLLLEGRFPEVWIPSLEMRDARQLLLHRHKLVGMRRQVKNQLQHLALNQGVQKKRKLWTTAGRQLLEELPLIGWTARRRSDLLRWLDELNQAIAELDRAVEQEASQHAVARLLQTHPGVGPVTSLAFVLTLGKIERFQHSRQVVSYLGLNPAENSSGGRQRLGAISKQGNPMLRSLLVEAGQSASRQDKELKRAYQRLKQRKHSAIAKVMVARKLAVRLYWMWRTQQPYSATRMQGSPCHLVVAV

SEQ ID NO: 337435 - protein, 377 aa, unidentified
MKIKLHIGLDVHKNSIVVATAKADGSLPQSYGKWGGSNLSAERGLSKLLKTHGLQKSEISIVYEAGPSGFVLARRLIQLGYHCIIVGPSEVPGKAGDKVKTDKRDARKLARLHRAGELTAIHIPEARDEAVRDLCRARTDASQALARTKQQLGMFLLRNGHRYPGKTRWTQAHMNYLRRQRMPHVAQQLVIEEYIQAVDAGIERVNRIEQQMKDLLPSWEREPYVRALMSFRGFQEVAAMTEVSELGDLSRFDHPRQLMGYLGLVPSEDSTGARRRQGSITKTGNGHARWMLIECASHYSHAPRVSPQLSARQAGQSREVRAIAWRAQNRLNYRFKRLAARGLHRNKIVVGIARELCGFLWELHHQVSKEKEVKTSH

SEQ ID NO: 337436 - protein, 526 aa, unidentified
MAQTGTNFSILGRPKKVSQLHSEAATSLNRVALFADDTFLGSKKPYESLCNVVCDTMQTVSGHLLTLKHRNCMAKKAQKIKKGKRSELLIVNSNAAGIDVASTEYQVCVPEDRDNEPNRRFEAFTCDLHFIALWLKECKIETVAMEATGIYWVQLFMVLQEYGFDVILCNAKHVKNIGEKKTDYVDASWIQVLHTYGLLKESFQPDNQIRQLKDLMRQRERIIQRTSQDLLRIQKALEMMNIKVHKVLSDIKGKSGLNILEAIIGGERRPDILADLVNHRVKASREEIIKSLEGNWNDAQLLITKQSFDAYCFALKQVEELDLSIEQSLKAYSQISGKPNKPIVRTIKRQQPLGNAFHFDAEQYSYDILGVNLTRIPGISSLTGIKLISELGRNFTEKFPTVKHFCSWLNLTPNNRISGGKILSSKVPKRKNFAGQSFRVAANTLSRSKGYLGDYFRRMKSKLGYNQAIIAVAHKLARIIYKMVEMGIEYDETIDRDKNISMLTLKQKALQKRLAKVEKELNISYC

SEQ ID NO: 337437 - protein, 339 aa, unidentified
MKLYGAIDLHSNNNVLMLIDRHDKIRFQKRLPNDAAYILETLHPYRSQLQGLAVESTFNWYWLVDALQEAGYPVYLVNTAAVKQYEGLKFTDDSSDARWLAHLLRLGILPQGYIYPKEERAVRDLLRKRAQMVHQRTTNVLSIGNLLQRNTGSSLAGGRIKRLTEETVDEVLPETDLSLAVKCNLRVMQCADEQVAELERVVLERVKLKPAFKYLRSIPGIGRILALTIMLETGDIGRFPNVGNFASYCRCVESKKLSNSKKKGEGNRKNGNRYLAWAYVEAANFAQRYDPRIRRFYQRKQAKTHPVVAIKTVAHKLARASYYIMRDQVPFDMAKAFGG

SEQ ID NO: 337438 - protein, 457 aa, unidentified
MNKRRKKAQSQSFNLQSLPKQLQHINLKAAGIDIGSERHMVAVPEGRDEVSVREFGAFTADLIALADWLQQCGVTTVAMESTGVYWIPLFELLERRGFEVKLVDARHVKNVTGRKSDILDCQWIQQLHTYGLLAGAFRPADELCVLRSYLRQREMLTQTASMHIQHMQKALQQMNLLLHNVVSDITGVTGMKIIKALLAGERDPQVLASHRDNKCHHDRATIAKSLVGNYRAEHLFALGQAVDLYEIYQTKISDCDEAIVKQVSTQPDVTDEPPPAEQKRTSARDRQRGGVNVRDLLFQKSGVDLFAIPGLAADTLLVLASEVGFDLSPWKTEKHFSSWLSLCPGTKISGGKVLSRRVKRNPNRAAQAFRMAAATLSRSQSALGAFYRRIKARSGGKQAITATAHKIARIYYALLTQGTTYVELGQQAYEQKYAARRLKHLMAQAKSLGFQLVPSQT

SEQ ID NO: 337439 - protein, 355 aa, unidentified
MSQEKYVGMDVHRATISVAVLDFRGKLIMESILETKAATILEFLQGLHGSLSVTFEEGTSAAWLHDLLKPHVTRLVVCDPRKNALLKDGSKSDRIDARKLAELLRGNQLTSVYHGEHGMRTLKELGRSYVTITTDLVRVMSRIKALYRSWAIACSGTGVYAPRHRAEWLDKIPEPGVRLRAERLYQQLDLLQPVRQQARRDLLTESRKHHAVKLLRQIPSIGPIRAALLVAQLQTPHRFRTKRQLWAYSGFALETHDSGEYRYVRGKLQRNRERMTVRGLSNNHNPEVKNLFKGAAISASTHPGPLYDFYVALLEKGMRPTMARLTLARKIASITLTIWKKGADFDATQLHRQEA

SEQ ID NO: 337440 - protein, 419 aa, unidentified
MRDHIEAFVAFDTSKLRNAVAIAEAGRTGEIRFLGEIDNDGAATGKLVRKLAARYERLTFCYEAGPTGYGLYRQIEGLGYDCMVVAPSLIPKKPGARVKTNRRDALSLAKQLRAGELTAVWVPDRRHEAMRDLTRGREAAVEDLRSKRQQVSSFLLRQGLHFTGKKTWTKAHMSWLASQKLEYAEQRIAFEEMLLAIRQAQERIERLEQAVRAAVPDWSLAEVVTGLMAMRGIDLIAATAFLAEIGDLSRFQTPRELMAYLGLVPSEDSTGDTVRRGPITKAGNRRARRILVECSWSYRHPPRVGKKKQEKVAAAPRAVREIAWKAQCRLSARYRALTRKGKLATVAVTALARELAGFIWAINREIAAAKTDIVQWRGRSHGRGIPGFAMWPIADRRPREDAGQPQTNIRICVNPRIRA

SEQ ID NO: 337441 - protein, 343 aa, unidentified
MQSVKTIGLDIAKSVFQVHGVDTDGQVVIRRKLKRRYVLAFFAKVPACLIGMEACATSHHWSRELQALGHRVRLMPPAYVKPYVKRQKNDATDAEAICEAVGRANMRFVETKTMEQQSCLVLHRTRHLFIRQQTSVINAIRAHLAEFGIIAPVGRKGVEQLLEAVANSEDKRIPDVARACVAALGAQLRALKAQILEFDRQIMIWHRSHETSKRLDEIPGVGPALATALVASIADPKAFRSGRDFSAWIGLVPKQHSSGGKEKLGSISKQGDRYLRSLFTAGALAVIRYAKIYGTKHRPWLTALLARRPTKVAAIALANKLARMVWAMMTRGERYKEPVALAA

SEQ ID NO: 337442 - protein, 336 aa, unidentified
MNIKRIGLDLAKQVFQLHAVDHQERVVLRKTLHRARMLTFFTRLEPCLIGIEACGSSHYWARELTRLGHTVRIIPPQFVKPYLKGNKNDANDAEAICEAVSRPGMRYVAIKSEAQQSMQAEHRVRARLIHDRTALSNEIRGMLGEFGFVLPAGLSALRKALPEILSQQEKWDNRFIRLLSELTEELQALDERLNRYDRRLKQLAQEDERIRRLQEIGGIGPVTASALVAAVGDAKQFKSGREMAAWLGLVPRQHSSGGKTKMGHISKRGDSYLRTLLIHGARAVLNACDHKEDRRSRWLQSVAERRNRNIATVAMANKNARIAWSVLSRGEEYRVM

SEQ ID NO: 337443 - protein, 335 aa, unidentified
MDRQYVGIDFHRRRSVIVRKYAAGEKLSSVRVPNDPLAIAAVVADAGPEPEVVIEATYGWYWIVDWLQAQGARVHLANPSGLNWGTRRVKNDERDAIDLVDMLRLGRLPEAWVAPPATRELRELVRYRAKLVALRSGLKAQVHAVMAKEGVLPAVTDMFCKAGNAQLDDMALGDVYAIRVESLRDLIEVYDREVAMLERNIHQRLRGDTGYRAIQAINGIGPTMAAILVAEIGDVTRFRSAAALCSWAGLTPKHKESDTTVHRGQLTKQGSRLVRWAVVEGTVRYHAGGKLAADFRKIAERRGKNKATVAIARKVLTLVYYGLRDGTIRCLANTA

SEQ ID NO: 337444 - protein, 382 aa, unidentified
MEMLLRCCAGLDVPKRTVVACIRRFTDAGRLEEQVLSFGTTTAELLALADWLAGHGVGQVALESTGVYWKPVFNLLEPPFEVMLVNAQHIKQVPGRKTDVTDSQWIAQLLQYGRLRGSFIPPLPIRQLRDLTRQRTQLVRHRATACNRIPKVLEDANIKLAGVAAHILGVSGRAMLAALIDGVEDPAVLAELARGRMRSKLPALREALRGQVQDHHRFQLQELLDQVTDLDGRIARLSDRIATMLEPLSSALQRLRTIPGVDRRAAEVIVAEVGTDMSRFATAEHLCRWAGMSPGNNDSAGKRRSGRTTKGNCWLRSVLVQAAWAASHTKATILGATYRRWVRRMGRKRAVVALGHKILVLVYKLLSEATVYEERLKPEDAA

SEQ ID NO: 337445 - protein, 438 aa, unidentified
MQESATSTKPEPEFAALVAIDWADRKHCWELLVTGSDQLEKGELKHTVESVHEWAMQLDHRFNGRPVAVALEQSHGALVYQLSKYPHLVLYPVHPNKSAQFRLALYPSGAKSDPRDTSAVMQLLRYHRGSLRRQDPDTPGTRLMKMFAEQRRELVDEKTRLSNRMTALLKIYFPQALDWIDDIDSPMGCDFLDKWPNLEQLQKAKPNVLAKFFREHNCRSEQRIQDRITAIYEAHDAIHDPAMREGGPVCVGNMVRQVRALAAGIADWEHRLEKLVAEHPDAPLFASFPGLGPVLLPRVIVAFGDKRDRFENAGELQCYSGIAPITKTSGHTKVVQMRHARPHFLCQTFVEWAGHTIASSQWARAFYDLKRSEKMEHFAIIRELAFKWQRIAMACRKKGQPYDEQVYMDSLRRRGSPLATRVQWTSVAGFSKLTAKTA

SEQ ID NO: 337446 - protein, 296 aa, unidentified
MAGHGVEALTQVANDRAGFVELLAWLERLGVVRVGLEATGGYERAVVAFLQAKGFEVVIHQPLEVRLFARLKRRRAKNDRIDAVLIAAATAQVDTVKAAADPLLVELAEWMTAYEQATDQLAQLKTYLEQVTLPKLAARYRTQLRRAQAWKVDMLREVLKRIRSRPDLAHRYALLLSLPGTGPVVAASLVIRMPELGSMEPGQAAALIGVAPYDFDTGQYKGQRHISGGRARPRRMLYLAALAAKRYDPGLRAFAERLLAAGKPPKVVITAVMRKLIQAANLVLARGQPWVRTQTA

SEQ ID NO: 337447 - protein, 338 aa, unidentified
MEKYIGMDAHSSICVFSVVDEKGTEVDQTKIATNGQLLVEYIRSIKGTKKLVFEECELSAWLHEILHNEVDELVVCNPTRNLQYKKAKTDKLDARNLALLLRGGFLTPVYHDGSKTEWLRALMSGYQDVVDTGVSVKNRYKSLFRKAGLPARGTRLYDDSSLLEDLPRPDQRFVGHSFYRLLEALEKEREQYVVAIKKLSRTFPEIKLLKGIPGIGDIQAAKIASQVIAAQRFKDKHKFWSYCGLVRHRLESGGHVYGSKRGWGNRILKCVFKMAARSVLTGESELRAYYDELRAKGTSDKSARNAVSRKLAAITLVILKTRRPYDETRIMPQTEQAI

SEQ ID NO: 337448 - protein, 428 aa, unidentified
MAQISEEPAAQYARVCAIDIGKAGLVACVRVPHETDPARRIQEVREYPTVTPALLALADWLRCQQVQLVGMEATSGYWKPVFYLLEAQGLQCWLLNARHVKNVPGRPKTDRLDAVWLAKVIERGMCRPSLVQPKDLRQLRDLTRYRRSLVRDQTREKQRLEKILEDAQVKLDSVICDLHGVSGRKILEAMIAGQRDPAAFANLAQGRMRIKLPQLRQALTGHFEDHHAFLCATMLHRIDTLTADIATLDERIDALIAPHTSDVDKLDEIPGIGHRSAQELIVEIGVTMTVFPAAAHLVSWAKFAPIDKQSAGRARTASTGKGNPWLAGALGEIVAGLARTDTFLSERYRRLARRRGKKRAIVAVGNSLLTIIWHVLSKPDTRYQDLGSGYYESRLNTQRRQRDLIRQLEHLTGQKVTLDPKPDPAQAA

SEQ ID NO: 337449 - protein, 378 aa, unidentified
MKQDIRYVGLDVDSEKIAVAVAEAKPGGEVRSLGEIPYRAESVRRLVKKLGAANKLRVCYEAGPHGYVLYWQLVGLGVHCDVVAPTLVPVRPGDRVKTNRRDAKKLARSYRSGDLTPVWVPDAEHEALRDLVRAREAAKKDQLRARHRLGKFLLRRGLRAPQGVKNWTLRYKAWLRTLRFEHAAQEATFLDYLHEVEHAAERLVRLEKALDEAVERLPEEMRAVVAALQALRGIQQLTAATIVAEVGPLSRFSRPSQAMSYSGMVSSEDSTGNRVRRYGITKAGNAHFRRVVGEAAWAYQYRPAMSAVLKRRQQGLSEPVKEIAWKAQHRLCTRYRHLLGKGKVKQQVTTAVGRELVGFIWAIGMQVEKERQQRRRAT

SEQ ID NO: 337450 - protein, 339 aa, unidentified
MKITTIGLDIAKRFFHMVCCNEQGRLINKKMLTRAQVLAFFQKQPTCLVALEACATSHYWAREIQKCGHKVKLIPPQHVKAFLIGNKNDYNDAFAISVVANQLHIKSVGIKSIAQQDNQEQHKARELTVKQRTALCNQIRGLIAEYGIILNQGVSRIRKTIPLILDDETTQLSEAFKTILRQLQAQLNALDTCIETYSQLIVETVKNNAICQRIQTIPGFGPMVSSAYFNEVGNGANYRRGRDVSASLGIVPKQHSSGGKDILLGISKRGNSYLRCLLIQGAKAVVSRAGTKNDKLSQWINKLVQTRGHNRACVAYANKMARMAWAITVSGEDYSTIEK

SEQ ID NO: 337451 - protein, 483 aa, unidentified
MKKKNIYLNQSQELLRLFEEAGNGANVMCVPIDYAKKDHVAMFCDGYGHILRKPFPVKNSPEGIEYLTEQVTRSCLHRHIDPKHVFFGGEDVGSYAENFIHTLRSGGWIVAGVNAQDAKKQRANLQASTDRLDLMGIASMLLNRRANCSPAQTGIYRNLRTIVRHRRKLVVMSTEMKNRVHTFVDRLFPGFLDDKKSGIPPFSKCSLYLMENRFSPRQIRRRRRPKLIEVLHRYGTEEPEKAAAKLQEYAAHVLLPPDEYISTLQVSLAHHVKLFRCLQDSIHQLEHELAVWLAQTQGAFLTTMRGIGIVLAAGVCAEIGDPDAQKPLNNLVSYSGIIPRVKQTGGPEGKTHTGKVAKRCNRILKDYVVQSANHLGLHGPEDLMADYKRREAAGQHADFGIGRRYLRTGMRLMRTSQIYLPPRLRNNREATPEERAGYYLMIWPALRDKWNKADALDAAFHKDRPLGRWRNMVQELYGIKLKL

SEQ ID NO: 337452 - protein, 367 aa, unidentified
MCGEAPVFTERTSVGLDVHARSLTAHGMDERTGEVFTARLSPGAEVHDWIGRLPGPVAVLYEAGPTGFGLARELRAAGVRCEIAAPSKLQRPAGERVKTDAKDAELLCQLLRLGAFTPVTVPDAAAEAARDLVRCREDCRTDLMRSRHRLAKLLLRRQVVYSEGTAWTGKHLAWLARQRFDDANLQATFDEYLDQVLATTARRARLDTRIEQLAADSPWTPMVHKLGCLRGISTLTGFALAVEIGDWTRFDGNSIGAYLGLIPSEHSSGTSKQRGRITRTGNSHVRRLLIEAALHHLQPYRRGTALRARWELAPPAARARADAGNRRLHNRWVGFQARKKLHHVATVAIARELAGWCWSVATIDQQP

SEQ ID NO: 337453 - protein, 351 aa, unidentified
MVQSKGINFNGQNIYIGIDVHLKSWSVTIITESGYKRTHSQKPSAKELFEHLKKHYPNGKYQAVYESGFSGYSTYYALKEYGIKCMIIHAADVPTSQYENVMKTDAIDSEKLAKSLKGGLLRGIYVRDKEELDDRSLIRLPKTLQKQLGGYKSRVKHLLYNNGISYPDCFENSRSHWSNRFIYWLENEVRLLSSTRLSLDLLIDQVKLFRKNLLKATRMVRDLSKKPQYSRQYENLISIPGIGLVTAMCLLTEIGDVSRFHNQREFASFLGLIPSCHSSGENIYNMEKTFRGNKHLGPLVIESAWVSIRHDRAMSMAYGAYCKRMKGQEAIIRIARKMSNRILSVLKSGKK

SEQ ID NO: 337454 - protein, 354 aa, unidentified
MIIIGVDFHPEFQQIALLNTTTGEVEEKRLAHPDEAEKYYRALASAGETVRIGMEASGHARWFERLVAELQFDLWIGDAAEIRAKRGRKQKTDRQDAQHILKLMLKDDFPKIWVPSWENRDLRQLLWHRHRMVQARTRVMNQLQAVALNEGLHCKKKLWRERGRQQLESFALAPWASRRRRDLLDLLDRLNPSIAELTQAIEREVENYPAAQRLRTHPGVGVLTSLAFVLILGDAERFRCGKQVASYLGLVPLEDSSGNRRRLGHITKQGSSIVRFLLVEAAQVTVRSLPEWRSKYFHLVLRRGRKIAKVAMARRLAVQLFWMMRKEWNYEQLKKFGSHAGQPGNRHGVQSNTE

SEQ ID NO: 337455 - protein, 351 aa, unidentified
MTCKKDVAVVRTIGIDTGKNTLHMIGLNEKGAIVLREKVSRDRIAARLVNIPPCLIGIEAGMATHYMSRDLLALGHEVKQVPPAYAKPFRQGHKNDFRDAHAVAEAVQRPSTRCVPIKTDDQLDLQALHRVRSRLIGDRTAVINQVRGFLLEHGIAVRQGPRSLRQQLPQILATRTDVLSPRMLRIIEDIVDDWRYLDDRIERVTDEIEGLARTDVNCGQLISVPGIGPIIASATVAAVGNGTAFAKGRDFAAWLGLVPKQMSTGDRTILGRITKRGNRYLRMLFVQGARAILLRPKSWAKYSFGPWLTAAARRLHRNILTIALANKLARIALTVLVQGRCYESRIVPAAA

SEQ ID NO: 337456 - protein, 342 aa, unidentified
MSRYIGVDLHRNRFTACVRSERGRQYVSTWKLEGLSKFVSRLRATDEVAVEVTGNTRLFYDAVEPRVKRLVVVDPRQFEVIRKSVKKTDAHDARALALFLSKDMLPEVRMKDPAHAEMASLVQTRDTLVKARTALKNKVNNLLSARGINLSRESLASDKGLREVLGMRFGTTVDVELEVLVGQIRSLNQSVARLEKAIADQGPKLPGHGNLKSIKGIGDVGAGVLLSVIGDVHDFKDEGKLAAYFGIVPRIANSNETEHSGRITKRGSKLGRTVLIQCALIAKRYSVYLQRYYERIQARRGTGKAIVALARKFLGIIYLTLKQNLVWEDFANGVIRDAEVSP

SEQ ID NO: 337457 - protein, 378 aa, unidentified
MQTTAARREYSEEKVLFLALELSNSKWKLGSTVGVGSKARERTIAAGDLGGLHEEVSRAKRRFGLESSARVVSCYEAGRDGFWLDRHLRHAGIENIVVDPSSIEVNRRSRRAKTDRLDVGKLLRQLMRWWSGEPKVWGVARVPSVEAEDQRQLHRELEALKRERTRYTNRMTSLLVTQGIRLKVSRSFLARLSAVRLWDNSPVPAGLRSRLEREYVRWTLVQEQIAELEKQRRSALRTARDRGAQTARRLYRLRGIGENYAWLASMEAFAWRRFDNRRQVGGMAGLTPTPYSSGQIQRDQGIGKDGNRRLRAATVEIAWGWLRFQPDSELSKWFQERYGPGSRRSRRVGIVALARKLLIALWRYLETGVVPAGAVLKT

SEQ ID NO: 337458 - protein, 343 aa, unidentified
MYIQVIGIDLGKSSFHLVGHDQQGRSQFRKKLSRSKLCEFLSNHPLTTIAFEACGGAHWLGRYCKKLGHQVKLIPPQYVKPYVKSHKNDFIDADAIAEASQRPSMRFVEVKSEQAQVIGAIHRIRSGYIKERTACMCRIGSLLLEFGISLPTGHSIMKRLFAWLATQRQSVPPMLMEELIELHEHYSDLNTRIDRQDRKLARLVKNHQDGELLKTIPGIGDLTASQCLSEFESVNQFKNGRSLAAWLGLVPHQHSTGGKTRLLGISKRGDKHLRTLLIHGARSILSRPDTVGAVFGEWLVKLRQSKPFNVACVALANKLARIVWSVLKYKKVFNAEKLHPQFA

SEQ ID NO: 337459 - protein, 324 aa, unidentified
MFVGIDISKLTFDVAVLQNGTYQHRHFDNNSGGFVCCLKWVKSFKTPALFCMEATGIYGLALAKYLCQQQQKTIVANPIQTHAFAKMEMSRNKTDKADAKSIARYAQHLDNQGLSNKALYTPKDPDFERIQFLVTRLDQLNKMRTQENNRIDVSLDKAAVQSVKAMCRFIDQQLLSVQKKIAGIVKHNNLLNEQVQLLTSIKGMGDKTAWAILAYMGDVSLFNNAKQISSYAGLNPSIEQSGSSINRSRLSKMGCARLRKSLYMPALVAVRYNPLMMALYDRLQARGKPKKVALVAVMRKLLVLAYGVLKSGKPFDINHQQQAN

SEQ ID NO: 337460 - protein, 373 aa, unidentified
MENTITKVALDTHKKQHAVAWVNCETGQTEVTTVKNNSKDIKKMVTKLKKASSNQLHFCYEAGVCGFTLKRRLEALGCQCDVIAPSLIPTKPGDRIKTDRRDVKKLLGLFAAGELTMVHPPNAQQEAAREVTRCRHAAQENLKRIRHQLIKFLTRHGYIYKDGNHWTKTHSNWLSSLQFDENDLQQVFAMIHTELEHCMQRLASLDKEVQALADRPEYRKVVGLLRCFRGIDTLTAIVLITEIFDFGRFESADALMCYLGLVPSEYSSGDKRSRGGITKAGNTRVRRALVESAWHYRHHPNVSRTLKQRRQDQPLWALDIADRAMLRLFKRYHHLINRGKVPQKVTVAIARELAGFIWAIMREHQVREVSNAA

SEQ ID NO: 337461 - protein, 403 aa, unidentified
MNNVAGIDVSKGKSMVSVLRPFGEVVAKPFSVGHTGSELKELADYLKSLDGETRVVMEHTGRYYEPVARFLYEEGIFVSAVNPKLIKDYGNNTLRKVKTDKADARKIARYGLDNWVELRQHTPMDTIRMQLKTLNRQQGLYSKTKTMMKNNLIALLDQTYPGVNDLFDSPVREDGSQKWVDFATTFWHVDCVRAMSLAAFTERYRKWCRRHGYNFSQSKAVEGHAGAQDLIAMLPKDALTKTMVRQAVDALNAVSASLERLKAEMRTLAAQLPEYPVVMAMRGVGDSLGPQLMAEIGDVTRFTHRGSITAFAGVDPGADQSGTHEAKSNRTSKSGPPELRRALFLVMDCLLKTQPEDDPVYRFMDKKRPEGKPYLVYMTAGANKFLRIYYGRVKEYLASLEGN

SEQ ID NO: 337462 - protein, 386 aa, unidentified
MQTLNDFSRSRIALEPNGTLIAVIEMSLSSWLVAGILPGVERQPLKKLAVDESALLKLLQRWREEAEKAGRRIERIAVAFEAGRDGFWLARWLKARSIEAHVIHAASVAVSREHRRAKTDRLDTALLKRAFLGWLRGERDHCKMVAIPTIKDEDAKRPNRERENLVSEQSRIINRMKATLIRLGIRGFNPKLKRAAGRLEDLRTPGGEPIPPNTLAELRRDMERRRLVRDQIRQIEEARLERFDHAPGDGSHPMVRLLARVIGVGIETADMLVHEVLSRNMRDRRAVARYAGLTGSPDESGRKRRERGLARSGNGRVRHGMIQLAWRFLLHQKDSALAQWFRARTENARGSRKRMIVALARKLLIALWRLVRQGVVPDGVVLRPAQ

SEQ ID NO: 337463 - protein, 421 aa, unidentified
MRVLYERCAAIDVGNAVVAVAVRLPGDGPDGRVTHKKIFKTFYGVLREAAGWLTSLGVTHVAMEATGIYSMPVYHALLEHGQFDQVLVCNAGHVKNVPGRKTDLADAEWLAHLLECGLLRGSFIPPADIKAVRDVIRYRTKVVHARTSEIQRLDNVLQDAGIKLGNVASSIASKSGRAMIEALIDGERRPDVLADLAIGRMRSKTSDLAMALEGRFGSHHALMCRLHLDHIAHLEQMIARLDAQVETMMRPYRAEQDLLATIPGIGQLAAAAIISEIGADVRAYFPSAAHLASWAGICPGNHESAGKQRTGKRRHGNQNLEPVLAEAAWSAARHDGYLKSLYHRHVMKSGGYRSSAAKNKAIIVVAHAILIIVWHVLATGTPYRELGADYFDRRLDPERETRRLIAKLEALGHQVTLQPGA

SEQ ID NO: 337464 - protein, 342 aa, unidentified
MQTITTIGLDIAKSVFQVHGVDAAGQVVRRQLKRRYVLAFFQKLPPCLIGIEACASSHHWSRELQALGHTVRLMPPAYVKPYVKRQKNDATDAEAICEAVTRANMRFVPTKTPEQQSCLMLHRTRHLFIRQQTAVINAIRAHLAEFGIVAPVGRKGVTELLHVVADPSDGRVPEVARACLAALGTQLLGLKEQIVEFDRLIMAWYRSNETSKRLHYIPGVGPLLATALAASVADPQTFRSGRNFSAWIGLVPKQHSSGGKDRLGSISKQGDRYLRSLFVAGALSVIRYAKIHGTKHRPWLTALLARRPTKVAAIALANKLARMAWAMMARGERYRQPVALAA

SEQ ID NO: 337465 - protein, 369 aa, unidentified
MARNGTLAKSQELQPSFHATTEQITIGIDLGDRFSHCCVLGPDGKILTEGRLRSTPETMARHFQDLPPARIAIEVGTHSRWVSQLLGQWGHEVIVANPRNLRMIADSIRKSDQVDAHMLARLARVDPKLLSPIVHRKQESYPDIIQLKARDLLVKNRTRLMNAVRGVLKSAGLRVPSSGTSCFPSKAATCIPDELKPSLTPLLETISHLNKQIYSLDKAIESTAQDRYPETNRLRQISGVGSITALQYVLTIGDPGRFAHSRDVPAYLGLTPRRHQSGSVEQQLRISKAGNKQLRSLLVQCAQYLLGRFGPDSDLKRWGTRMFERGGKNSKKRAIVAVARKLAVLLHRLWVTGDTYHPLYNVSIGSVTP

SEQ ID NO: 337466 - protein, 329 aa, unidentified
MRKSSFYVGVDVGQSELWAAVSGVQPRPFANSETGIKSLRRWVSSVLPSATIHYAMEATGVYSQTLATRLLRDQEQTEVSIINPAQIAAFARAQLRRCKSDRLDCQVILEYAQSQNPPCWQPESEALQQLRALVAQADALQKSLLEWNNRRHTQQQSLHVPSAVKKSTAAMQRVIERQLELLQTEIKSLCTLDPELRVNYQLLQTIVGVGDKTAAAVIAYGGSALTERSRKELTAHAGLAPRPRQSGTSLNQQGHLAKEGNKQLRKALYMPALVATQHNPIIHQTYQRLLTRGKAKMVALIACMKKLLLMIRSILIHQKPFNPAIRSLT

SEQ ID NO: 337467 - protein, 442 aa, unidentified
MTNLHSCVAPTEWAAFVAIDWADQKHFWALTATASDEIERGELDATPEAVEAWAAELSVRFSGRPIAVCLEQKRGALVYMLAKYAHLVIFPVHPKTAAQYRETFCPSGAKSDPADAAWLLDLLLRHRHQLRELRPDTPQTRLLQHLTEYRRRLVDEATRQKNRLTSCLKIYFPQLLGWFDDIGSPVAGALLERWPTLPELQRAHPGTLRRFFHEHNCRSEERIRERITAIAAAVPAVRDEAVVEAESLRARSLVALLTTLRSQIAVFDQRIQEVVAKHPEQELFASFPSAGPVLVPRLIAAFGTQRDRYGTASDVQSLSGIAPVTERSGKQEWVHFRWACSQFLRQTFHEYAAHSIVRSAWARAYYQSQIEAKKTHHAAVRALAFKWIRIMFRCWKDGKAYNEQAYVAALQKRNSTLSGLFRTTGTGWQSTAGFQKLFENPS

SEQ ID NO: 337468 - protein, 326 aa, unidentified
MSKPSFYVGIDVGSQELVAAVEGRRPKSFKHSRCGIKAMVKWAKGIADGRSLQFCLEATGVYGYSVACCLYQEHHMSVSIVNPAQIASYARAQLRRTKTDNVDAQVILSFAQSQNPPLWEPEQSNLRQLYYLVVEADQIRKTLRQWINRKHGYKYLNDLPQIIKKTNMALQRAMTRQLEKIEQAIGALCNQDKELKQMTELLCSIPGVSTRSAVRILAYGKNAIRDFNRNALTAHAGLAPSQRQSGISINGKSRIAKQGDRRLRAALFMPALVAAYHNPQLKACYQRLLDKGKPKMVALVAVMKKLLLMIQVILKTKIPFKPQIST

SEQ ID NO: 337469 - protein, 338 aa, unidentified
MSEDKQLIAEKQIFIGCDVSKYTLDFAIYQRGMDYRKFKHYQVSNDEAGFKELLKWLKSNGVKKQKDLVVGIEHTGYYSNALAEWLFRKKITFCYLHPLDVKNYISSARNKNDSEDACMIADYLYTMREKLTPSTPEPSEIKQLRALRNERALIIKSRTAFLNLLKNIDEPASIKRMQTIINELNTQVKAIEKSIMEAINSNEKIKQNYNLITTIPGIGLVNAINTIIATCNFTKFQTARQYAKFCCICPLSNESGISVRGGDHISKKGHNELKTDLTEAARSTIIHNSQMKAYYQRKRAQGKSHGCVMNAIKFKLVCRMFAVIIRQSPYVDFEKYRQ

SEQ ID NO: 337470 - protein, 330 aa, unidentified
MKQYDHVFGVDVSKKTVDITHVINQQFAHRQFTNDDAGMEQLMEWFKELTPEFDKTLFCMEATGLYCFTLTHFLAGHSIDTWIEHAAQIKKATALARGKNDKVDSQRIALYATKNIDRLRLWKPVNATLEKIRHLASLRERLVDTKKRLATPIKEFEDVGNLAMAKLLTKTIKSSLTAIDKDLKNIEIKIIDVINEDDNLKLLYKLITSVVGIGFVTAINLIVHTNGFTMLKDTRKLACYCGVAPFEYSSGSSIRGRTKVHYMANKKLKCNLHMASLTAVKLDADLKAYYERKVEEGKNKMSVLNAVKNKLLARVVAVVNKQQEYVKKSA

SEQ ID NO: 337471 - protein, 316 aa, unidentified
MSETGVETFAGIDVSKSTLDVCIDSTSEVLHVDHDDQGIGRVCAHLTAAQPALIVMEATGGLEMRLACELAAQGLSVAVINPRQARDFAKATGRLAKTDRVDAAMLAAFAKAIRPQARPLKDEQTRGLDEMVSRRRQLIANRVQETLRLDTAATRPMQKSLQAHIAWLDKRIAEIDADLRRRLRASDVWRAKDDLLRGIPGVGAVTTVTLLAKCPELGTLNRREIAALAGVAPLANDSGKHHGRRFVRGGRADVRAVLYMATISAMRCNPGIREFATRLKQAGKPPKIVIVACMRKLLTIMNAMLKNRAPWAPQHA

SEQ ID NO: 337472 - protein, 411 aa, unidentified
MDVLYERCCGIDVHKKMVVACLITPDATGTPTKETRTYGTMTADLLEMMDWLVDAGCTHVAMESTGVFWKPLYNLMEGTLEVLVVNAAHMKNVPGRKTDVKDAEWIADLLRLGLLRASFIPDRPQRELRELTRYRTSLLQKRSAEVNRLQKTLEGANIKLASVATDIMGKSGRDMLAALVAGRTDAAALAQLARGKLREKLPQLEKALRGQFAAHQRFLVAQQLAHIDGLDDIIERVSAEIAERVRPFEEAIEHIDTVTGVGRRTAEVLVAEVGVNLTRFPTHRHLTSWAGLCPGNNESAGKRHGGKTRKGSPWLRAALIEAAKAAGRSKKTYLGAQYRRIAARRGAKRAAVAVAHSILVIVYHILTRHEPYRDLGVTYFDERDRQAVERRLVKRLQSLGYDVHLQPLTAA

SEQ ID NO: 337473 - protein, 395 aa, unidentified
MFASSNSQGVMEAVGGKAAERSEAGFPPTTGDRSIVPGPFEAVTKRDRCQSHGISPNSRQSRRLPSSSHLQDGDHSMDGSIALFAGVDVSKRSLDLCLLPDDRRQSFSYDEQGLAQLSKALPAPGTCRIVVEATGGYQRAVVAELVNAGHLVAVVNPRQVRDFARGLGILAKTDRIDAYVLARYSQQAEPRTVAQISEKATELEQLVVRRRQLIQLQTAETNRKHATPSKVVRQSIQQVIVVLRKQIDQVEQEILALVESDDDWKDKMNRLGSVPGVGPVTAASLLAELPELGQVNRQEIAALVGVAPFNRDSGRFRGKRSIWGGRASVRSVLYMAALTARTHNPILRAFAKRLEAAGKPFKVVITACMRKLLTILNTILKDGTSWRLEKSLVNT

SEQ ID NO: 337474 - protein, 419 aa, unidentified
MKSQAPAAFAAFVGLDWADAKHDVCLQAAGTAQREFLSLAHSPEEINSWVQTLRTRFNGQPVAVCLELNKGPIVSALRTYDFLVLFPVNPLTVAKYREAFTPSRAKDDPTDAELQVEILLKHRDKLTPLRPQSPTMRALAQLVEQRRRLVGDKVRLTNRLTSALKNYFPQVLHWFPEKDTAIFCDFLIRWPTLKAAQLARRTTLEGFFRAHHVRSTDLIATRIEAIKSARALTTDDGVIAPNVLLVHALVAQLRVTLQAVADFDQAIAQRAQDHPDFPLFDALPGAGAVFAPRLLVAFGEQRERFTSADELQKYAGIAPVTERSGKKSWVHWRLQCPKFLRQTFVEWAAESTRHSFWAQVYYQQQRDKGKAHQAAVRALAFKWMRILYRCWQNRTPYDESIYLQALNRRSAPLLHNLAK

SEQ ID NO: 337475 - protein, 320 aa, unidentified
MIVHDTGMPAKYEVLRAYLMERYPECKITVMYEAGFQGFWLHDLLVKDGIGCVVTPPNKVSCPKDERVKTDKRDAQRLALNLETRNYTACHVPDQERREDRQISRTLSQIQKDIRAEKNRIRRFLEYHGLNGDMPAGVWKDTDYLRLKEMSLTHSLKVSLDAYLVVLDTLLKTENELKAELKALCKKERYKEPVRIKMSVPGVGSLSAIRFTLEWGPLDRFPTGKRFASFTGLTCREYSTGESIRRGHITGQSSEYIRAWLIECAWRAIRIDPALLDQFRRVWKNSGSRKKAIVAVARKLAIRMRAIELSGQTYCMSVAK

SEQ ID NO: 337476 - protein, 349 aa, unidentified
MGEVITIGLDIAKSVFQIHGVDADGAVVIRKRIGRAKVIEFFGDLPPCLVGMEACATAHQWARELKMLGHDTRLMPPSYVKAYVKRGKNDAADAAAICEAVTRPSMRFVPIKSVGQQSALMLHRARDLLIRQRTQLINALRAHLAELGLVAAKGRQGLQQLIAAMAESSDERLPGDARFACQSIVAQLHALQSQINGLDKRITQAHRANADSKRLDAIPGFGVILSTAVVATMTDPKAFKTGREFAAWIGLVPRQNSTGGKERLGSISKQGDRYLRRLLVVGAISIVRTARMWPDKYPWAIELLGRRPAKVVAVALANKMARIAWAVLAKGEDYRAPARSGNATIAAAA

SEQ ID NO: 337477 - protein, 418 aa, unidentified
MQYAPSPSLPVRPPGGVTAGLDWATDDHAVSIVDSAGQVVARFTVPHTAAGLAEMVRRLVAAGAAELAIERSDGPVIDTVLEAGMTVVVISPNQLKNLRSRYGSAGNKDDRFDAYVLADTLRTDRARLRPLHPDTPATITLRATVRARRDLVAHRVAVCNQLRAHLQKVFPGAVGLFAELDSPISLTFLTRFDCQDRADWLSVKRLTAWLTAAGYSGRKDPAVLFEHLTAATRGATGDQGAALAHTTGALLAVLTSLVEQIKALSEQIGEQLALHTDAHIFTSLPRSGTVRAARLLAEIGDCRAHFPDPQSLIGLAGVAPSTRQSGKHKTVHFRWAVDTQLRDAVCDFAADSRRAHPWAAQLYNQAIARGKDHPHATRILARAWLYVIWRCWQDHTPYDPTQHRALQRLLNQDQQAAG

SEQ ID NO: 337478 - protein, 316 aa, unidentified
MQSILNLGADVDSRFIVVACAAQSFAPQRIANQRGAIRAWLRSVPRGSRLGLESTGSYHELLADLAHAAGLQVFLLNPRILRRYAQGVGQRGKTDRLDAEMIARYVAKEHAELHSYLPPSKAQRALTRLVKRRAKLVTMKQTLTQSLRGVPGVAQDVKRALRDLERLIHQVETLMQSALQQLPAAQQAAQQIATIPGFGPLGSTCLGHTLTRLPYANSDAVIAYTGLDPRPDDSGRKHGRRRLSKHGPSELRHLLFACAMAATRTPFWQPYYLAQRAKGLSSTAAIVILARKMLRVAFAVCKHNAPFDPTRIGAVA

SEQ ID NO: 337479 - protein, 456 aa, unidentified
MRKKKTQSNKIVRLDALKHINLNAAGIDVGDSQMYVAVPEDRDEQFVRVFGTFTRDLLSIAQWLKDCHITTVAMESTGVYWIPLFEILVEHGFDVLLVDARKIKNVSGRKTDIQDCQWIQQLHTYGLLHGSFIPEQNMRALRDMVRHRANLLRYRASHVQHIQKILQQMNIKLTNVISDITGTTSMHILRAIVVGKTDPTYLSSFRDPHCKKSQTEIELSLQGNYRTEYIFQLKQMLDLYDYYSSLVVQLDAQTETMYAHLPSLVNQKDRPLKPLKRNVHKKNKNAPTFDLRTQLYRICGVDLVQVDGLNTSTVQDIITDIGTDMSKWKTSKHFCAWLRLAPNNKITGGKVFLSHTPKSKNKANKALRLAAFSLANAKCALGAFYRRIRAKYGAPMANIATAHKLARIIYKMLKDKVDYVDLGENYYNENYKARLIRNLNDKAKSLGFQLIPTATQ

SEQ ID NO: 337480 - protein, 418 aa, unidentified
MNAAGIDVSSRKSMVAVLRPFGEVVMLPFEVKHDVKSLLHLAQILKNLDGETRVVMEHTGRYYEPIANVLHDAGLFVSAVNPLLIKEYGGNSLRKVKTDKADASKIARYGLDNWADLRDYTPMDTIRYDLKTLNRQFHLAVKQKTATSNNLIALQEQSFPGIRKCFTSPVRKDGTQKWVDFTHDFWHADCVRGVSKNAFSERYRKWCKRHDYIFKQDKAEEVYTLAKSAVVLVAKSEVTKLLVQGAADQLTSISRSVEIYRAEMNRLASMLPEYPFVMAMYGCGGSTGPQLMAEIGDVRRFASKKSLVAFAGVDPAPNDSGTKVSKSNKTTKRGSPYLRKTLFNIMDACLQNAPADEPIFQFLDRKRAEGKPYYVYMTAGANKFLRRYYAQVNDYLKTLEPKEAEPSQETTAETVSTS

SEQ ID NO: 337481 - protein, 463 aa, unidentified
MTRGDRRRNARRERLRAVLPWDGAVIGIDLAEEKQALAVVDHDVRVLARKTVRVRAFRLGPALDWAVAQARAKGLGAVTVACEPTGPRWLQVQRLCAERGLPLVCVQPLVSHIAREQQDYTGHKTDESDCVLIARLAAELYCYLPEELDETWAQLRHLGRRRAALITSATASVQRIRDFLSVAWPTVTETCLHPLDSVTWLAALEVVTSRCGGQPASLAAIGPLRFAGLVEDALHGWGGRRPCARISRAVFAALTDTDGVVTAHRRGLLRRCADELGDLRRARAQLRQVEADMAAVLAELGLARLADIPGLTAVGAAAILAETGDPRRYDSSSSLVKHAGMSPAGNASGAFRGDAHISRRGRPGLRLTVWRTVWPMLTHNPVMAAKYAAMTKTADAATAAPADGTGHLSAAAAAARACRAKARVACAASLLRWIYAIVAHDTSWDPAVASGAASGRRDHAEAA

SEQ ID NO: 337482 - protein, 339 aa, unidentified
MNSMAVGVDIAKQVFQVHYVDRETGEIVNKAIKRAKFLEHFANRAACLIGMEACGGAHHWARQLTQMGHEVRLMPAEFVKAFNIRNKNDAADARAIWLAVQQPSKPVAVKTEMQQAMLALHRTREQLVKFRTMQINGLRGLLTEYGEVMSKGRAKLDKEIPDTLGRIAERLPAALIDTLREQWNGLTKLDEQIAEIERRMREWKKEDKAVKAISEIPGVGLLTATAAVAMMGDAKAFSSGREFAAWAGLVPKQTGSGGKVNLHGISKRGDTYLRTLLIHGARSVLTHAKEPGEWVEQMKKRRPPNVVIVALANRMARTIWAVLAHDRPYQRDYVSVKPA

SEQ ID NO: 337483 - protein, 394 aa, unidentified
MAFKIFRKNCCGLDVHKTWIYACMGITDTNGRTEYKQARFSSFTKGLQKLADWLAKYDCNDVCMESTGKFWIPVFNILEKTCWVTLAHPKYTKPQKGNKTDCKDAKWICDLYMCDMVNPSFIPPPDIRQLRDLMRYRSKLTNIMTSEKNRALNCLTVSNLKLDDVFSDVFGKSSRSVIRYILEHPGETFQVAPFIDRRCKHPVEEIQAVIDGTISHQQAVKLRECLQHLDELEVHKTNVEKEILCLVRQYPYQLELLQTVPGFSGNIMTAIALISEIGADMSVFPSAKHLVSWAGCCPRNDQSSKKVKSTRISRAGVYLKPLLVQVAIQPFTANADELSAAGAVEIRCQICDGRFLSMWAALFIFLGCPLPPCPKNLHVHNGRIVILASVAWIF

SEQ ID NO: 337484 - protein, 370 aa, unidentified
MGKSVLYVGLDVHKMSMDVAIAEAGSGAEVRFYGQIGGDLDSLDRVIRKLRATGAQLQFAYEAGPCGYVVYRHLTAQGWPCLVAAPSLIPRRPGDRIKCDRRDALSLARLFRAGELTAVKVPDADDEAMRDLTRAREDAVSVERRAKQRTGALLLRHGRRYPGKTTWGRGHWRWLLQQVMDHPAQQIVLQEYLDAVREASARVQRLTGQIQELLPQWRRAPYVAAYQALRGVSLIVAATMVAELGDLRRFNNPKELMAYLGLVPSEHSSGASVRRGRITKTGNGHARRVLVEAAWAYRLRARVTRPVLQRQEGLSTGVKEIAWKAQLRLCARYRRLLARGKAKNTVATAIARELAAYIWAIGQAVEPLTA

SEQ ID NO: 337485 - protein, 341 aa, unidentified
MRIFVLGNDLGKTYCSVVGLDDSGHVVLRRRLRRGNVEKFVGGLPTCVVAMEACCGAHHLGRVFGRQGHEVRLMSPEYVRAYVKAQKNDDRDAEAVAEAATRPTMRFVPVKSVAQSDVQALHRARERLVAARTALINHLRALLLERGIVAPQGRAKLEAELRTFADEEVGSVSPRIRLLVEDLRREWRSLDRRIAAFDAEFVALAREDAAARRLTTIPGIGTINATALVAALGDARTFRRGRDMAAWLGLTPRQRTTGGKPRLLGISKRGNRYLRKNLIHGARAVLPRLIQQDTPLGRWTRALSQRAHKNVVVVALANKLARIVWAVLAHGRAYDTGYEGA

SEQ ID NO: 337486 - protein, 427 aa, unidentified
MKEQSRTIVGIDWSADSHTCYDLQTDKSFKITDSVEGYEKLLKNYPEAVFVIEEANNRIGDYLLINNREVYVLPPCRSKEARKYHFSSGTKSDGLDAKAIALTFKEHPSYCLKARYSKVGVKITKLVTAYNIVSKMHSQQCNRLYSLLLRYFPEYLHIMDKQYRSDTSLRILSVCPTITELKKVSNEKLKKILNKENYRMTSILKNKLDRIRSEGISWEDTSCEGKLILLLVNTLLSLRKGLEVLKKEMEKTLKNSPYRIILSIPGVKAVIGSYIVKAYLTHDFKSYQEIQKYAGTAPLLFQSGRKSIMLMRKKCDNDLKGMIHMAAFASLKTCGWARNYYRRKRKEGKTYGHALRALGNILLKIAFSMLSKMKEYDETLFLNAKGIKTTQLNDTSFSETFPYPEYSQDAQLSLAATKDVVDNLIVT

SEQ ID NO: 337487 - protein, 340 aa, unidentified
MSEVSIIGVDLAKRVFQVHGALPDGNVAFRKKLSRSQFMRFLAEQPPCLIAMEACATAHYWGREALGSGHEVRLIPPIYVKPFVKRQKNDAADAEAIVEAVLRPTMRFVEVKSADQQSLGLLFRTRELLVRQRTQLINALRGHLAEYGIVVAIGVRNVKVFQQALLDHGTRLPKTVLSISGLYFEQIAALTEKVTELEIALRRETARDGQATLLQTMPGIGPMSAAAIQAFAPPLENFARGRDFAAWLGLVPRQHSSGGKDRLGRISKMGQRDIRRLLIIGAMSIVNWASRKGSRDSWLMRLLESKPKMVVAVALANKMARRLWAMCVKKEVYEIPILVA

SEQ ID NO: 337488 - protein, 414 aa, unidentified
MTKTQDNFSAYVGLDWADKKHDICVQIKGEDLRAFSVISHSPESINDWIETLHQKVAGNIAVAVELNKGPIVYALQKYSFVTVYPIHGLTLSRYRQAMFPSGSKDDPSDAELALDMMLNYPKKIIPLKPSSEKTRTLALLVEQRRLLVDDKRRYTNRLINALKQYYTQPLDWFSHRDTELFCNFLIKFPNLGELKRVRANTVAKLLNSKGGPAVKKTSARVASIKAAIPLTNDESLIVPYQTFVIALAKQMLVLIYTIREYDSQINTLFTSMEDASIFTSLPGTGPCLAPRLLAALGEDKSRFSSAQEIQNYAGLSPVTERSGQKNWVHWRWQCSKFIRQSFIEWAAKSVGQSYWAGLYYAQQKAKGNSHQSAVRALAYKWVRILFRCWKMGIAYDESKYLKALKERGSPLLTI

SEQ ID NO: 337489 - protein, 343 aa, unidentified
MEYYVGLDVSLKQTSICVVDQKGAVVREGVVDSDPEAISVYVRSKAPDAVRIGLETGPTSTWLWTELKRLGLPVICIDARHAKAVLKMQINKSDRNDAIGIARIMQTGWFKEVHVKDIDSHSVRALLASRALLVKIKRDLENHVRGLLKNLGLIIGRAKFNVFVVRAEELIEGRPELIAAIRPLLEARNAVGQQVSELDRKVMKLARHDAQVRRFMTVPGVGPITALAFKATIDDPARFARSRSVGAYIGLTSRRHASGEVDWTGRISKCGDAMLRSYLFEAAGVLLTRVPKWSAVKAWGVRLARRNGLRKAKVAVARKLAVILHRMWIDGTEFNWSKKEIAA

SEQ ID NO: 337490 - protein, 419 aa, unidentified
MADETVSWFAGVDWGSERHQVCLLDAAGQVVGERAFRHGGAGLAALCDWLVSVAGEPERVAVAIEVPHGPVVDALLDRGFAVHAINPKQLERLRDRVSLAGAKDDRRDARVAAGGLRTDPHLFRPVEAGDPAVIALREWSRLAEELQHERVRLGNRIRQQLWRYYPQLLAVSDDVTAEWVLDLWTLAPTPAKAARLRETTLARLLQEHRIRRLDAERALGILRQPAIAVAEGVTEAAVLHLRSMVARLRLANREFYQAERKLDELCTNLRDNTSTPKSGGPCDAAVLSSLPGIGPVTLAILLTEAAGPIKRRDYAALRTLSGVAPGTKRSGKSCLVTMRYAAQIRLRNAVFHWARVAVLNDPTCGRRYAALRARGHSYGRALRGVADRLLGVACVLLQRQALFDPAHDKRAASQPRATS

SEQ ID NO: 337491 - protein, 345 aa, unidentified
MKILALDLGNYKSVACVYETALQSHKFTRVVTTPKGLHDLLVEEEPDRVVIEICPLAGWVSDLVGALGIELQVASTTHDAWRWKNVKRKNDREDGLKLAQLSALGQLTLVHVPAPGVRQWRALINYRQRLVSRRTKIQNHIRALLLRQAVAMGAGHRGWTRAGIAQLEALAKPLNEVEREELWRGELALELEGLKALAEPLRQVEQKLDELGAADEQVQLLRTIPGVGPRGAEALAAVIDKAQRFKRGKELGAYLGLVPKQIQSGESNRLGRITRQGNRLLRSLLVEISWSGLRYNSWMRSVYEQVRRGSKARKKIAIVAVARRLLIRCWAMLRDGTTWRPASST

SEQ ID NO: 337492 - protein, 355 aa, unidentified
MPSKADTAVARTIGIDTGKNTLHMIGLDEKGAIVLREKVSRTRIAARFVNLPPCLVGIEAGMASHHVARELVALGHEVKQVPPAYSKPFRQGHKNDFRDAHAVAEAVERPSTRCVPVKTDGQLDLQALHRVRSRLIGNRTAVINQIRGFLLEHGIPVRQGYRFLRQQLPQILATRTDVLSPRMIRIVGDLMADWKYLDERIERVTDEIEALAHADEGCQQLITVPGIGPIISSAMVAAIGNGAAFCKGRDFAAWLGLVPKQMSTGDRTILGRITKRGNRYLRMLFIQGARAVLLRPASWAKHSFGSWLTAATRRLHRNVLTVALANKLARIAWTVLAQGRRYEARVEPRVEPAAA

SEQ ID NO: 337493 - protein, 344 aa, unidentified
MNYKLISIDLAKTVFQVAAFNPDNTIAFNRKINRPALLDTLRQCEPTLVVMEACYSANYWGRAIEKLGHTVKLIPARMVKAMLVGNKNDANDAVAIGETASRPKVSLLRPKTVEQQDIQSLLRIRERLVENRTANCNQLRGFLAEYGLIVAKTRRQLMLAIPLIVEDADNELSTVARGFIQRLYEFQLCLNEQIDQVAQDILALAQAMPQYPLLLTIPGVGPIVASTLLASINEVNDFKNGRQLAAWLGLTPSQYSSGTTNRLGKITKRGNQTLRRLLIHGARTVMNWCDKKDDSLSQWLQRLKQRQHVCKVTVALANKMARMVFVVMSRGQVFDMNKACKVAA

SEQ ID NO: 337494 - protein, 413 aa, unidentified
MDVVVSRCAGIDIGKAEVVVCLRVPGSRGKRESQVRTFSAVAGEINRLADWLAEHQVSHVVMEATGQYWKPVWDVLAERGFELMLVNARHVKMVPGRKTDVADATWLAELLEHGLLRGSFVPPRVIRELRDLTRYRKRLVQAHTSEGQRIAKILEDAGIKLDSVVSHLLGVSGRAMLRALIAGQRDPEQLAELARGRLRTKIPALAAALEGRFAEHHAIIIGLALDHFEYLERSVVRLDERIDALMAEHSAARDRLDTIPGVGKRAAEVIIAEIGADMSVFPTAGHLASWARMCPGNNITGGKRKPGTTGGGNRWLRETLVECAWAASRKRDSYLAAQFWRLARRIGKKKAALAVGHSILVIAWHVLHDNSTYTELGADWFIRRIDNNTRRRDRLITELQGMGYRVSLDKAAS

SEQ ID NO: 337495 - protein, 450 aa, unidentified
MSKAGTGLSITSKCSQVKTRFVGEVHAVAWRLRRGPARPPLFLYKITIGDSDLINVCFGPFCGLKSDILRGPRMGWTGRAPAPNGSQSAPGACQERITTMPRTTTLHAVTAIGIDMGKNTLHLIGLDARGAIMLREKVARGRIALRLANLPPCLIGIEAGMATHYVARELAALGHDVKQVPATYAKPFRQGQKNDFRDAHAVAEAVQRPTTRFVPAKTNEQLDLQALHRVRSRLVSERTAVINQIRGFLLERGIVVRQGPRFLRQQLPDILAKQTDVLSPRMARIVADLANDWRRLDERIETVTDEIGTLAKSDDSCRRVMTVPGIGPIISSAMVAAIGNGAAFARGRDFSAWLGLVPKQMSTGDRTILGRISKRGNGYLRTLFMQAARVILLRSANWPKHSFGLWLVRAAQRLHPNVLAAALANKLARIAWTVLAQERSYEARVTKAAA

SEQ ID NO: 337496 - protein, 455 aa, unidentified
MAQRNPSISLKSGKSRAALTITHPNAAGIDIGSGSHFVAVPPDRDDEPVREFSSFTVDLNALADWLKTCGVDTVAMESTGVYWIPVFELLESRGFTVMLINARHVKNVSGRKSDVLDCQWIQQLLTYGLLRGAFRPADQVCVLRSLWRQRGMLLRSQSRHVQHMQKALTQMNVQLANVIADVVGVTGQKILRAIVAGERDGHALAEMKDVRIRASVDEIARSLQGNWRAEHLFALRQALNGFDFIGTQLAECDHEIEQQLQRLQTHEGEPASGKRRGRARNAPKFDLRTQLFKMCGVDLTRIDGIDVTTALAVISETGVDMSRFPSAGHFASWLGLCPGTRITGGKVMSGKTKRCANHAAQALRLAAAALRASQSALGAYFRRMCSRMDKPKAVTATAHKLARLIYTMLTKGEEYTDQGQDYYEERYRERVLLQLSQRAQKLGMKLVATEQPQPV

SEQ ID NO: 337497 - protein, 361 aa, unidentified
MIVIGTDTHKRSHTAAALDEGTGRVLAERTVSAKRRSFDDLLLWGRGLEADRVWALEDCRHVSGALERFLLARGERVVRVAPKLTAGARDSARERGKSDAIDAVAIARAAIRVGLDTLPVAQLAGAELDIRLLVDHRERLVAARTRLINDLRWNLHDLWPELEVPLRGLIAVHWPQRLAGRLARAEQTTRVRIARDELRRIRELTKTIDELKRELALLVAKVAPRLLAERGCGVLIAAKIVGEVAGVTRFATDAKLARIAGSAPIPASSGHTIRHRLDRGGNRQLNCALHRLAVTKGLHDPDSNAYLARKQAEGKTRREALRCLKRYLARRVWHLLQDAPPSPQPAVTILCNTPYNNFSLT

SEQ ID NO: 337498 - protein, 358 aa, unidentified
MQSNTLNFNGQKIFIGIDVHLKSWNVSIFTSNVKMKPFSQSPDAVALRTHLDRNFPGGDYFSAYESGFCGFSVHYDLLRCGIKNIVFNAADITDSHKERARKADSVDSAKIARNLRDGNLTPIYVPSQEELSDRQLLRTRRSLVKNQSQTKIRIKSFLNFYGIKCPLSLECNGTHWSQRFINWVKYEFGNMADSQRKSGMFLLRTLEFQHAEVLSATRELRDLMRSPKYEKNMRLLTSVPGVGLIAAATFLLEIGDISRFSNSDHLASFIGLVPDTRSSGEKDAKIGITNRSNRYVREALIEGAWRAIRKDPALTLAYEELRKRMEPNKAIIRIARKLANRIMCVLRTQEPYVPAVIK

SEQ ID NO: 337499 - protein, 338 aa, unidentified
MTCIGFDHHKKWTQAAAVDDQGKIIREMRVLNDNSSLKGFLKGLPQPLKGVVEAGPTWGWIYDTLTELGVKMIVANPSAVRAIAEAKIKTDKIDARMLASLLRVGLIPEVYVPTEEVRSQKMLWRERIWLVRMHVRLKNRIHRLLNHYHLEVPEFSDLFGAAGRRFLEELKLPEPGNRILNAQLKLLQSYRLQIEEVQRWAVKATQGHPNRAYLESLPGFGKVFAPIFALEIDDPKLFASPGKLASYCGLVPSLYSSGGKSWQGGIGKEGNHWLKWAFIEAAWAAIRSSAYFRVVYQRLRQRKTAQVSIIACARRLCEIAYHLLKERRCYEERPYRCA

SEQ ID NO: 337500 - protein, 412 aa, unidentified
MLFVGDDWAEDHHDVEILDAEGRRLVKKRLPEGLEGLSKLHELIAAAMPPERSQLDSVEAAGQVKIGIETERGPWVAALITAGYEVFAINPMSTARYRERHSTSGAKSDAGDAHVLAEIVRLDRAHHRSVTGDSDDGEALKLLARAHQSMIWDRTRHLLRLRSALREYFPAALQAFADLDAPESLELLAAAPDPDVAAQLSKARIVAALRRAKRRKIDQRVEDIQAVLRAPALRQSTAVQNAFSAIVVAEVRVITALVAEIDALGVVVAKLFDRHPDAEIFTSQPGLGVILGARVLAEFGDDPDRYADAKSRKNYAGTSPITRASGTKKVVLARYARNHRLADAVQQWAFSSMRGSPGARAYYLSLRARKIGHQAAIRQLANRQVGILHGCLKHRTLYDEQKAWPHHATAAA

SEQ ID NO: 337501 - protein, 348 aa, unidentified
MTEAYDGRQVVGMDLHRRRSVLVRMTEDGRKLETVRITNSPAELRKVIARAGENPRVVVEATYGWYWAADVLEEAGAEVHLAHPLGVKAYTYRRVKNDERDAADLADLLRMGRLPEAWIAPPEIRELREITRYRHKLVKARTSYKDQVHGVLAKLGVPVSHSDIFGVHGQAWLDGLPLPQPYAGKVASLRQLAGELGAEIALLDKVLGDLLDGHQGYAAIQQLPGIGPVLAAVIVAEIGDIRRFPGPGQLGSWAGLTPRHYESDTKVIRGHVTKQGSRMLRWAVTEAIQRQPAGSRPREVKDAIIARRGKEAKNIAKIAAARELLTLVFYGMRDGRVRRLAAPRRPAA

SEQ ID NO: 337502 - protein, 383 aa, unidentified
MKIVGCDLHARQQSIAMVDTETGELTEKLLKHEGNAVRDFYASLEGPVVVGIEATGAMQWFLELLEELGIECRVGHPAKIRAAETRKQKHDRRDAEVILDLLLMKDRFPDIWMPSTEQRDLRTLLRDRQQWVKMRTRLQHTLQAIALNHALREGRGLWTATGRRALQGLALPPYTHQRRDELLGLYTQLDKRIQQLDKQVETEARQRPRARRLLTHPGVGPVTALATEVFLGDPNRFATANQVASYIGMIPCEHSSGKRQRLGKLTKEGNSLLRYLWIEATLHAVVKDAELKRFYRRKLIQKGMGKARVAAARKLGIRLWIMLRDEIDYEEFCRRGKLRQKGEAHAGMPDYNSGPARAVTGSTNRPPASPKGRGVCTTHHDRT

SEQ ID NO: 337503 - protein, 344 aa, unidentified
MQIVSVGIDLGKTTFHLVALGAAGKVLVRKKFTQRQLLTYTANMQTSLIGLEACSGAHFLGRALRKQGHDVRLIAAQFVKPFVKSNKNDFVDAEAIAEAVERKNMRFVPIKTDDQLDLQAIHRVRDRLISRRTAVINQLRAFLLERGLVFAKTPAKLRAALPDILENADLDLTTQMRNLIDLLWKEWKTVEDEIEGLSLELERISAADPGCTRIRQIPGIGPIVATAIVAAIGNGAAFRKGRDFAAWLGVVPRQYSTGGKARLLGISKRGNVYLRKILIHGARAAVLRIKRDRAPIGAWLDALDARAPKNVVVVAMANKLARIAWAVLSSGEDYRPNSNMATAS

SEQ ID NO: 337504 - protein, 478 aa, unidentified
MDDRRLVGIDLGIASAHTVRVLAGDGSLVCRRKAAPTVESLAEVEQAALTGVAPATRLEVVVEPTGPAWLPIAVFFSARGHTVYRVSSAKAHDLRRVLSRHAKSNGIDADTLARLPLVDPAGLHPLQLPDAPRAALDRRVRACDRLTQQAATHKRRIKDLVHQLLPASPLVGELGQADLAVLERWADPHALVAAGRARLQRLLATASAGQQGPQRATQWLAAAHAALELYGDHPAIAWQDLAAEVTSEVRLLRTTQAELAAHATKREACYQRVDPAALARSLPGLATIGGPALVATMGTASRFATAAKFRCFTGLAPKASETGHSDRKGQPISKAGNRLLRTTLVRAADHARRQDPQLARIYHTQMVQRGKDHLGAVCVVAAHLAERAWTVMNRGTPYVLCDTDGTPVTPAKAKAIIADHWTVPEQVRQRRRSKKGKAPQQVLTGHVHGARSATRRPSPSSATVGQQPNRVKPTQPQP

SEQ ID NO: 337505 - protein, 491 aa, unidentified
MNSIFQRSNPAIEKLFAEAGSPKKVMCIPIDYAKRQHTALVCNGEGLQLRGVFNIHNNPEGVAFMEQIVQGLCKKHAIRKQYVFFGGEDCSTFAFNFIHALLQAGYLGIGLNARDAAKERENQVASTDQLDLRGIASLLINKKWGRTLSAEYNAARILRELTHHRAALVKAHTASAYRIHRLVDQLVPGFLDEKQSGLTPFSQPSLWVMSAHFAPRQLLARKSDVLAEKLRLFMVRDPEVKVAKLKALAGSVLPPPSALCQTLQINLTHEVSVHQHLGHCIQEVDKDIAQRLAATPGAMLTTVPGIGVTLAAALYAEIGDPTRQRCLKRLTSYAGLVARLKQTGGPDKEAQTKGRSRRACVPLKRCIMDIALKMGQFGQEELQRDYQRRVDDRQDPRLTMGRRMLRICTHLIRHTDFFVPPSLVRDSAHAVRRDYYAHAWDKILIKWRDAGAIQQAFVDGTPLEKWRRMLNELYNLKLDKLSPQYDRLRAR

SEQ ID NO: 337506 - protein, 349 aa, unidentified
MRYFQPPADTQFYAGVDLHARSLFLSILDRDGHSRFARNLPAAPEPFLRAVQPFRDGLVVGCECLHCWYWLADTCRDAHIAFALGHAWAMKAVHGSKTKCDRHDAQAIARLLRGGNFPLAYAYPQERRGLRDLLRARLRLVRQRAELYGHVHTARRQANLPPVSNDVKYKSKRAAITADIADPFVRRRVATHLALLEPLDTTIRRLEAEIEDAAQAIFPTELAVLQTTPGVGPILSLTILLEIDTIERFDTRQQFCSYARLCGAVQESGNKRVGVGNRKAGNAWLKWAFSEAAVLSAQKDARIGRYLERRATKLGKPKALSALAHKLGRAFYHMLHTKEVFDIQRFVRP

SEQ ID NO: 337507 - protein, 345 aa, unidentified
MQSMYYIGLDVHKRKISYCVKDSSGKIHSEGSILATRLDLDGWMKTLPQPWTAAMEATVFTGWIYDHLRPHAAALKVAHPLMLRAIAAAKKKNDRIDASKICDCLRCDSLPECYMAPTALRERRRTLRYRNLLVRQMVQTKNKIAVLLMEAGVSYNKQKLHKAGYFSDLIHTNPDIPDGLRPLLHLCRNTVVRLGKTEGALVRSLQRDQLLRERIERLMTIPAVGPITALTWALEVGDVARFSSIKKAISYCGLCAAEKSSAETVKRSPLSKQRNRHLQTTLIEAAKMAPRNSPALAMLYESEKQKHNANRATLAVARKLVTYLMAVDRRQTDFLLMEKQTRTAA

SEQ ID NO: 337508 - protein, 364 aa, unidentified
MNTITIGVDLAKDLFSVCSVNASGRVLDRHELRREKFAAWLAQVPAGTVMAMEACSSAHHWGRVCRGYGLEPRLMAAQFVKPFRKSAGSKNDRNDAEAIATAARQGNMRFVPLKSVDQQVRLSWHRVREGYKAEGLAISNRLRGLLAEFGLVIAPSDAALRRWLADLDAVSLPVELIELVRDLAEHWQAVQQRVAHCDRRIEAHAQSDERCVRVRSLVGIGPLTADAVVATIGEGKEFKNGRQLAAWLGLVPTQHSSGGRRRLGTISCRGDGYLRTLLIQGARSALQRAKAVAPEKATPEQIWIRSLAGRLIFGKILVAIANKHARQLWAMLARDETYDAHAWLTHPMAQRAAGAHAASRAVKA

SEQ ID NO: 337509 - protein, 362 aa, unidentified
MTTQERQRTLFVGVDVHKDTHTAVGVSPFGDKVFEMTIGNMEADFASLVERVHEEARRANLSARFGLEDVHSWGERLSQFLVEEGLPVVAVAPILVDRLRGMQTHPEKNDSLDALGVAEVMLRKSDSLPAYTLTEDAKKAKQIRELSVEREWLVDERTRLKNQLHVLLHRVHNTGYRTQFKDPFSKKALAYWMKSIPRSCEPILAARTKRAVKRLQDLRDDIMAIEKDLESLVLESGHTLTSASGCGVVIAAEIIGEVGDIKRFKSPGSLAKYAGCAPRECSSGKTIRYRKTRSGNRRLNRAFHRMALSQISRMGNPLALAYFKRKVSEGKSKMQALVCLRRQMVNIVWMMLKHKTTFCYPQ

SEQ ID NO: 337510 - protein, 341 aa, unidentified
MLAIGIDTHKATLAACAVDELGQPLTEATFANDPAGHRALHAWAERIAPAARIGLEGSAGFGAAAARFLLAAGREVREVPPQLSHRERLRTRRAGKTDPGDALAIARVSARETDLPPVRTADVTREIGLLVEAREDLVAEATRVRNRLHAHLVVLVPGYQVTAANLVAERNRQAVGRLLRPVHGIQAELARARLTRLGRLVAEAKAIELRLAGLVGDHPLRGLPGAGVLVTAKVIGEAGDLDRFHSADAFAMLAGVAPIPASSGQTQRMRLNRGGNRQLNRALHTIALAQAWHHPPAREYIARKRAEGKTWREALRALKRHLARIVFRLLAGHREAVRQPA

SEQ ID NO: 337511 - protein, 446 aa, unidentified
MRRRPYGATFVNDVDVVGLLQGKEGLAVTVGVDVGKVHLFAVCRWANGQFERPWKVSNPDEIGDLVVLLDRLRTGRKLVVAMESSGTYGDALRQALGDSGLGVERVSGKAAHDYAEIFDGVASQHDGKDAAVVAELVALGKSTPWPYEATGDWDQELSYWVDWMVAQRQVLATWQGRLEGLLARHWPEATRLLKLSSVTLLKVVAHYGSPQALAADRQAGERLGLWGGKFLKKEKIARFLAEARSSRGVRSGDWERRRLQDFARQALQARQQGQCGQRHLRQLANGHEVLEAQGKVVGVPTACLLWVYTGDPRQYYAAAAYRKALGLNLIERSSGKFKGTLHISKRGSSRSRQWLYLATLRLLQKAGVRSWYEAKKAGNADAAKRVLVALMRKLSMALYQVGVHQQEFNTRRLFQKIMRRLKSSEPEKAKNEISFEARSSNPPGRR

SEQ ID NO: 337512 - protein, 343 aa, unidentified
MEHFAGLDVSVNETSVCIVDETGKIVREVKVASEPDALLTVLKNRAYHFKRIGLEAGPLSQWLYSALAEAELPVVCVETRHMQAVLKAQINKTDRNDARGIAQMMRVGLYRPVHVKTLRSQKLRMLLTHRKLMLSKAIAIENDLRGTLRNFGLKVGMVGTVKFEARIKELIENLPDLAVLVEPLLVVRRVLREQIGILHRRLLVIVRDDAVCRRLMTVPGVGPVVALTYRATVDVPARFRNSKAVGAVFGLTPSKYQSGEINRTGAISKCGDEMMRVMLYEAAQVMLTRTNKWSWLKAWAMKIARHRGMRKAIVALARRLAVILHRIWVDGTDFRWTRKVAAA

SEQ ID NO: 337513 - protein, 339 aa, unidentified
MQIHSVGIDLGKTTFHLVALGAAGKVLVKKKFTQRQLLAYTANMQTSLIGMEACSGAHFLGRALRKQGHDVRLIAAQFVKPFVKSNKNDFVDAEAIAEAVERKNMRFVPIETDDQLDLQAIHRVRDRLVSRRTAVINQLRAFLLERGMVFAQKPAKLKAAMADILENAEADLTPLMRNLIDTLWGEWKLVERQIEELNDELERISANDAGCTRIRKIPGIGPVVATAIVAAIGNGAAFRKGRDFAAWLGIVPRQYSTGGKAKLFGISKRGNVYLRKILIHGARAAVLRIKRDRAPIGAWLDALDARAPKNVVVVAMANKLARIAWAVLSSGNEYRPVAA

SEQ ID NO: 337514 - protein, 412 aa, unidentified
MTAKDQFAAYVGLDWADKKHDVCVQFKNGDRIFHVIEHTPEALDIWLNELHQRVKGRIAIAVELKKGPVVYALQKYPFVTVFPVHALSLARYRQAFWPSGAKVDPQDAELALDLMLRYPHKIKAIEADNPDIRLLQQLVEQRRLLVEDKRRFVNRLINTLKQYYPQPLEWFSHRDSSLFCELIIRWPSLQQLKRARSDTVRHFMNAKGGPAVAYTEQRVASIASAIPLTTDKTVIEANALIATALASQIKLTGDLIRTYDERIESLFDTLPDAELFKSLPGMGPCMGPRMLAALGDNRNRFNSAEEIQNYAGIAPVTERSGQKSWVHWRWQCAKFVRQTFVEWTAKTVNSSYWARLYYQGQREKGKSHQSAIRALAFKWIRIIYRCWKTRTRYDEAKYLLALEARKSPLLKP

SEQ ID NO: 337515 - protein, 445 aa, unidentified
MVTKKMYRRTSVKKISFDALKEIALLKGSAGTCVGLDISKAEIVAVVRWADGAFECPWSIKNPTEIGELVRLLQMLREVCDSLTVGLESTGTYGESVRAAMTVANLEVHRISGKAASDYKEIFDGVPSQHDGKDAAMIAELTSFGKGTPWPYAALSEIDQEIMHLVRRLDVFHQQATQWCGRLEGMLAKHWPEVTSLLDLNSATLNRIVLHYGSPSRVAADPAAKEMLRSWGRGLLVTDKIDRIIESAQTTVGIPLGGHEIAWLQEIASEQKRSILEVNASKKRLEEVAQSHAGMRPHVDKVGAVTLCIIWSLVGDPSMYDSSGAFLKSLGLNLKESSSGKRQGELAITKRGPSLVRKYLYYWALRAIQTPELKRWYSDFQRVGRNSCNGSEHRKIKGLVALMRKLSRSLWYAHTREEAFDYAKVFPGRPLEKRRRQRRERAVTN

SEQ ID NO: 337516 - protein, 342 aa, unidentified
MQIAVLGIDLGKNSCSVVGLDASGRVVLRRRLHRDGVIRLAAGLPRCVVAMEACCGAHHLGRRLRDQGHQVRLMSPEYVRPYVKAQKNDDRDAEAIAEAATRPTMRFVELKSETQLDMQSLHRARDRLVGERTALINQLRAVLLERGVIVPQGRRKLELHLETLLAAEQVSLSPRTRRLIEDLRAEWRELDRRIQAFDEEFALQARTDEAARLLMTIPGIGPLNATALVAAIGKAETFGRGRDLAAWLGLVPKQMTTGGKPKLLGISKRGNKYLRKMLIHGARAALPTLSKSETPLGGWLRGLLARAHVNTVVVAFAAKLARTICAVLRSGQKFEMKAAAVS

SEQ ID NO: 337517 - protein, 403 aa, unidentified
MTDRYYLFPFYLLEFEQNVRNYVCHDIQDIQPGEKTKGGSSLYIKLKMMKKILKEVLGVDVAQNELVVTAGRMLDDLSIDLYAHKVFKNNESGFLALLDWTKKLSSDEFKVRFVMEATGVYHQKFAFYLYDRGREVTIVLPNKISNYIRTLEDKTITDKSCSAAIAQFGLERNLDQWHRPKKVFHVLQQLTRERDQIVSERVTVKNQIHAEKSEVEPNERSLQRLYERIKLLNRQEKEIKADLKMLVNGDANLTGEIKRICSITGIGELTAIIVLAETNGFELIRNKKQLTGYAGLNVKEKQSGTSVKGKPRISKKGNRHLRKAMYLPALVAVRHDKNFTEIYLRIVSKHGIKMKALVAVQRKLLEMIYVIYNSKQEYQKEYSVLKESSALNLKDQHATLASS

SEQ ID NO: 337518 - protein, 433 aa, unidentified
MKVMHERVAGIDVHKDMIKVAIRSPGEKPWTRRTEILTFRTFYGVLQAAARELRRRGVTHVVMEASGVYTEPVYYALREEDFTEVAVVNPAHAKALKGHRTDAEDCARLAELSGCGLLQGSYIPALELKELRDLTRYRAKTVQARTPEIQRLGKALEPAGIKLGPVASGITGKGPAAMIGALTGGERRGAVMADLAIGRMRAAGKLADLSMALEGRFTEHHALLCRLTRDRITVLDAAVADLEARITARAASWQRETGLLKTIPGISDAVAWTWIAEIGPAPHQWFGSHEKLASWASLAPGNYISAGKRRHGRTGDAGTYIKPVLVQAAWAAIRVKGRLQARCNRLVRRMGGPKNPAAKKKAIVAIAHTLLKIAYAVLKTGTPYQDPGADFYTRRESPGHRQAWLERQLQALHPGRTVTITISPPADAPALPP

SEQ ID NO: 337519 - protein, 375 aa, unidentified
MSDLSEAFVGLDTSKLRNSVAIAEGGRNGEVRFVGEIDNTPAAIGKLVKKLAAKYERVTFCYEAGPTGYGIYRQITAVGHECIVAAPSLIPKKPGDRVKTNRRDAVSLAKLLRAGELTAVWVPDRRHEAMRELTRARDSAMMDLRRKRQQISAFLLRHGMHYPAEKKTWTKAHVDWLARQKFELAEHRIVFEEMMLAVREAQDRLRRLEDAIRVAVPEWSLAKAVTAMMAMRGMDLVAAATFLAEMGDLSRFQSPRELMAYLGLVPSEQSTGDSIRRGPITKTGNRRARRMLVECSWSYRHPPRVGRDKLEKVAAAPPAVREIAWKAQNRLHNRYRSLIRKGKLKTVANTAVAREFTGFLWAVHREITSAGVVSR

SEQ ID NO: 337520 - protein, 343 aa, unidentified
MQTITTIGLDIAKSVFQVHGVDNDGKVVIRRQLKRRYVLAFFEKLQPCLVGIEACASSHHWSRELQALGHTVRLMPPAYVKPYVKRQKNDAADAEAICEAVTRTNMRFVPVKTPEQQSGLMLHRTRHLFIRQQTSVINAIRAHLAEFGVTAAVGRKGIEELLRVIADPSDKRVPDVVRACLAALGSQLLSLKKQILDFDRMIMAWHRSNQTSKRLNCIPGVGPLLATALVASVADPKTFRSGRNFSAWIGLVPKQHSSGGRDRLGSISKQGDRYLRSLFVAGALAVIRHAKIHGTKYRPWVAALLARRPTKVAAIALANKLARMAWAMMARGERYNYPASLRV

SEQ ID NO: 337521 - protein, 325 aa, unidentified
MEESTKVHVGLDVHKDSITIGAAEPGRAPARVIGKTAHDVNKLLKVLVKLGRPEQLHIVYEAGPTGYGLQRALQARGYLCEVIAPSQMPRRPGDRVKTDGRDCVQLAECSRAGQLRAVWVPDPADEAIRDLSRAREDAVNSRTKVRQQLKGFLLRHGVRYTGKTSWTKAFYRWLATLSFGAGASQTAFTEYWLAVQAADDRVQRLTQALQPSIAGWRFEPVVAALQALRGIDVISAIGLVAEIGDLNRFDHPRKLMGYLGLVPSERSSGERVSRGSITKTGNTHARRLLTERRGTIASRHVSGARPSDARSRCPSRSEAWAGRRS

SEQ ID NO: 337522 - protein, 386 aa, unidentified
MKTVAGLDVHKDSVYLCILRENGEKIERVYGVLTPQLDSMRDFMAENEVSEVAMESTSVYWIPIWRVLVDSFELKLVNPYFIKQLPGRKSDVKDAQWIAECVMKELIRGSFIPPPLIQQLRLYDRRIFELNAELVRKYSKIDAILQRCNIRLSNYVSNTDCKSYKNVVKRISEGVTSPQELLMLVHKRIINKHGEDTILAALTGVVSEAEIDMLAQYVAESALLEDNKNKCIEKMREICNREFEEQMKNLQTIPGVSERSALTVLAEIGPDVNAFPSAKHLVSWCGFNPRNDESNKKIKSNKITHGNRFIRIASVQCAWAASRTKDCYFSKFYAFHTQVRKKFKLKVVVAVARKILVCIWHILKFNVSYKDFEPQKSVAKDSTQLA

SEQ ID NO: 337523 - protein, 339 aa, unidentified
MKKTDRPTYLGIDVSKGSLDCCLYNGTEHKTRNFNTNKLSTVQKIITHFKISPDSCRVVLEATGVYHSAAFVGFVSQGFDVAVENPLRIHSFATMKNLLRTKTDPVDAKTIAEYGFINKPVSTKPKEAYQCKVVARLKLIGFFKKLIAQNRNYIEALNNNSFECNATSLITHVKNEINHLNVTINEIKSDIEKILTKHCPELYKQYKSIPGIGPTVAGAIICFYGDFSGFSNSKKAAAFAGLCPKVCKSGSSVDKKGSISKKGNSMLRTLFYMAALSAARCNDTCQEVYLRLRQAGKPAKVALIAVANKLLRQAMALARKGESFIENYKEISPCAAKTT

SEQ ID NO: 337524 - protein, 350 aa, unidentified
MNDTITIGMDLGDRNHLVVVLDVDGEQVHCETVVNTKVAIQRFFQPYEGATVAIEAGTHSPWISRLLEELGCQVYVGNPHKLRVIWDSTDKSDERDARMLAMIARLEPKLLWPIRHRNANAHNDLEVIKARDMLVQSRTKLINHVRSAVKGCGERLPKCSAASFAKRVVDLLPAALGPALMPLMEMIAQMSERIHALDKRIDTLAAERYPETRWLNQVPGVGPVTSLSYVLTIEDPERFAKSRMIGAYLGLTPRRDQSGAIDKQLRITKAGNVYLRKLLVSCAQYIIGPLGPDSDLKRYGLAIAARGGKNARKRAVVAVARKLSVLLHRLWVSEQAYVPLHARQAVKKAA

SEQ ID NO: 337525 - protein, 457 aa, unidentified
MNRKTTKSKIDRTMPMVHPNAAAIDVGATMHMAAVSADRTPEPVRSFGTFTTDLHRLVNWLKECGVETVVMESTSVYWIPIFEILDARGFTVFLVNARDAKHVPGRKTDVSDAQWLQRLHSYGLLRASFRPKGQIAELRAYVRQRERLLEYAASHIQHMQKALTEMNLQLHHVVADITGATGLRIIRAILAGEHDPKELAHLRDYRCHASAETIEKALTGSYRAEHLFALEQALALFDAYHEKVSACDVRIEAVLKELSTGRGRGSGLLPSSRRRTDQTNAMAFDVRAALFALLGKDLTQIDGLGPYLSLKLIAECGDDLSAWPSAKHFTSWLCLAPSNKISGGKVLSSRTRRSGSRAAALLRLAAATVGRTDTALGAFYRRLSARIGKAKAVTATARKIAVLFYNAVQHGMEYVDPGASVYETRYRARVVDNLHRRAKAFGFVLQPAEPKPSVAVS

SEQ ID NO: 337526 - protein, 385 aa, unidentified
MTIRVQVSKFIPRDYDVFAGLDVDKKSMSVVFADHADWQRALRMANSATPLLNYVRKHFAGQRVAFAYEAGPTGFGLHDELVQQAYTCVVVAPSKIPRVPGDRVKTNRRDSRKLAENLRGGQLQSIHVPTRAYRDLRHLVQLRDTHVRQLSASKLRIKALLLFEGIPFPDPAERWTARAMRDLQTLPGSETVRFKLDDLLHTLHFHFQAAARATKQIRQYCLSDPELQQSISVLLSLPGIGWIVASHLVARLGDPQQIKNGKQIAGFLGIVSSEHSTGDKENRGEITRSGDSRLRNKLIQSAWTAIKKDPELRDFYRRIYQRHPKKVAARKAIVAVARKLTTRIYVVLKEQRPYLIRPDSSIAPLTAEETVGPRDRLDAAQNDQP

SEQ ID NO: 337527 - protein, 400 aa, unidentified
MDKDRIVAGLDVHKDTIYLCVMDNTEAVIFAKVYGTLTPDLELMCSEMVSHGVTEAAMESTSTYWVPVWNALCESMSLKLVNPYFIKQLPGRKSDVKDAQWIAECLLKNLIRGSFVPDKRVQDMRKYNRRIFDLNEDLTYNSNKQDAALQRCGFRLSNYVSRVNGKSYQKCVRAIITGITDPEELVKLIHGKTLRKYGRNIIKDAVTGDFHQADICLLKQYAELIEVIERQIEECRNALIAMCQEHFPKQFKRLQSIPGVKERAASAIIAETGADMKPFEKATNLVGWCGLKPRNDISNNKVKSNRTTHGNRFLRQILIEISWVASRTRNCFFSNFSYVQCTQRHKNKMKIQVAIARKLLVAVWHMLTKDEDFIDVYLKRLEKQAEWQNDIQALESLLVG

SEQ ID NO: 337528 - protein, 387 aa, unidentified
MMARPENNLPAATHDGAARCLLAIEMSKQSWVIAANTPLSDKISRHTLKSRSLKELLDLIERLQSRIARASGQTVEVISCYEASYDGFWLHRSLEEHGVRNHVIDPASLQVDRRARGAKTDRIDAQRLLRSLMAYLRGEPKVWSVVRVPSIAEEDARRLHRERDRLIAERVQHVNRIKGLCALHGIYDYEPMRPNRLARVKDLRSAQGGELPARLKAEIGRQLQRLELVLEMIVSLEAERDAIVTDTAPGQLNADKIGRLNKLRALGPETSTVLVGEVFYRSFNNRRQVGSYVGFPPSPFASGPMVREQGISKAGNAKARKTMIELAWLWLRYQPDSALSIWFRERVGTMKGRIRRITIVAVARKLLVALWRYLETGLIPQGALLKP

SEQ ID NO: 337529 - protein, 346 aa, unidentified
MNIKRIGIDLAKQVFQLHGVDSHEQIVLRKRLKREQMHRFFKELPPCLIGMEACGGSHYWARVLMGYGHTVKLMACQFVKPYVKGGKNDANDAEAICEAVSRPGMRFVTIKTEEQQAMQADHRIRSRLVKVRTALGNEIRGLLAEFGIVLPAGIRQVRQAMPILLEDEEQKLPASIKSLLAELAHELRQTDDRVEQHDKRIQAAVKEDERIQRLLEIEGIGPITASALVAAVGDATQFANGRNMAAWLGLVPSQHSSGGKERLGHISKRGDTYLRTLLIHGARAALNTSAGKEDRRSRWAQALATRRNRNIATVALANKNARIAWAVLSRQEMYRSAIINDGTVRQ

SEQ ID NO: 337530 - protein, 354 aa, unidentified
MKRRTKYVGLDVHQAMTVASVREEGGRVVARTVVATEEAALVEYFSGMRGAVHVAFEEGTQAQWLHDLLMPVVDRVVVCDRRGESRRGNKGDQVDADQLSELLRRGGLRAVYHGSADRATLKEFTRTYQNVVEDTTRAMLRLKALFRARGIKTPGKGVYHPKQRAQWLAKLPERGARFRAEALYAQLDVLRELRPKAKAAMVAEARRDPAWSVLRSIPFLGPVRVALLMATMRTPWRFRSKRNLWGYCGLAVVTSSTSDFTLVEGRPVRRRRKPLTRGLNRNHNPVLKDVFKGAATAATGRPGPLQEFYHAMIARGMEPELARVTLTRKLAAVTLRLWKTGERYDPTMLTVQAR

SEQ ID NO: 337531 - protein, 369 aa, unidentified
MGEYSEAFVGIDTAKGRNAIAIADGNRGGEVRYLGEVDASPASMARIVRRLVDKYGRVQFCYEAGPTGYGLYRLITALGHECTVVAPSLIPRRPGERVKTNRRDAVALAKLFRAGELTAVWVPDEGHEAMRDLVRARSAAVETLRVHKQQVSAFMLKHGRHYPRKKAWSMRYLRWLQEQQFDHPAHQIVLQEMLEAVRLAKERVERLEQTIEEFLPAWSLAPIVHALRALRGVDLIVAATFVSEVGDVGRFDNPRQLMGYLGLVPSERSSGDTVRRGGITKAGNRRVRHLLVESAWTYRHPPKIGKQKLYVLEKVPPRVREIAWQAQTRLTARYRALAGRGKRTTVVCTAVARELVGFMWSVAKEARLA

SEQ ID NO: 337532 - protein, 346 aa, unidentified
MTTVDVTRPVTGGVDTHLDVNVAAALDPLGGLLGVAEFPTTPAGHRSLAEFLASFGTLTRVGVEGTGSYGAGLSRYLRGSGVEVVEVDRPNRQSRRRTGKSDPVDAIEAARAALSGRAQGAGKSRDGNVEAIRALVVAKRSGGSTKIQTLNQIRHLGFTAPEELRARLKGISRQHLGAEAAALRPRAGGDPVVFATKTALSLLGHRVLVLDAERERLNLLLGELVEKTAPQLLEIHGVGVDTAATLLVTAGDNPGRIRSEAAWARLCGVAPIPASSGKVSRVRLDRGGDRQANSALWRVVITRLRSDPRTQAYMERRLKEGRSKPEVIRVLKRYVAREVYQRLPRA

SEQ ID NO: 337533 - protein, 416 aa, unidentified
MYYVGIDWADENHQVFITDDSAQRLGAFSIKNSRSGVEELFERIRYFVKDQKQALFALETSKGLLIDSILDAGYTVYPINPKSVDRYRDRYKVSGHKSDDFDAMVLANILRTDRHNYRPILPDSPITRELKILTRECCSLIRLKTMLSNQLTSCLKDYYPVALELFCKLDQPITLLFLKNFPTYQQAKQVSLPQWGKFLSKHHYRVGVKKKAHEIYLKLQEPQFNVEPFVDNAKARYTLALVEQLQLLLSQIKSFENKIEQLLKQHTDSEIFLSLPGAGITLAARMVSEFGDNRERYKKVSSVQAEAGTAPITESSGNWKFVHFRSACRKSFRNTMHQFAFCSIKESPWAKQRYQQYVASGKKHTQSIRCLANAWLEIIFPMWKNYMPYSEQRHLLKYVKEQKPVNYSRNLNYLSV

SEQ ID NO: 337534 - protein, 311 aa, unidentified
MNNTIGIDISKDTLDAHRLAYGQHKQFLNGKTGHAQLVKWIGKQSDPLIIFEATGAYHRQLERVLCTHIIPFVKVNPKQARRFAQASGKLAKTDRVDCEMLAKMGAALQLMPKPFTAENLYDLKELLSARRALIKDRTAAKARKATVINALIKQQLEKRLRQIKNDVAKIDALMLDVAREDQYMSERLDILFSIPGIGVITALMILVDMPEIGALNNKQVASLAGLAPMSQSSGKWMGKARIQGGRPNLRNAIFMPALVAIRHNADLKTKYDQLVTAGKEKKVAITAVMRKLLVLANALLRDNRKWAEKAA

SEQ ID NO: 337535 - protein, 364 aa, unidentified
MTDIEQHDSVQVFVGVDVGKGAHHAVALDRKGKRLLDSALPNDEAKLRALIGKLKIHGQVLLVVDQPATVGALPVAVARAERVLVAYLPGLAMRRIADLHAGEAKTDARDAYIIAEAARSLPHTLRSLKLADSQLAELTMLCGFDEDLAGQITQVSNRIRGLLTQIHPALERVVGSHLDHPAMLDLLERYPSPAILAKLTQKQLANRLVKLAPRMGKTWAAEILQALSEQTVVVLGTQAASIVLPRLAQQLAALRIQRDEVAKEVERLVLAHPLHPVLTSMPGVGVRTAARLLIDVASRAFASADHLAAYAGLAPVTRRSGSSIRGVAVQTRQQTAQTGDVPVGLRRSARSGLQGLLHPQNQSG

SEQ ID NO: 337536 - protein, 348 aa, unidentified
MDKITVVGLDLAKQIIQVHAIDGLGRVVLRKAVRRERLLALLTQFPRCVVGMEACSGAHHWARAFKQLGHEPRLMAAEFVRPFRKSLAAKNDANDAEAICTAVVQPNMRFVSIKSVEQQALLSLHRVRQGLIEERTATINRLRGVLAEFGVVLPQSVAVVQRALPALLADEERLPARVQRSLQVLREHLHDLDARIAEFDRAIAQHAKSSAPAQRLVALPGIGPLTASAVVATVGNAQDYRNGRQFAAWLGLVPRQCSSGGKCKLGRITRRGDAYLRALLIQGARSTLQAALRRAPVRHDRLSAWVVQLVRRIGYHKTLVAIANKHARIIWALLARDQALNLARAATH

SEQ ID NO: 337537 - protein, 418 aa, unidentified
MKSPPNASPEIRYLAIDLHKHYTVIGGVNIQQKVILSPRRVEIDELEVWARKNLRPSDEVVLEATTNAWTAYDLIVPLVRHCVVANPLHVRWIAEARVKTDAADVLRLAKLLAANLIPEVWVPPLHVRELRSLMTYRRRVVKMQTMTKNRLHSILHSCHLTPPTGQVFAEKNREWWLALEVSPTERLRIRHDLATLEHLQGQLTDLESEIQRLSITSPWQEQAPYLIQLPGFGLLTAMTVLAAIGDITRFPSAKELVGYAGLGAGVHDSGETHRDKGITKQGRRDLRKVLVEAAWVAVNSHPYWKAQFERLERRKPKNQAIVAIARKLLVAVWHVLTERTTDKNAVPEMVAFKLMVWSWKLSDQERGGLTSRQFIRYHLMRLKLGEDLPYLITGKDTKRAIASPGEVLALRPELASAD

SEQ ID NO: 337538 - protein, 327 aa, unidentified
MTDTQTIHKTIIAFDVAKQKLDICTDDRLKVPKIVNNTVSAIRKILAAAQRKVRQQSLPELLVIVESTGTYERKVLDLCVALEIRCHRAHSNNVYHFARARGLLAKTDKLDAATIWAYGKTTPNLRLYVPPRPAEEKLHALMMRRDEIKNMVTAEGNRLGTVHDKDIKKSLQRIKGHLETELKRVEKQITALVESDEVLSEKFTLLRSLKGVGSWVACAALAFMPELGKLGREEAAALAGLAPYNNDSGKMRGKRRIKAGRKNFRNKLYMGAVSASTHNIILRPFGERLVAKGKCKMLALTAIMRKMVVIMNAILKSGEPWKHAKKA

SEQ ID NO: 337539 - protein, 407 aa, unidentified
MRCSGLDLHKKTVVACVIISHPNGKVDKSIRIFPTTTTGLLALCAWLESLQVRQVAMESTGIYWRPLYNLLEDRFELILANAHEIKALPGRKTDVKDCEWIAELLRHGLIRPSFIPAKGVRTVRDLMRYRKSLVYQRTQQINRLHKVLETANIKLTSVVTDVLGKSGRSMLQALMEGESDPQTLAKLARGSLRSKLPQLQEALEGRVEAHHRLLLQQIWSHLHFLEAAMEQLLLDIEGHMAPFEEVLAILRTHPGVQRLAAMSFVAEVGVDLSPFPTANHFASWIGVCPGNHASAGKRKHGHTTGGNVYLRALLAEIVWCISHTKDNYLSAQYHRLARRIGKAKAVVAVSHTVAVNFYYMITKKQPYRELGADYFDRVDRDRLTKQTVKRLEALGYEVSLTPKEVRA

SEQ ID NO: 337540 - protein, 401 aa, unidentified
MRAIDTRGREFSKSAFSFSNTLEGFQSLIDWATKIAAANDKKQIVLGLEPTGHYWFALATWMVSNGISVVQVNPYAVKQTKEVEDNSQRKDDRKDPKLIANLVKDGNFGMPYLPEKLYADIRRLSMFRDQLNEDRIRNLNRLHREMKIYFPEYKDAFGKIDGAFCLEVLKVAPFPDELVELGTDGIRQIWRDAKLRGRGYTKAASIYEIAKKSIGIKEGADVSKQAVKWFVNRILELDEQLSDIENQLNQKCMEIPHAENILAIAGIGENTLSGILAEMGDISRFDDVKEIQKLSGLGLVACSSGKHKGETKISHRGRKRLRYWLFQAAKSAVAHAEEFKELHVYYTTRKDNPLKKMQSLIVIACKILRVIYTILIKGTTYDPKKMLGDIVRSDRQKVQAA

SEQ ID NO: 337541 - protein, 371 aa, unidentified
MEESSKTLYVGLDVHKESIAVAYAPEERGTEVMSLGAIGTRQCDIDKLIRKLQSKGAPLVFVYEAGPCGYWLYRYLTRQDLSCHVVAPSLIPRKPGDRVKTDRRDAVLLARLMRSGDLTSIYVPTLEDEAIRDLSRGREDAMRDLKATKYRLKAFLLRQDIRYEGRANWTAAHLRWLSEVVCPTPAQQIVFQEYVRAVTEQQERVQRLETELHEHVKTWRLYPVVEAIQALRGVELTGAVILVAELGDLTRFDTPRQLMSYLGLTPSEYSSGERRRQGGITKAGNTHARRALVEGAWAYRYPAKVSRHLQLRLEKLPAEIQAIGWKAQVRLCKRYRQLIARGKHANQVVVAIAREMAAFAWAIARLVPLAP

SEQ ID NO: 337542 - protein, 350 aa, unidentified
MEIHTIGIDLGKTLFHLVGVDSSGAVVIRKRCSRTQLLAYTANMRVHRIGMEACSGAHFLGRALREQGHDVRLKPAQYVKPYVKTNKSDYIDAEAIAEAVQRPTMRFVPIKTEEQLDLQAVHRVRERWVMRRTAVVNQIRGLLLERGLTLPKGRSHVDHALPEILADTQSKLSNSFRVVLAQLKLELDQLSARIDEMDRVIRNVATEDEACRRLTTIPGIGPVTATALLAAIGNRTAFRKGRDLSAWVGMVPREYSTGGKQKLLGISKQGNSYLRRLFVQGARTVMQHRTKQALGLRCWLDQLLARTHQNVAIVALANKLVRTAWAVLRKNETYRCPVLLTSSCDPGVPG

SEQ ID NO: 337543 - protein, 372 aa, unidentified
MASIIYVGMDVHTTNFTFCCYTVDSDRGFAVAQTEPDYRQVIKYMERVQKQRGEECKFVCGYEAGCLGYSLYHQLTRCGVDCVILAPSTMHQEKGKRIKTDRRDAENIARCLAFSLYSPVYVSTTEDDAVKEYIRMRDDIKADLKRVKQQIIAFTTRHGFAFDGKSYWTQKHLKWLETLVFEHPLYKETLQKYLILYYMLDEKVAVYDTRIGEMSHLEHYEENVQKLCCFRGVAAHTALSLLVEVGDFQRFRSAKHFAAYLGLVPGEHSSSDKQIRTSITKAGNTHLRRLLVEAAQSYNRGAIGKKSAALKARQGGNPAEVIAYADKANERMQRKYYRITFKSRHNIAKTAIARELACFVWGMMTGNISNAA

SEQ ID NO: 337544 - protein, 289 aa, unidentified
MQVVRIGLDLAKYVFEVHGVDGQGNAVIRKTLRRGSVSTFFANLPPCLVGMEASNGAHYWARVLTELGHKVRLISPQFVAPYVKTNKNDRNDAEAICEAVGRPTMRFVPPKSPEQLAVQALHRIRQRLVRSRTKLVNQIRGILAEHGIVIARDIWRLRRALAEITENSTDSLNTLVRVLIIEGQAELLDLDRRIASCDRRIRELYRTSELCQRLGEIEGIGPVTATALVAAVGDRSCFKNGRQFAAWLGLVPKQRSSGGRNRLFGISKRGDRYLRTLMIHGARAEPLAC

SEQ ID NO: 337545 - protein, 340 aa, unidentified
MNQSKVIHSFSRGKSAQGYDHYVAIDWSLKTMAIAHMTQRSDVPGVFEEPTSLKDLKVYLGSLKGRTIVTIEESGSAHWLYLELLDYAERILICDPFKNRLLCHGPKTDKIDAGKLCELLRAGLLTEVYHSSSTLYELRALVSSYDDVVRAGVRVLNQREALKLSHRNKGKSAAFIEEVLEKNIDLYRQSKGQYERRFSTMARRSYLVKFQKDLPGIGAIGAAKIVACVVDAHRFPHVGKYLSYCGLIKHEKLSGGRSYGRRSPRCNRVLKSVYKTAALAALKGKNAIRGYYDHLLAQGLAEYEARHAVARYIARISYGMLKNGTRYEPYRWRDKTEKVA

SEQ ID NO: 337546 - protein, 443 aa, unidentified
MMRVVVKRGAGLDIHKKTVVATRMRVDEDERMVWETQTFNTTTPELLGLYDWLSDWECTHVAMESTADYWKPVFNILEGGFEVLLVNAQHVKHVPGRKTDAKDSEWLAELLIHGLLKPSFIPPRPQRELREMTRYRATLVQERARVVNRVQKLLEGMNIKLASVATDVLGASGRAMLEALVADRLRPDEMAQLARGRLRTKIPELEKALTGIVAKHQRKLLALQLAHIDFLDEQVEELNAEIRRHMEGMDQPPSSGNSQSENDSSEGALADGPLPPLSYGEALIVLDTAPGVNQNVAETVLAELGADMSRFPTPEQAAAWAGIAPGNNESGGKRYSGRIRDGNRALRLALVQAAWSAIRTKETYLKAKYERLVVRRGKKRAIIAVAHSLLKSIWYMLAYHVPYQDLGADYFDNRHKESKINYHLRQLQKLGYSAQIEPQLVTG

SEQ ID NO: 337547 - protein, 432 aa, unidentified
MHNRLQVGIDFCQKRADLCLLLPDGRPIESHVAFDNSYLGYSRAKQLLLDALDDYAFDGIDVSGEATGYLWLPFFLQLAADPELELHDLRLHLLNPRWVKWFKKCFAQDDKTDQKDPFYIAERTRTRRPDVAWSADPSILALRFYTRLRFHLVQNLAREKCYFSAFLFLKASAYRRLKPFSDVFGVTSRLVLTQQPSLDELADLPVEDLAMHLHEVSGHHLRDPLKNARKLKRVAQESFPLEQRLALPVQRILDLTLQHIRFLEAQVEQVEHWIATELQAHPSICQLVTIPGVGPVFSSGNGAEIGHTQRFLQGHKWDAKRKRYRPRNLRDAEDAVAKLAGLWWPRSSSGDFEAEDRRMAKSGNRYLRYYLIQAADKMRAHIPEYAAFYARKFREASKHHHKRALVLTARKSVGLVVGLLHRNEPYRSEGRI

SEQ ID NO: 337548 - protein, 338 aa, unidentified
MIVIGVDVHKHSLTAVAVDEAGRRLDERTVTGANDGLVAWASSLSDERLWALEDCRQLTRALERELLAAGEELVRVPPKLMAPARRAGRTRGKSDPIDALAVARAALREPRLDHPRPAEQRLRELKLLVDHRDDLIDERRRAQQRLRWHLHDLDPTLAVPLGALDRAVWLDRLGRWLARLEQTAQVRIARELVARCRSLTRTILELDRELQSAATQTAPALLALPGCGAISAAKLLGEIGPIERFPTDAQLARHAGVAPLEASSGKHRRHRLDRGGNRQLNCALHRIAVTQGRVHPPARAYLERKQAEGKSRREAIRCLKRQLARTVYATLKNEPLLT

SEQ ID NO: 337549 - protein, 361 aa, unidentified
MSESMALVGLDVHRAQSVAAVLDPVGGELRVECLRGMPCEVVPGFLEALGRPVRAVYEAGPTGFGLARVAAERGLDVRVIAPGSIPRSPGDRVKTDRRDAKRLVRLFAAGELSFAFVPSEEEERFRDLVRCIDDARKDLMRSRHRLSKFLLRRGLRFPGRAWTQPHQRWLGRLRFDDALSQAVLIDYMSAVDALLHRRRELIAVLVNAVPASAHAETIARLRCFRGIDTLSAAGLCAEVGDFERFAKPSLLSGFLGIVPSEYSSDSKRVQGAITKAGPTHARRLLVEAAHHYRRRPRVGLELAARQAGQDPRVVAVAWRAQRRLYARWTHLGADRGKPTGTVAVACARELAAFCWEAATMN

SEQ ID NO: 337550 - protein, 319 aa, unidentified
MDKVIGIDVSKATLDGCFIEVSKKESFVVKNNQKGFKKIALKAKGALVVMEASGPYYLQLSNYLYTHGIEVSVVNPLVIKRFSQMNLQRAKTDKKDAETIANYGRIYDPKRWSPNSKNTNSIRQLHSAMELLDKQIRQLKGQQEAFDNSGELVCLLRKELKSMLNFLVKKKLKLSVEVERLAEQEFGDKINKITSIPGIGKKTAIMLNVITDGFTKFEHHKQLTAYIGFSPRVYQSGTSVKGKGHICKMGNSQIRKLLYLCSWTAKFCNKACREMYERLKGKPERVIKIAIANKLLKQAFAIGKSKMNYSENHVDNICF

SEQ ID NO: 337551 - protein, 335 aa, unidentified
MNIITVGIDLAKNVFAVHGVNDSGKAALVKPKVARADLLPLIANLPPCLIGMEACSGAHHWARLFRQHGHTVKLMAPKFVAPYRMTGRRGKNDAADAAAICEAVTRPAMLFVPIKEEHQQIILSLHRTRQGFVEERTASYNRLRGLIAEFGIVLPQKVTCLRREIGAHLEDLPGYANLCVGDLLSHTADLDAKIAEYDRVIAQAARENARSKRLMKLPGIGPVTASAMLASIGNGHDFKNGRQVAAWIGLVPGQYSSGGKARLGRITKAGDNYLRSLLVMGARAVLNSIGDKQDRFSRWARSLQERRGYWRAVIAIAAKNARLAWAVLKYGEDFK

SEQ ID NO: 337552 - protein, 403 aa, unidentified
MNSVGIDISKGRSTIAVMRPFGEVVISPFEVRHTDSELSELARQLKSLDGETRVVMEATGNYHAPVAKLLHDAGLYVSVVNAKLVHGYGNNDLRRVKTDRKDAVKLANYGLDRWLTLPRYVPEEDTRLLLKNCYRQYRQYSKVQTVLKNNLISLLDTVFPNVNRLFSSPIRGDGSEKWVDFVAEFWHCRCVSEKSQKAFTNKYQRWCRKHGYNFSEAKAHTIHAEACGHIDVIPKSETTKLLVEQAVAQLRATSTALAALKHEMQSLASMLPEYPVVMDLFGVGPTLGPQLIAEIGDVRRFYSKKALVAYAGLDAPPNDSGDVTGRHKSMSKIGASSLRRTLFLVMSVYLQTAPLDEPVYQFMDRKRAEGKPYRVYMMASANKFLRIYYATVKAYLESLEHTA

SEQ ID NO: 337553 - protein, 505 aa, unidentified
MGYPVWKSAFNEAQRPSGIGNEPANAFIHPMKPKKSQSSLSQTIRPAAKMPVIHPHAAGIDVGSVEHFVCVPPDSVPEGEPSVRSFGGFSGELDKLVEWLQSCGVKTAAMESTGVYWIPLAQKLETAGIEVVLVNARHLRQVPGRKTDVKDCQWLQQLHSYGLLQGSFRPAQDICCVRSLMRHRQNLTQSCGQQVQHMQKALQQMNVHLHHVVSDLDGETGLRILDAILAGERDAGKLVLLRDALCRKSTPEEMVAALQGDWRSEHLLVLRQALETYRHLLAQMSVCDGEVQAALAQIILPVVEEPAEPAPPNPPASPEPRKKKRFHQRKAGTGLRRDVSAELARICGVDLTQVTGLNALGVMIILSEIGLDMSRWRDSKAFSSWLGLCPGNKISGGKVLSSRTPHVVNRVAILLRTVAPSVGRSETWLGSFHRRMRARLGPAAANTATAHKLATLIYHLLKYKEEYIDVDRLLYEEKLRGKRLARLRKQADELGFEMVQKTQAA

SEQ ID NO: 337554 - protein, 392 aa, unidentified
MIFVGIDVAKDKHDCFIISSEGEVLADVFTITNSKEGFEHLLQTINTCTGIGGSKIKVGLEATGHYSYNILGFLLDNGLPTYVINPLHTNLYRKCQTLRKTKTDRVDARTIASMLMSDVSLKPYTNIAYHNSELKSLTRYRFDKVKERAALKSSVTRLVNILFPELEKLLPTLHTASSYALLSELPSAKHIAEVHLTHLTNLLYTASKGRYDRDKAVQIREAARNSIGTYMPAKALELKHTIKLIKEFNNEISEIESAIQSIMDKIDSPITTIPGISLRMGAMIIAEIGDFNNFDSPDKILAFAGLSPSTYQSGQLNNCYAHMEKRGSRYLRYALFNATKFVCNWNPLFADYLAKKRAEGKHYNVAISHAAKKLVRIIFALQKSGQPYIAKT

SEQ ID NO: 337555 - protein, 340 aa, unidentified
MTVIIGIDPHKASHTAVAIGCDERQLAEIRVRATCQQTTRLLAWAKPLGERTWAVESAGGLGYLLSQQLVGAGEQVLDVPATLASRVRVLGTGRSNKNDPNDALSVAIAALRSPGLRSVEPANHREVLRLLAKRNHEIGRLRNMVISRLHAALANLSPGGISKELNASDAVRLLGAFDPVTPVEQTRYDLALELLDDVRRLDVQLKESHKRIKTAVRASGTSLTELYGVGPILACELIGYTGDVCRFTTRDQFASYAGVAPIELSSGGRIVHRLSRRGNRQLNHAIHMVAICQIRQTNSEGRVYFDRKVAEGKTKREAIRSLKRHVSNAVYRQLRLDAQK

SEQ ID NO: 337556 - protein, 392 aa, unidentified
MDVLHSRCCGLDVHKSSISACVLLREAGRVQKHQRRFGAMTQELQELAEWLRQFGVTQVAMESSGVYWKPVWNILEGQFTVVLANAQHIKNVPGRKTDQKDAEWIAQLLQYGLLRASYIPCEIIRDLRDLTRMRASLSQEASRISSRIQKVLEDANVKLASVATNVLGKSGRAMLEDIITGEDDPEHLASLALGHLRVKIPQLRLALQGKIRSHHRFLLRRLLDQIQFLEHEIALLDERLEDIGRQRPDLAQAVARWDTIPGIADHLASWAALCPGNHESAGKRLRGTTRQGSTWLCRMACQCAWAAARTKNTYLSSQFRRLAARRGKKRAIIAVAHTLIVIGYHLQKNQSNYEDLGGDYFDRIHSDGLKRYLVKRLQQLGHKVTLEPMEAA

SEQ ID NO: 337557 - protein, 401 aa, unidentified
MHAVIGIDVSKATSQVAVAVDGNVVRNFKITHDVFGFNQLNSVIMQFNTFPDIVFEATGVYSRRLKTFLEAHNYPYTYLNPLTAKKQLDQLRPNKNDLNDAKHLAETQFILKRAKSYVQNPIYIELQDMSRFYQQLNHDIVSAKNRLHRLLQLTFPEIETLFSTTDSQQYWEIVSLIPHATMAKHSRQTLSDTIQSSVSRQIGVARLTRLVDKLVALGSLSAPAVAVASYNVTEVRYYAQRLIALSQSKANVLATMVDQTKDLPEYDIYQSIPGFSDKTVVSLIAELGDLHRFATSNKLNAFVGIDLRFNDSGDYKSSGFITKRGNTIARKVLFKAISNIASTATYGHQNHINDWYQKKKQSSMSKGTKKIAIGAMSRLLRTMHYLVLNNQLYDYDTASKR

SEQ ID NO: 337558 - protein, 316 aa, unidentified
MTSSPLFVGIDVAKAALEMALRPSDQLWQVLYDDAHVEALVAQLSELSPTLIVVEATGGLERTLVAALVAARLPVVVINPRLARDFAKATGRLAKTDRIDAQVLAHYGEAIRPSLRPLPDADTQQLRALVDRRRQLMDMMSAEQSRLNTSPARICDSIAYHLTWLRQQVASLDDDLDGMLKASPLWLERDAILQSTPGVGPILSRTLMSQLPELGNLNRKEIAALVGVAPFNRDSGTWRGRRTIWGGRATVRAVLYMSTLVATRYNPVIREFYESLLAVGKVKKVALIACMRKLLTILNAMIKNQQRWKLRVAKSM

SEQ ID NO: 337559 - protein, 364 aa, unidentified
MDNFTHIGMDVHKDTITVAVLRPGTTDCDERTIANTPEAIRRLISRHDDRSFLRACYEAGPTGYDTHRLLATLGVACDVVAAALVPRRPGVRVKTDRLDARNLARLHRAGELTAIRVPTPAEEAARDLVRAREDLKADRRLAQQRIRSFLLRHGRHYPGRGGSWTRPFVQWLSVQDFGETAANAAWRHLLAAYSVRASQLVSLDAEIAAVAAEPPLAEAVARLRCFRGIDTLTAATLATETCDFRRFPRAASFMAFAGLVPSERSSGATSRHGGITKTGNAHIRRVLVEASWSYRYRPAVGKLLAGRLEGQPPEVAAYSWAAQCRLNATYRKLASVKSPNKAVVAVARELSGFVWGLMTDQIAV

SEQ ID NO: 337560 - protein, 408 aa, unidentified
MDLLHARCAGLDVHKDLIVGCIRVQEGRQATTTLMRFGATTRELLKLSEWLHAAGCTHVAMEATGVYWKPVWHILEDSFALVLANAGHIKGVPGRKSDVNDAAWIADLLAHGLIRGSMVPPQPVQEIRELTRERLGFVREVTRHTQRVQKVLEDCNVKLSSVLSDTMGLTGRKILRAIVKGQKDPERLADLAHGGVKASREELVESLRGRYTPHNRFLLEQHLKAIEDSEKIISVIERRIGKAIEPFRDAIERLSTIPGVSKTAAASIVGEIGVDMGRFETDDHLVSWACLCPRMEESAGKRRSTRIRKGANYLEPLLLQGAWAAIRTKGSYLRAKYYRLKSRRGSKKAAIAIAASILRAVYIVLRDGVNYRELGADYFIPKDRLKVAKRLAARIQELGFNVQLQAVA

SEQ ID NO: 337561 - protein, 401 aa, unidentified
MISIGIDVAKGKSTVCILKPYGEIVSKPFDISHVEKDLGELAAMLLRFDDEVKVVMEATGIYHLPVLTYLQEKGLFVAVINPYLMKVYRSGDLRKAKTDKIDSRIIANYGIEHWFTMAEFKASDDVYGELKILGQQYRHYMKLHIMSLHELTHLLDYTMPGIKGMLASWNEGNRKDKLSDFVERFWHYDTITCLSETEFIKQYASWAKEKKYHQSQDKAQAIYALAREGIPTVSSETPSVKMLVTEAVRVLKEVDATLSIILSRMQELAKSLPEYSVVRGMGGVGEVLAPKLIAEIGDVRRFHSGKALIAYAGIDTPPYESGQFVGSNRKITKRGSAALRKVGYETMRCIKTHPRPDDPVYQYIVKKEAEGKAKKAAKIAGLNKFLRIYYARVKEVYTDIK

SEQ ID NO: 337562 - protein, 340 aa, unidentified
MTIVMGLDQHRAQITAEWIDTDTGEISRTRVAPADRVAVRRFLERFAGRQLEVALEATTGWRFVVEELRAVGAKVHLAEPAQTSALRGPKKHAKSDRADARHLRELLLTGRLPECWIPPDHILDLRGQVRLRHSLVDERGEWQQRIRAVLYHHGLPRRSDLDLLTAAGRDWLTELSLSPAAREQITVGLQMIGALDTEIPAIDKQLRAYARRQPGCRALMGHYGIGELTSVAILAELGDCRRFTSSRYAVRYGGLDITVHASDRRRAPGHLSRQGPPVLRWALYEAAQAATRPSSPDHAYYRQAAQRLGHNRACLAIARNLLKRSYHTLKDLGEEALAPA

SEQ ID NO: 337563 - protein, 430 aa, unidentified
MNSNTQNAKIEAITETTLVIGIDVGSETHYARAFDHRGFEYSKKPFKFSNDEAGFETFKAWILDIKEKHEKDKVVPGMEPTGHYWFNLGKFLQDNDMKPVLVNPHHVKKSKELDDNNPTKNDRKDPKVIAGLVKEGRYMIPYLPDGVYADLRTASNIRFQLQSELTRIKNRISRWFNIYFPEYKTVYGKPESISGMLILKQAPLPKDILTLGVEGVNRIWRDAKLRAVGIKRAKTLIEAAERSVGSKEGATSARMEIRMLLEDYETRNTRLQEVMTLIEELVAKIPMAEKLLAIKGVGIKTVSGFLAEVGDISRFSNPKELQKLAGLALVENSSGKHKGETTISRRGRKRLRYLLFEVAISLVSKNPEFASLHHYYTRRKLNPLKKMQSLMAVAAKLIRVFYAMLRKGVDYDPTKMLSDIKRPTVYLQAA

SEQ ID NO: 337564 - protein, 401 aa, unidentified
MEGPVISIDVSNGCSHFRCFIDRNKAFGKVHKIKHDVDGFQYLLDCMERLNEKTDEEACVVYEATGVYTKPLIRFLNKHKIKHYMVNPLQAAKMRKTDLHSKKTDKNDPNSIAKVYYDKDLYEYEDEKQIYHALRVMNRNYEDQLNHLRKYKVTFQNLLSIVFPGYDSLFKNPYCDIALAILKKYPHPDMIKNKKPETVAKYLEKHTCHKKKACLKWATKVIEYANRTYPGCEKDEIEVIELLRIIKEVEGCIASCDTQLNAMIQLAEQLPNYFLILSIDGIGPNLACRILAEIGDIKRFNNTKQLISYAGIDPHISQSGDVDGLHLSISKKGNKRLRCLLYLAVSCNLRHKNENDPIQQFYKKKKQQSVPLKPKAARVACTNKLLRIIYSMCNNGCFYLN

SEQ ID NO: 337565 - protein, 281 aa, unidentified
MKMKHFSTKSSDQKCGGVDVGKIFLDAAVEGGAALRRPNTPEGRADLVAFFHEHGVARVGLEASGGYEIEIFDALGAAGFEAVLVQPAQVRAFARAMNQRAKTDRIDAALIAAFTSVMKTPVRQSDPRLASLAERLTRLEQIEKDLAQMRTRRDRFRDEEMIADLEEEIARLKKRQREMVAHLQRLVRAHADLARRFELLVSIPGLGARTALSLVIRMPELGSLSREAAASLAGMAPVTRESGRWRGQAHVGGGRKRVGRAVFAAAQAAWPKVDAQVIAGS

SEQ ID NO: 337566 - protein, 455 aa, unidentified
MTKQKSQPRMKAPVNALEQINPHAAGIDVGSEEVYVAVPPDRDVESVRSFPTFTADMRQLAEWLKACRVATVAMEATGVYWIPLYELLEEHGFEVCLVNARHLKNVSGRKTDVLDCQWIQQLHTYGLLRASFRPPEEIVAIRSLVRHREMLVQYRSAHIQHMQKALTLMNLRLTNVLSDITGVTGLTIIRAILAGERNPQRLAAMRQAGCKKSEAEIAKSLEGHYKREHLFALKQALELYDFYDRQLKACDAELEAMYSEFDPPEDPGTPPPAPRTRKRRKNQAHFDLAPALYRLTGVDLTQIDGVDELTAQKVLSEIGTDMSKWPTVKHFTSWLRLCPNNKITGGKIIQTGVQPTKNRASAALRIAAASLKNNDSALGAYYRRMRARLGTPAAITATAHKLARIIYFMLKEGKPYHDFGADHYEQQYRARILRNLTRRAAKFGFRLEPAALEVS

SEQ ID NO: 337567 - protein, 341 aa, unidentified
MMIIGCDFHPRFQQIAFVDQETGEYGERRLNHPQEAEQFYRSLAGVKVRIGAEATGNFRWFRHLMEELGHEFLLGDATAIRAACPRRQKTDKRDARHILTMLVEDRFPVVWQPSVENDHLRQLLLHRCRMVRMRTRIKNQLDSMAKNEGVLSSRVWSPKRRSEIEALPLPGWYAHRRADLLGLLDELDKRVRPLDQAVREAAEGNREACLLMTHPGVGPIVSLAYVLTIGDWRRFPRGKQVGSYLGLIPAEESSGNTRRLGQVSKQGSVLVRWLLVEAAVHAQRHDPSWHRQYVRLSMNKHHGVAKVAIAHKLAVRLYWMLRSGDDYSKVKERGSHAGQSV

SEQ ID NO: 337568 - protein, 337 aa, unidentified
MIWVGLDLHKRYVTACALDDTGVVVAEHRRLPTDPEVLLAWLRELGGPVMVAMEATLYWAWLHDRLSEAGIAAVAAHPYQVKLIWQARCKTDPIDARKLADLARANLLPTIWVPTPAVRAQRTLLRGRAYLVRMRTGVKNRIHGLLTAENHHIEVSDLYGRAGRAWLHTVPLSPMARVQVDLLLDMVDVLDQRVVRLDKRVQRVVKDEPAAQLLQTWPGIGTFGAALLLAEIGTIDRFTTSHQLAAYAGLIPSTQSSGGKTTHGGVGRAGNPWLKWILIEIVQSLKLAPGPIGHHYSEAAARQGEGEGDRRRSAQAVLLLVLVSEGGLELRAVAPAT

SEQ ID NO: 337569 - protein, 413 aa, unidentified
MEVVEDRCAFLDVHRDTVMACARLPDPGGGGRLEEVAEFGTTTSQLLVLLDWLVERDVSLVGMEATGIYWKPVHWVLEDQIDRVWVINARHMRNVPGRKTDVADAQWGAQLLEHGLVRPSFIPERPVREMRDLTRYRKSVIEERGRETQRLHKVLEDAGIKLASFTSSVLTKSGRQMIDALIAGQRDPEVLAEMAKGRMRVKIPQLQDALTGCFNAHHARLCATMLDRIDHADRVIDELTEQIEVLLDPHEAAVHLLCGIPGVSNRTAQVILAEIGTDMSRFPTAGHLASWAGMCPGNNESAGKHRSGRTRHGSKWLRIALVEAGQAAGRSKNTYLSAHYHRIRGRRGPRRAAVAVGHSILVIAWHLLSTGELYNELGGDYFDRRRTSHARQRRLVAQLEAMGLDVTITPAAA

SEQ ID NO: 337570 - protein, 348 aa, unidentified
MAVYIGVDFHARQQTISYLTSEEGEIRQLQLDHGQPAAVRKFYEQFAGQRVIVGFEASGYAAWFEELLEELGCEIWIGHATAIRTYARRRQKNDRRDADLILDLLVRGDFPRIHRHSAASRVVLQQLRYRQRLVKLRTMIVNQLVFMAASRGVSFRTQLKSERGVRRLKELSLPAPLSEQRDELCHLLLELKAKIATVEQWLAAQAERDQRVQRLRTHHGIGPLTGLCLVSTLEPVERFANARKLTAYIGFDPVEDSSGDRQRIGSISKQGSRLLRFYLVEAGQVAIRKDADLARAYKRLLLRRGHAKAKVAIARRLLIRAFIMLRDEIDYAEFLRRGVAARSSRATA

SEQ ID NO: 337571 - protein, 316 aa, unidentified
MTGSEVFVGIDVSKARLDVAVGYAGELLGIGHDARGIVELAGRLQKLAPALVVLEASVGLETALVGELAAAGLPVAVVNPRQVREFTRCTGQLAKTDALDARALALFAERIKPPVRELPDEQTRQLQALVTRRRELVEMLTAERNRLASVPAVLHREIRAHVRWLQARLKQRDHDLDQMLRNSPLWREREDLLSSVPGVGPVLCATLIAGLPELGRLNRREIAALVGVAPYPHDSGKQRGRRTVWGGRAHLRATLYMATLAGVRYNPALRSLYCRLLERGKAKKLALVACMRKLITILNAMLKHRTHWSAPCPNPA

SEQ ID NO: 337572 - protein, 379 aa, unidentified
MKKDIRFVGLDVHAETISVAVADPSGEVRSIGIIPNRPEAIRKLVKRLGPPDTLRACYEAGPTGYVLYWQLTELGVRCDVVAPTLVPVKAGDRVKTDRRDAEKLARSYRSGDLTPVWVPDAAHEALRDLVRAREAAKKDQMRARHRLGKFLLRHGRRPPNGIKPWTVKHLEWVKKEVDFDQQAQRAVLLDYISEVDHARDRIQRLERAIDEAVETAPERMRAVIEALQALRGAAQVSAVTIVAEVGELSRFARPRQLMGYSGAVSSEHSSGERTRRGAISKAGNSHLRRIVVEAAWAYRHKPSLGGALRSRQDGLSEEVKAIAWKAQHRLHSRYRRLAAKGKVRQQVVTAVARELLGFIWAIGVTVEMNTKAAGKQPAR

SEQ ID NO: 337573 - protein, 336 aa, unidentified
MFKLGIDVSKKTLDLCLLREGVKGRVKTRKLQNDINAVSAVIAWLSKQHCKPEDVHIIMEATGVYHESLAYGLHKAGGRISLANPHRAREFARGMGMLTKNDRVDAYMLACYGALKAPEPWLPPPEEVRHLSALLRRRDALVADSTREKNRLEKYLATDTPSVIAESVEAMIGQLNAEIKRLDSLIRSHLNQHPELKKDFDLLTSIKSVGYQLGLNMLVILRSHDFTTAEQVAAFLGVVPVEKYSGTSVRGCPKLSKIGPPEIRAKLYLASLCGLRFNPLMKAMYERLCLRGKAKMCAIGALMRKLVHWCYGVLKTQKPFDVGYLSSYARSACKAA

SEQ ID NO: 337574 - protein, 337 aa, unidentified
MNTEYSFFVGIDVSKRKLDLALLHEGKIRSKVIENSPRGYADLQDWLVAHGAAPAQTHLCLEATGPYGEGVATALADAHWPVSVVNPARIKGFAQSELARNKNDRADAALLARFCAALNPALWQAPSVQWRELRAKVERLQVLKEMHQQESNRLEAHQASQEALQAKSVSEHLAWLDKKIAALETDIDDHIDRHPELKQDAELIESIPGIARTTAAKVLAYLGDVRRFHSAKALAAYVGVCPRERVSGSSVRGRTMISRAGNASIRHALYMPGMVALRHNPILKTFGERLLASGHAPKAVIGAAMRKLVHMIYGIVRSGVPFRADFCSQKLDFQDGI

SEQ ID NO: 337575 - protein, 346 aa, unidentified
MMIIGCDFHPSWEQVAWLDTETGETGERRLVHADGDAERFYRQLPTPVLIGMEATGNSHWLVDLVSELGHELWVGDAAQIRASYVRQQKTDKRDAAHILKLLVEGRFPRIWMASSEVRDLRQLLVHRYKLVIIRARVKNELQHLCLNKGVQRQRKLWTKAGQQVLRELPLKPWAGRRREDLLGLMVMLDQQIKPLDEAVKAEAQRDKMALLLQTQPGVGPITALAYVLTMGDVGRFPRGKQVASYLGLIPREHSSGGRQHLGAISKQGNRMLRMLLVEAATTTVRLDPGFRKEYLHRCHRKPKAVAKVAAARKLAVRLYWMLRTNVAYPEVVRIESSPRVRLVGEH

SEQ ID NO: 337576 - protein, 387 aa, unidentified
MPQLNDLSRSLVALDQDSTIIAVVELSQSSWLVAGVLPGIERQPQKKLEPSAERLLGLLHRWRDEAVRAGKKITRIALAFEAGRDGFWLARWLNARGVEAHVIHPSSVAVSREHRRAKTDRLDTELLKRGFLGWLRGERGHCSMARVPTIAEEDAKRPNRERECLVGERTRIVNRMKATLARLGVRNFKPTLRKAAERLATVHTPEGMPLPPNVLAELQRDMARLGFVVSQIREIEDTRQKRLEQEPETGHHAMVRQVARVIGIGIETADMLVNEVLSRPMRDRKAVARYAGLTGSPDESGARRREQGLAKAGNARVRRGMIQLAWRFLRFQKQSVLAQWYRARTADSRLGTRKTMIVALARKLLIALWRFVTTGETLEGVILRPAG

SEQ ID NO: 337577 - protein, 371 aa, unidentified
MARLHAMIGRAVGDVEDDAVRVRVGIETDRGPWVQALIAAGYEVFGVNPLQAARAREQLGVSGAKSDAGDAHVLADLVRAHCHQLRPVAADSAEAEGVKIVTRMHKTLIWERTRQTQRLRHLLRDYFPAALAAFDDLDAADSLELLAKAPDPAAAARLSISQISAALRRARRHHVPAKAAAIQAALRSEQLGRPVVVTAAHAVAVRALVALLGTLNQQVTVLEGEVQACFGRHPDAEIILSQPGLGPILGARVLAEFGDARERYATPKARKNYAATSPITRSSGKKKTVAARFVHNDRLIDALIHQAFAALTASPGARAYYDKQRARGADHNPALRQLANRLVGILHGCLKTGTHYNENTAWAHQPTLTAA

SEQ ID NO: 337578 - protein, 351 aa, unidentified
MMIIGVDYHPSFQTIAFLMEETGEYGEQELKHSDGEAERFYRDLKQRGIRVRVGMEATGYSRWFERLLAELGFEVWIGDPAMIKTKRVKKQKTDREDARLLLRLMREGNFPQTWVPTPENRDLRQLLWHRHRMVQMRTRIMNQLQALAMNEGKRWKTKLWSQQGRAELEKLALAPWASRRRRELLELFDRINPTIEELTAAVEQEVQKRPDALRLMTHPGVGPITALAYVLVIGTPERFRRGKQIGTYLGMIPSEDSSAGKQRLGHISKQGNSLLRYLLSEAAQAAARFNPHWRRRYMHLAMRRHKSIAKVAMGRRMAVRLYWMWRNDCDYSPSLEFGSYVGQLGNGHGVK

SEQ ID NO: 337579 - protein, 414 aa, unidentified
MKSARNTLPTEPVNGITCGIDWARDDHALSIVDAKGREVTRKTITHDAAGLRDLLSTLDSAGAREVAIERPDGPVVDTLLDAGVTVVVISPNQVKNLRGRYGSAGNKDDRFDAFVLADTLRTDRARLHPLLPDTPATIALRQTCRARKDLVAHRVAVANQLRAHLKIVFPGAVGLFAAIDSPISLKFLTRFDSQDRADWLSLTRLTAWLANASYSGRTHPRELHRRLTSAPRATNEVTGAHITGAFVATLTALNTQITALDDSIADQLAAHADAHIFTSLPRSGSFRAARLLSEIGDCRARYPTPEALACLAGVAPSTRQSGKITHVGFRWAADKQLRDAVCDFAGDSRRANPWAADLYNRARARGHDHPHAVRILARAWLYVIWHCWQDHTTYDPTKHRALQALLERPQPGAA

SEQ ID NO: 337580 - protein, 324 aa, unidentified
MNKVSNYFGIDISKDVFDVMDKNSVHYQFKNNESGFRSFSKLLSKDSYCVMEATGYYHYQLASYLLNCNFLVSVANPLSVKRFIQMRLSKIKTDRSDAKMICLYAQKVELKLWTGHSANQLDCLQITRMLSVYTKQSTALKNKIHGEEVLGEPCLLVVKSIKRSLKNIIKEMKILEDKLNELVKLDHQDLLSRIETIPGLGRKTATMLIVLTDGFSSFSKGSELCSYAGLTPVIRQSGSSVRGRSRISKIGNQKLRNLLFMCSFTACIHNKACREIYQRIVAKGKSKKLALMAVCNKLLKQAFAIAKSGLIYEESYKSINPVLK

SEQ ID NO: 337581 - protein, 342 aa, unidentified
MGQVVTIGLDIAKSVFQVHGVDAAGEVVMRRQIRRAQLLQFFAKQPTCLVGIEACASAHHWARELGVLGHQVRLMPASYVKPYVKRQKNDAADAEAICEAVTRPTMRFVEVKSPEQQSVMVLHRVRLMLMRQRIQLSNAIRGHMAEFGLVAPIGREGLQSLMKVIVEADDERVPEEARTCLELLSSQLQLVNAQILETDRRIRSSAGSTEVGRRLLEIPGVGPLLASALVASIADPKAFKTGRSLAAWIGLVPKQNSSGGKERLGGITKQGDRYLRQLLVVGALAVVRYAERHGTRRPWLVQLLSRRATKVATVALANKTARMAWKIMTSGERYREPVVQPA

SEQ ID NO: 337582 - protein, 381 aa, unidentified
MTKHSILFIGLDTHKEFIEVAYIEDQRGAKPVHFGRISSAKLTIKKLVRQFESKYPDATLHFVYEAGPCGYWIYRLITGLGHCCYVIAPSLIPKKPGERVKTDKRDALKLAKLIKSEDLTPIYVPEPEDEAIRDLSRAREVAMKDLKDAKYQLKALLLRNNINYAGTANWSLKHLRWLTELVLPHPAQQIVLQEFIQTINERTARLERLDNELTHHVYQWRYYPVVKAMRGVRMLVATGVVSELGDLTRFDHPRKLMSYLGLVPSEHSSGGKRHIGAITKCGNGRARRLLIEGAHTYRYAANISTELQKRQEGLPKTIADIAWKAQVRLCKRYKKLINKGKHYNLVVTAIAREMIAYIWAIAKEVVLTPVNPKQRLARVPA

SEQ ID NO: 337583 - protein, 367 aa, unidentified
MLLPRHDRGVYPEGVHYPNFRAEQQAMSNVTVHVGLDYHKGSIQVCVMDSDGKILVNKSCPNRVDRLVELVARHGGDVRAGIEACPGAADLADELAAGHGWSISLAHPGYVARMKQTPDKTDWADDRVIADLVRVNYLPKVWLAPEDVRQLRTLTRHRRQLAEQRRDAKLRASALLRDARVVEPGVRRWGKAWLAWLAAREGLGSEGRWVADRLVAEVARLEASIAEVEARLAEVTADDKVVAELLALSGVGPVTACVLRAEVGRFDRFATGKQLARYCGLSPRNASSGQRQADAGLIKAGNEHLRAVIIEAAHRLIRHDRRWKALAATMRQAGKPACLIVAAVANRWIRWLYHQVSGGPIALKKVA

SEQ ID NO: 337584 - protein, 437 aa, unidentified
MRRKKNKATKKVHFESLSLIHPNAAGIDVGSKEHLVAVPPDRDPQPVRTFQAFTPDLHELAAWLKRCGIETVALESTGIYWISLYEVLEQYGFEVRVVNARHVKNVPGRSKSDVLDCQWIRKLHSFGLLNGSFCPDQQIRKLRTYMRLKDNLVVEGTQAIHHMQKALFEMNVQLSNVISDITGESGLRIIEAILAGERDPEQLADLCSTRIKASRQTVAKSLHGNWDEALLFCLKTALETYRFSQKKIQDCDQCIERQLATFEIKAPLPDSKQNLQTQLHQVCGVDLTKIPGIKEQTAKIIISELGLDMTRWNTEKQFSSFLGLCPNNLITGGKIIRRSTRKVYNRAADALRLCAQSLTHCKSALGAKYRRLRTRLGAPKAIVAMAHHLARLVYRMLRYGQDYVEKGIQQYELKFRLQLKWLKKEAHSLNLELVAAQ

SEQ ID NO: 337585 - protein, 327 aa, unidentified
MSVILGIDVSKAKLDVCLLRDDQRPATKTLANTPSGFEQLAQWLQQRQVSELHACLEATGRYGDGVALFLHERGYTVSVVNPAQIKAHAQSQLQRNKTDKLDAALIADFCRKQQPPAWTPPDPAARELQALVRHYDDLKVALQQHRNRLEAGIASSLVIAQLQAQITLIQQQMDEVLRQINDHLDQHPDLKRQRDLLTSIPGLGNLTAAQLLAECRDIRRFQDVRQLVAFAGLNPKHRQSGSSVRGYPHISKMGRASLRAALYMPAVTAMRYNPILRAFAERLRQRGVRGKAVVAAVMRKLLHLVYGILKSGQPFDPDYLLKCSTAS

SEQ ID NO: 337586 - protein, 446 aa, unidentified
MKRVGVFDETRRFVAGIDLAGAADHYVCGPRKDDGSHDVEHFGTTTPELQRMLTWLKERNVESVAMESTSVFWVPVWDILESGGIEVRLVDTREVRMVPGRKSDIKDCQWLQRLHSCGLLHGCFRPPEKYNAIRSVIRERANVLSTRTQAIQGIQKSCDQMNIRIHHAVSDIDGMTGMRMLEAIVKGERDPRKLAKLRDRRCKKTEEQIANELTGNWRDEHLFTLKQAYLHLVFLNDMLESFDDKIKEMFAALADNSPKPNPPTSPKKKQKTDSKALYDLAKIAGFDMTSIDGISFGTASGILSELGNDLSMFPTENHFVSYIGLAPPLAKSAGKNIKTRKKHRNTHPVGQMLKNAASTLYRSKSALGALYRCVRSRSCTSFAVMATARQMAKYIYRGMKYGSVYVDIGAKQYEELHRNRTVKSMKSKIQKLSIKAEELGFLQFAS

SEQ ID NO: 337587 - protein, 341 aa, unidentified
MDKELYFGVDVSKKTLDLAYYDGETIDWKNAHIQVSNDDAGFKKIGSWVAKVGKDFDTFLFCMEYTGLYNQNFRLWLESKEYIYGMVEPRKMHRFEPDLDDDQRSLDRIKTDELDAFRIAIYCEQNHKKILRNPSKLPSPVYFKLKRLLAERKQNTKQSTLYKQQLHDICAYDTDLSVERKKLLLKNMQENQKAIDREIDSYMNEDASISKNYDLLTSIPGIGRIIALETIVLTENFTAISNPRKYACYIGIAPFKKESGTSVRKRTSVSKKGFSEAKADLSIAVLSAIKNNPSIRDYWIRKRKEKCGGIVLNAIKFKLVLRMFAVIKRGTPYVETDAYKN

SEQ ID NO: 337588 - protein, 402 aa, unidentified
MLRRACGVDVHRDNFVATILSGRDCETRRFVKDAGGVEAFKAWLKKKRCRSVVMESTGVYWIPLYAALEGEFDVKLANAQKTRKVPGRKTDQSDSEWLAQLLKSGLIEACYVPCRKIRVLRELTRLRTKLVQNRTDYKNRVHKVLERCNIRLGCKLSSVFGRAGMEVLEGIMAGKSFGEIVGNSKSWVLKRRKDEIEEAVRSGLDEEEIFLLKRCLRMIERLDEEISEVDARIAMLIGDYKEDVRRISGVPGVDKVSAPAILAEIGDAKRFANGKKIASWAGLCPVVYQTSEKNLTGGIKPGSKNVRRIMYQAALAATSCRNSRLRLFYLRVAARRGRKTALVALAHKMLVIIHHLLVNGEDYVEEGFVKASKFRFRDLARIPLGEMVEVLRRAGFVVWSPG

SEQ ID NO: 337589 - protein, 412 aa, unidentified
MRRVIGIDVHRTFGEVVIWEEGALRHAGRVDMTRTALEGLGKSLRSTDEVVIEATGNSMAVSRVLTPFVARVIIANPLQVKAIAQAHVKTDKIAAGTLGSLHAAGYLPQIWTPDAATERKRRLAARRYQVVRHRTRIKNEVHSILHAHLIPKCPHADLFSARGRAWLARQPLPDDERAAVERHVRELDRLAEDLALLDHEIAQVAIDDPAVRRLITITGVNLTVAAGIVAAIGDIGRFKSPQKLVSYFGLNPRVRQSGLGAAHHGRISKIGRSHARAMLVEAAWTAAKAPGPLHAFFVRIRARRGHQIAAVAVARKLTVLCWHLLTRGEDYLWARPALVANKTRAMELQAGHPQQKGSRRGAAFAYNVKALRDKEMLVAAQAEQSYERFVGHWKPRRPKEPARGRLSSAGHQ

SEQ ID NO: 337590 - protein, 394 aa, unidentified
MGTWVGIDIAKHVHWATAIDDLGQVVWDQRVPNEPAALQQLIDDLGELGGEPVIGLDVVGGIAALAEAMLGAAGLRLVHVPGLAVNRARQGTTGGEHKSDPRDARVIAEQVRTRRDLRPIQPASELEVELRLLVGRRGDLQVEQTRRLARLHDLLVGIHPGLERVLDLTTKGGLWLVSRYATPAEVRAAGRHGLIEHLQGAGGLSARQVQALADRALAAAAAQQLVIPGERLAASLVRELAAEALACRRRVLQLDRDLAELLERHPDAALIRSLPGMGAVLCAEFIALAGPLARFRSADALAAAAGLAPVLRQSGKVRFQRRPSGGNKGLKRVFYQSAFCSLSSPDSRAFYARKRREGKRHHQALIALARRRIDMLWAILHSRQPYQPNYPKAA

SEQ ID NO: 337591 - protein, 412 aa, unidentified
MEPIYTSCCGLDVHKKSIQACVRRIGKDGKIQEEIRSFGTMTQDIRDLADWLFEQEVTHVAMESTGVYWKPIYNILEGRFNILLVNARHVKHVPGRKTDVKDSQWIAHLLQSGLLKGSFISDRAQRELRDLTRHRTKLVDQRASVVNRVHKVLEDANIKLGAVATDIMGKSGKDMIRALIEGEKDNAEMAELARRQLRGKIPQLRLALEGHVTDHHRFMLGELMDQLDYLDGQIDRFSQRIEEISRPFAEAIEEVARLPGFEKRAAENVIAEIGINMDQFPSAAHLNSWAGICSGSNESAGKRKSGKTTKGSKWLRSTLAQAAWAASRKKNSYFRAQYGRLAGRRGKKRAVIAVAHSLLTVIYYVLRDHVDYKDLGQDYFDKLNSKRIVPYLVNRLKNLGYEVNLVPLESAA

SEQ ID NO: 337592 - protein, 342 aa, unidentified
MKFYCGIDLSARDCHVCVIDEQLKIVVQQKLGNELAKICQLLEPYKANLKIVVESTFNWYWLIDGLQAEGFEVVLAHTLGLYLITGAKVKTDRRDAYALAKLLLVGAVPAAYIYPAETRPVRDLLRRRARLVQVRAGEYGSLRRLLLRQGILSSRQQEIKTASETELAQWFEHPLVRLHASQELRRIELYSQQIAELEKTILELAKTEQSYQLLLQLPGVGQTIALTILYEVGELTRFANVKVFSSYCRVVPGIAQSGNVTGRGRASKQGNHYLKAAFSQAAVHAVRCYPKVRRYYERQLKRHQGRGRQMICYNIIAHKLAQAAFHILKEQTEYRAELLFGR

SEQ ID NO: 337593 - protein, 346 aa, unidentified
MQKIVKQVAAMDVDQKLLVTTLGRMYDDWSPELYAQKTFPNTQKGFEALLAWVKKNADTGIGIRFVMEATGVYHESIAYFLDDNKEEVTVVLPNKISNYMRTLEVKTITDKTASEAIARFALERKLELWRRPKSICKKLRQLTRERDQLVMERTMIKNQLHAEQAEAEPNKSSITRIKARIKMLDKQEQEIREELSALIETDAEMKKAVAVLCSLSGIGLLTAATVLGETNGFELIRNRRQLASYAGFDVKEKESGTSVKRKPKISKKGNKYLRKAMHLPALSAIRHDERFKAVFARIVSKHGIKMKAAVAVQRKLLEMMFTLFKTNKKYDKQYLIKNTIHAETEA

SEQ ID NO: 337594 - protein, 348 aa, unidentified
MDKITRIGVDLAKNLIVVHGVDSMEHVAVRKAIPRQKFLEWFANLEPCLVAMEACSAAHYWGRKLRALGHEVRLIAPQFAAAYRKGGKHVKNDRLDAEAICEAASRPHMRFVALKTADQQNVLVLHRMRSGFVEERTALVNRLRGELFEFGVFLPQGIDAFRGHFVEALEDGTTELDGIARTALLAGWHHIQALDEQIAWCDSQIAARVKHDTNAQRLMAIVGIGPLTASAAVATVGDARVFRNGRQFSAWLGSVPKQASSGGKTRLGHITKQGNTYLRTLLFQGARSALTSAHRRTDRLSRWIVQLHARVGWYRTLVAIVNKHARILWAILAKGERFDPSYTPIRPS

SEQ ID NO: 337595 - protein, 316 aa, unidentified
MQTTVLYIGADVAKAELVISVAGQRPCIIANTATGITRWLKTVSEHALIAMESTGNYHALLAQLAYLHGLTVYILNARDVFYYARALGSRAKTDNIDAEVIVRYLQEHQSSLQAWQPLTPEQQQLRQLLSRRAQVITHQSALRQAFTDVDLSGVDTQALQHGFDVVLASMDQQIQHLIANDPHLEQGYQRLRSVSGIGQQTAALLTELLNRIPFANADALVAYSGLDPRPNDSGTKRGRRRISKRGPALLRRQLYLAAMSACRSAACKPLYEAYRARGLAGTESIVILARKLLRIAYAVWKSGQAFDPSKLSPKTA

SEQ ID NO: 337596 - protein, 316 aa, unidentified
MAADLGLDIAKAKFDAALLIGEKFKTKVFSNDAAGFAALSAWLAAQQVTTVRVCLEATGTYGLAVATHLHDQGHHVSIVNPAQIKAFAATLLTRNKTDRADARLIARFSALHRPVAWQPPPAEIRVLQALVRRLEALQEMLQQEQNRLASADPAVVITITRHLEFLRAEIVAVRQQIRDHIDQHPDLRRKRVLLDSIPGIGEATIAQILAFVSTQTFSSARQLAAFVGLSPQQRQSGSSVHGKARISKTGRANLRKALYMPALVAWRYNPIISAFCDRLAAAGKPKMVIAVAAMRKLLHIAYGVLKSGQPFNPNLA

SEQ ID NO: 337597 - protein, 401 aa, unidentified
MLNLPSLQLRVGVDVGSRCHSVAVGLTDGSLLEEFEIPHTAAGFGDFFARIERHAKRHPYPIAVAMEGYNGHVRPLDSLVKARGWRLFNVNNLKLARFKEIFPAAAKSDRIDSAKTLELFQLRDHLPMAGEVLQEVMATPEENNVLKRLSRRRRRLVNERGRVASAMQADLQAVCPGLLEITRSAGNLWFVNFLTCRKGLRKLARIRRDSLLKVPGIGATYANSIAAWQGRAYFAPDADLVGEMIQQDAARMLELKRHIKALEGQMAQVAENSAIAGRLVSIPGFGAICAAELAGEIGTLERFRSEASLALYLGMATLDNSSGKSRRSKAPRHVNTRAKRAMMIAVDKHRKLVPQSQRYYEKKRAEGKRHNQAIRALGRHLCRVIFKIIAQDRSYRIDPLP

SEQ ID NO: 337598 - protein, 347 aa, unidentified
MSITMIGLDTAKAVFQVHAVDATGQVVIRRKLRRNELIAFFEKQAACTVVMEACGAAHHWARVLTGLGHDVKLIAPEAVRPFVKKGKKNDAADAAAICEAASRPGVRFVPIKSLEQQGVLALHSARSLLVKQQTMLANAIRGLATEFGLTAPLGMGKLGELMALVDADEAVPERGRQALTTLFDQCRALDESIETFEAEIVAHARRDDTARRLATIPGIGPITASLIAATVADIGAFKSARHFAAWLGLVPRQHSTGGKIRLGRITKTGNREIRRLLVLGATSMVYRAPQWNSAAGVWTRAILERRPVRLGTVALANKMARIAWALMTRSEVYHAKGRVAIAAEAVA

SEQ ID NO: 337599 - protein, 447 aa, unidentified
MSMNTTNNDTDKSSSAVAAPGPGSEPAFAAFIAIDWGDEKHAVALRVAGQTQTEHTTLEQKPQALTEWIAGLRERFAGGTLAVILEQKRGALLYALQPHEHLVLYPVNPQMSAKFRQAFYPSGAKDDPTDADLQLDILLQHRDRLTAWRPDDATTRQLSLLVEGRRRFVADQVRVTNRLRDALKSYFPQALELAGEDLTSLMACAFLQKWPSLAALQQVKPAVLRKFYYAHHCRSEELIARRLQLQAQAQPLTTDAAIIAAQSLLVQSLAQELATLHPVLARYEKQIAQLFAAHTDFALWESFPGAGPALGPRLAVAWGTQRDRFPDPQAMACFSGIAPVKEASGKQLWIHVRWACPKFLRQTFHEMAKCSLKFCAWALCYYQMQIERGKGHHAAIRALAFKWQRIMWRCWQDHIPYDDATYVASLRRSARDLYARLSAAPAKERCE

SEQ ID NO: 337600 - protein, 365 aa, unidentified
MNKETISGNGISAASLVNYVNRVLNLGLDVHYRQVTVAMQENGGRIKSAGKMGHVDFLNWVQKKLQDGWQIYSCYEAGASGYWLHRELVKLGVKNLVVVPKAMGQGGKKQKTDKRDAGELCDCLDRYLRGQDKALSVVAVPTEEQEEKRALIRYHRQIMADRGRCEARGKGLLCAQGIEVHGRWWHGEAWLEVQSDPRLKDWMKEQLIGWRNKILSTEEEQGGLRERIAALAPAILPKGVGAYSAAVLEYEMRGFERFTNRRQVGSMTGLCPGIHQSDGRGKEGSINRCGIGIVRWTLVEMVWRLMIWQPQYPPVRRLATGLVKGKRARKRLVVQAARRLAIDLWRLSTGQTTPEKLGLIMYSTK

SEQ ID NO: 337601 - protein, 355 aa, unidentified
MNTPHYIGFDVHKKTVSFCVKTAAGEIVEEGVVAAQRPALRQWAVAQRKPWQGALEATLFSGWIFDILQPYSAQLQMAHPAKMKAISAGKKKSDMIDARTIADLVRCNLLPACYVAAPRIRELRRLLRYRSLVVSEAVRMKNKMAGLLMETGALYVKEKLHRKKYFASLLEELEEVPESVIELLRLSRGALEMFESTQKRLVRELLADPELTQRVERLMSIPAVGEITALTWALEIGDPRRFRSGSEAMSYCGLTAALKSSAGKQQRGPISKQRNHWLQSTLIEAAKLAPRWNPQLAALHARELERGHRNRATLAVARKLVTYLLAVDKSGQSFQLRAPWPLEPAEEPQQKIKTA

SEQ ID NO: 337602 - protein, 406 aa, unidentified
MEGPIITVDVSKGSCHYQPFIENGHPMRKPKQLSATIDGFQKLGQTIKDLEAKTEREDIPVIFEATGVYHRPLQKYLEDHKIRYYIISPLLSATYRKTDLHSNKTDALDCAHIAKAYYCEKELRQYQAQPQEYKRLYQLSRIYESELVHLRKRKVSLRSMLDIIYPRIDKTFKGNQNLYDPIPMEILKRYPHPSLLLSHREDTIVKTVGHRTGHLKGYTERIVHKIYEKAKECYSGCDIDDIEVVKLPSLIENVQEQKKKCNSLLKEMIEIARTCPYFAPIVSIVGIGENLAARIIAELRDVNRFDNRAAIVAYAGLNPKIQQSGDIDGLHLKISKKGNKHLRCLLYLGAQCNYRLRKEDPLYEFTKKKRQQTQCPLSSKAAYTASAHKLLVIIYSLCKNGTLYHS

SEQ ID NO: 337603 - protein, 489 aa, unidentified
MAAGKKNSQGKNAGDGNGRARESAGAAAEHGGDGAEVAEDLVQVVEYAAAIDVAKGSGMVCTRVPGSRPDRRRQKVWQVGATYGEVTALMDHLRCEGIQRLVLESTSDYWRVWYYLAEASGLEVWLVNARDVKHLPGRGKSDRLDCVWHCKLNERGMLRRSFVPPQAVRDLRALTRTRARLAQDQARHQNRVEKILEDALLKISVVISDLFGASGRRFLDALVAGERSPAALAALGDPRLKATRKQLQDALTGRFRDIHAFEISTHLRLIDAINEEIARLDEAIGQQLAVIPGTAPACVACGLAGGGHAPGCADEGTAPLGLAGRLDEITGVGAVNARAVIAELGTDPSQFPTPGHAAAWARLTPRTRQSGETARPGRTGKGNRYLRGALGQAAMATARTDTRLGAMYRRIARKRGKQKAIVAVSRLICEIAWILICDPAARYQELGPDYHSPRSPARQTRDKIREIERLNPGKKVILADAGPQAGAAA

SEQ ID NO: 337604 - protein, 343 aa, unidentified
MEIKRIGLDLAKYVFEVHAVDNDEQVVLRKTLRRDAVTQFFAELEPCVVGMEACCGSHYWARVLTDLGHNVRLISPQFVKPYVKSNKNDRNDAEAICEAVGRPSMRFVPPKSPEQLEIQAVHRIRQRVVANRTRLVSQVRGLLGEHGIVVARDINRIRRTLSEVVDGQLGDFGELFVEMLRDMREELAELDARLSDYNRRIRNLFRSNEMCQRIGKIEGIGPITATALVAAVGNQSCFENGRQFAAWLGLVPKQHSSGGKARLFGISKRGDRYLRTMLIHGARAVLGRSSGKTDARSQWINRMRERRHPNVVAVALANKNARIVWSVLSREEAYQPNHIVATA

SEQ ID NO: 337605 - protein, 415 aa, unidentified
MEQLVERCAGLDVHQAEITACARIPGEHGGVVEIVQEFRTTTPDLLALLDWLVALGVTEVAMESTGVFWKSPYYVMEGHFDRVLVVNAAHIKHVPGRKTDVIDAAWIAQLLAHGLLRGSFVPPPAIRELRDLTRYRKALTEERNREVNRIHKILEDAGVKLAVVASDVMGVSGRAMMRALIEGQADPEALAELAKGRLRAKLPELRKALTSRFRGHHAFLLERMLAHVVDLESDIEAVQERIEEAVAPFGRQVEILDSIPGVGRIAAQAILAEMGTDMRVFPTAEHCASWAGMCPGQNESAGKRKSGKTRKGSKWLRSALTEAAKAAARAKGTYFSAQYHRLKGRRGPGRATIAVGHSILVTAYHILDRGVAYQELGEDYFQQRQQQATDRYAKRLVRQLEQLGHKVTLEPADAA

SEQ ID NO: 337606 - protein, 440 aa, unidentified
MSKRAYRATRVNDVNWDQLAQGKDGLDIALGVDVGKYSLWAVCRWADGRFERPWRVQNPGEIPTLLTLLKRVSAGRKLVVAMESSGTYGDALRQALADNQIEVQRVGGKAAHDYAEVFDGVPSQHDGKDAAVVAELAALGKAMPWEYQPADPWEQELAYWVEWMVAHRQMLTIWQGRLEGLLARHWPEATQVLKLSSGTLLRVLKRYGTPQALAADGEAAKLLARWGGAFLAPEKIEQLLAGAGASVGVRLGEWQQRQIQNYAQQALAARQEANRAQRRLRSLAAGHAVLQAQGKVVGVPTACVLWVSTGDPRKYHAAGAYRKAMGLNLVERSSGTYQGKLRISKRGSSRTRQWLYFAVLRLVQKCGVRSWYEAKKAHDEADARRALVAVMRKLAVALYYVGVHNEEFQPRRLFGRIRRHRGSPGEQKSRTKRRSRAEQL

SEQ ID NO: 337607 - protein, 430 aa, unidentified
MMEEVDDAELVVERIAALDLGKAGLEACVRVPSPHRPGRRMQELRGYGTTTAQLLEMVAWLRHWGVQRAVMESTSTYWKGVYYLLEAEGFECWLVNAREVKNVPGRAKTDRADAIWLAKVAERGMCRPSLVHPAEIRRLRDLTRYRRALVQDRTREQQRIEKLLEDAQIKISSVLSELHGVTARAMMDALIAGQRDPRALAQLAKGRARKKTAQLEEALRGFFTDHHAAILRMMLDNTDRISAQIAALDARIEKEIGPFSHQAARLAEIPGVDAVAAAELIAEIGVDMTRFPSDAHLVSWAKFCPQTHESAGKSKSKGRGRGNPWLAGTLGRIAFANSRADTFLGARYRRLARRRGKQKAIVATGNSVLTVVYYLLSDPMATFCDLGPGYYESRINVHRRARDLATQLQALTGQHIVIRDGKAVITDAAA

SEQ ID NO: 337608 - protein, 421 aa, unidentified
MNQLTDTQYTAYVGIDWAAAKHDICVQSVDDGGREFACISSQPEGIEAWAQDLYQRFGGPIAVALELSKGPIVSALQKYDFFVLYPINPSTLAKYREAFTPSGAKDDPTDAELAVDLITRHPERFSPLKPQSVDMRKLIGLVEQRDKFLSDQGRLVNRLGHALKHYYPQVLEWFSEHNTVVFCDFVSQWPTVAQVKRARKASLERFFKSHHVNSAKLIERRITAIKAAMPLTEDPAVIEPHRLQVEMLIEQLRITIKALKRFDDEIKATAQKLPDYDLLFSPLPGAAKVLAPRLLAAFGEDRQRYPQADSLQKYSGIAPVTKRSGKSTWVHWRWQCPTFVRQTFVDWAAQTINKSAWAGAYYRQQRAKGCSYQVAVRALAFKWIRILHRCWQDRIPYDESKYLEALRRKGSPLLKYLAEAA

SEQ ID NO: 337609 - protein, 441 aa, unidentified
MAHNYYLGIDVSKGYADFIILDQKKNCVEKCFQIDDTFTGHNQLYKYLSEFFSSNPDCHLYAAVESTGGYENNWYNNLNQWQANLPLSVARVNPYGVNYNGKATLARIVTDKQSAKNIADYMISHSEKVDYQHQDYFSSARRQWTFIKMLTKQKTQLLNQLESMLYIANPEILIHCKNGVRLWTLKLLLNYPTANCLSRARVGSISKIPYVSKSLAEEISKQAKQSIASSNDATTEEVIKAMVKQIISLRGLIVQQNKLLENSINLPQVELLKTFNGIGTYSAVGLMLEIVSVNRFKTSKQLASFFGIHPVFRESGDGLSGTKMSKKGRKEPRQILFNVARFAIVHNPLITEIYKNHLKKGMSKMAAIGAIMYKILRIVYGMLKNETPFNPEIDRKNREKFKKIIPKIKPETKRRYQPIDSKAPISRRQNIKRKEKEIIPK

SEQ ID NO: 337610 - protein, 337 aa, unidentified
MDNYIGIDVAKATLQVFIPRNDLDIEIENSLDGLKKLYSKLKKQYKKSINDIVFVYESTGAYSTILEHHCQDKEIKCFKVGAYQSASFSKVVKNRSKTDIVDARMLSQMHILIKKGDVKVPHRDKEAHQIRSYIKYYQTLVKEERRKSNYLEAADFNLEDSYVLKQVKKHIKRLQKEQTEIMDKLMEVIKGNAKYYQAYKNIISIKGIGDKSAIILLYLFLRYPNASRQHITALCGLDPVQRSSGTSVQHKERISKQGLSLVRDILYMPTLVAVRYNEEMKLIYDRLVQRGKPKMLAQMAVMRKIVLLAHSLYKNDETYDPQRYIQFTQLSEVENMN

SEQ ID NO: 337611 - protein, 340 aa, unidentified
MKFIRTAIDLGKTYFQVHGLESEGGQSMSRKMKRSKMREFYEQIEPCRVGMEACGSGHYWARELVAMGHEVVLIPPAYIKPYIKRGKNDAVDAAAICEAMSRPGMRLVPIKSADQQAVLMLHKTREMFVKQRTMSVNALRGHLAEFGIIVAKGIGRVDELLALAQSDTELPQIAKSTVAGLAQHLEGLDQSIEAVGDEITRAHKQNPTSRLLDEIPGIGVLIASVIASSVPDPSVFKTGRDFAAWLGLTPRQNSSGGKEKLGSITKQGNRYIRKMLVVGATSVMRVAGKRKGALADWINALQAKKPKRVAAVALANKLARICWAIMTTGEGFRVDTYVKA

SEQ ID NO: 337612 - protein, 340 aa, unidentified
MSKVTRIGIDTSKSVFTLHGTDEAGEVVLRRNLGRGALVRFFAKLPPVEIAMEACGGSHHWGRVLTGLGHRVRLIPTQYVRPFVKRAKNDRNDAEAIGEAASRPSMHTVPVKSAAAQAAAMLLSVRELLVRQRTQLVNALRGHAAEFGLVAAKGDKGVAALRQEIAATADLPAAAREALALLGSELDRLELQLAAIEKALMAQHKANGVSRLLTEIPGVGPLGALNFALRVDAGQFRSGRHFAAWLGLVPKQRSTGGKQRLGAISKAGDERLRQALVLGATAVIRHARPGRRSASAWLIELLKRKPRKLAAVALANKMARIIWAMLTSGEAYRQPTPVAA

SEQ ID NO: 337613 - protein, 344 aa, unidentified
MKVVTIGLDLAKRVFQAHGVDAAGRAVVRRKLGRSEVLDVFRALPPRLVGIEACGTAHHWAREIGALGHEVRLVPAADVKPYVKRGKTDAADAEAICEAVTRPTMRFVPVKTAEQQAVLVLHRTRDLLVRQRTMLVNALRGHMAEFGIVARQGVGGVSELLATLREKEAAGLPSLTKEALLGLADEIEALERRTDEIEAAILAWPKGDEASRRPVTVPGIGPITASALVATVGEVSNFASARHFAAWIGLVPKQNSTGGKPRQGGISKAGDRYLRRLLVLGASAVIRHNKAAAGESWLAGVIARRPRMVAAVAQANKAARIVWALLTRGGTYDPHRCAQRPARA

SEQ ID NO: 337614 - protein, 399 aa, unidentified
MIENYELVDVFIGVDVGKSGHHAVALDRAGKMLFDKALPQDEGKLRELIGGLKQHGQCLLVVDQPATIGALPVAVAQAEGILVGYLPGLSMRRIADLHQGEAKTDARDAAIIAQAARSMPHALRSIVVADEQVAALSMLCGFDEDLVKQVNQTSNRIRGLLTQVHPALERVIGPRMDHPAVLDLLQHYPSPAAMKTAGLTRLTTRLTKRAPKIGRRLAEDITTALAEQTVVVVGTSAAAMVLPRLAEQLATLRRQRAEIAVEVEALVEAHPLHQVLTSMPGVGVGTCARLLTEISGRHFDTAGHLAAYAGLAPVTRRSGTSIHGEHHSRRGNKVLKRALYLSAFAALRDPVSRAYYDRKIGQGKHHNQALIALARRRCDVLYAMLRDGTLYQGDHDLAA

SEQ ID NO: 337615 - protein, 356 aa, unidentified
MSIVAHVHPYVVGVDTHARHHVYSVLVSSTGELLGSQKFPTTEAGLKRAMRWVVHRTRSHVEALWVIEGTSSYGAVLTGMVLASDFSVAEAPRVDSQHRAGVGKTDELDSARIARAALGLPVDKLRRPRLGKGIRQAIRILVASRELLAGERTRKVNALTALVRGNPLGIDARSSLSRTQIEQIASWRMRGEDIELRVARTEAKRLAHQILELDCELGANERDLAGLVQISEAAPLLQETGFGAVSAAKCLAAWSHYGRIRTEAEFASLAGVNPIPASSGNTVRHRLNRGGDRKLNSALHMVAIVKMTHDEETRKYVARRREEGKTDREIRRCLKRYIARRVYRTLNAQHELSITT

SEQ ID NO: 337616 - protein, 392 aa, unidentified
MTKIQIGIDVAKYTHVFAVMSSDGEVLVEPTSFENNIQGFSSFFKAVEDFKSLDHIVSMESTGHYHENLLTKLVQYNFNCALINPIITDKYRQTKSLRKTKTDKIDSLMLCELAQTFKLKKVTIKTVEMIELKKLTRYLNKLKEDSSKIKIEIKTSLDTTFPEYAKFFSSVYGKASLALLSQYGTADEIYNLHLTKLTNIMSKASKGRFKKQRCKALKDLAKTSIGNNNLSKSLEIRQAVQRLNLFNSQIEEIIKKIEEIVEQFNSPIFSIPGIGLITGASILAEIGDINKFSSSSKLLAFAGCDPSVYQSGTYEAVKSRITKRGSPYLRKALYQIALTCSNNNTTFNKYYSKKLNEGKRHRNAQGHLINKIVRVIYKLLTTNTMFNSELCI

SEQ ID NO: 337617 - protein, 352 aa, unidentified
MMIIGCDFHPRFQQISFLLEETGECGQRRLMHTAEAEQYYRLLSGARVRVGIEATGSYGWFRRLLSELGHELLVGDATQIRASNPRRQKTDKRDAEHILGLLVADRFPAIWQPPASNEQLRQLLLHRSRLVRLRTRVTNQLDGMAKNEGLLVPGGWSGKRRKAIEALPLPGWYGERRKDLLDLLDRLEERIAPLNKAVSQAAANNAEACLLMTHPGVGPVVSLAYVLTIGNWQRFPRGKQVGSYLGLIPSEDSSSDKRRLGHISKQGNTLLRWLLVEAASTAQRYDPSWHRQYLRLSMTKHHGVAKVAIAHKLAVRLYWMLRSGEDYQHVRERGSHARQSECPGGRSKRPIE

SEQ ID NO: 337618 - protein, 318 aa, unidentified
MQISGCVIGVDVGKFELQVAGHEKSIVSGVLPNNRSSIVGWLKRLPAGSVIGMEATGGYQELLARLAHERGFVVYVLNPTHVHHYAISLGNRGKTDRLDAEVIAQYIAQRHTKLHPYEPISPELQQVRALQALRSTVVRVSTSLRLSAQRHGCASVHQKKALAGLSSWAEQLERELIAKIKAQSEWAKIYGLLTGICGIGPINGVALTALFTRVHFTSSDAVVAFCGLDPRPKESGRKVGRRRLSKQGDKAARSLLYNAASSAARTPRFKDYYAALRARGLASTAALVVIARKLLRIAYGVWRTGRAFDPDRLNLKTA

SEQ ID NO: 337619 - protein, 366 aa, unidentified
MLQRAELSGQADSENNLGGSSETMYYIGLDVHKRTISYCVKDAAGHVHSEGKIGSMRCELDAWIRTLPQPRMIAMEATIFTGWIYDHLLPHAEKVKVAHPLMLRAIAAAKKKNDRIDAVKIADCLRCDFLPECHMATREIRDRRRTLRYRNLVIKQMVQMKNRVSGLLMETGVSYNKQRLHKVGYFGELMTTNKEVQQSIRPLLKLSRDMISRSQKLEYALVSSLERDPLLQERLRRLRTVPGVGPITALTWALEIGDYTRFSSIKQAISYCGLCGEEKSSADKVMRMPISKQRNKHIQRVLIEAAKLAPRQSHELALIHARELERGHRNRATLAVARKMVCYMLAVERRQQDFVPAEEFSRTVAA

SEQ ID NO: 337620 - protein, 374 aa, unidentified
MPSGKKFVGLDVHQDTIAIAVAEEGREKEVRFFGTIANTAESLRTALAQIGKGGSELRVCYESGPCGFVIYRYLAKIGIECMVISPSSMPRRPNDRVKTDRRDAQTLARLLRAGELVAVWVPDEAHEAIRDVVRAHRQAKQDLAAAKTTLKSFLLRHDRRFPGKAIWGGLHWRWLAEQVFPFPHQQFVFEEYKRRIHELEGRCKRLEQVLAEALEDWPLAPIVMALQALRGIKLIAAATLVAEIGDLHRFDSPKQLMAWIGLVPAEYSSGKRIKRGEITRAGNAAARSMLIESAWHYRFPAREGRALRERNGSIPDNIRAIAWKAQVRLCGKYRRLASAGKQTVKVVTAVARELVGFIWDIARNTPLAAMEPRR

SEQ ID NO: 337621 - protein, 361 aa, unidentified
MQQQEDTKLDFTGQDIFVAMDIGNKSWSTSIMTEQLEHKTFNQPPQVEVLVNYLHRNFPGARYHCVYEAGYCGFWIHEELQQRGIDCIVVNPADVPTKHKEHTHKTNGVDSRKLCRNLRSGDLDKIYVPTRESLEDRSLVRNRHCFVTKQTRCKNQIKALVSFYGISIPEELAASHWSRGYIRWLEQITFKRPSGDQALKSLLEELLYLRQIIARLTKQIRTLATGEPYREDVLYLQSVHGISTLSAMIFMTELIDINRFRTLDHLANYCGLVPGERSTGEEQTITGISPRRNPHLRALLVECAWIAVRKDPALLMAFSKLSARMPKNKAIIRIARKLLNRIRFVLKNQQPYEACIVQSTL

SEQ ID NO: 337622 - protein, 421 aa, unidentified
MIHKDIKQFAAVIGIDWADKEHEICIKVIGSETLKGSTLKHRPESIDEWARGLQQRFDGRLIAVCLELKKGPLVHALLKYDFLVLFPVNPQSLCKYRNAFATSRAKDDPSDAALMVDFLCKHMDKLKAWQPEAPETRKLAQLTEHRRRIVSDKVRLTNRLTSLLKGYYPQILDWFQDKDTIIFCDFLTKWPTLAKTKRGRKSTFERFFYSHNLRYKNIIDKRIEKIKEAMPLTNDPGIIEPSSIMATAIVDQLRSVLLSLRIFDNEIKKLFSSHKDHYIFSALPGAGEKYAPRLLTAFGTDRDRWASSDDIIKYGGIAPVLEKSGKKMWVHWRWGCPKFIRQSFVEWAGESIRHSFWAHAYYEQQRAKGSSHQAAIRSLAFKWLRIVFRCWKDRTIYDEAKYLMALQKRGSTLLKNLAPAN

SEQ ID NO: 337623 - protein, 359 aa, unidentified
MIVIGIDPHMKTHTAVALEAATGVRAGERTVTCDEEGHGELLVWARALGDEHVFAIEDCRHVSGRLERYLLPRGEVVVRVPPKLMAGARASARTYGKSDPIDAECVARAALREPDLARASLSGTEHEVRLLVDYRDDLVGERARIQKRLRWNCHDLELALELPPRVLDRYVWLDRLEGLLAALPDTTRKRIALRQVRCCRDLTTEIRALEREIRDRMRVLAPELMEIPGCSAISAAHLIGQTAGASRFRSEAAFAMHVGTAPLPVSPGKSERYRLNRTGNRKLNSVIHVIAVTQARMHPSAIAFIERKRSEGMSNREALRCLKRYIGRVLYKTMVGAERTRSNRVVHAQFGTREVAVAV

SEQ ID NO: 337624 - protein, 320 aa, unidentified
MATTTTSPPRIIGCDVGKDCIIVAERTAGHTATIDNRPDSLAAFVKTLGHDCLLVCEATGGHETALLLAATDAGIPAHRADARKVKAFIRSLGRIAKTDRIDAHGLARYGRDRHAELPRWQPAAGVLDDLRTLVRLRTQLVKQRAGLRSQLKAPTGRIAKQRLQAMIDHITDHIAGIAADIEELLGRDPAVAKVVAIVEDIPGCGHLTALTVAALMPELGSMTGRQAASLAGLAPHPHQSGQRDGRRRVRGGRPEVKRALFMAAMAARNHNPTLKPVYERLVRNGKTPLVALTAIMRKLITIINARVRDAHQQPTPELSL

SEQ ID NO: 337625 - protein, 363 aa, unidentified
MVVLIGADVHKNSHTFVAVDAAGKQIGQITVRATHSGHEKAYRWARKSFIEQDRQWGVEDCRHLTGLLERDLLAHGEPVVRVPAKLMARQRATARTRGKSDPIDALAVARAMAREDDLPTAFTDEQAREVKLVLARREDLVAERTRVINRLRWHLHELDPEVDPAPRALTHRPAQERVRELVEASEGIVAEIAGMVLADLERLCSSISELDARLRVMVREVEPVLLEIPGCAELSAAKILAETAGIERFANEGKYAMFAGCAPIPVWSGKTEGRVRLNRGGNRQLNCAIHRIALTQVRLEGPGKEYYDRLREQGKTVMEALRCLKSAIARRIWRALTRAHAEALATTPIPLNPTSTTCVPQAA

SEQ ID NO: 337626 - protein, 340 aa, unidentified
MNEITTVGLDLAKHVFQVHGVDAEGTTVLRKQLRRGQVLAFFSRLPRCLVGMEACATAHYWARELRTLGHEVRLMPAQYVKAYVKRNKNDAADAEAICEAVARPTMRFVPAKTAEQQAAVLLHRGRERLVRQRTMLVNALRGHLAEFGVIAPQGLRNVGRLIAIIRDEKDARLPGLARQVLQVLAVQIEQLEAAIAALEKQLMGWHKSNPVSQRLATIPGIGPIIATAIAAMVAEPSGFRSGREFAAWLGLVPRQNSTGGKNRLGGISKRGNQYLRRLLINGASANLLRSKATNADPWVIGLRRRRPSLVVAVALANKTARIAWAVMHRQENYQRMATAA

SEQ ID NO: 337627 - protein, 419 aa, unidentified
MERVAQEEFAALVGLDWADAKHDVCLQATGTARREFLRFAHRPEAIDAWVQTLRTRFNGHPVAVCLELNKGPIVSAWRKDDFLVLFPVNPLTVATYREAFTPSRAQDDPTDAALQVALLLKHRDTRKPLQPQSPAMRALAQRVEHRRRLVGDTVRCTHRLTSALKNYFPQVLQWFPEQDTAIFCDFLSRWPTLKAAQLARRSTLEGFFRAHHVRAADVIDTRLQAITSALALTTDDGVITPHVLLVQALIAPLRVTLQAIADFDTAMAQRAQDHPDFPLVDALPGAGAVCAPRLLVAFGAQRERFASAEELQQYAGIAPVTERRGKKSWGHWRLQWPTFLRHTFVEWAAESTRHSFWAQVYYQQQRDTGKAHQAAVRAFAFTWIRILFRCWQDRTPYDESVYLQALKRRSAPLLHNLAN

SEQ ID NO: 337628 - protein, 437 aa, unidentified
MSKRLQVGFDIHQKHNHVCMMTKDGQMVDPHQRFDNNWSGHQKFVDMLIGVLEEGGFEGVDIAGESSGLLWFYPFYHLTQAKELTSFDPHVYLFNPRTVKHFKKVLAERDKADPKDAYAVVERLRFGGRMPHELTFDERYLPLQRLTRYRYHLSHTLAREKTYARMVPIYLKASDYTRQPKPFSDLFGATSRHILSEYATTDELAAMPLDDLADELDRIGRRRFSDATDNARCLKRAAAQSYPLLPCLVEPINVILDSLLAHIRFLEEELKKLDSLIETTLVDVPGAPYLRSVKGLGLVYTAGLLAEIQNPDRFIRGYKRDKEGNLRPKTKHDAQASLARFFGLWWPRGDSGEFQAEDRRLPKTGNPYGRYYFVEGANSLRRHNAEYTAYYQRKYDQSLKHKHWRATILTARKLVRLVFALLHNEEMYRPPEERYRN

SEQ ID NO: 337629 - protein, 342 aa, unidentified
MNYYAGVDLHKKFSVFTIKNGEGDLVKQEKITNNREELLRFIKQFEKVKLAVEATFNWAWFSDICDEENVPLVLSHPLKTRAIASAKIKTDKIDSNILADLLRVNLLPKSYRFTKEERALKDILRYRIALVRYQTSLKNRVHAILHKHNIQIPATDIFGKLGKKICLSQSLPPIYQKMLNRYLFLTEVIALEIVGAENIADEEFKKHNLFDDLKRLMTIPGVGKFTAMMILAEIGNIKRFKNAKALSSYVGIIPSVYQSGETRRSGSITKEGTAYLRWALIQSAHKSVIQKSHLASFYRRLKKKDKKKAKVAVARKILVAAYHILTKKAEFKNPGKPAILSG

SEQ ID NO: 337630 - protein, 534 aa, unidentified
MARHGRRGRGRGTVHRQQRSKALGERVRRVGPEHFGVLAVDSAKSRFAVLLSDFYGRVLMDMLEVDNTGPALEGLVATVKSQCEAHGLKDLVVAIEQTGRYHVPIRQVLRGHWDVQMVHPFATKQLRQPADPGNKTDPTDLQAIVRAIIVGYGTAEPELSPRWADWRLVSREREALVRRRAWVRVRLQMRLDALMPGYPALFGCLWSSPVPLALARRYGSAAALLSAGEEAILDCGRQAGSHVQRRTVARVLAWAAEAAPADPGAGTSHRLLGDQIELLSLLEAQIGRYERDLADYLVDTPFVLLLGIPGINIVSAASYGAELGPIEHYLHPTKITGRAGIYPSRYQSNETDLADGPLVGQRNARLRDAIFEVAHNLIYHNAYFKAWAELRHKRKWAKQKVHVAVACKFVRISYWMLAGRMAFQHPCVRGRDAILRKLLRFAKEKALAAHDARSLLLRAVRQLPGATHPEEARALMEELPRGTRRRRRGGVASIGEVLPEVIAELTHSLSTEPERSQAAPLHPAEDPSLSALER

SEQ ID NO: 337631 - protein, 424 aa, unidentified
MKFKMQDKQNQLIERISDKHLVVGVDIAQQLHVARAVNFRGIVVGDPLIFENNEDGFLNLLNWIIKLKRIHKLEVSIVGMEPTGHYWMNLSKWLIKQDIEVVTVNPHLVKRNKENRDNTQSKSDKKDALVIADMVKNGYYSFVRNTSESFEKLRVLMSNRDVIVKRLVSSINQLNRWVDIVFPELRQVFKDITAKGAIATLRLFPSPMELGSMVPEEVVTGWRSVMKRQPGLKKAYLLLQVARKSVGTRQAMEAYKFHLEQLLEEYDLAVQQLERVELAVKAELAKIPFARKLLMIKGISEISLAGILGEAGDLSGFSHGNSLLRHAGLHLAEASSGKWKGQIIISKRGRSRLRRFLYLATMSLVMNNPEFQAIHANNVKVKKMKKMKSIMKLIGKLARIFVGIARKNEQYCAKKVQPLTVLAA

SEQ ID NO: 337632 - protein, 342 aa, unidentified
MEQFVGLDVSQAETAICVVDAAGAVQWQGKCASTPEAISATLKQKAPQAVRIALETGPLSAWHWRALSKLGLPVVCIDARHAKAALAMQVNKTDANDAFGLAQIVRTGWYREVRIKSEQSHRTRGLLAARSKLVDMRKDVSNQLRGLLKVFGHVIKPAGGQSFETQARTLAEGDPVLSTTSEVLLATRHSLAEQIARLDQLLLTQARQDPTCRRLMSVPGVGAITAVAFTATIDDPTRFRHSSSVGAYLGLTPRRYQSGTIDVAGHISKTGDCLLRSYLFEAATTLLTRVQRWSTLKAWGMRLAKRIGQKKARVALARKLAVVLHRMWADGTEFRWTAEAAV

SEQ ID NO: 337633 - protein, 354 aa, unidentified
MKHQAIQYLALDVHQSTVVGSLRDAEGDILLRATVATNARAILALIRSAGARVHVAFEEGAQAQWLHDLIAPHVEHVVVCNTRGQEGRGNKSDRIDADRLSDQLRRGSLRSVFHGARSVLTLKELVRNYNNLVEDSTRVMLRIKALFRARGVLTPGVSVYRASHREEWLGQLQGGARVRAASLLAQLDVLLELRPKAKTAMIAEARRQPGWRVLRSIPFLGPIRVALIMAIVGTPFRFRTKRNLWPYVGLAVVTRSSADREFHGGKLRRRQKTPLTRGLNRNHNPLLKSVFKGAANAATGRPGPLRDFYEASRARGVREELAKVTLARKIVSLTLRLWKKGELWDPTKLTMQAT

SEQ ID NO: 337634 - protein, 395 aa, unidentified
MYYLGIDIGKNNHEAGLIRDDGSHVGKSFRFTNTKEGFDMLLYFLEQHLPENESFCIGMEATGHYWLALYSFLRAQGFVLHIVNPIQSDSLRNFHIRQQKTDSVDCFLVAEVIRFGKFSETHLADEDILVLRNLARFRESIKDSCADYKRQVITVLDQVFPEYDTLFSSLFGESSKAFLKTYGTPDQVVEVNTKSLATLLRKASRGRHSTDKAREIKSLAARSVGLTLCSDAFAFEIRVLIEQIEFTEKQIDEIDRKIAKQLKKINSVILSIPGVGPNTGAVILGEIGDINRFSTAKKLVAFAGIDPTAYQSGNFVGQHNRLSKKGSPYLRRAVWMSALIATRCDPVFKAFYEKKRREGKAHGTALGAVSRKLLYTIHAVLKANKPYEVRLETIE

SEQ ID NO: 337635 - protein, 388 aa, unidentified
MYYVGIDIAKYKHDCFIFTSEGEVVLESLTFENTKEGFSKLKLILDALDHSQKIKIGLEATGIYGKNLKLFLTSIGYDFDELNPLQVKRFINAMSNRKTKTDKIDASQIARFVSTGTSRTYVYSSYHTEALKQLTRSRNSLIDERSKHQTVLTGILDVEFPEFKGFFNNKFSDTALYILNKYKTVKRISKLSHNDCVLLHNKSRNMSITIFEELRKLAKNTCGHHFDYNDSLISVNLQLIKCLNKEIDKIEKEINSIMSTLDSPIVSIPGISAISAASIIGEFGDFARFDNAKHLCAFCGVEPSIYQSGTSYHEGKMVKHGSSNLRRTLFNVVPYIIMHNETFKTFYDKKRSEGKAYRVAQSHVVKKLLRVIFTLEMTGSTFDPSKLY

SEQ ID NO: 337636 - protein, 331 aa, unidentified
MDFKETIGIDVSKPFIDAAIHTARKHRRFKNTAEGFCQMLLWVSENTNVTRQHTLFAFEHTGLYSLPLSAFLSERHLSYVLIPGLELKRSMGIARGKDDRMDAKAIALYAYRRREEVTPYTLPSKRLLELRKLLSLREKLVNQRTGFKATNTEIKGFLTRTDNAMYFAVHEAMIKALNQQILAVERQLELVIQAEEPLKRMFDLIVGIKGVGTQTALFMIAFTNGFTLFPNFRKFASYAGIAPFPYQSGISIKGKSQVHCFANKKFKSLLSSCATIAIRCNPEMRMYYQRRISEGKGKMSTLNIIRNKLLSRIFAVVQRGTPYVDTMAYAS

SEQ ID NO: 337637 - protein, 391 aa, unidentified
MTAVRKDDCSTPAAVLYLAFELGEGQWKLGFTTGLGQKPREREVVARAMVCVEQEIAAAKERFGLPAETTVVACYEAGRDGFWLHRCLLALGVQNAIVDSSSIRVDRRQRRAKTDRLDLHELLKMLVRWHLGERDVWRVVHVPTVDQEDARQLQRELETLRAEQTSHSNRIHSLLVTCGVTLTVNRHFPRRLKELRLWDGSALPQDLHQRLLREFERMQVVNRQIRALEKQRAQRLRKDDTDVGVVQTRQLLQLKGIGVNSGYLYTREIFAWREIRNRREVGSLVGLVGSPYCSGMLDHEQGISKAGNRRVRALAIEIAWGWLRLQPQSVLSLWYERRFAHGGKRLRRIGIVAVARKLLVALWKYLKTGVPPEGAEVVDWKKKIYDNTPPL

SEQ ID NO: 337638 - protein, 438 aa, unidentified
MSNKVIFNLDELFISVGIDVGADFSWMSIALPNQQFVGKPYKILHNSIDSLTTAVSKIKEAEELYSLESRIFLETTGIYHYPLFCYLRDKGFNCSVINPIITKNSTNINIRKVHNDRFDSKKAALVGLKPDLKVSLMPSDLALNCRNLCREYYDLMDNRSAYVNKLQGELRIAFPQYLGIFSKVTINTSLTLLETYTSPSAFLKADKQEIIDIIKSTARFGLTYAQNKYNAIIQAATDANQFGYIIDSNIKRIRLYISFIRKYDEEINSILESLHELVDANEDSDFVKQIHLIETFKGAGFLSAVSIMGEIGDFSAFSKPKQLFAYFGLDPAVKQSGKFEGTKVQMSKRGSAIARRVIHTLTLQSISISRNREAKNPVLREYYLKKCDSKPKLVAMGAVSHKVCNMIFAILRDNKPFKIIAPQEHIKQYNSAKCDIAA

SEQ ID NO: 337639 - protein, 410 aa, unidentified
MKVAGIDVHKKVLMVVVLDAGMPEEKPARRRFVTMPSELQRLLVWLREQGVEEVVMESTAQYWRSVWLELEPHMRLHLAQAFSNRAPRGRKHDFKDAERLVRRLIANELILSFVPSGEQRIWRNMTRMKLQLTRDRVRLQNQIECLLEEMRIKLSIVVSNLLGASGLRILHALANGESDPKKLAQLGGERLQCTEEQLVDALTGRAQPVHGAMLALQLQRLQLIDQQMAQLNNMIAAAMKPHQDAVMRLAEVPGLGVDSAQQIIAEVGAQAGTFASAAELTSWVGTCPGKEESAEQNHSSRSAKGNKYMRRVLNQAAHAAAAKKGSHFQIVFRRLLPRLGYQSAIWAVAHRLCRLIWKILHEGVRFIEHGAEVHPREKKKRAQMLARALRKLGYEVTITPTDQLAPKPVA

SEQ ID NO: 337640 - protein, 345 aa, unidentified
MELHTIGIDLGKTVFHLVGLDLRGEVVVHKKFSRKQLLHFTANLQVKLIGMEACGGSHFLGRALREQGHEVRLMPAQYVKPYVKTNKSDYIDAEAIAEAVGRPKMRFVPIKTDEQLDLQSLHRVRERWVMRRTAVINQIRGLLLERGITLRQGRGHVDAALPGILEDASAMLSGALRMLLAQLKLELDHLQMRIDEADAIIKKVAGENEACRRLVAIPGIGPVTATAIIAAIGNGAAFKKGRGFSAWLGIVPGEYTTGGKQKLLGISKRGNSYLRRLFVQGARAVLQQRAKQSSALSAWLARLTTRTHSNVAAVALANKLARMAWAVLAKNEPYRPPMWVGAATA

SEQ ID NO: 337641 - protein, 424 aa, unidentified
MPSNRNNSSIVSVVHEICCGLDVHKKTITACLVSLDAADDERSEVMEFGTFTDDLIKLRDWLLERECPIVAMESTGSYWTPIHNILEGYFQVVLVNARHMRNVPGRKTDISDSRWLAGLLRHGLIKGAFIPPKYQRQWRDLTRMRKNYVLTLGDFKRRVHKLFQQANIKIDSVLTDLFGSTGRNLMKLLISKESTPTFPEVEDCLRGSLKEKAKELHRSVKGFFEEHHRYLLVFLLETIEKLEKQIEELELRISQVQQTSEKLINRLKEIPGVSEVSAHALLAELGPVLEAFPSPTALASWCGLCPGNNQSGGKRFSGKIRVKKHHLKTIMVEIAWPAIKTKGSYYKAKYYALKSRLGPKKAIIAVAHRILKAIYYVIKHGVCFKDLGEAYLLERNRASKIRYLSKQAALLGFELTSIAQVATT

SEQ ID NO: 337642 - protein, 400 aa, unidentified
MNPVIGLDVSKGESHAQAFLDRGVPHGKIFKFKHDLEGLASFLNYLRGVESAAGMRPSIVMEATGHYHSPVVQFLDEHQYLNIVINPLISHNAKKTNLRRLKTDAADAHLLGALFYKEEFEPYKKRGQHLMNLRYLTRQHESLTGMYVQAKLQFQAILDQVFPEYHGVFGDLYSKVSLRFLALHPTSKEVLELDEKEIAATIGRLTGRGKSALWCLERAQILVAAARRNPFKETAFPSHLISMQLLIKLLLQYQDHLADLNKSIEALAEALLEYDLIQSIPGIGTKIAATILAEIGEIDRFNHAKKLVAFAGIDPSVFSSGKFTATINKITKHGSRRLRTALYQAVRCGIRSNRNKKLRAYYDKKRAEGKLFKVAIIACVNKLIHWIFAILTTKEAFRLE

SEQ ID NO: 337643 - protein, 367 aa, unidentified
MEKSSKVYVGMDVHKESIEVTLAEPGGEVRRLGQIGGDRGSLLKMARRLQSRGGERVFVYEAGPCGFWIHRELAALGERCMVVSPALVPKRAGDHVKTDRRDSERLASLARAGELEAIHVPDIRDEAIRDLVRGRDDAVIAQRRVRQQLKALLLRNDIRYVGKTSWTGAHRRWLSELKLPEPAQKIVFEEYVDAIAVATGRIERLTRAIETETLTWRFAPVVAALQAMRGIQFVHAVTLIAELGDLTRFGSARSLMGYLGLVPREASSGEHRRQGSITKAGNSYARRALIEAAWAYRHPARVTRIIATRQTGLPKAACDIAWRAQLRLSARYRRLNARHLNHNKIVVALARELSGFVWAIGQSVKPH

SEQ ID NO: 337644 - protein, 417 aa, unidentified
MAKHSVEQSDGRKQGLGVGGIDVAKDWHYVQWLDTNGRPVGKAFRFANTRAGFEAMWERRPSEEVRVGMESTGHYWVGLAHWLRAHGAEVVLVQPAHVHRLKELDDNTPTKTDAKDARVIARLVYDGRWFRWEPRGGALAQLATLAVTRRQHHQDVMRWRARIAGWIHQYFPEFFTVFKAWDGKAALTTLDTLPTPDLVLAQSVDAIADQFKAATTHRVGAKRAHALHQAAVDSIGIPVGRATARLQLASYLRSWRAALAAQTAIEAAQAAILEDWTPAQPLFSIPGFGPQVIATVLGELGDLSRFADARQAQKMAGLNLTQTSSGHRQGPTHIAKRGRPAARAVLYQAACVAVAKDPQWKAWYQSLTRRAAHPLAPKAAMVAVATKLLRVAWACMKHGQAYDAARLFPLGEVSTAA

SEQ ID NO: 337645 - protein, 348 aa, unidentified
MWIIGCDFHPSWQQVAWCNSETGETGEQRLEHSNGEAERWYGQLPVGSRIGLEATGNSQWFVELLQRLGHEVWIGDAAQIRASYVRKQKTDKRDAAHILKLLLEGRFPRLWRPSPEQRDIRQLLIHRHKLVEIRTRVKNGLQHLAMNRGMQKKRQLWSEAGQRALRELAMPGWAGCRRQDLLETLAYLDRKIAPLDRAAEETAQRDKMALLLKTQPGVGPITALAFVVTIGEASRFPRGKQVASYLGLIPREHSSGGKQRLGGISKQGNRFLRQLLVEAAQSAVRYDDSLRRPYLHRCHRKPKGVAKVAAARQLAVRLYWMLRTMTPYPEIVRIESSPRVALVVRHGG

SEQ ID NO: 337646 - protein, 436 aa, unidentified
MNANYANRLQWFRQFKAQVNASTSTLIVGIDIGKDTHHAFLGTPAGRTIHRRLIFENSIHGFDRLLSLIKRHMSDKQVTEVVIGVEPTSVYHKPLSEYLITIGYHVVYVTNTAIAKNRVILDGRWDKNDTKDAANVADLVSRGRCHFYDLPDINLRDIRNLLSLRKRLKKQEHRVMTRIRNNLVAQYFPELDGAWSRCQQENLAIVRFCLSPHKVAELSFDDFCRMVTTRRRGIRQYQRLRHIHTVAEQSIGCRPGSSVVFEAQLLVENLERSREQIRQVEEQLDLICGSYRQYELLQTMPGFGPYVSAVVLGAIGYAQRFDNVKQLLRLAGLDLNANRSGKTSHSAVPVISKVGKADLRYALYQAALVATSRTAEFKAYFKHILKGREKERGIKTKMRVKVAAKMLVIAWTLMKTNQPYKAGLLITDEPVQQRGR

SEQ ID NO: 337647 - protein, 309 aa, unidentified
MATSSYAGIDVSKDKLDVAVLGDRQETQVENSREGIAKLVEQMQALQPELIVVEATGGYQRAVVEALFWAGLAVAVVNPARVRQFARACGLLAKTDKLDARVLAEFGQRVQPKRYTGKSEAEKQLSALLVRRKQVEEMLKAEQNRLRTLSPSLRSSVERSIAFLKEEKKILDEQIQQFLAEQEAWQAQTRILGSAPGVGPVTTATLLAELPELGKMDRKKIAALVGVAPMNYDSGTKRGYRKTKGGRTNVRSVLYMSTLVATRYNPVIQAQYQHLLKRGKEKKVALTACMRKFLTILNAMMRDQQPFRV

SEQ ID NO: 337648 - protein, 360 aa, unidentified
MEKVRSTSLAGRLVSEVRMTQIKYFVGIDIASSTFTAAVGAMPWKVVLKPQEFKNEADGFQVFMDWLTQHQLIANHTIVCMEATGVYGECLAYFLHVKGYRVCVEPPLKVKRAFKPNGPKSDAVDSLQIAEYAGRYFDQLTLWHPRSEILEQIKVLLATREQFVVQRTTHKNALQAIQRKVVKTPFAEQVHLQMIEQLKQQIRAIEQEIRRLIDSDSTFKPMLLLLMSIPGVGFLLAAHLILLSQVSLNHRQLASYLGVAPNEYSSGSSIYKHATSRHFGPQTIRKLLYLAACSVRTHRLEFKIYFQRKTAEGKSPRLVLNNIENKLLKIICAVLRSNTPYDPNYCSVQPPLSTTALTGS

SEQ ID NO: 337649 - protein, 346 aa, unidentified
MEHYVGLDVSLKLTSICIVDRTGKVEREGVVASDPEAIATFVKLHAPHVVRIGLETGATSTWLWTELNKMGLPVICIDAKHAKAALKMQINKSDRNDAVGIARIMQCGWYKEVCVKDLDSHATKALLVSRALLVKIKRDIENQIRGLLKNLGLVIGRAKMNMFAVRAAQLAEDRSELLAAVDPLLKAREAVEQQILDLDRKVLRLARNNAQVRRFMTAPGIGPVTALCFLATIDDPARFKRSRSVGAYAGLTTRRYASGEIDWTGRISKCGDKMLRSYLYEAANVLLTRVAKWSALKAWGVKLAKRSGLRKAKVAVARKLAVILHRMWIEGTEFKWSSKEAADQPA

SEQ ID NO: 337650 - protein, 370 aa, unidentified
MTTVVSTELQITVGVDTHADAHVAAALDQLGRLLETQSVPTTPTGYGALLAWARSLGELERFGIEGTGSYGAGLARWLHGQGVEVVEVERPKRQNRRRRGKSDAIDAEAAARAVQAGTATAQPKAGDGPIEMLRSLQVARRSALKARTQAANQLHALVVTAPDSLRTRLRRLSRPRLVATAAAFRPCLPLATPTAAAQLALKSLAVRHQQLSAEVEALEAQLALLVAQAAPDLVAVKGIGTDIATTLLVTAGDNPDRLRSESAFAHLCGAAPIPASSGKTNRHRLNRGGDRDANRVLHLLAVGRMGWDPVTRAYVERRTTEGRSKKEILRCLKRYLARQLYPLLARNPALLLLRQESSAGPALLALAAGA

SEQ ID NO: 337651 - protein, 473 aa, unidentified
MSRLGPAPRRTPRITHEVLDQVLSLSRRISLDFGPTANARRPAEHPHFTPRTIRMKRSKPATPVLAKGRAVVGIDVGKRKHAATALTPQGEMIAQLASFPNTRQGIDMLEKEILRKAGGPGKVLVAMEATGHYWMCLYYELKRRGYQSVVLNPVQTNAHSRSQIRKTRNDRIDSAGIARLVLAGEARATRVPDEKTAELRLWVRHRQRLLRAAGNMERFAHTLVDRVFPEYAEVLSKPFLPSAQKLIRSLGLAPADLASQEAEVRQLLRAASRNKIAPETIDRLLQAAKVSIGTRQAENVANRQLVLAFDYLATVRQQIAAIEGELDTRMQELGSPLFSLGLTANLVAAIHAESDPIQDFPSADQYVAYTGLDPSSHRSGDTIDRHGKISKRGSPTLRRALYLAAFVVTRKHACFHRIYQRHRRQGKGHSNALVIVARHLARVVWRLLTDGREFTKRPPNHTPPSPQQRRKPR

SEQ ID NO: 337652 - protein, 421 aa, unidentified
MRGLRGKRVKMVKEGTLIATVDIGVANNTGYCTTLDGRSTKSFRFDNTKEGFEKFWCMTIASKNRFGCDEVLVGYESTGPYAEPLIHYLVNKQVEIVQVNPMHTKKMKEVNDNSPLKTDDKDPRVIADIIRLGRALTIVVPEGDAASLRRLNNARERHVGEQTALLNQLQQLVFLIFPEFKTVLKKMKGKTAQYILKRYTTPERIAPLSKEALGEEMRKRSMGKFGIKEAESLIGLARETVGIKEGIAGILMDIKHILMQLEAEARFISEIEAEMGVTLERIPCSIRLLSIKGLGIVSVAGLIGEVGDFSKFSTQSEIMKLAGLDLYEISSGKRKGQRRISKRGRSLLRKILFYAAIQMIRKNGIMYDYYARLTGRGMERMKALIAVSRKLLRIIHAIVRDNRDYVGQYQAPERMVIKRAA

SEQ ID NO: 337653 - protein, 390 aa, unidentified
MQSVTSATAVATTARANNITLFASLELSKSKWVVTINSPGGEKFSKHVVEGGDGAALLDLLSRSRAKAEQRYGVPIKAIVIIVIQEAGLDGFWIHRLLIANGIDSHVVDAASIAVDRRHRRAKTDAIDGETLLRTLMAWARGERRVCSMVRAPSPEDEDRRRLSRERGTLLKERIQHTNRVRGLLSSQGVRDYNPLRRDRFERLEALRTGDGRELPAMLKAEIRRELERIALAATQLAAVERARDALIRTDAEERNNPAAQLLKLKGMGPEFASLLWLESLFRSFGNRRQVAAYGGLAPSPWQSGGVERDQGISKSGNRRLRKTMIELAWFWLRHQPDSALSRWFRARVGAAKGRVRRIAIVALARKLLVALWRYVTQGVVPEGAVFKAA

SEQ ID NO: 337654 - protein, 388 aa, unidentified
MIYVGIDIAKLNHFASAISSEGEELIKPFKFTNDADGFQLLSSHLDSLPDDSFIIGLESTAHYGDNLVRYLVNNGHKVCVINPIQTSTLRKNNIRKTKTDKVDTYIIAKALMLQQSHRFVTTLDINLMDLKALGRFRQKSLKQRTRLKIQLKAYVDETFPELQYFFKSGLHQKAVYALLKEAPSAKDVASMHLTHLAHLLEVASHGHFKKETASQLRVLARKSVGSPDSALSIQVVHAIEQIELLDSQIDHVEDEMTDIMKYLDSVIMTIPGIGYINGGMILGEIGDIRRFPGPKQLLAFAGLDPSVYQSGNFQAKRTRMSKRGSKVLRYALMNAAHNVVKNNSTFKAYYDAKMAEGRTHYNALGHCAGKLVRIIYKMLTDKVEFNLA

SEQ ID NO: 337655 - protein, 330 aa, unidentified
MNYSHFVGLDVGKKSFDASLVSLDQELSHHTFPNTPEGIEELLHWIKQHGVEVETALFCAENMGSYVIDLCLSSYQYHFPLALECPLTIKKSIGLQRGKNDRIDARRIAQYASLHYRKLRLYELPDKDLVRLRNWLVIRDNLVKQKVSSLKLLELPRETSRLADLMVPMTFLENQICQIKEKISYVEEEMEKIITENITLSTNYRLLTSIKGIGPVNAIVLLCVTDNFQRFSDPRKFACYSGVAPFEYSSGTSIRGKTKTSHLANREVKVYLTRAAITAIAWDPQIKAYYKRKIAEGKHKASVINAVRAKIIARCFAVIKRKTPFVTLSA

SEQ ID NO: 337656 - protein, 395 aa, unidentified
MNYLVGIDIGKNKHFFCVMDKDTGELLVDPVSFSNNKEGFDFLINKLKPFSKNSILTGMEDTGHYHFALLKFLLSNAFTVALINPKTTDFTRKMQGGITKNDKLDTLTICDVLDTPERKKQYRITKVNSFDFYEQKQLTRHHHNLKEELNVYTNRLQKCIDIVFPEFNRLFKSKYGTVYMNLLKTFGSAEDIANTDIRTIRKCFDINGRGKRIALTPEQLKECAKSSIGISSTAEIIQIKHLVNQIELINEQIAETDKKIEEFSVKNNSPILSIPGISHFSGTSILAELGDISNYKKPSQIIKFAGVAPLHYESSQFTAQHTSITKKGSKYLRKTLYQIILPVINHNPIFKQYYELKISQGKGHRCAQGHCVRKLLRIIYHLLSTSQKFDPVLLR

SEQ ID NO: 337657 - protein, 364 aa, unidentified
MKKSIKGSEKKDRGPVYASTGLDIGDRKSCWVALDEAGKAVGREKVSTRAPELEAWGMSIAPTVIAIEAGPHSPWISRLLSRCGHEVIVANPAKVPSISRSRSKSDWRDAEQLARLARFDRTMLHEIRHRSEQAQKDLQVIRSRDAAVRARSKLISHVRCTVKAHGQLVERCSTDAFASRARATIQAELLEIVTPVLEAIDQLSRAIHVYDQRIEMLARTRYPDSSWLTQVRGVGALTALAYMLVLDDASRFRTSRMVGAYLGLTPARDQSGEVDPQKGISKEGDRLMRRLLVQSGHYILGPFGVDCDLRRHGEAIAKRGGKNAKKRAAVAVARKLAVLLHHLWITKNAYVPLFNALTTEHKAA

SEQ ID NO: 337658 - protein, 395 aa, unidentified
MEYLKYGIGIDMAMKKFDVCFSVIDTLQKVTVKASTSFTNNAKGFKDFLQWVNKHAKLDLPKVFLAEATGIYYEQLAWFLYLQDLPISIILPNKARMYKEALGLKSKNDKIDAQGLSRMACEQSHKRWSPLSKSIYTLRLITRRIEGINQLLTMSKNQLHALTYGMFRDAGVEKMLKKDISLFESQIESLKKRVESTIKEDPLLKAKIDKITTIKGLGIQAAAVIVSELNGFALIENQAQLVSYCGYDVIENQSGKHSGKTKISKKGNSHVRRALYFPALNVVRYKQKPFVQLYERIFERTAIKMKGYVAVQKKLLITIYALWKNDEAFNVEKTIKKDVIFREEELAPSFSSASEKSSILAKKLAPDVSRAKQDGHSSNFRRMPSFSYHKFNKLL

SEQ ID NO: 337659 - protein, 417 aa, unidentified
MKVVHQICCGVDVHKSFIVATIIKTEGLMPQYAKKRFSTFNNGILRFKQWLLENNCRDVCMESTGKYWIPVYNLLEDEINVVVASPKWVKAVKGNKDDTKDSKWIGDLFRLGLVPGSFIPPRPIRILREYTRYRYKLVSCKSSEKNRFQNSMTVCNVALDSVVSDMFGVSASKITNYLIESDEFDTEHVKSLLHGRMLPKADAIIESIQGCQLSKAQKYRMSVINSHLDFVQKSIEKIDAKLDSLVEPYESHIALLCTIPGISRQSAITIISEVGVDMSVFSNSKKFCCWAGLTPGNNESAGKKKSVRITRAGVYLKPALVQVAHAAVIAKNSPYYKNKYERISKRRGKKRAIIAIARMILTAIYHMLATGEVWNPSDLFNVDMPCALHERQKKKAIKNALILLQREGIIDSTVIPA

SEQ ID NO: 337660 - protein, 411 aa, unidentified
MSAIFCGIDWAEGHHDIALVDQSGAQVAKLRISDDSAGFHALMQLLSRHGDTAEDPIPVAIETPRGLLVACLRATGRQIYAINPLAAARYRDRTSVARAKSDAADARVLANILRTDRHAHRPLPDDSEAGQAVAVLARAHQDAIWDRQQMINRLRSHLREYYPAALAAFHGPGKPGLDSPRARVILTAAPTPADAAKLTRSQLRALLKRGERPRCGVEAEVERLRDIFRADQLRQLPQVEQALGHQATALVRQVDAACTSVAQLAVATEEAFLAHPDADIITSFPGLSVLSGARVLAELGDDRERFADARAMKAYAGAAPVTRASGRSHVVVARTVKNQRLAAAGHMRAFAALRTPAPRAHYDRRRAGSERHTASLRNLFNKLLGCLYHCLRRRTLYDPDRAFSAALDLAA

SEQ ID NO: 337661 - protein, 531 aa, unidentified
MVTTGKTRTTRNRSRSQKFKKAVLGRPQGIIQKRVQAVGPEKFGVVAIDCAKARSTWRLTDFYGNVLTQSASVEHNRNGLQLAVLTLKQAVEKHDIKDLIVAVEMTGTYHKPPMRAFRDAGYETRLVHPFASSFYRQPEHGDDKTDDHDLDAIFRAAVNGFGLLEKPVDAIHQQLQILARHRRDLVKKRSKLQCQIRHHLEQGLPGFGALFNGDDMWTQVTPVPLLEAIAAHGGTVDVIKQADQKGVTKWLEDAKISFTPATIERVVVWAANAANADPMATFHTRVWMSQLADWEQKNQQIHDTERDLAAVVARTPYVLLLSHPGINVVSAAELAGEMGPIENYATARAVCGRAGLFPSRYQSDEVDRSGKLTRFRNAKLRAAWMMIADNMCKCNRYWMVKAEKWKSEGHKSHDIRCRIANRMTRIVFKMVSGRELYKHPSRLDRGYVMDKLLTFLREHNTAPAVIVRDLKHAAEQLPKSGQLEEGAKLQEAALKARRSRQKGPQELGTLLVAVLARLGIAAKDDDGLKST

SEQ ID NO: 337662 - protein, 339 aa, unidentified
MNKTNMIGVDLAKNVFHLHIQDSKGHVLQKLKLGRSQFQHFLATTPISQIVFESCSTSHYWHRRSTYHGHQARLIHPAYVKPYVKTNKNDFNDAEAICEADSRPTMRYVTVKTVEQQDIQLLHRIRQRVVQQRTALVNQIRGQLLEYGIALPKGISQVRSRLAGILEDAENELTPFARTLFSSLCQELYGVDERVKTLDKKVKQLANEHPICQRLMAIPGIGPMVATAVLSAIGNASNFKNGRELSAWLGLVPKQYSTGGQQRLLGISKRGDGYVRALLVQGAISAITRCKGRCDRQLVWARQLHVTKGLQKAAIALANKMARIIWSIMARDRDYVMVM

SEQ ID NO: 337663 - protein, 415 aa, unidentified
MNDLIRIGMDTSKSVFVLHGVDAAEQPVLRRTLRRRQVIEFFARLPPTQVGMEACGAAHHWARELGALGHEVKLLPAQRVKPYVARNKNDTADAEAVCEAMSRPRMRFVPVKTAEQQAALMLAGMRDQLIARRTQLSNTIRGYAAEFGLVAAKGLDKIEPLLARIAADESQPALVRELFAALDAEYAELKPKLRKIEAQLLAWHRQNELSRRLAEIPSIGPIGAALMVMKVPNPQAFRSGRDFAAWLGLTPKDHSTAGKQRLGVITRAGDEALRRVLVLGATAVIQQVRRGRGHPSPWLVALLRRKPPKLAAVAFANKTARIAWKLMVSGERYRGARATGAGHGNACSEGASPQPRKDRAVLATVKARPGSTAARRAGNATAGLDGGCARRVTAIAVGTKKRSAVEQRNESQGHV

SEQ ID NO: 337664 - protein, 364 aa, unidentified
MKLVKDIVNRVVRYIGMDVHKDSTTAVVLDAQGKLVMQVTLRTEGGVLVDFLRGLSGALHLTFEEGTYSAWLYALLSPHVEKLVVCNPRQNALLKQGNKSDPIDARKLAELLRLGSLTAVYHGSPGMRTLKELAASYATLVNDGTRVMNRLKSLYRGRGIRCGGTQVYSPRHRDQWLEQLREPGAQQRAKLLYQELDLLLKLRPQARRALLSESRKYPAQKILRTIPGLGPVRVARLLALLQTPHRFPNKRKLWGYGGLGLLTRGSAQYRLQQGELVASPKGVTVRGLNPAHNAPLKDIFKGAALAACQRPGPLREAYERCLREGMQEHLARLTIARKIATLVLTLWKRGERFNAQRLRREQAA

SEQ ID NO: 337665 - protein, 343 aa, unidentified
MEQYVGLDVSQEQTSVCVVDGGGKVIWEGKCTSTPEAIAATLRTRAPEAVRIGLESGPLSAWHWHELRKLDLPVVCLDARHAKAALALQLNKSDRNDARGLAQIVRTGWYREVAVKSVDNHLVRSLLTTRAQLVRMRVDLANQIRGVLKPFGLIAGKGGGRPFAERVRALVAGGPLQEVAGALLAAWQAIGEQIAVLGRRLVAVARQDEAVRRLMTAPGVGVLVALAYVSVVDAPERFAKSSSVGAYIGLTPRRYQSGEADYTGHISRCGDKLLRTYLYEAAGIILHRVPRWSALKAWGTRLARKIGTRKATVAVARKLSVILHRMLRDSSEFRWSAKEVQAA

SEQ ID NO: 337666 - protein, 482 aa, unidentified
MKPKQQEETRKATCRPTQGHWHQMNRKRRREMMRRIQSENLSLEVVHPDAAGIDIGNESHYVAVPPTRDSEPIRRFGCTTAELKSMADWLKQCRIRTVAMQSTGVYWIAVFDILEEAGFEVYLVNARETKNLPGRKSDVQESQWLMKLHTYGLLRNSFRPSQEIRTMRTYWRQRNDLVRGAARHVHRIQKALTQMNVQLANVLTDVSGVTGQAIIKAILAGERDPHKLAAFRDPRVKATEEEIARSLEGNWQEDLVFVLKQEQDAYEFCQKQMAECDRRLQDYLQQRKDRSAGADLPEEKRKTRLKNKKGNKPQFDLRRELFRMTAADLTRIDGIDVMTAMTIISEAGWDMSKWKTEGNFASWLRLCPDNKISGDKLIGKGRLPSNNRVTIALKMAASSLRTSHSYLGAQFRRLKTRLGAPVAIKAMAAKLARLVYRMLSHGMQFIDRGADFYEAQHRHRQINALKWKAARLGFQIIEAPAA

SEQ ID NO: 337667 - protein, 434 aa, unidentified
MEVVYSRCCGLDIHKKLVVACRIVPGAEGQPCKEIRTFGTMTEELLQLGDWLAAEQVTHVAMEATGIYWQPIYNLLEAGFELLLVNAQHIKAVPGRKTDVKDCEWIADLLRHGLLRPSFVPPRPQREFRELTRYRTTLVRERGAEVNRLQKTLEGANIKLAGVASNILGTSSREMLEQLIAGTTDAEALAELARGRLRAKRPQLQQALTGQVGPHQRFLLARQLAHIDALEQLIAEVSTEIGQRLHAATGFQPPEPQAPPSTPAADTPAPLAAIAQRLQTIPGVGQRAAEILVAEVGVDMQRFPSAAHLASWAGLCPGNHESAGKRRSGKTRHGSPWLRTLLVEAAQAASRTKETALAARFHRLMGRLGYKKALLALAHTILRIVYALLKNGTTYQERGPQVDDQARQAAIRLGIRRLQALGLTVTVAPAPPAA

SEQ ID NO: 337668 - protein, 347 aa, unidentified
MRFYTETHKHYCGIDLHARTMYVCILDQEGQVLLHRNLPCDPERFLRTIAPYRDDLVVAVECIFTWYWLADLCAQEGIAFVLGHALYMKAIHGAKAKNDKIDSKKTAALLRGGLIPQAYVYPPEMRATRDLLRRRLHFVRHRGQLLAHIQNTHHQYNLPAPGKRIAYRSNREGIGEGFEDVSVQTSLAADLALIDHYDVVIRDLELTALRQARGHDLDSYERLKTIPGIGKVLALTILYEIHDIGRFPRVQEFASYSRLVKCQKSSVGKVLGTSGNKIGNAHLKWAFSEAAVLLLGKCPEGKKLLARLERKHGKGKALSILAHRIGRAAYFMLARKRAFDLERFVRS

SEQ ID NO: 337669 - protein, 349 aa, unidentified
MSQTSNSSISVVGIDIGKNSFHIVGLDERGAIVLRQKWSRGQVETRFANMPPCLIGMEACVGAHHLSRKLSALGHDARLMPAKYVRPYSKGQKNDFRDAEAIAEAVQRPTMKFVATKTADQLDLQALHRVRERLVSQRTGIINQIRAFLLERGIAVRQGQRFLRIELPRILATSPEVLSPRLVRMIENLTGDWHRLDERIADLSNEIEAIARQDSGCERLMSVPGIGPIISSAMVAAIGGGDAFSKGRDFAAWLGLVPKQMSTGDRTILGRISKRGNRYLRVLFVQAAWVVLIRPKSWERHGLKPWIEAAKKRLHHNVLAIALANKLARIAWSVLARGRGFEVSKLQVA

SEQ ID NO: 337670 - protein, 414 aa, unidentified
MPNAADHPEAPAAIQTNLSAIFVSLELSRKVWLITSLSPGSGEKMSKHSVPACDVAAVLLRFSELKRKAQARAGKSFPIVTIQEAGLDGFWLHRLLQSEGVESHVVDPASIATSRRRRRAKTDRLDGEALLRALMAFKRGEPRVCAMVRPPSPEEEDRRHISRGREVLVAERIEHTNRIKGLLFSQGISNYDPLKRDRRKRLDELKTGDGRPLPPHLKTRIVQELDRIELLLDQIKAVEAACDAMLAAPRAAKPKADAQQAASPSPAAPKVEAGQTVSPPTAVQMLLKVKSIGPQLASLLWCEALYRHFDNRRQVASYVGLAPTPWQSGSVDHEQGVSKSGNPRLRAAIVELGWLWLRHQPDSALSLWFKQRVAANDGRRKKPTIVALARKLLVALWKYVTFGVVIEGAVMKQA

SEQ ID NO: 337671 - protein, 347 aa, unidentified
MKTSTQDTGLYGGLDLHGDNVFCALLDAERNVVFEKRLPNDIDTIRLALEPYKERIRELAVESTYNWYWLVDGLRRLGYAVRLANPARMQENIGLKHANDKTDARFIARQLTFGCLPEGYVYPEGTRGVRDLLRHRMHMVRHRSAELNRLGALAARQTGRGIGAAKVAPRELPALFGGHAPSIAIAEASLRHVEYLDGEIKALEKSVAAQIPDEAAYASLTAMPGIGKILASCILLETGPISRFKSAGNYASYCRAVPSEHTSNGKKKGEGNAKSGNRYLAWAFVEAANFAARHDPLIRAWLQRKQARSRGLRVVAIKALANKLAKACFFVLRDGAPFDSARLVGGA

SEQ ID NO: 337672 - protein, 340 aa, unidentified
MIRFYVGVDLHRNNFTYCMRLKNGEEKMGKLAIRELKGFARMLGKHAAVAVEATGNTWMFCQEMKEKVGRLVVVNPTQFKVISRSTKKTDKHDARILAEYLEKDMLPEVRMKDGLQSKISSLTQTREKLVQLRTVLKNKINNLFASRFIELRREELSSEKGLLKVLTCRFDPITDTELRVMVNEIRSLNKSIEELDRTIEENGSKMDGFDNLKSIKGIGSKGAATLLSVIGKIEDFRSAKQLAAYIGIVPRVSNSNDTVCHGRITKLGSKIARTVLVQCSLVAKRYSPYLHRFHESVKSRRGGAKANIALARKFLEIIYKTLKNNWIFEDFTKFKLAENN

SEQ ID NO: 337673 - protein, 415 aa, unidentified
MKANPHTQYAALIGLDWADKKHDVCLMPSNTGKFEYTQFTHTPEAIEDWALALHKRFPHQRLSICLELKSGPIVYALLKYPWFDLYPVAPTTLAKYREAFTHSGAKDDPTDAFLMVDFTLRHNDQLRLIHPDNEETRILLRLVEQRRLLTSEKVRISNRVTRALKDYYPQSLNWFNDIDTVIFCDFIKKWPNHSKANRAHKSTLVKFFHAHHVRSQDRIDKRLNDIKTSMPLTEDNAVIEPSQRYVLCLIKMFKSILNMIKEYNQEIAKRFEAHPDYEVFHSFPGAGPVYAPRLLTALGSQRDRFESSDELVRQVGVAPVVKRSGQSTWIHWRYNCPKFVRQTFVEWANQSIHYSYWARLYYDRQLAKGKAHQTILRGLAFKWARIIYRCWKNHEPYNETRYLMILKKKGSPLVV

SEQ ID NO: 337674 - protein, 355 aa, unidentified
MNDGKYIGIDVHQATISVAVRDSRGNLVMEAILETKAETILQFLRGLRGSLYVAFEEGTWAAWLHDLLQPHVACVLASDPRKNALLKAGNKSDRIDARKLSELLYLNKLSPVYHGEQGIRTLKELARSYITITRDLTRVMSRLKAIYRSWGIPCADQQVYAPRYRAEWLAKISEAGVRRRAELYYQQFDALAALRQGTRGELLAEARKHPAMRLLRQIPAIGPIRAALLIALIQTPNRFRTKRQLWAYCGLALRTYTSGEYRFVAGQLKRSKKVLAVRGLNINHNHDLKNIFKGAATRAAATAGPFQGFYQDCVARGMKPHLARLTLARKIAAITLLVWKKGDRFDAEHLKQQAA

SEQ ID NO: 337675 - protein, 342 aa, unidentified
MDRLSPVTRICKVGFTMENELHFIGIDVAKAKLDVDILRPDGRHRCKKFDNTLSGHEALVRWLRGHDVNRAHVCMESTSTYMEDAAAHLSDAGYTVSIINPALSKAFAQSEGLRSKTDKVDARMLAHFCREKRPSAWEAPHPTERALKALVLRHQALTEMQTQEKNRRETAPEVQLASIDILLGCLSAELARIEKQIKDLTDNDPDMKRRRKLLNSIPGIGEKTAAVLLAYTGLRLKFGTARQFAAYAGLTPVQHESGSSVMRASRMSKAGPVQLRKALYMPALSALYHTAWGKAFRKRLEESGKRAKVIIGAMMRKLAQVAYGVLKSGKTFDASQHELLIA

SEQ ID NO: 337676 - protein, 364 aa, unidentified
MSIVPVYVGLDYHDDSIRVCVLDEEGELVVNRDVRNHPDAVRDLIRCHAGLVRGVALEACSGAADFATQLEAATGWSTKLAHPAAVQHLKQGPDKTDFGDAWLLADLLRVNYLPEVWLPDEATRQLRRLVRYRSGLVAERKNVKLRIRALLREERVVSCGHNPWTKPWMLWLAQVALKIQSRWILDQEIRRLKQLDEDVSQVEQRFAEATQGDPVVEKLLKQKGVGLVTAVILRAIIGRFDRFRNGKQLSRYTGVTPRNASSGKRQADAGLINEGNELLRGVVIQLAQRLPRQDPHWKEFHARMRKTKPANVATAAVANRWLRKLYHEMVPSPMDPSHTAENLGSGSTNGGPPHSPRPRIDLVG

SEQ ID NO: 337677 - protein, 409 aa, unidentified
MRYYLGVDWADQTHAVWVVDEGGTKVAMRTVPHTAEGLTEWGRELDEWRAQGIELWAAIERPEGRVVDFLLDHGVVVYAVNPKTLDRARDRFRQSAAKSDPFDARVLADFLRTDHAHLRAVQPSSEAAQELKLLTDDYQRQIRQQTRLVNQLTTTLKAYYPRGLEVAELTTGLAREFLQAYPTPATVTALTERQWQRWAHAHRLSQTRTQQLWVVLQRPQLPVPPHVVRAKARLMQSLVAQLTVVMEGVGAYREAIEDFFARIPAAQWIRTLPIGDHGITAPTLWARLGDAPGRWESFRHLQAQAGTVPVTIRSGKQQVVRFRFACDKSLRYIIDHVAFLSLRWSEWARAYYAEQRARGHSYRQALRALSAKWLKIIFVMWERRVPYDEQYHLAMMTRQQLRQRQKKVA

SEQ ID NO: 337678 - protein, 343 aa, unidentified
MQTITTIGLDIAKSVFQVHGVDAGGQVIVRRQLKRRYVLTFFQKLSPCLVGIEACASSHHWSRELQALGHTVRLIPPAYVKPYVKRQKNDAADAEAICEAVTRANMRFVPTKTPEQQSGLVLHRARHLFIRQQTSVINAIRAHLAEFGIVAPVGRHGVEELLNVVIDPNDKRVPDIARACLSALGDQLQRIKQQILEFDRLIRAWHRSNEMSMRLEEAPGVGPVLATALVAAVADPKSFRSGRNFSAWIGIVPKQHSSGGKNRLGNISKQGDRYLRGLFVAGALSVIRYAKIHGSKHRPWLTALLARRPTKVAAIALANKIARMVWAMMARGERYKEPVALAR

SEQ ID NO: 337679 - protein, 415 aa, unidentified
MKFEKNTRGIKRYIGFDIHKEYALVGGQNAQQEWVMVPRRIGMEKLREWAKANLRRGDAVVIETTTNVWDVYDIVVPLVSYVVVAHAGGVRQIAEARVKTDKKDIERLIRLLIADIVPEVWVPPMEVRELRGLISYRNRLVKTSTMIRNRLQSLIHRHNLILPKGKLRDKAWWEMQKLSALEKIQIRQEQAMLDELEKHKGEVDGELGRQSLGEVWGKQAMRLLQLSGFGVIVSMTVLSAIGDVTRFESAKKLVGYSGLGAGVHDSGKEHIEKRITKSGRKELRWAMVEAAWRAIRISPYWKEQYEKYLRRMRKPNQAIVVIARKLLVVVWHVLTKEETDERVSEEDLAYKMLVLSWDLNEEVRMGLTYKQFAKYALMKLGVENDITRFVRKKVPRRLAPRAEVLERMAELGIAQ

SEQ ID NO: 337680 - protein, 340 aa, unidentified
MQLYAGIDLHASNNFVAVIDESGKRVFKKKIPNEGEIILSILESFKEEMTGVVVESTFNWYWLVDLLIEEGYRVHLANPCAIQKYSGLKHCDDKHDAFWLAEMLRLHILPEGYIYPKEERPIRDLLRKRGHLVRLRTSLILSLQNIVARNCGVRLSVNDAKRLKENVVVPLLESNDDLAMAGLVSKETIDFFTRKIWAVESMIEQRVQLKDQYRYLLTIPGIGKVLALTIMLETGPISRFPKVGDYVSYCRKVGSKWTSNDKAKGKGNKKNGNKYLAWAFSEAAELARRYNTQCRSYYNRKMQKTNFMVAHQALAHKLARAAYCIMKEDVAFMPEKLFAM

SEQ ID NO: 337681 - protein, 340 aa, unidentified
MNTVCRIGLDTAKNVFQVHALDAAGRKVATRRLRRTQVLDWFARLDRASDCVVGLEATGGSHYWARELQRLGYRVRLLNPQAVKPYRQGQKNDARDAAAIAEAVAREVVSEAPIKSEEQQALLARQNYRRRLVDARTALGNQLRGFVAEFGIAVPQGWKRLKQRLAEAVEDADNGLPADLRAVLADGADELRELDRRIDAQDREIARQAHADERCRRLMELDGIGPLTALRLVAICGDGTAWGNGRGFAVSTGLTPRQHSSGEQVRLGAITKQGDVELRTLLIHGSRSTLRRRQPLDPWTERLRQRRPHNVAAVALAHKRARIAWAMLAHGTRYQAPTAA

SEQ ID NO: 337682 - protein, 464 aa, unidentified
MTAGKQLWRNRKEKKEWARRLQSEDPGLEVVHPHAAGIDVGNSTHYVAVRPDRDPEPVRRFECFTADLHRLADWLQSCGVKTVAMQSSGVYWIPLYEILEEHGLEVYLVNARHTKNLPGRKSDVQESQWLLKLHTYGLLNNSFQPVSEIRVLRTYWRQRGEQVRGAATCIQRMQKTLTQMNVQLANVISDISGLTGQAIIRAIVAGERNPLKLAMLSDPRVHASHEAIAKSLEGNWRPELLFVLHQEVDMYDTYQKRIAECDQRLQKHLASFTRPLPIQPPTQKLKTKKPAAKNAPRFDLSSELQRVTGVDLTRIDGIDVMVAQTLLSEVGLDMSRWITESHFASWLGLCPDHRISGDKVLSRGTRRVVNRAATALRQAANTLMRSRSYLGAQYRRLRTKLGAPKAITAMAHRLARLVYRMLKYGQTYVDKGTQYYEERFRQQQVQLLRKRAAKLGLQVAEIHA

SEQ ID NO: 337683 - protein, 403 aa, unidentified
MISVGIDVSKGKSTVCILKPYGEIVSKPFNITHTQKDLSELSSMLFRLNDEVKIVMEATGIYHLPVLTYLQEKGFFVSVINPYLMKSYRNESLRKAKTDKIDSRIIANYGIDHWFKMKEFQTSGEIYEELKLLGQQYRHYMKLHLLSLAELTHLLDLTMPGIKNLLASWNETNRKDKRSDFVERFWHYDVITSMSEQEFTEEYILWAKEKKYVPSQEKAKVIYTLAQESIPTLPSETSSVKILVTEAVRVLKEVDATLGLILSRMQEIAKTLPEYSVVREMGGVGNTLAPKLIAEIGDVRRFRNGKALVAFAGIDPPPYESGQFVGCNRKISKRGSASLRKVGYETMRSLKMRSRPEDPVYRYVVKKESEGKSKKAAKIAGLNKFLRIYYARVTELYKIYNLI

SEQ ID NO: 337684 - protein, 331 aa, unidentified
MKKCHRVGVDVSAKELVVAIEASGRREAPIVFSNDANGHRKLIQRVTKRGASAQVVLESTGTYGLDLALALHRAKRVEVMVANPRAIAHFARASLQRSKTDRLDAETILGFAMRMPFEPWSPPAPQILELRALSRRIEAMSKTMVQEKNRLHANDQSEELSEFVKQDIRELAALLECRIVRLRQQALLVIEQSEDLAKAFAHLTTIKGIADASGITILAELAVLPADMTTRQWVAHAGLDPRQYQSGSSVYKPARISRTGNAHIRRALFMPALVAVQWEPHIKGFYEHLLDRGKTKMQANVAVMRKLLHAIHGMLEHDQDFVGEKFFAMNG

SEQ ID NO: 337685 - protein, 401 aa, unidentified
MNHWFAGLDWAASIHALCVIDNTGAVREQFEIAHDAAGLRELFARLHRYAPVPIAIERPSGLLVDSLVEAGYSVIPIHPNIVKATRPRYRSHGAKSDASDAYLLADLLRTDGARFNALQPQSDAICALRALVRGRDDLVATRVQLANQLRSLLESFWAGAAAIFAEIDSPIALAFLQRYPTPASAAHCGEKRLAAFLAQHRYCGRRSPAALLERLRAAPVGHAAELEADAKGTLVHALATALRVVVVQITQLTSRTQHAVAELPDGQLIMSLPRAGQVCAAQILAELGEVRDRFPSDAQLAAEAGVAPLTYQSGKRRTVTFRWACNHRLRRAITCFADNSRHASQWAARVYAAARARGCDHPHAIRILARAWTRVLWRMWVDRRAYDPARHRAALACNALG

SEQ ID NO: 337686 - protein, 316 aa, unidentified
MEDGRAMYQLYVGSDVAAETFVVAWISPGGKPATPFTGEQTPTGFAALQRRLQGTGAAPAATLVVLEATGSYWVALAVALHEAGYRVAVVNPRQAYHFAKAQLRRAKTDALDARDLAQLAAALRPAPWTPPPAVYHEVQQRLVARDGLLTMRTQARHQRHALLQWPVVVAAVREHLDELIADLDRRVAALEAEIAAVLKESVWAESLACRTSAPGIGLVTASWLLVGTLNFALCAGPEALTAYAGLAPVPRESGRSIRGRPAIGHDGNSRLRTALYMATLSAARYNPAIRACYQRLRAAGKPQQVARCAAARKLLH

SEQ ID NO: 337687 - protein, 383 aa, unidentified
MDALIERAAGLDVHQGSVVACIILGAAGRRPTKEVRRFGTMRQDLAALRAWLLEKGVTHVGMEGTGVYWQPVYAALEDAFTLIVGNASHMRNVPGRKTDVKDAEWIADLVRHGLVRASFVPPPEIRVLRELIRHRKALVGTLAAERNRTLKLLESAGIKLAGVMSDVFGVSGMLMLRALAEGTADAATMADLAKRRLRRKRDRLALALDGSLAEHQRFLLGLHIRRLEEIERDLAEVEAAIGAAMRPFAAQQALLVTIPGVDALTAAAIVAEIGTDMAAFGTAQRLAAWAGLCPANHESAGQQKRRGTRKGNPYLKAMLVAAAISASRTKGTYLRDKFHRLKARMGPKKAAVAIAHKILTAVFHMLQRAVSFIDLGARRGHRA

SEQ ID NO: 337688 - protein, 388 aa, unidentified
MIYVGIDIAKLNHFAAASSSDGEILIEPFKFTNDYDGFYLLLSNLAPLGQNSIIIGLESTAHYGDNLVRFLISKGFKVCVLNPIQTSSMRKNNVRKTKTDKVDTFVIAKTLMMQDSLRFMTLKDLDYIELKELSRFRQKLVKQRTRLKIQLTSYVDQVFPELQYFFKSGLHQNSVYALLKEAPTPAVIASMHMTHLAHLLEVASHGHFGKEKARELRVLAQKSVGVNDSSLSIQITHTIEQIELLDSQLFHTELEMANLVTCLHSVIMTIPGIGFINGGMILGEIGDIHRFSEPKKLLAFAGLDPSVHQSGNFQAQRTRMSKRGSRVLRYALMNAAHNVVKNNATFKAYYDAKRAEGRTHYNTLGHCAGKLVRVIWKMLTDEVEFNLE

SEQ ID NO: 337689 - protein, 387 aa, unidentified
MNVKARRTKKQVNVENWAINLLPKEELSKKIEVVEKELRSYTWRDLETNGKFAKNDKLSFITDDMLIVGCDIGSENHYIRAIDVRGRELSRGAFEFSNTSEGFANAKEWVLALAAKNDKKQIVLGLEPTGHYWFALAAWMISNGISVVQVNPYAVKQSKEIENNSQLKDDRKDPKLIANLVKDGNYGMPYLPEKVYADMRRLSMFRDQLTEDRIRNINRLHRELKIYFPEYMDAFGKIDGAFTLEILKVSAIPSDITALGAEGMKNIWHNAKLRGRGYSRANEIVSYAEKSVGLTDGTDAGREAVKWYAEQILRLDEQLAEIESALHEKCREIPYAENILAINGVGENILAGILAEMGDISRFDDVKEIQKLSGMGLVACSSGKHKG

SEQ ID NO: 337690 - protein, 345 aa, unidentified
MELHTIGIDLGKTVFHLVGLNLGGEVVVRKKFSRTQLLRFTANVHVGLIGMEACGGSHFLGRALREQRHEVRLIPAQYVKPYVKTNKSDYIDAEAIAEAVARPTMRFVPIKTDDQLDLQSLHRVRERWVMRRTAVINQIRGLLLERGITLRKGRHHVHAALPLILEDADAKLSGAVRMLLAQLKLDLDQLAARIDEADAVIRKTAHENEACRRLVAIPGIGPVTATALIAAIGNGGAFHKGREFAAWIGLVPREHSTGGQQKLLGISKRGNSYLRRLFVQGARAVMQQRTKQSSGLSAWLAQLTSRTHRNVVAVALANKLARIAWAVLAKNEPYRHPILADAAAA

SEQ ID NO: 337691 - protein, 394 aa, unidentified
MTATRTPVIDQKTPALYLAFELGWSEWKLAFAAAPADAPRLRSIGARNTQTLLKEITQAKKRFGLPEDAPVRSCYEAGRDGFWLHRYLLAQGIANSVVDSASIEVQRRGRRRKTDRLDAAKLLNMLQRWHGGEQKVWSVVQVPGADDEDRRQLHRDLVELKAERTQHVNRLKGLLAGCGLALAQVNETFPEVLAGLRTWDGRPVPPALQQRLLREHERWRFVGRQIKDVENERDRTIRKSEEPPVSKVRQLLNLRGIGVNSAWLYVMEFFSWRQIRNRKQLGSLAGLTPTPYQSGDSAGEQGISKAGNRRLRTMAVEIAWCWLQYQPDSALSAWYQQRFAKGSSRQRRIGIVALARKLLVALWRYLEVGEVPKGATVVDWKTKYRGRKQAAAAV

SEQ ID NO: 337692 - protein, 355 aa, unidentified
MNSEKYIGLDVHQATISVAVLDSTGKLVMESILETKAATILEFFTGLRGTLSVTFEEGTWAAWLYDVLHPHVANLIVCNPRKNALIKDGSKSDRIDAHKLAELLYLNKLSSVYHGENGVRMLRELARSYLTMVKDLTRVMSRLKAVYRSWAIPCTGRDVYYTRHRAEWLGKIKEAGVRRRAERLYQQLDMLQHLRQQARRELLAESRKHPITARLRQVPSLGPIRSALAVALIQTPHRFRTKRQLWAYSGLALETRTSAEYRYVKGQLHRAKKQISIRGLNKDHNHDLKDLFKGAATRASVLPGPFQDFYQRSLAKGIKPTMARLTLARKIAAITLTLWKKGENFDADKLKAQAA

SEQ ID NO: 337693 - protein, 415 aa, unidentified
MERVYERCAGLDVHKQQVTVCVHVPDQAGVRSELRAEFATMTGDLLGLRDWLKGLGVTHVAMEATGVYWKPVYYLLEDDFELLLVNAQHVKNVPGRKTDVQDAQWLCQLLEHGLLKSSFVPPQPIRELRDLTRYRKSLVWERGREANRLQKVLEDANIKLASVASRPLGVSGKAMLKALCEGESDPEALADLAKGKLRAKLPALRAALEGRFREHHALLVSHLLAHIEYLDETINSLSAEIEERVRPFERQVELLCTIPGVAERTAEVIIAELGPDVERFPSHRHAASWAAVCPGHDESAGKRRSGKTRKGDSWLRVALIEAANSAAGRTKDTYLRAQYLRIRRRRGHKKAIVALAHSILVSAYHVLHDEVSYQELGGDYFLTREDRNRITQRLVRQLERLGQTVTLEPTTVEAG

SEQ ID NO: 337694 - protein, 343 aa, unidentified
MQIRSVGIDLGKTTFHLVALGDNGKVLLKKKFTQKQLIAFTANMQTCLIGMEACSGSHFLGRALREQGHDVKLIPAQFVKPFVKSNKNDFIDAEAIAEAVDRENMRFVPIKTDDQLDLQALHRVRDRLMARRTSLINQIRAFLLERGIVFAKSPIRLREALPEVLENVNENLTPRMRNLVAMLWSEWKDLELQIVQMNDEVERIASSDAACRRLRQIPGIGPLVATAIVASIGNGAAFRKGREFAAWMGLLPKQHSTGGKARLYGISKRGNSYLRKILIHGARAVVLRSKRDRIAMGAWMSSLETRAPRNVLIVATAHKLARIAWAVLSTGQDYRAVPEALTV

SEQ ID NO: 337695 - protein, 376 aa, unidentified
MAVIGLGARVGELTIRVGLGGYRELKVWARSLGAVRAFGIEGTGSYDAGLARFLRAAGHTVHEAGRPDRGRRHRHGKTDHLDAEGAARAVLSGQATALPKAGTSVVEMIRHLKVARDTAVKARTQAMLALKAIMISAPPAQREQLEAVADRMALVWHLAALRPGPLTTTTASAKASLRAIARRWLDLDVEIRSHDAHLDRLTERCAPEMLILVDDEPERIHSKAAFAKLCGACPVPASSGKTSRHRLNRGGHRQVNAALHRVVVVRMRTHQPSLDYVRRRTAEGKSKREIIRCLKRFVAREVFGYLCRPPMPPAQRKSPLDRYRSIGASGRCASYPAASGFLARCLEALAEAALGGMSAAPRRVFLNLVMHAVTIK

SEQ ID NO: 337696 - protein, 402 aa, unidentified
MFYAGIDWADDHHDVVIIDEAANTRGSLRVAHSVSGLSQLNSFLKEMTPDPALLACIIETSQGLLIAALLEAGWAVYPVNPKTVDRKRGAAGAKTDKIDAYLLAKTGRSDLADLRQLKPDSAVVQELKELTRDQDNLIEMQTRLVNQLTACLKAYYPAALELFTKLHQRSTLLFLQSYPTPDQAHSASLEELTMILKTAGHKRAAEYAPRIYQRLHQPHLHSNAVTTRTKSRLMLALVAQLLPLVEEIAAYDKEVESLFLSHTDSEMWASLPGAGKRLAPRLLAEIGDDRSRYEQPTNLQAVAGTSPVLFESGNYSKARRRLACIKPLRNALYQFAWQSTRQEEWAEEYYRRKRAEGKSHSVALRALSNNWLRIIHALWRKKESYVSATFQKAQQTHLRKVA

SEQ ID NO: 337697 - protein, 347 aa, unidentified
MGTPSYEGKQVYMGLDVHREFFVASCICDGVVVKRCRMPGTAEAVIALVSKEFGGASVRVAYEAGYSGFWLYRKLTAGGIDCIVVHAASIEVSSRDTVKTDKRDSLKIAQQLAAGRLRGVRVPTEEEEQQRLLTRTRDQLMNKKRRVMVQIRMRLHYFGLFPESIQGRIKLQDVEDILVGLEGELQRTIGMLRDEWIELAKRIKEIDRLLVEQAKEDPLDAVYRSVPGVGPLISRILSAELGDMSQFRNERALFSFTGLTPSEYSSGGHICRGHISRQGNTRLRHMLVEAAWKAVRKDPVIKEYYIKLSERIGKRKAIVAVARKLAGRIRAALRKHEHYTLDYRAAA

SEQ ID NO: 337698 - protein, 412 aa, unidentified
MGSLLQRSLPTATLVVAIDPGKARNRVWLSTDASGLVVEPLSVPVLRSGLDEVDALVRRHCPDGGPIFAVEATGALHRAWVAELNRRFPQAVRVFAPSETAAARAQLGSRRFKTDDRDCAALTYLARQGQGRSVPADDHEALLAAVRHRRGLVAERKAAQQRLHDQVNALCPGLSAPTGQGRSLDLAGVTGQAFLQCLIDFGGRPVGARSLRARAPGRLSAANAAFWAARWKDCLPPPAHVAAGVDRLARSVRRWRYLNDDITAVETDLETLLAGTDGQILTSLPGVKTVRAASFAAFSLPVTRFPDAEHLYSATGLAPASYQSSSIDRPGRISRQGLPEHRDALMNMAWGLAQHCPPFTDREEQLRIRGMKPMQVRVALARHTCRLAYRMLTTQDAFDEQRYRGNRHQVRR

SEQ ID NO: 337699 - protein, 341 aa, unidentified
MKNLFIGVDFSKEKVDVAIIFADGLTETAARVFNEFKTTVSGYKQLVKWVEQNSYGIDSSLWLFCGENTGDYSKGLCNFLYGKGYDMWLENAKSIKDASGLRRLKSDRADASMIAEYAMRNYDKAVMYEPLSESLVQLRELFLYRQMVVRHRCSFQVRRGEKKLTMEKSPVKTMISQSGRHIVSELNKEVEKIDRRIAELIKSDEELTEVFTIVTSVPGIGTQNAVCLMVYTDNFRRFNYDSRKISCYYGIAPFGKDSGTSVHSDPHVHYMANRQIKAMLTQAALAAVNFNPVMARYYMRLVERGKKKQVALNNVKNKLVHLVNAMVRNRQIFTPEYKITA

SEQ ID NO: 337700 - protein, 428 aa, unidentified
MAAVMIGVDPHKASHTAVVISAAEEPLGELRVRACVAQAERLLAWAAAWPQRTWAVEGAGGTGHLLAQQLVSAGERVLDVQPKLGARVRLLAAGDVNKNDPNDARSVAVAALRSAGVREVRPDDHAAVLKIWSKRYRDLGRTRTQVVCRLHAVLGELIPGGVPKVITVARAARVLNAIRAEGAVQAARCELAAEFVEDLRRIDARIRETRKKLAVTIAAAGTSLTGLFGVGPVIAAAVIGDVRDVSRFPGRDHFAAYNGTAPIEVSSGPRKIYRLSRRGNRRLNHAIHMAAITQIRYRHSQGRAYYDKKLAEGKTPKEALRALKRQVSNAIFACLQADAAQAAARAKDLGGQQGNDSVASAAGSHPRHRLFGQATPRPRHHPTATPGGPSPRPARGRGTPGHSPIAAKLPSATPKVQVERPQRSEEGL

SEQ ID NO: 337701 - protein, 334 aa, unidentified
MELIKQVLGIDISMDTFICRVGAITADQRTKIGTHKIFNNNIQGIRQFYKFAQSQQIDGVTQYFLMEATGVYYEGLAYFLKAQGAHVIVVLPNKAKHFAKTLTIKSKTDPIDAHMLTQMGLEKRLSEWEPPSELMKELKLLTREHLSLKELKTDAKNRVHAKTHSFKPGKDTIRRLRREIKLYETLIKEVELSIRSLLQSDTLMWVKIQNILRVNGVGLMTVAKVLAETNAFALIRNGKQLTSYAGLDVVFNDSGKHQGKTRISRKGNSHLRQSVYMPAISAIKSNPNLKSYYDRIIEKGKPKKVGVIAVARKLLLLIYFLWINETEYDPAYAA

SEQ ID NO: 337702 - protein, 411 aa, unidentified
METLIRRCAGLDVHKASVVACVRVIDENGELLSFTQSFGTTVSDLLKLNDWLASYAVTLVGMESTGVYWKPVYTLLEAEFECWLLNAQHLRNVPGRKTDVADAAWIAQLVAHGLVRPSFVPPKEIRELREVTRYRKTVIQERSREAQRLHKTLEGSGIKLSCVATDILGVSGRDMLQGLIAGTHDPDVLADLARGRLRKKLPALREALMGWFSPTHRILVSELLAHIEYLDESIERLSGDVAKMIAPFAAAIDLLDTIPGVDRRNAEVILSEIGPDMSRFPSSGNLASWAAMCPGNNESAGKRFSGKTRKGSKWLRVALVESAQAAAHTKGTYLAAQYARIKGRHGHKKAIVAVAHSILVIAYHVLQRGQPYNELGGDYFIERQNKDAYQRRLVKQLERMGYEVALTTHAA

SEQ ID NO: 337703 - protein, 366 aa, unidentified
MLRPARKAPAQKAHSENPMNALHYIGFDVHKKSISFCVKTAAGEIVEEGMIPAQREVLRQWARARRQPWRGAMEATLFSGWIYDTLKPYSEQLEMAHPAKMKAICAGKKKSDTIDARTIADLVRCHLLPACYVATPRIRELRRLLRYRSLVVSEAVRMKNKMAGLLMETGALYVKEKLHRKKYFASLLEELEEVPESVIDLLRLSRGALEMFESTQKRLVRELLADPELAQRVERLMTIPAVGEITALTWALEVGDPQRFPSCSDAMSYCGLTAALKSSAGKQQRGPISKQRNRWLQTTLIEAAKLAPRWNPQLAALHARELERGHRNRATLAVARKLVAYLLAVDKSRQPFHLRLPPEGLTQKAA

SEQ ID NO: 337704 - protein, 341 aa, unidentified
MNTQSPSPVFAYFGIDVSKETLDICLLREVGKPLYGTFDNSPKGHGALLKWAINQARHAQRRFCIEATGTYGLALSLHLDQANEHISVVNPAHIKYSSADGAANKTDRTSAHQIADYTRLHRPERWTPPTPEQRELVALVRHRDDLVAQQAQVKTRLTDNTPAVTPAVRKSLNALLQSLSGLIADIDTQINAHIDSHPDMKREHELLRSIPGIGKVSAPKLLAEMLPVKQCHSAQSAAAYAGLSPKEHRSGTSVRRATRISKAGNKHLRTALYMPALIALRRNCRILEMAARLRAAGKSKMVIVAAAMRKLVMIAYGVLKSGQPFKPEGPTAGRIRTLATA

SEQ ID NO: 337705 - protein, 344 aa, unidentified
MNETTTIGLDIAKQVFQVHGVAEDSTLTVKRQLRRSEVISFFDRLPRCRVGLEACGGAHFWARELTALGHDVRLIPASYVKPYVKRGKTDAIDAEAICEAVSRPTMRFVPIKTVDCQAGVMLLKTRHLLVKQRTQSINSLRGHLSELGIIAARGTGKVETLIAIIRDKTDQRIPAVARRALEMLADQVEALARRIATLENEIVAEVRRDDTMRRLATIPGVGPITAATIVALVPDPRAFTSGRHFAAWIGLTPKMHSTGGKERLGRISKMGNPVLRSLLVVGATAVSRHARRGATVSPWLTGLLARRPAKVAAIALANKMARIVWALLMKGGVFTRRPATARSM

SEQ ID NO: 337706 - protein, 406 aa, unidentified
MRFYIGLDWADAEHAVWVEDENATKIVGRIVPQTAEGLSEWGRWLDERRAEGIELWAAIEKPEGRIVDFLLDHGVLVFPVNPKALDRARDRFRISGAKSDPFDARVLATFLRTDHGHLAPLRPSSEAAQELKGLTRDHARQVRQQTRLLNQLTATLKAYYPRALEVCDDLKSQWARAFLREYSTPAALAALTARRWQRWTREHRLGAERTAELWAILQGPQLPVPAHVVRVNARLVGALLAQLEATVTAVEAYREAITDFFASMPAAEWATSLPGGRSGTTVPQLYAELGDAAGRWQTFRHLQGHAGSVPVTDRSGKQVSVQFRFACNMHLRQAVHQFAFQSLRKSEWARAYYDRCRKRGHSHHHAVRALAAKWLKIIFVLWTRQVAYDETYHLATMARQHLRQTA

SEQ ID NO: 337707 - protein, 355 aa, unidentified
MSSEKYIGLDVHQATISVAVMDSQGRVVMESILETKASTILEFFAGLRGSLFVTFEEGTWAAWLYDLLKPHVTEVLVCNPGKIPLHKQGNKSDQIDARKLAERLRLHDLKPVYHGENGIRMLRELARSYLTVVKDLSRVMNRLKALYRSWAIPCAGRDVYYRRHRSEWLDKIQEPGVRCRAERLYQQLDMLQHLRQQARRELLVESRKHTITAKLRQIPSLGPIRSALAVALMQTPNRFRSKRQLWTYSGLGLETRDSGEYYVVKGQVRRRKKQATIRGLNKDHNHDLKGLFKGAATRASVKPGPFQEFYQRSLAKGIKPTMVRLTLARKIAAITLTLWKKGEDFDINKLNSQAA

SEQ ID NO: 337708 - protein, 338 aa, unidentified
MSEITTIGLDLAKRVFQVHAVDAAGAVATRRQLRRRQVVPFFAKLPRCLIGLEACGTAHHWGRTLQALGHEVRLIPPAYAKAYVRRNKTDPADAEAICEAVSRPSMRFVPIKSEADQAMAAVHRVRERLIAQRTQMINMLRGQMSEFGKVVAQGPQHVKELVAELLKPESVPEPLRPVLLGLVRLLAALREQIAVLDKQILSWHRGNECSRRLVGIDGFGPILSSAMAVRVQQPERFRCGRDLSAWIGLVPRQNSSGGKIRLGAISKKGDVYLRRLLINGAQAVLNSKRATQDPWIARLLQTKPRLVAAVALANKMARIAWAVMVRGTDFRRAPATAT

SEQ ID NO: 337709 - protein, 317 aa, unidentified
MPQSERIVGIDVSKRQVEACLRARRERLSQPSTPEGRQAMIAWLRQHDVAVAVMEASGGYERDWAAALRGAGIAVRIVDPKRVRYFAKSAGRLAKNDPIDAEMIAWFAETFATEATPAHDPEREAVDRLMTVRAMLVRLESQIGQLGEHRQPPLVERAGRAIAGVIVRQRKRLETAIAARIARHADWAERHRIIQSVPGFGPRCAAGIIAWLPELGQIGGKPATALVGLAPYDDDSGGHRGERHIKGGRREIRDLLYMAALAATRCNPVIKAHYQQLRARGKKFKVALVACMRKLMVILNTMLMRGQMWNPPAVAVA

SEQ ID NO: 337710 - protein, 354 aa, unidentified
MAIAEAGRERARYWGTIQNEPAAVRKLIRQLGKKEELEVCYEAGPTGYGLYRLLKDMGVSCVVVAPSLIPARPGERVKTDRRDALRLAELHRAGELTGVYVPTAEDEALRDLVRARDDVREDVHRAKQRLIKFLLRHGIRKPEHLKNRWTKRYRAWLGTLKFELAAQETTFREYLHAIYEAEERVRRIETSLLEVASEGAHAKVVEALQGLKGVAFLTAVCLVAEIGRFHRFRNPRQLMAYLGLVPREYSSGQTVRRGKMTKAGNGHARRLMVEAAWSYRHQPGVKGALAKRLEGMDADIQMISWKAQTRLYGKYRRLVARGKQKNVAIAAVAREFVGFVWAVACLAESGQQSA

SEQ ID NO: 337711 - protein, 338 aa, unidentified
MKLKRIGIDLAKQVFQVHGVDSHEQVKCRKQLKRQQMLAFFRQLEPCLVVMEACGSAHYWARQLQAQGHEVRLIAPQFVKPYVKSGKNDVNDAEAICEAGSRPSMRYVEVKSAEQQAGQSVHRIRSRVVRSRTALVNEVRGLLAEFGLTEARTGIAAARELLRQAIDAQDNGLPAPMRELLRDLNQELQGHDERLANLDHLIQRQVREDERVKRLMEIEGVGPISATAVVSAVGDARQFRSGRQFAAWLGLVPSQHSSGGKERLGSISKRGDKYLRTLLIHGARAVLNRCQEKTDKRSDWLNQLLCRRNKNIATVALANKNARIIWAILSKGETYQPC

SEQ ID NO: 337712 - protein, 404 aa, unidentified
MSETRDKGSFSGFLGIDISKGTFDGCCIDREGKVLFHVSLPMNRAGFEKLITQVCAISLPQGSILIGMESTACYHVSLFSFLMALGYSVSVINPLLISNFVKLQLRKTKTDKKDAAVIARYLSAHGACLPQTMADSHVADLRELSRQRESLLHQMTALKCDIKRVLSITFPELERTMGIFTRTTLRLLGRFPSARALAQANREELAPLLHHASRGRSTPVSVDTLLKLARSSVGTANPSREMILRQKASILVHLEEHLREMTNTLIELCQSALEQDVEILTSIRGIGDKTAATFLIEMGGEIQKFDTHNKLIAMAGLDPSVYQSGQYDGHSRITKRGNRHLRRVIWLMTIRVIQFNDLFKSYYRKRIEDGLPFKKAVLATAHKLIRIIFVLLTRRTMFCHQVTS

SEQ ID NO: 337713 - protein, 414 aa, unidentified
MKSARNTLPMEPVNGVTCGIDWARDDHAVSIVDARGHEKVRCTIDHDAAGLRELLAVLDRAGAREVAIERPDGPVVDTLLDAGVTVVVISPNQVKNLRGRYGSAGNKDDRFDAFVLADTLRTDRARLRPLLPDTPATTALRQTCRARKDLVAHRVAVANQLRAHLKIVFPGAVGLFADLDSPISLAFLARFDCQDRADWLSVKRLAAWLASVGYSGRTHPRELYRRLSTAPRATTGTDGTATTRAFVAVLGSLGAEIKTLDADIAEQLSRHADAQIFTSLPRSGTFRAARLLSEIGDCRARFPTPEALACLAGVAPSTRQSGQVKHVGFRWAADKQLRDAVCDFAGDSRRANPWAADLYNRARARGHDHPHAVRILARAWLYVIWHCWQDEVAYEPAKHRALQTLLNQAQPEAA

SEQ ID NO: 337714 - protein, 361 aa, unidentified
MAKVRSWAGLDVHARSVLAVTLDAPSGELRSRRLPGETAKVVEFLATLPGPTRAAYEAGPTGYGLARALQAAGIGCLVAAPGKIERPAQDKVKTDQRDAERVLRLLMIDALHPVRVPTVEEEALRDLVRAREDVRGDLMRARQRLSKLLLRHDILYEDTSSTWTQRHRAWLRAQDLGGGAQATLLDYLGAIDTLELRRGALEKTIAELVPASPCAQTVARLRCLRGVDTLSAVGLCAEIGDFGRFQRPGKLMSYIGLVPSENSSGETRRQGAITKTGSRHARRLLVEASWHYRKTPARGITLQRRQDGQPAHIIAISWQAQQRLHRVWRRLAEDRGKRRTIVAVAVARELAGFCWALAHAD

SEQ ID NO: 337715 - protein, 408 aa, unidentified
MEVLHPRCAGLDVHQQTVVACARIVSEAGVAQHVETFETTTQGLERLRDWLAGHGCTHVAMESTGVYWKPVWHVLEGAFALVLAHAAHIRNVPGRKSDVNDATWIADLLAHGLIRGSFVPPTPVQELRDLTRTRKQLVREVAQHTQRLQKTLEDANIKITGVISDLLGQSGRALLQALIAGETDPERLVALTSGRLKASRTALVEALRGRVRPHHRFLLKLHLDQIDALQAAVREVEGRIGESTEPYRAAVELLDTIPGVNATAAHVILGEIGLDMARFPTAAHLISWAGLCPRNDESAGKRRSTRVRKGAPWLKTTLVQAAWAAVRKKGGYLRAQFLRIKARRGPMKAILAVAASMLTAAYHMLRTGAVYEDLTEGYFDTRDRLKLVHRLVRRLGDLGVQVELKGAA

SEQ ID NO: 337716 - protein, 354 aa, unidentified
MVLLGIDPHKDTHTVVAVDPAGRQLDQTTVAARTLGHGELVSWARTRWPGPAQRIWAVEDCRHVTSRLERDLLAAGERVVRVPPGLMAGARQAVRVRGKSDPIDALAVARAALREPNLPVAQHDQASWEVKLLVDHREHLVAERTRHINRLRWHLHQLDPDLERATRRLPGPGLRRIAAWLDQATPQAASPVQVGICRDQVTAISSLTSQVSELDRQLRHRVARLAPTLLGLPGCGPLTAAKLIAETAGVARFRSEACFAMHAGVAPVPVSSGRTDRHRLSRGGNRQLNAALHRIAITQLRLPGPGQAYYQRRRAQGDATGEAVRALKRRIARAAYQHLKQAQPPPATAAAAAA

SEQ ID NO: 337717 - protein, 364 aa, unidentified
MLILAIDLGKAKSVACWYQADDASHEFRTVPTRPGDFHTLLADRPVDRVVIEVCDAAGWIVDLCRTLAIPVQVADTNQQAWRWKNVKNKCDREDGLKLARLSAMGQLSLVHVPEKNVREWRSLILYRHKLIDRRTSIRNAIHSILVAQGQAMPGRRSVWSDDAMSKLSAVARPLAECTTMNELWRGHLHMELQQLDELCRRIVELDQKLDALGQADDRVRRLRTIPGVGPRLSELVVAMIDDPLRFKSVRQVGAYAGLVPRRYQSGEMDRSGRINKAGCGTLRKLLVEIAWGMLRHNRHGAAVFNRISKGQRTRRKQAAVALGRKVLCWCWAMLRDGTEWNVPATRPRPTPGPAPAPAPALSCG

SEQ ID NO: 337718 - protein, 320 aa, unidentified
MSSSVLGIDIAKATYAVALVLEGRVSKREFPNTPRGFEQLSAWLARRGVEHVHACLEATGRYGDALAEYLYQAGHTVSVVNPARIKAYMRSQLVRNKTDQLDAAVIADFCRTQNPPPWAPPPPEIRELQELLHQYTALQEARQQEANRLQAGLKAQTVQDLIQDHLDFLDRQLVEIKQLIQDHLNRYPHLKAQRDLLTSIPGIGDLTAAHLIAVEPLRFVDARAITAFGGLNPMVRTSGKSIRGKPRLSKIGHHDLRKALYFPAITAQRWNPIVKALCERLVERGLHPMAIIGAAMRKLLCLAYGVLKSGRPFDPNYAST

SEQ ID NO: 337719 - protein, 346 aa, unidentified
MCSLPVFVGMDYHDSFVRVVVQDTDGSEMGNADRTNHWKAIADFGDRFGRPVRAAIESCCGAADLAEELVSCAGWSVALAHPGYVQRMKQNPDKTDCQDAQLLADLERVGYLPRVWLAPRYIRELRHVVRYRLQLTEQRRATKLRLRALLREQRCHAPEGLNAWTKAWLHWVRQTAELSEQGRWLAEQHLDELARLAIRIHEVEKRLEHLTTNDVEVQRLQQQPGIGPVTAWMIRAEIGHFDRFRTGKQLARFCGLSPRNASSGQRQADAGLIRAANPALRTVLIEAAHRLVQYDPSWQKFAQRLRARGKPGSVVAAAVGNRWMRRLYHEMKTSSGELAIAVGPAR

SEQ ID NO: 337720 - protein, 356 aa, unidentified
MKELTTVGIDLAKNVIAACVMDARGAIVERRVLRRDAFERWAEQLPASNIAMEACGSAHHWGRWFAARGHTARLIAAEFVVAFRKGGKNDTADAEAVAIAARQPTMRFVPIKSVDQQAILAWHSVREGWKEERTALLNRLRGLLAEYGVVIGRSADRLLAALPKLSEDRRLPDAVRALLLEAREHFAALHARLARCDAQITAHARISPAAQRARELLGVGPVTASALAATVADANAFRSGRQFGAWLGLTPRQHSSGGRTRLGRISLRGNVYLRTLLIQGARSTLQTAINTEPLRASRLQRWIIALYGRKGYYKTLIAIANKHARILWAMFAKDSHYDASAWQRHPMSQLPLAGNT

SEQ ID NO: 337721 - protein, 324 aa, unidentified
MSKDKKTFGIDISKDTFDVVDCSGNYYQFSNNLKDFLKFLKLLDATSHCVMEATGYYHYQLAYFLVDHHIAVSVENPLSIKRFIQMKLSRVKTDKSDAKMICLYGQQQELSLWFGYSKYQTQCLQMLRLLDTYTKQSAALKNKIQAEGVLGNPCKIVVSSLKKSLKHLQKEIGLLEAELLVLVKSEQQEMLTKVESIPGIGRKTAMMLLVLTDGFKRFEDSSQLCSFCGLTPVIRQSGSSIKGKVRISKVGNSKLRNLLFMCSFTACKCNKACRELYERIVNKGKSKKLALIAVCNKLLKQAFAIAKSGVEYNENYRSKLIVKN

SEQ ID NO: 337722 - protein, 375 aa, unidentified
MSESYDGLQVVGMDLHRRRSVLVRMTADGRKLETAHITNSPAALRRVIARAGKHPKVVLEATYGWYWAADTLAAAGAEVHLAHPLGVRGFAYRRVKNDERDAADLADLLRMGRLPEAWIAPDEIRELRELTRYRIKLVRLRTSCKDQVHAVLAKLGIPVTCTDIFGVWGNTWLDGLELGQPYAGKVASLRTLAGELTAVITVLEAAIADLLEHHDGYHAIRPCRASARYSRRCWWPEIGDITRFPHPARLCSWAGLTPRHRESDVKVSRGHITKQGSPLVRWALMEAIQHVPAGHPLRRRKDDILARRGKEAKNIAKVAAARQLLTWVFYAMRDGQVRTLAPRRAEGRVSRPGRGQRVIAGFTGPRHWWPGRLSD

SEQ ID NO: 337723 - protein, 357 aa, unidentified
MKSQDSNYVGIDCGKKSLEVIRINSEGSYERQQFSTTEIGISKLINWLNPNDVVGLEAGSQSFRIAKSILNKGIQVIVLNPGDLATIYQSLKKTDKEDSLKIARLIQRFPIEELPTVPVPTDEEEDNRRLCSEQENWTRQLTQGKNRLHSLFTQAGLTHITKKHLRTKANRETSVALLPSRYHKEAERILKVLDLVEQNLKLIEEEIKEALRKNQTYTQTIMSMPGIGMITSLAILSYMGDCKRFSSAKQAAYYVGLVPRVDISGDSAYYGRIVNRGCHSIRRVIVQAAWSLVRCQHGGKLKEFYERLYSKKGAKKSIIAVSRKMIEVLYSMIRTGTLFDSMPEEVLNRKLAQYGLM

SEQ ID NO: 337724 - protein, 391 aa, unidentified
MIYIGIDVAKDKHDCFITNSDSEVLFKAFTIFNNLDGFNDLYQKIESVMDDVTKVKVGLEATGHYSYNLLGYLIDKGLPTYVINPLHTNLYRKSLSLRQTKTDKVDARTIASMLMSDVNLKSYSDTSYHNEELKSLTRYRFDKVKERAKLKTSVSRLVCILFPELEKLVPTLHMASVYALLSEFPSAKHVATAHLTRLTNLLSESSKGRYGKDTAITFRDSARTSIGSNMPAKSLELKHTIKLIQELDSEIDEIENEIKIIMDEINSPILSIPGINYRMGAMIIAEIGDFNRFDSPDKILAYAGFSPSTYQSGQLDGAYAHMEKRGSRYLRYALYNATKYVCHWDPTFAAYLAKKRAEGKHYNVAISHAVKKLVRVIYHLEKTKQQYIKAA

SEQ ID NO: 337725 - protein, 356 aa, unidentified
MTKLQQFADFSNKKIFVGIDVHKKSWSVSLYYEQQYLRTFSQPPSTEALAVFLKREFPQANFTCGYESGFSGFWIQRQLREKGLTCYVLHPGDIPHTVKHKTAKTDAIDSKSIASALSAGTVSSIYIPDPKAENDRTLLRYRQRLLKDIKRCKNRIKSFLFQFGIPIPDRYERSWSKPFVQWLNDISIEYPTGRLALSRMISQLELLRGSFLQVNKDLRLLQKSAEYKPLMDILTSVSGVGPLTAFTLILEIADINRFSSFRHLNSFVGLYPMEYSSGEHEYKGKITVRRNHFLRDLLVEAAWTSIRHDPAMLLAYESWTQRMTAKRAIVKIARKLLSRIRYVWINKTVYVKGVVK

SEQ ID NO: 337726 - protein, 404 aa, unidentified
MLDTDGVGVFLGMDVGKSAHHGHGLTPAGKKIFDKPMPNSEPKLRAVFDKLKAKFGTVLVIVDQPASIGALPLTVARDAGCEVAYLPGLAMRRIADLYPGEAKTDAKDAAVIADAARTMPHILRSLELTDEITAELTVLTGFDQDLAAGATRTSNRIRGLLTQFHPSLERVLGPRLDHPAVTWLLERHGSPAALRKAGRRRLVELIRPKAPRMAQRLIDDVFDALDEQTVIVPGTGTLDIVIPSLAASLAAVHDQRKALEAQISTLLEAHPLHQVLTSMPGVGVRTAAVLLVTVGDGTGFPSAAHLASYAGLAPTTKSSGTSIHGEHAPRGGNRQLKRAMFLSAFACMNADPASRAYYDRQRARSKTHTQALLRLARQRISVLFAMLRDGTFHESRTPTITLTA

SEQ ID NO: 337727 - protein, 467 aa, unidentified
MFVLGCDVSRGYVDITVVNERGELALPPFQADASAQGESRIFRQISALRKNYPQETVIAVMENTGGYEANIAQCFRQHGVPVSVLNPKNIHSFRQLELHHAITDPSSARDIALFALQHLDAIKTEVEGTSERALKRLAHILDALSRDMTRLKNRLDNLLFTVRPELLSLTRGDKPRWLLQLLLQYPIPQKLARGRMSRVTRIPGITPDKARNLISLAKSSRGADNHPDFAPLIVYLATRLLQAMDQEKTLRKELEQRFNRIHPSCPLPTIKGVSSYGAAIILAHIGNVHRFHSAKALVAFFGLDPLVRESGDLQHRRHISKRGPGMVRRVLYMQCLSMCSDPDHSIGRFYARLTKQGNPHYYAITACMRKLTVILYAMLRSGNAFDPNYEDSSKALKQSERDRGRKKLRVAKHARTSLALDVPISTREAKRRKRIIALQNKKREGPHVSCDTSAGSCPKNLNEVTFP

SEQ ID NO: 337728 - protein, 343 aa, unidentified
MQTITTIGLDIAKSVFQVHGVDVAGQVVVRRQLKRRQVIAFFQKLPPCLVGIEACASSHHWSRELQGLGHSVRLMPPAYVKPYVKRQKNDMADAEAICEAVTRANMRFVPTKTPEQQSGLMLHRTRHLFIRQQTSVINAIRAHLAEFGIIAPVGRKGVEELLRIVADPSDKRVPEVVRACLAALGSQLLSLKKQILYFDRMIMAWHRSNPTSKRLNCIPGVGPLLATALVSSVPDPKGFRSGRNFSAWIGLVPKQRSSGGKDRLGSISKQGDRYLRSLFVAGALAVIRYAKIHGTKHRPWLTALLTRRPTKVAAIALANKLARMAWAMMATGARYNYPASLRP

SEQ ID NO: 337729 - protein, 346 aa, unidentified
MKNYIGLDAHSRTSTFVVLDSKGRQILHKTVASTEREILRVIDGLKGSKALVFEECHLADWLNTLLKPNVDELVICDPARISKKRGAKTDLIDAHHLAQELRAENLVGVYHNESLLELRILCSHYSNLICDIKRVKCRIKSLFNAQAVRVEGKKVYDTPSRLKELKSPSKSLAGQRLYEQLELLESSKKRYVEEFEKFHKKHTIIRRLDTIPGFDVIRSCIAFAIIGEASRFRSKHQLWSYAELVRHRQISDGLNYGERKMKGRSDLKNVFLGAAHSVVCLSKKNSLKRYYDRLRSEGKDHHRAKKAVARKIAAITLAVMKGPKHYDDLHEERSHRKTTSLPETTR

SEQ ID NO: 337730 - protein, 428 aa, unidentified
MLDKLDRLEQFRQLRSTIRGSKTILVVGIDVAKSRHHAFFGDANGKTLRKRLIFDNDLEGFQKLRGMASSLIARHTLKQCVYGVEPTASYHKPLAEYLIRNNEQVVYVSNVAVKHNRSLLDGRWDKNDTKDAANIADLIGQGRCQYYDLADNDIRELRSLLAYRDKLKKQEHGLRMRIRNNLLAQYFPELDKQMPQGGQDGLILDIIAKDFDPAHIAKTPFENFRQQHNLSRRPISYEKRLRTIWEQSQQSIGCPLPESAAWEGQMMVDQLHYIRQIKHDLERRLKLAGEKFPSYRCIITIPGFGPIISAMTISAISDAHRFTSRKQVLRLAGLDLSASRSGKTSNNAVPVISKQGKAALRYGLYQAALIASYQDETIRNYFTRLLKGREQERGIKTKMRIKLAAKLLIVAWTMMKRNEVFDSGHFKV

SEQ ID NO: 337731 - protein, 339 aa, unidentified
MKLYAGIDLHSSSSYLAIIDDKGVRKYRKKLPNNLEGILQQMKPYKKGIAGVVVESTYNWYWLVDGLEAEGYTVHLANPSAIQKYAGLKHADDKHDAFWLAEMLRLEILPEGYIYPKEERPVRDLLRKRGHLVRLRTSLIISLQNIISRNCGIRLNGDEVKRLKTDHVTPLLAQNEDLRLAGAVSKESIDFLTRQIKRIEKVVEPKIELKEPYGHLLSMPGVGKVLALTIMLETGPICRFEKVGNYVSYCRKVGSQWTSNGKAKGKGNKTNGNKYLAWAFSEASEIARRYDDQVRAYYNRKLQKSNLMVAHSALAHKLARAAYYIMRDEVPFMPEKLFS

SEQ ID NO: 337732 - protein, 431 aa, unidentified
MDIGSERHWVCAPTVDGSGREIADFGATTPELLRMAEWLKQRRVESVAMESTGVYWIAPHEVLEAQGLEVLLVDTRQLARVPGRDKKTDPTDCEWIQRLHGCGLLRGSFRPQENICMLRTLVRDKGNLVAEGGDWVRRMQKSLDQMNVRVHRAVSSLEGLTGMAIIQAIVAGERNPQQIARLRDPHCKKSEEAIAEQLSGHWREDHLFSLQQALRMYDAIQERIAAYEKEILRKLGQMERETGTTAPPLRNTNKARMIRNRGQEQKRQALYRMSGVDVTQIDAIGVEAVEVVLSEYGPDLSRFPTEQAFVSHATLAPHVPKSGGKPVKKKKRNSASARVANVLRMAALSLRNSKTALGAYYRHLAQRLGADVADFATARKLATLIYRLLRWGQPYVDEGVEAYEKRYQEQRIKSLKSKARQLGYEITPLTA

SEQ ID NO: 337733 - protein, 375 aa, unidentified
MKEKVRFLGLDVHAETIAVAVAEPDGEVRSLGVIANRAESVRKLIRKLGAAGQLRACYEAGPTGYVLYWQLTELGVECAVVAPTLVPTKAGDRVKTDRRDAAKLARCHRAGDLTAVWVPDAETEALRDLVRAREAAKQDQLRARHRLSKFLLRTGRRPPMAGKAWSQPYMAWVRQLRYEQAAQEWTRLDLLHEVEHMAERVKRLEEAIREAVKLAPTAMQEVIRGLQALRGVAEISAVTVVAELGQISRFEKARQLMGYSGAAPSEDSSGKRQQRGAITKTGNAHLRRIVVEAAWSYRLKPGVGPGLRKRQEGLPEEIREMAWKAQLRLHKRYARLAAAGKDQRKIVTAVGRELLGFIWAIGRRAEAAAPLQRAA

SEQ ID NO: 337734 - protein, 390 aa, unidentified
MAKKRISDDPAGFTVLTEMLAAAGDSSDDAIPIAIETPRGLLVAALRATGRPVFAINPLAVARYRERHTVAGAKSDHADAMTLANILRVDSHLHRRMPADSELAQAIAVLARAQQDAVWRRSKASNELRSLLREYYPAFLDTFAGKSATNLAKPEARAVLAIAPAPARAAKLTKTRVAAALRRAGRKRGIDGLAVNILEHLQAPQLRQPELVEKAMGRQALALLAMLDAACTGADELAQTAAEEFRKHPDYAVITSFPGLADLTGARVLAEIGDDRDRFADDRALKAYAGSAPITRASGKVTSITHRRIKNDRLAAVGWVWATYAYINPGPAQDHYRRRRDHGDRHAAALRHLFNKMLGQLHHCLQTRQTFDPIKAFGQPRTAPREPAAA

SEQ ID NO: 337735 - protein, 422 aa, unidentified
MTQQAEPAYAAFIGIDWADQKHDYCLSAADAASVEIGTIGARPEDVNAFINRLRKRFQGGKIPICLEQSKGALMHQLMTVEFIDLYPLNPQALANFRKAFTVSRAKDDPTDAHLLWEYLVKHRDRLRVWTPEDVETRKLALLVEDRRKMINLRTQLSNKLTATLKGYFPQALELIGSKVASPMACDFLQKWTSFPQIKKCRTQTLQKFYTTHHLRNHKKTEARLELIRNSIPLVEDEAIVETSILKVKSFSRQIACLNEDLDDYDHRINDLFKTHPERELFDSLPGAGPALAPRLLVAMGTNRERFAHPDEVATFSGIAPVTDRSGKHTWIHWRRACSKFLRQTFHEFANLSRRQSPWANAYYEMQRDRGKSHHAAIRALAFKWIRIIYRCWKQGKIYDEAKYLTSLAKRHSPLVKFMAQAA

SEQ ID NO: 337736 - protein, 361 aa, unidentified
MNKRLSKKQMWFKQFNPTKDDKMYVGIDVHKESCSVAIWLNDAPAIDFVTPADNKHLTQALQKLSPAVKLIAYEAGPTGYSLARELQKAKLPVQVVAPSKTPRQSARDSKTDRLDCRKLAEYAAKGLLRPIAIPTKQQEADRQISRLREQLVDKQKRVKLQIKSFLLQHGLPQPPGLKSWSHAAIEALQKIQLSNQLRFCLDTLLAELHFLTGQIKTTEQKQNEILNHPHHAATVKILKTHPGVGPVISAQFRLEIFNPKRFKSATEVAKYVGLCPMVTQSGQSQRDGPILKTGRPQLRSNLIQGAWIWVAKDPHAHRVFGRILHNTGERNKAITAMARKLAIHLWKMACDNKPYRQPLTN

SEQ ID NO: 337737 - protein, 344 aa, unidentified
MKIAVLGIDLGKNVCSVVGLDASGAVVLRRRVRRDTLIDLVAKLPACIVGMEACCGAHHLGRLFATQGHNTRLMSPEYVRPYVKAQKNDDRDAEGIAEAATRPTMRFVEVKTEAQLDMQTLHRSRERLVGERTALINQLRAVLLERGIVVPQGKRKFEQYLVAMMDEHDGEGLSARMRMLVADTRAQWRELDRRIAAFDAEFARWAKENEDARRLATIPGVGVTISTALIAAIGKAETFEHGRDLAAWLGLVPRQATTGGKPRLMGISKRGNKYLRTLLIHGARAALPHLAEKGTTLGRWAKNLLSRVHQNVAVVALANKLARICWAVLRSGEKFAAKEATLTV

SEQ ID NO: 337738 - protein, 368 aa, unidentified
MGEITSFVGLDVHKETISVAVAEGGRNGGVRFLGEIPNTPAALDRLAAKLAKDGRSPQFCYEAGPCGYGVHRHLAERGHDCIVVAPSQIPRKPGDRVKTDRRDAVMLAGLHRAGQLTPVWVPDAGHEAMRDLVRARAAAVASGRAARQRLLGFLLRHGRRFEGRPWSRTHRAWLSGQRFDRAAQQIVLQDLIDTVDAAAERVARLTRQIEVQVAEWSLAPLVAALQAMRGVALIVAVTLAAELGDLGRFASPAQLMAYAGLVPSERSSGAKTRRGGITKAGNGQVRKALIEAAWTYRRPARISEPKQRKVGAAPRPVREIAWKAQVRLCARYRRLAAAKPLQVVVAAIAREMLGFVWAIAREVRPAPA

SEQ ID NO: 337739 - protein, 400 aa, unidentified
MIDTGDIDVFLGLDVGKGEHHATAVTPAGKKAFDKRLPNTEPKLRELFAKLQAKHGTVLVVVDQPASIGALPLAVARGMGCPVAYLPGLTMRRIADLYPGEAKTDAKDAFIIADAARAMPHTLRAIDGEDETIAELEMIVGFDDDLAGEATRVANRLHGLLTQIHPSLERVLGPRLQHPAILTLLERFGSPDQIRKAGRRRLVTLLRPKAPRMAERLVEDIFTALDEQTVTVPGTAAAALIVPSLAGSLTAVLDQRKLLAGRIEELLEAHPLSKVLTSMPGIGVRTGARILIEVGDGSTFPTAGHLAAYAGLAPATRSSGSSIRGEQPSRRGNKQLKRAFFLSAFAALGDPASRTYYDKKIAQGKHHTQALLCLARRRADVLFAMLRDGTFYEPQPARSA

SEQ ID NO: 337740 - protein, 365 aa, unidentified
MLHRLNSAVTLIQRTTTEAPGRHMYYIGLDVHKKTISYCVKDVSGRIQQEGKVGSTRRELDCWMKTLPQPWSVGMEATIFSGWIYDHLLPHAAQIKVAHPLMLRAIAAAKKKNDQMDASKIADCLRCDFLPESHMMPREIRDRRRTLRYRHLLVRQMVQMKNRVSGLLMETGVEYNKQRLHKVSYFRELLATNTEVHSSIRPLLRLSRETIERCQKTEYALVSSLQRDPVLADRIKRLRTVPGVGPITALTWALEMGDVSRFRTIKNAISYCGLCGDERSSGDKMMRMPLSKQRNKHIQRTLVEAAKLAPRQSHELAVIYEQAKQKGNGNRATLAVARKMVSYLLAVDRQQRDFVPAEESRTGAA

SEQ ID NO: 337741 - protein, 348 aa, unidentified
MRIIGCDYHPSWQQVCWLETTTGETGELSLQHASGEAERFYRQLAGHALIGMESTGNCQWFVELATRLGHDLWIGDAAKIRASDSRQQKHDRRDAALILKLLLEGRFPRIWVPSSEEKDLRQLLIHRYKLVCLRAQVKNELQHLAMNQGITKKRKLWSKAGEKVLRELPLRPWSSRRREDLFSIREMLNGQLDLLDQAVAEAAEKNERARLLMTQPGVGPITSLAFVLTMGDVNRFQRGKQVASYLGLIPREYSSGGHQRFGSISKQGNRFMRMLLVEAAQNAVRYDPQMRSEYLHRCHRKAKGVAKVAAARKLAIRLYWMLRTNKGYPEVVRVESSSRVPLVVPQAG

SEQ ID NO: 337742 - protein, 345 aa, unidentified
MKYFFIGIDVSKEKLDATMIHYESESDSEQQLAYTTVENNPKGFRSLVSWSKKNAGRGVKTDTMLFCCETTGGYDRALCDWLYGNGLNIWRESALQIKRSMGLRKGKDDKADSEMIAYYALRFRSQATLYKPLDGNMRSLRDLFLYRQSLVAERQAKMVSSKEKQHISSKSKVDNFIYRDAQKGIDILTKSIKKCECRMLEIIKEDEEMYRNYLHLISCKGVGLITSVMLIIYTDNFKSWNAKKMASYCGIAPFYESSGSSVFHKANTSGYSNRRLKGILTQAARSAITHNPTLRQYYLRMKAQGKPYGVILNNVNNKLVHILFSLVLHDCDFELDHEAKRALRA

SEQ ID NO: 337743 - protein, 410 aa, unidentified
MRYYLGVDWADQTHAVWVVDESGTKITERAVPHTAEGLGEWGRELDEWRAQGIALWAAIERPDGRVVDVLLDHGVVVYPVNPKALDRARDRFRQSGAKSDPFDARVLADFLRTDHAHLRALQPSSEAAQELKLLTEDCQRHIRQQTRLVNQLTATLKAYYPRALEVAELTSALAREFLPAYPTPAALTALTERQWQRWARAHRLPEARTADLWAVLQQPQLPVPAHVVRAKARLMRTLVEQLMPVVAAVAQYRKAIDDFFASLPAAQWARTLPIGKHGITAPTLWARLGDAPGRWESFRHLQAHAGTVPVTKRSGKQQRVVHFRFACDKALRHVVDQVAFLSLLSSTWARAYYDQQRARGHAHRQALRALGAKWLKIIFVMWERHVPYDEQYHLATMTRQQLRQRQEQIA

SEQ ID NO: 337744 - protein, 461 aa, unidentified
MSKKKPGGRQKGSAQKKVDWKALEIVHPDAAGIDVGGSEHWVAVRPDRDAEPVRRFGPFTADLHEMARWLVEKGVRSVAMQSTGVYWMPVFEILEQHGLEVYLVNAQHTKNVPGRKSDVEECQWLLKLHAFGLLHNSFQPTDEIRIARTLWRQRGNLVAEASSAIQRMQKVLTEMNVQLSNVLSDIRGVSGMKIIGAILKGERDPQTLASLARPEVKATPRDIAKSLEGNWREELLFVLRQQVELYRIYQEKIADCDLQLRKHLESFGSKVDLQKQPIGPKPKGKKGGRNTPQFDLRTELYRITGIDWAQINGIDVLTAQTVIAEAGADLSAFPSEKQFASWLGLCPTNEQSGGKILSRRTRKVVNRATVAFRNAASTLLRSQSYLGAQYRRLRTRLGAPKAVTAMARKLACPFYRLVKHGQQYVDKGTEYYESRYREQQIRSLAKRAQKLGLQLVIPKTA

SEQ ID NO: 337745 - protein, 447 aa, unidentified
MEKKNVKMEVINPNAAGIDIGSRSHFVSVGQGTDDVREFGVYNEDLKAIADWLKANEIETVAMESTGTYWQSLFAVLQAEGFQVILCNGKFTKNIKGKKSDVQDCQWIQKLHTMGLLSGSFLPDEATEQLRTYCRHRSNLLEQAADTTRKMQKYLRLLNLRLDVVVNDICGLTGMKIIDAICKGEINPEKLASFRNGNCKKSEEEIAKALQTNGRNDYLFALKHEYQMYLNLQSKITECDAEIEKMLNQQINNDDNKKQHHIDKKAHKRINKNTPKNIDINLLSYQYFEGVDLLAIEGVSYSTVLTLMSEVGHGIHKFETAKQFASWLRLSPNNKISGGKVLSNKIPKGSNRLKIALRNAANAIGNLKDTALSNFFARISHRKGRVSAISATARKLAVIIWNMVVKGTAYIPLTEYQFVDQKRKKIAAMKRLITKFEITTDDLNLQM

SEQ ID NO: 337746 - protein, 355 aa, unidentified
MHSTLIINFICKDMKDLSTLQHFVGCDISKDTLDFALYERGKDYRTFEHIQVPNSPDGFKTMRKWLRTLKVRMKDAVIAMEHTGSYSMALSEWCFGKGITFVMLHPLDVKNYGGTSRNKTDKADSQFIADYAYTMREKLKPSVPESANIKQLRQLRNERQLAVRSRTAYINLLKSMPDNVDTRRIEKIIKEFEAQIKQIESEMNTVISRDKAILANYDLLLSIPGIGLVNAVTTIIATGNFTRFQTARQYAKFCCVAPLSRQSGTSVAKGDHVSKAGHNEIKSVLTEGARSAITHDSQIRAYYERKKSEGKCHGCILNAVKFKLICRMFAVVSRQRPYVDVEAYRSRTVKSADSA

SEQ ID NO: 337747 - protein, 422 aa, unidentified
MNQSLNEEQFSAFIGIDWADSKHDLCLRKSGSHHRESSSLTHTPEAIEAWANALRRRFDGKPVAICLELNKGPLVYALSKYDFMVLFPVNPLTVARFREAFSTSGSKDDPSDAELQLEILLKHRHQLRELKPSSPAIRALEQLVEHRRRLVNDKVRLNNRITSVLKNYFPQVLEWFKDRDTKLFCEFLTRWPTLARVKRARRSTLERFFHTHHVRSAVRINKRIEGIKAAVPLTTDEAIIVPNELLIKAMIGQLQMVLSAIREFEDEIALRAQAHADFAIFDSFPAAGKAMAPRLLVAFGDQRERYTCADEVEKYSGIAPVTIRSGNQCSVVWRWRCPKYMRQTFVEWAALSIRQSFWAQAYYEQKRAQGKSHQAAVRALAFKWIRIMYRCWQDRKPYDESTYLQALQRRGSPLFKYLANST

SEQ ID NO: 337748 - protein, 397 aa, unidentified
MKVSGLDVHKDTIFCAIHSGKSPGEVKEFLTLTASIREMGAYLHKLGVEKIAMESTGIYWIPVWNILETMGFKLMLINPYLIKQMPGRKSDIKDAQWIATLLHKNLLRSSLVPCARIRELRTYSRKYIKLQQRMTTVLQSIERTLEVCNIRITSFVTKIESKSVLTVVKRIIQGETSPDQLVECIFGSILNKHGSKIKQSLDGFICEHHRFALELSYAEYELLLHQSQQCEERMHKLCMEHYSRELELLQTIPGIKLLSAILIIAETGADMKAFENSGKFSGWTGLRPRNDESAGKYKSTAITKGNRYLCALLVQVAWGAVRTKGSSFQEKFTRLAIRKSRKKALIAIARKIGVVAWNLLYYNKPYNPQLIEAYEPQKVIAKVNYHQREIIRLQKLI

SEQ ID NO: 337749 - protein, 367 aa, unidentified
MQNTIVHHEGAASLEAAETKVKLCGSIIKIGLDVHARIYVAVAQYDQLLPKHARRLAPSEFVPWVEQLLRAGHTVHVVYEACGFGFGLYRELQAAGAHCYVIAPRKLDEQCNRVKTDPRDATTLCQRLSRYVEGNTRELAVIRVPTEAEEQARHVSRQREQLVRHRQKLEAQGRSLLVGHSLPSPAHWWKNQTWSRLSKLLPAWICLRLEVHRPALLTLEQQISALSAELEAAAPADVPAGVGKLTTVVMTREICSWERFRNRRAISSYTGLCPGEHSSGTKRVPGSVTKRGNPRLRAALVECAWRMVRFQPNYPPVKKRLSVLAKGSRATGAQRKKAIVAVARRLAVDLWRVHTGRNTAAQLGLTI

SEQ ID NO: 337750 - protein, 405 aa, unidentified
MVRYVGMDVHREFAQLAVVEDGIVRDEGKIGVTPEALRAWATELRPDDEVALEATGNSDAIATLLTPLVARVVVSNPSKTRAIAEAKVKTDKVDARILAQLLAADFLPPVWLPDDRTRSLRRQVMRRAHVVRQRTRIKNQVHAILARNLAPTPPVSDLFGKAGRHWLARQLLPADEQASVQALLRQLDFHAHELALVDKELAEEAVTDPVVARLMTIPGVDAIAGISIVAAVGDFSRFDDPDKLVAYVGLNPKVRQSGNSAPVHGRISKAGRAHVRGVLVEAAWSASRAPGPLRAFYQRIKARRGFQTAIVATARKMTVLAWHLVTKDEDYAFARPGLVTHKRRKLELAAGAPGRRGNHRIPGAAYNSKQRRDQENAIVEQAERAYEVLVAHWQPRKPTTVSASP

SEQ ID NO: 337751 - protein, 361 aa, unidentified
MNLKYSVGLDVSSKKINACISVIDEKQKVVFKSSTEICNTLKGFATLEDWISKHKKEAIPLVVCMEATGIYHENCAYYLYEKGFDVSIILPNKAKKYLEAIGLKSKNDSIDAKGLSQMGAEQCLELWQPMGTFFYELRLLTRQHQNVTELKTVLKNQLDALSFAMHNLDSVTNQLKQTITLFETQLKELNKEIKAHLKSNEEVNDKAENILKMKGLGILTISTVLAETNGFTLFKNYKQLVSYAGYDVVEAQSGTRVGKTKISKRGNSRIRRALHMPSLVVIQCKVKPFKDLFDRTYQKHGVKMKSYVAVQKKLLTMIYHLWNKNQGYDADYQMNIQEEEQKSSSRAIVFEEDTIKKIAST

SEQ ID NO: 337752 - protein, 397 aa, unidentified
MIAVGIDISKAKSTVAVIDSDGTVLASPFTMAHTQPEMEAFVTYLKGLGEPTTILMEYTGHYHYPVLKKLQDEGFPVCIVNPYQMKKYGDVEIHKAKTDKKDALRIAAYALEKSYKLVPYSSMEQKYEDLKFLSRQYSQRITYVAKLKVQLIALLDQTMPGITRILPLNSRNPEKCALLLFIRRFKSFDEIHRIGKARFLASYDVLAKKASERSASSKGLSIYELAVDSITTRGEDPYIWLSQNQCVDLLSATQNAADEIISQMRNIAETIPEYKVLRAMHGVGDRLGPIILAEIGDVHRFHSGKALNSYAGNDAPPYQSGQFESRNRHISKRGSSTLRKACYEVMQALKLTKPQDDPVYLFMLKKEQEGKPFNVAKMAGVNKFLRIYYARAMELYK

SEQ ID NO: 337753 - protein, 416 aa, unidentified
MDASGVPRRPEHTLLQTGVVMESPVYLGVDIGKSGHYAVAVDAAGKPIHQTSVSNDELALRRLVDWAKAHQATVVVDQPGGAAGLLLKLCWQVDVRIGYLHGLAMARAREFYAGKSKTDPKDAFVLADVARAHPNRVVWLEPNSEALAHLELLCGYDADLRSDANRLSNRPRELLVSHWPALERAFGERLDSRDVLAVLQQYPSGPALKQAGVAGLTAALKAQRVHRAEAFANQLHEAAMAQTVTITGSATAARLISELAMQLAAVRVRRAELEKEIETDFFALPEAVILRSLPGIGARLGARIAVEIGSISRFRTPGHLAAYAGLGPTPWKSGTSINANRPSRFGNHRLKNALFLAAFASLRHAPSRTYYDRKRAEGKRHNQAVLCLARRRVDVLHAMLSQGALYRPPTPLAAAA

SEQ ID NO: 337754 - protein, 369 aa, unidentified
MKKYITFVGLDVHKDSINVALADGDRNGDVRYYGAIGGTLDDLNRVVKKLASTSGELHFVYEAGPCGYDIFRSLTDKGYACAVASPSHIGKKPSERIKTDRRDAMMLARLHRAGELTYVFVPHAEDEAMRDLTRAREDALKAQRVSRQQLGGFLLRLGFRYQGRTAWTPAHFRWLADQKMPTPAQQVVFQEYIHAIEETTKRVGRHTQQIEILVPSWRLAPVVKALHSLRGVSLIVASTMIAEIGDLTRFENPGKLMAFLGLVPSEHSSGQKKRQGAITKCGNSHARRVLVEAGQAYRYPARISLLLLKRQEGISKEVKDISWKCQVRLCARFRRLSATGKNYNTVVTAIARELAAFMWSIAKQVPISA

SEQ ID NO: 337755 - protein, 417 aa, unidentified
MTAQPMLPKLTFGLDLSDTTSRYCAVDDAGQIVATGRVRTTPAALQREAVRWPRCRVVLEVGTHSPWVSRLLTRLGHEVLVANARQLRLIYASERKSDRVDAETLARLGRLDPALLKPIRHRGLQAQADLAQLRARDCLVRARTQLINHVRGAVKAVGGRLPASSAPAFVSKVAAQLPPEVEEALRPLLRLLTSLTQEIRAVEQRLETVATTQYPETRQLRQVGGVGLLTALCYVLTIEDPGRFRRSRAVGAYLGLCPREDQSGARQPQLRITKRGDAMLRRLLVSGAQYILGPFGPDCDLRRWGLILAHRGGVNAKKRAVVAVARKLATLLHRLWVSGAAYQPLRAVAEPEPATASEAQPPGPVTAIAAEIHQDRASESSTDQRTATCTGATASAPSECGWKRVGEPSRPRPPRWP

SEQ ID NO: 337756 - protein, 331 aa, unidentified
MSFKAYVGIDVSKLKFDVYIKEKESYKQFKNDKSGFIAMVKWLQKLIGPVLVETFVCFEHTGLYSLPLALFLSEEQISFAMVAPLEIKRSLGITRGKNDIVDAKRIADFAYRFHDKINVTKLPASDLNKIHLLLTLRDRLSRNLGSYVASKNETERVLGEQYLPELFTSYDTIIATMKAEIKRLENEIKEIIEQNEKLATSMQLLTSIKGIGLLTAAYLIVYTDNFTKFDNWRKFACYSGIAPFDYQSGTSVRGRTKVNSIANKQMKRMLYLAAICAIGFDTELRDYYHRKQAEGKPKMLVINVIKNKLIARAFAVIKRGTPFVDTKKYAA

SEQ ID NO: 337757 - protein, 392 aa, unidentified
MSLGAIGRPCPRFSRPWEALGRRARTTKRRARTVARVISPYRARMGGALEKAMQNQVFVGIDVSKARLDVALRPGDESFSVTNNQRGLATLVKRLQKLCVSRIVLEASGGYEIAAASELAAAGLPVAVVNPRQVRDFARATGRLAKTDALDARVLAHFAELIQPQARLLPDAQSRELMALVARRRQVVEMLTAEGNRQGRAGASLTRAIAAHVRWLRKQLGELDVVLEHAIRRSPAWCAKARLLRSVPGIGNVTVTTLLAHLPELGTLNRRAIAALVGVAPFNHDSGKLRGTRTIWGGRAQVRAVLYMSTLVASRRNPVVQAFYARLLAAGKKPKVALTACMRKLLVILNTMLRDQTPWTAEAATLPRATPAALSAAKSGGAVILRGSHGTA

SEQ ID NO: 337758 - protein, 350 aa, unidentified
MMIIGCDLHTRYQQIAMLDTDTGELVERRLEHESGEAQAFYAGLSGEVRVGIEATGHTHWFEAMLAELGHQLWMGDAAKIRASVIRKQKTDVRDAEHLLNLLREGRFPQIWRPSPAERDLRQLVWHRQKLVWMRGAVKNQLHALAMGEGVCRKKKLFTAKGRKELEGLALGPWASYRRQELLRMFDELAAATAQLDAAVEQAAKDQPLAVRLMTHPGVGPVTSLAFVLIIGPVERFEHSKQVVSYLGLNPQEHSSGGKQRLGSISKQGNPMMRSLLVEAGHTAARFDPALKRMYQRLKFRRGASVAKVAVARKLAVRMYWMLRSTADYAQLVRMQDSPWATLVENSPSLG

SEQ ID NO: 337759 - protein, 344 aa, unidentified
MEHYAGLDVSIKETSVCVIDGTGRVVREVKVPTEPEAILAVLSDEDFNIKRIGLEAGPFSQWLYGELAEAGLPMICVETRHMRAALSAQVNKSDRNDARGIAHMMRVGLYRPVHVKTPASQKRRMLLTSRQLLQAKARDIENDLRGTLRNFGLKVGIVGAIKFEARIRELVANHPDLATIVDSLLIARRVLREQLSVLHRHLLAVVRHDEVCRRLMTMPGVGPVVALTFRATVDVPARFTNSKTVGAIFGLTPRRHQSGEIDRMGGISKCGDAMMRTVLFEAAQAMLTRTIKWSWLKAWGMKIARHRGMKRAVVAVARRMAVVMHRMWVDGTDFQWKREEVAAA

SEQ ID NO: 337760 - protein, 405 aa, unidentified
MSLVIALDISMGKSYKVTYDDQTCLSEGEIIHNKEGFQVLLDEIQSLPEEPILVFESTGIYSKPVETFCQRNQLRYCLLNPLEAKKQLEDGTLRSWKTDKHDAHKLAQVHQQNNRMEKKQQSDIYKELRDLSRFYQEVEVEIKRIRMYLHIAIQLSFPELEQFFSSRVTPYALTLIELFPHPDLVLELSHTKIKNRLIKSTSKRISENNAKEKASQIKDYAKNSYPAVSADSIQAQKVQYYARQLLHLLETKEQISNQMIEKAKNLKEFELLKSLPGVGAISAALFIGEIGDLSRFSNHKKVNAFIGIDIRRYQSGKYAGQDRINKRGNPKGRKILYLIIQNMIRQQKAAPNHIVDYYYKLKKQPTSKLDKVAIVACMNKLLKCIYSMVRNNTKYDYSHTVSMDQ

SEQ ID NO: 337761 - protein, 408 aa, unidentified
MEVLYPRCAGLDVHKDNVVARIRCVSEPVHHEVRTFATTTSALLELNEWLSSHAVTHVAMEATGVYWKPVWHLLEGDFELILANAQHIRNVPGRKTDVSDAGWIADLLAHGLIRSSFVPPAPIQELRDLTRTRKQLVREISQHSSRIQKVLEDANLKLGSVLSNVLGKSGRAILQALIDGESDPEKLADLAQGNARKKRAELVEALHGRIRDHHRGLLRVHLDLITALQHGLAELDATVGKALASIHQSARLLTTMPGVSDVTAHVIVAEIGVDMTRFASDAHLRSWAGFCPRNDESAGKRRSTRVRKGAPWLKTTLITAAWAAVRVKDSYLQAQFHRLRARRGAKKAILAVASSMLTAAYHMLKRGIQYQDLGAAHFARRDRSKMIQRLVRRINNLGCQVQLTPLAA

SEQ ID NO: 337762 - protein, 342 aa, unidentified
MAIVGAFDVHRRQVTFDVLDTETGQVRRGLVRPACRATLRRFLAGYAGVGEVEFTVEGCTGWRFIVEELERAGITTHLAEPAATADARGSKRRAKTDRTDARHLRQLLVEGRLPESWIPPEHVREVRARLALYHDLREEHTAWIQRIHATLFHQGVPVFDDALSSAAGRARLESGEGLSSAGVQVVAAALRVLDALDEELHTLHQQLAAFARRQPGCRALQTLYGVGTITSVAIWAFMGDTRRFSSSAQAVRHTGLDVTVYSSDGKRAPGHLARQGPPVLRWALYEAGCNASRTGSPDHDFYHDTKQRIDHKRAAISVARKIARRSHHILRNLGDQAWAPAT

SEQ ID NO: 337763 - protein, 645 aa, unidentified
MSKGIYRSVNVEGVVSAALVALLKTATVIVGLDVAKFDLAAAFALDTGQVVQIVRFNQLTQTHLFLDLIGALRRAGREVQIAMEPTGTYGDALREMLHGAGAAIFMVPAKHVHDARELYDNVPSKHDPKDAVTLARLRSQGDGSLWKPVDPFRRDVRALIETREVHHGPLMQGYNRLEALLARHWPEVSSLVNVYETTSLWKLLVEMPGPHEIAARPQEARELLSKQSRRTLKAAAIEAIITCARDTMGVAPTRLERAQMQRVVSEMLRHREEVRAVDRELRALLESRPEFGAMVRWVGLVTTGVLLGCVGDPLDFHHAGAYEKACGLNLKEQSSGTATRRGLHITHRGSACARKYLYLFVLRWKARDRAACAWVERRQSWPRKGGKVSALVALMRKAVGALWHLRRGQDYEAGRLFDLRRLTLTPPAQATLITESDAGEADAPCATAHDDASSTAPARDDASGATVAASEATAANATKAVATSATKAVSADALPAKAATKAATKAATKAATKAATKAATKAATKAATDDDATAEKPARDDASKATAATHVARPGATKRRGSREGHDGAAPERGPRTGASDGAAPSAASASDESHAGAPDEAIQSRSAGARVSANHTTAVRSQGAPSRALSSTLERLNALVRTSR

SEQ ID NO: 337764 - protein, 299 aa, unidentified
MLDARIGRDGKVERFCRTAEGIDALASFCRSSNVTLVVMEATGGYERLPFGLLWQQNIPVAIVNPRAVRQFAEAMGFLEKTDTIDAGIIAWFAEVKRIVPQEPLGIEHARLSALVQRLRQTTTLQTAQTNQRRLVTDPDALTTIDELLALLRRQIRNLADKIAGIINQDPLWAELDKIFRTIKGVADRTVAQLMAGLPEIGTLSNKAITKLVGIAPLARDSGKIKGKRPIRGGRADVRTILYVVADIVRRYNSEFADFHKRLSDAGKAKKVIRIALAHKLLVRLNAKARDVRKELAMAA

SEQ ID NO: 337765 - protein, 349 aa, unidentified
MEEKIIRQSLGIDVSKRTLSLCLASVHMDLSKSFDPRDDVLNDQEGFTELERWLTSHRSEGVDLSIVMEATGVYHEGIAMYLFERGYAVSIMQSGRVKKYAQSLDQRSKTDALDSKMLSMLGCERRLRKWEPPSPVLQELKLLSRERSTLLKEKLILSNRLDALKSGVHVNKRTVKRYQKRIDLIKKQMVDIEQEMSEIVSVYPVLSEKFDYLRSIPGVSFILTATVVAETGGFDLITSAKQLTSYAGYDVVLRESGSYRGRTTISKQGNRRIRAVMHMPSMTAIRVNPTLKPFYQRLKEKKSKPIVALVAVQRKLLILMFELWKKNEYYDAEYEQKKAASLQETCCTG

SEQ ID NO: 337766 - protein, 345 aa, unidentified
MKKIAIGIDFAKEKFDVTVKNVETGASVYGQYPNTPAGGRSMVKMVRKFAKGINSSEWLFCGEDTGYYSQTIARYLTEKGYFMWLQNPYSIKHSEGDIRRGKNDKADSAAIADYAHRYEDKARKWELPSKVSEELHLLLTRRDAYVRAKRVIQSGADEIPKRDKQGESVSLIKSSAKRLLREIDEEIERLEAQMEKIVKEEEAIQKNYEILRSFTGIGLVNSMCFIAYTDNFKKFDLNARKIATFWGVAPFGKDSGKTVHVDPHVSQFCNHWLKAIISNAANSAIVWNPIIKKYYERLQKAGKCEGICRNNVKNKIIQIITAMIRKKEKFDRNFIFINNTTVAVC

SEQ ID NO: 337767 - protein, 412 aa, unidentified
MDSIVAYIGLDWADERHSVHLQTADGAIEHLELEQKPAVLHDWVAQLQRRFGGGKMVVALEQRKGAVIHALLMYDCFVLYPINPKALARYREAFRTSGAKDDPLDSELLLDLVVRHREKLRAWVPDTVESRKLQALCEQRRKLVNQRVALTNRLTSLLKQYFPQALEWVGDLASGQACDFLAQWPTLAAVQRARPTTLQQFYRAHNCRQAHVIAARLAAIASARPLTTDPAVVEPLSLSVQTYATQLRALMAAIQTFDDRIAQVFAAHADHGLFTSFPGAGDVTAPRLAAAFGTDRSRWDSAAELQAHSGIAPVTERSGKTLWVHHRLACPKFVKQTFHEFADQSIRFSRWARAYYDQQRARGNDHHAALRALAYKWIRVLFRCWQERRPYDEDTYIDALRRRGSPLAKNFS

SEQ ID NO: 337768 - protein, 426 aa, unidentified
MSERDYNKQVAKRQRIRSTSLVVGVDVGKAYNAVGFMNKEGKVLGSCAKVYNSREGFEQFVKMVEDLKARHGLKDVLMGMEPTGHYWRKLAYFAKEHGYEVRFVRTTALKHHRELDESASAKSDQRDALTITNITREGKYIDTVIEDGLLRQLRTLGKARERLLRYSVSAKNSLHAALDDYFPELHELFWSMGSRSLWAILDRCPFPEDVLSIKVSTLRGLIMKSSRNRAGAVQKATALYQAATKSIGLRQIGSADRYRVQICLEEVKRTVLTLKSMDQQMKNMLKEIPAAAYLLSIPGIGALSAAVFLGELGDPAHFHHARQIVKYAGYDPQESDSGSWVSRKFISKKGRWLMRKYLFFMSMRVVVLTNYFKTYYERKLETKNRVGQLPRRKEILCAVAIKLIKVIFALLRDQRNFEDTVACSVE

SEQ ID NO: 337769 - protein, 407 aa, unidentified
MSKEVLYLGLDVHAENIAVAIAEAGRDGEVRNYGDIPNTLHSVEKLLRKLGHPDKELRACYEAGPCGFVLARFLKKKGIACDVIAPSLTPKGSGDKIKTDRRDARMLARLHRAGELTAVHVPDERDEAIRDLCRARTDAVQDQRSGRNQLKAFLLRNGYRYGEKTSWSAGHMRYLRELILPHPAMKIVLEEYLQCIDAAAERIERLEEHMKALLDEWHMKPVVLALMGFKGYQTVAAMITVSEIGDIHRFPHPRQLMAYLGLVPSESSSGGSRAQGTITKCGNGHLRWIFNECAQHYRLPPKVSQELTTRQEAIPKAHRRQVIEISWRCQNRLHERGRKLAARGKTRQKAQIAMARELSAFVWEVMRAVMPKADGSHAISTARTPKAIEATQPAAKKKGREYTLKTK

SEQ ID NO: 337770 - protein, 316 aa, unidentified
MAMQTTPTIVGIDVAKAELVTYRADVDRVEVVDNAHKAIGAWLSSLPAGSLIAIEATNDYHLAVLERAHALGHRPYVIDGYRLNHYRKGTGERVKTDARDARLLARYLAHEQAHLRPWSPPPAAYRRLQQLLRRRAALVRARTALKQSFAGPTAARLAPVLADIRQLEAQLQRELLQVAGQANLGDSVQRCQAVEGIGPLTACALNMAYLRGPCRHSDAFIAFLGLDVRIRDSGRSRGRRRLTKQGDPELRRLLYNAAMAASRSQTWKPFYQRHLGRGLTRIQALVALARKLARVAFALIRHQTQYQPRLAGCGDT

SEQ ID NO: 337771 - protein, 364 aa, unidentified
MNKCHLNTELSSHEGTRCQFNGGTGAIKLGIDVHQDFYVVVMQEGGSNPKPPQRFRKEAFLHWATKLKSRATEVHAVYEACGFGFSLQRQLNALSIHCYVVCPQKLDEHNKRVKTDGLDAKALVLKLDRFVQGNRAALAMVRVPSKEEEQKRAIHRQREQLVKTRMQLEAQGRTLMVNHGIEPVKNWWKGRTFAALQLPAWMKELLGNSQPILLALQEKISALTLQLQVAAASKQARGLGAMTSVIIDREIGDWNRFSNRRQIASYTGLCPGEYSSGNSRLQSCVTKHGNPRLRAALVELAWRLVRFQPSYKPILKWRRLLSKGALATGAARKKAVVAVARQLAVDLWRVRTGRCKPEALGLVI

SEQ ID NO: 337772 - protein, 422 aa, unidentified
MKNVTDSGQKVKGQKRLMALERASWILGIDVGKEKLSCALLLKDETFRCRFDVEASLHGFQMMLERVKTETKGEGAVMFALEPTGHYWMVLGQFFEDHNQSYVLVHPLVVARSREVKQLNRGKTDAFDARLIAELACRGAVTRTQIPEDDWATIRFYAREYMDREKEIAREKNRMMSYLETTLPGFLEIFPKPLGMNSRACLRVLANFREVLQGDIVQFESQARKHITGKRLMTSRVRRLFEMLQRGDALGLRAGRKTLFWRIINSLDRLELYEKQQDMASKALISLYEECEFKPYLDSVWGTSPLTNSLVLGFMGDPTSYDTPASLIKMAGCDPVPKESGKFKGKASISHRGRNLLRKAGDRISFLLEKRNTVFRNFMHHLTARPKNKLTKRQARIACINKYFRIIWVLCNHRVLFNPALA

SEQ ID NO: 337773 - protein, 436 aa, unidentified
MEEVTDEPLYRDRVCGIDIGKAGMAATIRVPSDENPARRASETREFATTKRGVLALADWLRAWQVPAVVMEATSEYWKPVFYRLEAEGFECVLADARQVKNLPGRPKRDPSDSRWLAACFERGAVRSCFVPDPEFRIIRLHTRYRRDLTDERTREKNRTEKLLESAAIKLSSVVTGLHGVTGRDIMEHLIAGERNPKVLAQLARARARRKITELEHALDGAEFFTPEHAALLTTMLERIDRLTGDITRLSGVIEQLLAPYEEQLQQAESMPGWGRRSAEDAVAETGVDMSKFPTGGHLSSWAGRTPLDSQSGKRTGRARHKKGNKYLAAVTGETAVAAGKTATREGARYRKLARSRGKGKAQVALGNTQLKVYHKLLSSPGMRYQDLGPDYYERQAAIRRKIAYHVREIEALGLDVTLTRPAPEPGPDEPANTPAA

SEQ ID NO: 337774 - protein, 423 aa, unidentified
MSYRIAGIDVHKKMLAVVVADVEVQGEYQFERIRYGSNPEPLRLLAAWLIEHEVEEVVMESTAQYWKPVWGALERYWKPSCQKREGAGPMSGTLHLAQARSNRGRRGRKKDFPDAERLVKRLVADELILSFVPDAEQRLWRTVTRRKYQLTRNKVRLQNQLEALLEEAHIKLSSLVSDLLGVSARRMLQALADGETNPTSLAALADKKLRATQAQLCDALGACTELQPVYRRLLKMFLEELHLIEQQIGQLDQEMAALLSQHPESVQRLSEIPGLGVDSAQQIIAEVGATAATFPSGKHLSSWVGACPGDEESAEVSQSHRSPKGNRHMRRILNQAANAAVKAKGTIFEIVYRRLVSRLGHNQTIGAIAHRLCRLIWIILHRGVRYEERGPSVNTKSRRQRTSRMIRELRNLGYRVEPLGTPA

SEQ ID NO: 337775 - protein, 391 aa, unidentified
MCSDGSKHSSFSVPNNRNGAKIIVDRVTSVLLLQDIPQVVIGMEATSVYGDNLMRFLRESGSLGRFERSLHMLNPKQVKKFRDAYSDLPKNDHVDSYVIADHLRFGRINKEVYMDDYKYQALKMYTRARHQLVQELTREKQRFLNTVFISFSGLTQEKIFSNKFGATSMALIEEFSSLDELAYMSTDELVDYIRKKGKNHFENPEEIAEAVQRAAKNSYRPPQVIADAAKQMLAISMNTIRLLQKQIKEYDKAIEKMLEAFPQTLTSVKGIGNIYAAGIIAEIGDINRFPSQASLAKYAGLVWTQHQSSDFEAEDKRMIQGGNHHLKYYLCEAANALRRCDPEFKRFYALKYKEANKHNHKRALALTARKLVRLVYTLLKTNRLYIPPEEY

SEQ ID NO: 337776 - protein, 336 aa, unidentified
MSQSSTLDIGWDVHKDSIAVAYVAAEHGAEVTDLGTIGTRQCDIDQLVRTLHAKATHVVLVYEAGPCGDWLARYLTTKGHHGWVVAPSLIPQKAGDRVNTDRREAIQLARLRRSGDLTPVDVPAVEDEAIRDRSRAREDASADLKAAKFRLNALWLRHDLRSTGRATWGPAHLRWLADVGCATPAPPIVFQAYVRAVQEHTARLQRLVQARQEQVTSWRLHPGVEALEALRGVQCTVAVTLVAELGDLTRFENPRPLLKYLGLIPSESSSGARRRQGSITKPVTPTPDAPWSTGPGPPGIPPRSVGIYHCGSNNHPNPSRTSPGRRKSDCANASAA

SEQ ID NO: 337777 - protein, 418 aa, unidentified
MQVESNEPELIERVAALDVGKAEVVCCVRIPGPSGQRMQEVRTVSTMTAALLALGDWMAGLGVTRVVMEATSDYWRPPFYLLEDQFETWLVNAKDVKHLPGRPKTDRLDAVWLCKVAERQMLRPSFVPPPAIRELRDLTRYRVDLLAERTAEKQRVEKLMEDALVKLSAVASDLFGVSGRAMMAALIAGERDPAVLANLARGSLRNKTGRLTEALTGRFTDHHAFLLTQMLRRVDAITADVATVQERIDAQIAPFAQAVARLDEIPGVGTTAAQAILAEVGLDMTRFPTPAHLTSWARFAPGVSESAGRKKGNAGTGHGNRYLARVLGEAAIGAARTDTFLGERYRRIARRRGKNRAIVAVGRSILVIVWALLSDDDAHFVDLGPDHYATRTNPERKVRQHIRELQALGYSVTLNPAA

SEQ ID NO: 337778 - protein, 404 aa, unidentified
MNNVAGVDVSKGKSMVSVLRLFGEVVTKPFSVGHTGSELKELANYLKSLDGETRVVMEHTGRYYEPVARFLHEEGIFVSAVNPKLIKDYGNNSLRKVKTDKADARKIARYGLDNWVELRQHTPMDTIRMQLKTLNRQQGLYSKTKTMMKNNLIALLDQTYPGVNALFDSPVREDGSQKWVDFATAFWHVDCVRNMSLTAFTERYRKWCKRHGYNFSQSRAIDVHTKAQDLIAMLPKDALTKTMVQQAIDALNAVSASLERLKTEMRTLAAQLPEYPIVMAMRGVGDSLGPQLMAEIGDVTRFTHRNAITAFAGVDLGADQSGTHEAKSARASKSGPPELRKALFLVMDCLLKTMPQDDPVYRFMDKKRAEGKPYLVYMTAGANKFLRIYYGRVKEYLASLENSD

SEQ ID NO: 337779 - protein, 406 aa, unidentified
MICIGIDIAKRSHVASAVDEDGGTVVESFKFNNTASGFAKMLKRLRKADATPENSLVGMEATGRYWVALFDFLSSHGYEAAVINPVQTDAFRDVWTVRKVKTDALDAAMIADLVRYKRYSPSALGDEATEELRNLARYRMSLVERSTALKNRATAILDRTFPELAGLFSNAYCPTRRELLQHCATPDQVLGTDVGTLERILREASRGRCGRAKAERLKALAKESVGVGFGSKTLAFEARLLMEELDFVQDQVKEVERELARLLERTQGKWLVTIPGIDVALASVIAGEIGDPNAFDDPHRLMGYAGMDPTRSESGETVKSDGRMSKRGPGALRWALMQAADCARKNDPYFGDYYDRKRGVDGKHHYVALSGVARKLMGVALAVMKEGRPYEPAPPRNHRPGHLKEA

SEQ ID NO: 337780 - protein, 386 aa, unidentified
MTLYVGIDVSKFKHDLAILEDQGEIITKNLRFDNSSQGFQILKEHLEALECPISEIHIALEDTGHYGDNLVAFLQKLGYSVFTYNPLLIKEFVKSQTLRKSKTDKKDALVIARKLLSDSYSERFIVEPQMRELKELTRYQNRLIHDRSKAKTLYVRVLDIIFPELSKIVTSPHNQYVYELLTRYPSASKIRHAHFDSLLKIKHLKADKANQIQQAAQVTIGNPSFALHLELTQLIATIRHLTSQIDEIQVQINSILHELDSPITSITGIGERLGATILAEINNINNFKNPAQLQAYAGLEPSIYQSGTMDTTGRMVKRGSPYLRYALMLATTCVCRFSPHFQTYLALKRSQGKHYYVAISHAAKKLIRVIFHLLKTNQTFDENKLA

SEQ ID NO: 337781 - protein, 366 aa, unidentified
MATYCGVDFHARQQLVKWCNTDDGEIRERQLGHQSIDEVREFYAQFRGAVIVGFETSGYSSWFEAMLEELGHQVWIGHATEIRRGARSRQKTDRRDGELILDLLLKNEFPRIHRVSAESREVLRQLRYRHRLVQQRTRSYNSLQAIALGAGVSLRAKLRTRKGKERLLGLSVTEAHSRQREEWLALIAQLNGYIERVEQELEVIAEADERVQLVRTHPGIGLLTGLALVHTLSPVSRFANSRKVAAYVGLEPREYSSGERQHFGGISKAGSRLLRLLLVEAGHKAINKDAQLKQLYYRVVHRREKAKAKVAVARHLLVRAYIMLRDGIDYAEFVRRGVAVRSARVSYRPQVPGKLIERLASGQQPS

SEQ ID NO: 337782 - protein, 416 aa, unidentified
MLFVGDDWAEDHHDLVVIDDNQKVLARARVPEGPAGITAFTDVIARAALKTVTSDDDLDDDAVEVMVGIELNHGPWVQALVAAGYQVFGVDPLQAKRFRESWSNSTAKSDSGDALGLAELVRSRHRTLTTVGADSEGSAAIRILAREHQRAVWDRTRHTNRLRSTLREYHPAIVTIAAKYDLPLHDKTILGLLTLVPTPAAGVAITVRQVLPLLARRHDKDAKAAWIVQALRQPQLPVGPEIVEAYAITVRAATRVISSASSHIAELEEQVNAHFSRHPDAEIYLSQPGIGQVIGARLCGEYGDNSTRFRTAKDRRNFAQTSPLTRQSGKLRIVCARKAGNDWALDAAIRQANAAIMHDKHAHAYYRRQRDRGVKHNAALRQLANKLTGILHGCLARHHRYDPAIAWANADLEVPA

SEQ ID NO: 337783 - protein, 369 aa, unidentified
MEDRITYVGLDVHKEGIVVAVAEGGLRGEVREYGRIANTAAALDRLMRKLGSTGVRLRFCYEAGPCGYGIQRHLSARGHECVVVAPSLIPKRAGDRVKTDRRDAAGLARLHRAGELTAVWVPDAEHEAMRDLVRARLDAVHALRRARQQLSGFLLRQGCHYGRPAWTKLHRRWLAGLKFEQAVHHIVLEDYIAAVEAAEARRGRLTAQIEAMLPDWTLAPVVAALQTMRGMALVNAATLIAELGDLSRFANPRQLMAYLGLVPCEHSSGASVRRGGLTKAGNSAARRLLIEAAWCYRFPARVSRELLLRQEEQPKPIREIAWKAQLRLCARYRRLARSGKPANVVTAAIARELAGFIWAIARRVPPAAG

SEQ ID NO: 337784 - protein, 345 aa, unidentified
MTNDIQFSSFCGIDIAKSVMQVYKVSSDGVVSNKAVKRADFLNEFRNIPPALIGMEACGGSQHWARELQSLGHTVRLMPPKLVKPYVTGLKNDKNDARGIYTALEMSVREVPVKSAAIRDLALLQTMRTKRQREKVAKINHIRGILTEYGLVMGKSINAFLAKAGSLIVQLKDRADVSPYIVSELIALFEEVKEAIAKIKELETNIESIAKTLKQYDLFRSAPGVGPITAATMLVLLCNPAVFKNGREFAAYIGLAPKSSGSGGKNFVTHIPKKCECNNEVRTLLVQCAHSICRCRHKSDWVSSILARKPKKVAIIAIANKLARQLWIMAKKGEKFEKRFILAAV

SEQ ID NO: 337785 - protein, 367 aa, unidentified
MKKVSTKAGKQTKNFTCQRLTIGLDLSDRSSWYCVLDESGTVLLEQRLSTTPKAMKEVFGGMPRSRMALETGTHSPWVSRLLAEFGHEVIVAHARNVRLIGESRKKDDRLDAQTLARLARIDPQLLCPVKHRSAKAQADLTVIRARAGLVRARTALVNTARGLAKSYGERLRSCNVRNMNAEKAEGLSPELQTALEPLLLAMESLSEQIREYNERIENMAQHSYPQVALLKQVKGVGTLIALTFLLTLEDPLRFRKSRDVGCYLGLQPGRRNSGQSEPQMHISKEGDPYLRTLLVQGAQHILGPFGVDCDLRRWGLKLAERGGKSGKKRAIIATARKLAVLLHHLWASGEVYEPLHNSKQNAMATAA

SEQ ID NO: 337786 - protein, 338 aa, unidentified
MGQVVRIGLDLAKSVFQVHGVDEAGEIVVRRKLRRSQLLAFFAKQPACLVGMEACASSHHWARELIALGHEVKLMPAQYVKPYVKRSKNDAADAEAICEAVTRPTMRFVAIKSPEQQCAMMLHRVRLVLCRQRTQLSNALRSHLAEFGIVAPVGRLGLERLIEIVADPADRRLPAGARISLRMLVAQLAVVKEQILENDRRIMADARSTELGRRLMTVVGPLLASALTATVADPRIFRSGRDLAAWIGLVPRQNSSGGKERLGSISKAGHRYLRQMLVVGSMAVIRYAERSARQRPWLAQLLARKKAKVAAVALANKIARIVWAMMITGDRYREPVAA

SEQ ID NO: 337787 - protein, 374 aa, unidentified
METIYIGVDFHARQQTICYLKTETGELVTCELKHQDKDKVRAFYAEFRGQVVVGLEASGYSPWFERLLEELGCAVWLGHATEIRRRARWRQKNDRRDAELILELMLHDEFPRLHRPAVQSREVLRMLRYRQKLIKIRTMSKNSLQALALQAGVARRSHLFTREGKQELAAALMSPAMQWQREHWLQLLQPLNQQVLESMVWLKAQSKGDVEVERLRTHPGIGLLTSLCLAHTLQPIDRFRNTRKVVAYAGFDPVERSSAERKRFLGISKAGPRLLRHLLVEAAHIAIRKDEDLKRFYQRLADRRGRPKAKVAAARKLLIRAYIMLRDEIDYAEFRRRAVAARLARLGHGPKVPEVVIGQPASAERQEPTHNRKK

SEQ ID NO: 337788 - protein, 390 aa, unidentified
MEHYAGIDVSLELSSVCVVDGRGKIVKEAKVASEPEALVYFLKELGFAVDRVGFEAGPLSQWLHAGLTQAGFETVLLETRHVKAALSAMTVKTDRKDACGLAQLLRMGWFQQVHAKSIGSQEIRALLVARKQLLGRLLDVELSIRGILRGFGLKVGQVTRKTFEARIRELVTGHTTLERIAEAMLPARATLKAQYEKLHKAVLAIVREDVVCRRLMTVPGVGPLVAVTFKSAVDDPSRIAKSKAVGALFGLTPRKYQSGEKDVTGAITRTGDEMVRTALYEAANVLLSRITRFSKLKRWGMDVAKRRGSKRAKVALARKIGVILHRMWIDGTTYRWAEAKPIAARVDQGGIRDASGPNRGLYCPKSRRRDGGAGEAVTRPVAVIRRTTRI

SEQ ID NO: 337789 - protein, 481 aa, unidentified
MKSKPQEKTKKATSRPTQGHWHEMNRKQRRETMRKIQSDDLSLEVLHPDAAGIDIGNESHYVAVPPTRDTESVRRFGCTTAELKTMVEWLKQCEIRTVAMQSTGVYWIAVYDILEQAGLEVYLVNARETKNLPGRKSDVQESQWLMKLHTYGLLRNSFRPSQEIRTMRTYWRQRNDLVRAAGRHIQRIQKALTQMNLQLANVLSDLSGVTGQTIIKAILAGERDPHKLAAFRNWRVKATQEQIARSLEGNWQEDLLFVLKQEQDGYEFCQKQMTECDRQLAQYLRQREDRSQGASLPEEKRKERLKKKKGNAPQFDLRAELFRMTGADLTQIDGIDVMTATTILSEVGWDMSKWQTEHHFVSWLRLCPDNKVSGDKIIGKGRLPTNNRITNALKMAASSLRTSNTYVGAQFRRLRTKLGAPVAIKAMAAKLARLLYRMLRYGMQYVDRGAKFYEAQHRNLQIAHLKRKAAKLGFRITELAA

SEQ ID NO: 337790 - protein, 425 aa, unidentified
MSSAHIRTAPNMDRELDKGGGLDIHKKSIAAAISSEDGSILEAEFGMTIEQIYDLKKWLLENGCKRVLVESTASYWYRIDQVLRDEINVIVVNPRDIKSNSSKKTDKIDARKLASRCLSNYEIHPSRKFTSEQLNLKRLTRSRQQYVQNRSKIKNQIHKSLDATGVTLSIFISDIFGKSGRYLLNGLVARKSLKELISGIPSNRIRKRAQELPQHITVQLDDTQVFLVGKALDTMDYIQKNIDEIDAILYERAEGHVEDLKILMSVPGIKFIAAITILAEVGDYKDFKNGDQLACYAGLTPDVQNSGEKKNIGSITKHGPKGLRWILNQVAHGASKTMNSRLRKVYLRLLRRKGKPKAITALARKILSIIHHLLANREMWEEEGFKKRRLDFDFGRTSSSSQLTWLDLVVNNVVRIGEGKPGGGG

SEQ ID NO: 337791 - protein, 376 aa, unidentified
MDTSTAAGSILHCALELSKNTWLLGIQFPDRPQPSLYPIKGGNTEDLMAKLTAARDRCAKLNGRAPSIVLCYEAGYDAFWLARFLKARGIECLVVDSASMQVNRRARRPKTDRIDVGKLLRGLIAWLQGDRHVWSVVRIPSVDEEDLRRSHRERDYLVHERTAHINRIKGLLFAQGIRGINVKRQYKTLLVDKLVTGNGHPIPPRLASEIVREIARLALVQEQIAILERERDERPTPCTATEKKRAQLMQLNSIGPAISAVMTREVYYRQFDNRRQVAGFLGLAPSPYDSGETERSQGISRAGRGQVRGTMIQAAWLWIKHQPRSTLTRWFLERTVGQGGRVKRIMIVAVARKLAIALWRFLEHGLVPQGAILSSK

SEQ ID NO: 337792 - protein, 348 aa, unidentified
MASLQADRVVTGGVDTHRDIHVAALLDELGRVLGTESFPATPAGYRSLTAWMRSYGTIDTVGVEGTGAWGAGLARHLQARDVRVIEVDRPNRQRRRRYGKTDTTDAIAAARQVQSGEATSPPRGGVGPVESLRLLRIARRSAMKQRTAVANQIHALVVTAPDEIRTHHQHLTLTQSVTIAAAYRPGNPLDVTQAAKHALKTLAVRYQHLTNELATLDTHTTTIVHTIAPQGLLDMCGVGPHVAADLLITAGTNPHRIGNPRSFAALCGVSPVDASSGLQQRHRLNRGGDRQANAALYRITIVRLRWHQPTRDYMTRRLAQGKTKPETIRCIKRYIANEIHHHLTQTPT

SEQ ID NO: 337793 - protein, 383 aa, unidentified
MVEAQYTIVPRQFDLFVGLDVDKSRIAVTVTDHERLLKSFQMPYCCEDLLHYLDKHFVGHKIALAYEVGPTGFGLYDDLTAAGHRCLVVAPAMVPRAPGKRVKTNRLDSRKLSQGLRGGELESIHVPSPLYRQLRHLVQLRDSHVRQMTAAKFRIKALLLYESIPFPVVSRSWSARVLQAVGTLPCNDSVRFKLDSLMASLQFHRLQAAAAQKQMRRFCQQEPELRQSIRWLLTVPGLGWITASHLVARLGDWRQLTHVRQVAAFLGIVSSEHSTGDDVQRGPITRSGDSRLRNKLVQAAWTAIRKDPELREFYRRIYRRHPRSLAPRKAIVAVARKLTTRIYAVLKEQRPFQLRPPRDSAPLTPEETAGPRGGLDGAQNEQE

SEQ ID NO: 337794 - protein, 346 aa, unidentified
MEQISRIGMDTSKRFFQLHGVNTAETVVLRKKLRRKEMVTFFEKLAPTVVGIEACGASHHWARLLQSFGHTVKLIPAQLVKPYVKRGKNDMADAEALCEAMSRPTMRFVPIKTAEQQAALMLVGLRDRLIRNRTQLSNAIRGYAAEFGLTAANGLANLRPLLERIQADEGVPDLARELFGAQAEEYAQLEEQIAEISAKLMAWHKADECSRRLAKIPGIGPIGAALLMMKTPAPELFRSGRQFAAWIGLTPRDHSTAGKVKLGVITRAGDEALRAVLVSGATAVIKHAVGCKGRASPWLIDLLKRKPPKLAAVALANKLARIAWKLMVTGEAYAATSTPIASAAAV

SEQ ID NO: 337795 - protein, 321 aa, unidentified
MNTYKDYLGIDISKETFDVVNQDGKHASYSNNSKDFSKFKRSIKANSLCVMEATGIYHLQLAKFLYSKNITVVVENPLKIKRFSQMCLSRNKTDKSDAKMICLYAQKQEVTPWKPAPEIIEQSKDIYQIMEQYIGFRAGLKNKLDALKHKNVPQSIINGIVSQIELIGKSIDELQTELDNLVKEFDALMLSNISSIVGIGQRTASLLIITTEGFRDFDSAKQLSSYFGLAPTEYSSGTSINGSRKISKMGNPLVRKKLYMCSLQASRHNKTCIDLYQRLLAKGKPKKVALIAVANKLLKITFALAKSGLPYDREYKSHIKT

SEQ ID NO: 337796 - protein, 331 aa, unidentified
MKFLETSGIDVSKDTIDATLHLKKCHNQFNNNTTGFRSFIRWVEKRSGLDINQVQICFEHTGLYSMKLAAFLSTNEIKFSMVPALEIKKSLGIVRGKNDKLDAHKIAEYAFMRRDKLALYNLPSSQVLKLQALLTLRAQMVRNRSGYQSSLKGIKTFFIRKDNEELYQTLQSEISGLNKKIKKIEGHILAIIKNDEAIAFLYHLITSVKGVGLILGTNFIVITNCFTNFENSRKFACYSGIAPFDKQSGTSLNAKSRVSHYANKKMKVLLNLAASSAIQCDPELKKYYNNRIENGKSKMSTLNIVRNKIVYRVFAVVKRGTPYVPLHQHAV

SEQ ID NO: 337797 - protein, 424 aa, unidentified
MKVTFQTCCGVDVHKAFLVATIIKTTGGIEPSYQKRRFSTFNNSILEFKRWLLENECLDVCMESTGKYWIPVFHLLEDEINVTIANPKWVKAVKGNKDDTKDSKWIGDLFRLGLVRGSYIPCKKIRILREFTRYRYKLVSCRSSEKNRYQNALTVCNVALDSVVSDIFGKSSTSIIDYLLEQSGTSIDHEVIASKLLKRLKAKEDAVIESIEGYQMTDSQKYRMHLVRTHMDHITAAINDVDSEIESLITSDPDYQNAIELLCTIPGVKHDSAVTIISEIGIDMSQFCTSKRLCCWAGLTPGSNESGGKKKAVRITRAGVYLKPALVQCAHAAVKSDKSPYYKKKYESLVKRRGKKRAIIAIARMILTAVFQMLTTGEAWNPCDLYKIDMPEILLEKQKQKTIKQAQKLLIREGLLPPIETVAS

SEQ ID NO: 337798 - protein, 355 aa, unidentified
MNEAKYIGMDVHQATISVAVRDSRGNLVMEAILETKAETILQFLRGLRGSLYVAFEEGTWAAWLHDLLQPHVARVLASDPRKNALLKAGNKSDRIDARKLSELLYLNKLSPVYHGEQGIRTLKELARSYITITRDLTRVMSRLKAIYRGWGIPCAGQQVYASRYRAEWLAKILEAGVRRRGELYYQQFDVLAALRQGTRRELLAEARKHPAMRLLRQIPAIGLIRAALLIALIQTPNRFRTKRQLWAYCGLALRTYTSGEYRFVGGQLKRSKKVLAVRGLNINHNHDLKNIFQAAATRAAATAGPLQDFYQACVARGVKPHLARLTLARKIASITLLVWKKGVRFDAEHLKQQAA

SEQ ID NO: 337799 - protein, 347 aa, unidentified
MRFYTQSHRYYCGIDLHARWMYLCILDPQGEVLLHRNLRACPEAFLKAVEPYRQDLVVAVECIFSWYWLADLCAQEGIEFILGHALYMKAIHGGKAKNDRIDSQKIAVLLRGGMIPVAYVYPPQMRSTRDLLRRRTYLMRKRAELLVHVQNTNSQYNLPEIGKKIAYRANRSGVAQRFSDPAVQTSIAADLSLIDFYDRLLNQLELFITSQAKQQDHHSFYLLRSVPGIGKILALTILYEIHDIARFPRVQEFVSYCRLVKCSRQSAGKNYGFSGKKIGNVHLKWAFSEAAVLFLRNNPEGQKLLARLERKHGKAKALTILAHKLARAVYFILRREKTFDLTQFLAA

SEQ ID NO: 337800 - protein, 475 aa, unidentified
MSRQTKLSETKRSTRASAKSAAVKPSSEALNVVHPNAAGLDLSRDEIWVCVPSDRDPTPVRLFGTFTPDLQALVDWLIHCQVDTVAMESTGVYWIPIYELLEARGIKPYLVNARYVKIVPGRKSDVLDCQWLQKLHRLGLLSASFRPDAEMVALRVYLRHRAALLEQRAPSILHLQKALHQMNIQLTQVLTDVTGQTGLQIIRAIVAGERDPHQLAEFRDGRCQSSQEEIAKALTGNWKPEYVFVLKQALEGYDFYTQQVTACDAEVERFYAALKPRWDAPDVIPALPRIKRDSRSKNQPAGNVRQALYRVVGIDLTAVDGLNEASVQTILAEIGTDMSPWPTVKHFASWLSLAPHNDISGGVVLHSHTLKSNNRARQAFRQAAESVARSDNAFGAYYRRLRAKYGPQVANVATAHKIARVVYFMLKHHVPYDPTKAEEAEARRHERELKRIQRQAAQLGYSLTPNSAKTPAPVT

SEQ ID NO: 337801 - protein, 358 aa, unidentified
MQIIGVDLHTRQQRIAMLDTETGELVEKTLQHEGEEVREFYSALTGSVQVGLQASGSMHWFLELLEELGIDYRVGHPSQIRKAETRKQKHDRRDAALLLKLQVEKRFPSIWMPASELRDLRTLRRQCHPWVRIGTRVPNTLQAMALSHGLRRGKTVWSQAGQHGMASLPLPLHTAYRRSELQHWYDQLQGPIDERDKRVSAQAWQRAGARLLLTHPGVGPVTALASDVFLGDAGRFADGKAVASYVRMIPREYPSGGRQRLGGLSKQGNPLLRFLWCEAALHVVRRDPELQRFYRRKLAAKGWGKARVAAARKLAIRLGILLRDQIDYPEFCRRGQLRQKSGATGAGTPDVGHSPAIL

SEQ ID NO: 337802 - protein, 434 aa, unidentified
MSHRLQVGIDFSQKRADFCLLSPDGRFIEPHKGFDNSVLGYSLAKQLLLQALDQHHFDGLDVSGEATGYYWLPFFLQLAADPDLEPYDLKLFPLNPRWVHWFKKCFARDDKTDQKDSYYIAERTRTRPPDVPWSADPNHLALRSYTRFRFHLVHNLAREKCYFSAFLFLKASAYRRLQPFSDLFGVTSRLILSQQPSLDQLAALPVENVAAQLHELSGHHLPNPHSNAQKLRQVARESFVLPPTLALPMQRILDLTLEHIRFLEGQIRQVEAWIASDVVAHPAITKLTTIPGVGPVFSAGIGAEVGDTHRFLQGVKWDNKRKRQRPRNLRDAEDAVAKIAGLWWPRSSSGDFEAEDRRMAKTGNRYLRYYFIQAANRMRQSIPEYAAFYARKYQEATKHRHKRALVLTARKGVGLVIGLLHRNESYRPGGTPTS

SEQ ID NO: 337803 - protein, 342 aa, unidentified
MNLPVCIGMDTSKSVFQLHGVDENEVVVVRRQFRRAEMIRYFERLPPVLVAIESCGSSHHWARLLQSFGHEVKLIPPQYVKAYVKRGKNDAADAEALCEAVTRPSMRFVPVKSKERQAACMLMTVRERLVSVKSQLSNAFRSYAAEFGIVGPAGRQNVTALIKRVLEDDSLPEMARDLFRLQAEEYAAVQARLAKIEAKLMMWHREDDVSRRIATIPGVGPIGSSMLSMKAPPPETFRSGRDFAAWLGLTPKDHSTGGRQRHGGITKAGDSALRSTLIVGATALLRHIRKGRHKPTPWLASLLERKPPKLVAVALANKFARIAWRLMISGGVYNRPVAAMPI

SEQ ID NO: 337804 - protein, 331 aa, unidentified
MINPQDRVANGGQPNCGIDMSKQHADACWLGNELRFNNDLEGRKELIARLLADHVDLVVIEATGGYERELVCEMQQAGLTVARLNPRQARDFAKSLGYLDKTDRIDARCLRDFADVLARHKDRHKYITAPTDAAQQELAALMTRRRQLVDMRVQEMNRLDLAGKRARRSILSVIRMLDKQIEQIDREVQDHIDDHFDGQRKLLDSFKGVGPVTILTLLAALPELGKLNRRAIAKLVGIAPLADDSGPRKGKRRIKGGRSEVRNVAYMATIAAVKHNPVLRNHYHRLLTAGKAKKVAIVACMRKMLTILNAMMRDGTPWDLARHAAQTAAPA

SEQ ID NO: 337805 - protein, 311 aa, unidentified
MASIICGVDVSSETLDGRIGGSGLEVSVRRDPEGIAALGRFCAEHGVELVVMEATGGYEKLPFGLLWEAGVPCAIANARSVRRFAEAMGVLEKTDRIDAAVIADYARAKGLAAQAPESQAQERLRALVTRLRQLTQMKVAQSNQRRLIDEPAVIAGFDEMLRLIARQSRDLELQIAELLAADQLWRALDGAFREIKGVAGRTVARLMAEMPEIGTVSNKAVAKLAGLAPIASDSGKRNGRRAVRGGRAQVRSILVVVAGVVARHDPDLAAFHQRLIQAGKPRMTARIAVARKLLVRLNAKARDARAAIQPA

SEQ ID NO: 337806 - protein, 400 aa, unidentified
MLLFFEVITMIFVGIDVAKDTHYAAVSDDSGAVLVKPFAFQNNAEGFCLLLKKLSEFDRSKLLIGLESTGIYSENLICFLYESGFRLAVINPIQTATLRKTAIRKTKTDKVDTMLIIKSLMVNSYRLYSQRDADSLKLRTLCRFRQNLKKSKARLKIQLAGYVNLVFPEFGKFFKSGIHIAASYALLKKYSSPKEIAALRTSTLCTLFSKASHGRFGKDTAEALKSLALSSVGVKNPYISIQIAQTIALIELLEQQIKDLNSAIEEAMESINSVLMTVPGIGAVNAACILGEIGDIKRFSKPCKLLAYAGLDPTVRQSGQFTAKSTRMSKRGSALLRYALINSAWQLTLVDPTFKAYYDLKRSQGLNHYGALGHVAHKLTRVIFKLLTSDTPFIPAKLVA

SEQ ID NO: 337807 - protein, 386 aa, unidentified
MHDRTNLPVPKQTDIRADCATLFVSLELSRSTWVATSLAPGSKKMSKHTLVGGNGRELLDLLARLKARAEQRIAAPVKVVAIHEVGLDGFWVHRLLGANGVESHVVDPASIAVPRRHRRAKTDAIDGETLLRTLMAWQRGEPRVCAMTVPPSPSEEDCRRVSRERATLLRERIQHTNRIRGLLFGQGITNYNPLHKNRRECLEELRTGDGRSLPAHVKAEILREIDRLELVLRQISEVEAERDEMLRPAEASSPAALLMRLKGIGAEFATVLYLEGLFRHFENRRQLAAYAGLAPSPWKSGSIDHEQGISKAGNPRLRTTMVELAWMWVRYQPDSALSGWFRQRVGSERGRTRRIAIVALARKLLIALSRYVTHGEIPAGAVMKPV

SEQ ID NO: 337808 - protein, 485 aa, unidentified
MDRPALQRLLADIAAGRVDTIVVYKIDRLTRSLADFAKIVEILDARGASFVSVTQQFNTTTSMGRLTGPQPTYRIQILCSGRQNSGKSTSPITEARERPMHQATTLPAPQRSSSRGDWATLFVSLELCRSTWVATALAPGSSKMSKYTLVGGDGHKLLELLARLKSRAEQRIAAPVKVVTIHEVGLDGFWIHRLLEAHGVQSHVVDPASIAVPRRHRRAKTDAIDGETLLRTLMAWQRGEPRVCAMTVPPSPSEEDCRRISRERATLLQERIRHTNRIRGLLFGQGITNYNPLHKNRRENLEALRTGDARSLPAHLKSAILREIDRLELVLHQIGEVETERDEMLQLAQPSSPAALLMRLKGIGAEFATVLYLEGLFRQFENRRQLAAYAGLAPSPWRSGSIDQEQGISKAGNPRLRTTMVELAWMWVRYQPASALSCWFRQRVGAKRGRVRRISIVALARKLLIALARYVGHGEIPAGAVMKAG

SEQ ID NO: 337809 - protein, 446 aa, unidentified
MSDRSGLSRGDRNRNARLARLRQLLPPGNAIVGIDLADDKQAAVVTDHDSRVIARRRVTARAWELGELLDWALARAIAAGFASVTVACEPTGHRWRVLDQLAAERGLALVCVQPLLVYRSRESEDLTRDKSDPKDAVLIARLASELRCYEPERADAVWARLRHLGARRAQLTTDATGQVNQVRDLLECAWPAVLGASGSPFRSATWRAAVAVTLDRRAGDLARVRRLGPSRFEAVVRRELPRWGATRPCLRIVRAVFAALADGAGVIAHRPGALERAGLAMADWHDTRERLASTETRMVTVLDDLGLTGLVATIDGLTAVGVAAILAESGDPVRFATPRSLVKHAGLCPRDNASGAFQGKTPISGRGRPGLRVAAWRAVWAAMPNNPVLAAKFTHLTTRDENRLARQQARTACAAALLRWIHVVVTRRVAWDPVIAAGTTQLQRAA

SEQ ID NO: 337810 - protein, 355 aa, unidentified
MNSEKYIGLDVHQATISVAVLDSTGKLVMESILETKAATILEFFAGLRGTLSVTFEEGTWAAWLYDLLKPHVAKLVVCNPRKNALLKDGNKSDRIDAHKLAELLYLNKLSSVYHGETGVRMLRELAWSYLTIVKDLTRVMCRLKAVYRSWAIPCAGRDVYYTRHRAEWLDKIKEAGVRRRAERLYQQLDMLQYLRQQARRELLAESRKHAITVKLRQIPSLGPIRSALAVALIQTPHRFRTKRQLWAYSGLALETRTSAEYCYVKGGLRRSKKQISIRGLNKDHNHDLKGLFKGAATRASVLPGPFQDFYQRSLAKGIKPTMARLTLARKIAAITLTLWKKGENFDADKLKSQAA

SEQ ID NO: 337811 - protein, 387 aa, unidentified
MQPAHTQDFTLDDQTLTASFELASKHWKVALQDGMHRSPSVHTTEQEGAEDRLTEAIALIETTRQEWRLAPSSQVVIVYEAGQDGFWICRALQKQGYEVVIVDPASIPVERQARRAKTDRLDAIRLLCCLRGWLRGERDRLHAVRVPEVEAEEMRHLVRDRGQLQKEVGQHRDRICKLLRTVGCWVQVGPTFAVQLERDEVVCHDGTALPPCLRQRLMRECERLDLVTRQLKALEATLSEQLPDSTARSVAALKRLRGIGQVGAHRLVLELFWRRFNNARQVGSCVGLVPQPYDSGQSRVDQGISKQGNRRIRALLIEMAWMWLRHQPDSALTNWFIRRTAAGIGAPSAGKRSKRVAIVAVARKLVIALWRYLKDGVIPVGAELKCA

SEQ ID NO: 337812 - protein, 344 aa, unidentified
MNYCGIDLGKKSSYFHIVDGERKTVTAGKFANNVGAIRKVFANRERLKIVVEASCEAFWMADRLKELGHEVVVVDPGRTKAIGAARIKHDKLDARILAELCQTGLLAAVDIPTLEQRMARLPFTSRDTLVRSRTLMTNSVQSILDGEGVDLPTRWIGGFSKVIRDAIPRMPRAMVPIVEHLLRGIEELSKLIDECDEKIEQIAENDPEINLLRTVPGVGPLCAAAFVHVIRDPGRFKSSRLVAAYLGLVPSLYESGQTSIKGGITKHGNCQLRSLLHICATALMRTKRDTALKRWAVALSTRIGRKKAKSAIARKLATILWAIWPRRTPFEARLPVTQSAAKAA

SEQ ID NO: 337813 - protein, 451 aa, unidentified
MSGTKKSNSKRDISPTHLNAAAIDIGATMHVAAVRPDKFSEPVRSFGTFTGDLHRLADWFTKCGVRTVAMESTGVYWIPVFEILDQRGFEVIVVNARDAKHVPGRKTDISDAQWLQRLHEYGLLRASFRLKGEVAVMRAYLRQRERLLDYAASHIQHMQKALTQMNLQLHHVVADITGVTGMAIIRAIVAGERDPMVLASYRDPRCHASAETIRQALVGDDREEHIFALTQALELYDVYQAKVALCDVRIEAVLKRLRKASSTPVGKPPTVRTTQKQSNDPAFDVRAALYGLLGCDVTQIHGLGPYLTLKLVAECGTNLSAWPDTKHFTSWLCLSPSNKISGGKVLSSRTRRSGSRAAALLRLAAVAVGRTQTALGACYRRLSARVGKAKAVTATARKIAVLFYNTLRHGMEYSDPEASHYEENYRRRVLTNLERRAKSFGYTLQPAPTSG

SEQ ID NO: 337814 - protein, 309 aa, unidentified
MATSSYVGIDVSKDRLDVAILGEERGWQVDNSSKGIVQLVNQMQELQPELIVVEATGGYQRRVVDALFHAGLCVAVVNPARVRQFARACGLLAKTDNLDARVLVEFGQRVQPRRYEGKTEAEQQLSALLVRRKQVEEMLKAEQNRLRTISPSLRGSVERMITYLKEEKKRLDEQIHELMKEQKAWQEQTEILSSAPGVGVVTTATLLAELPELGKMDRKRIAALVGVAPMNYDSGKKRGYRKTKGGRTDVRSVLYMSTLVATRYNPLLRAQYQHLLKRGKEKKVALTACMRKFLTILNAMMRDQQPFRM

SEQ ID NO: 337815 - protein, 387 aa, unidentified
MSQVDDLSRSLAAFDQNTTLTVVVELSEASWLVAGLVPAVDRQPLKKQEPDPRALLRLLERWRAEAAKTGRMIERIVLAFEAGRDGFWLARWLRARGIEVYVIHSTSVAVSREHRRAKTDRLDTGMLMRVLLGWLRGERGHCRMVAIPTLEEEDAKRPSRERESLVGERTRIINRMKSALARLGIRGFKPALRKAPQRLEALRTPEDTPIPPNMLDEVRRDMIRLAVVREQIDAIERARLVRLEQAPARGSHPMVRLLARVIGVGIETADMLVQEVLSRKLRDRRAVARYVGLTGSPDESGKRRREKGLAKAGNARVRRGLIQLAWRFLRFQKDSALAQWYRARTEGPKGVRKTTMIVALARKLLIALWRLVMTGEIPVGVVLRAAT

SEQ ID NO: 337816 - protein, 310 aa, unidentified
MDKFVGIDISKDSLDLCIEPDGEVLHLAYDDKGIDQVVKRLAQVAPTLIVMEATGGLEMRLASELTAKGLPAAVINPRQARDFAKATGQLAKTDLVDAAVLAAFARAIRPAVRPIKDVDTRELDELVTRRRQLIDMRVQETLRLGTASELQRKSVTAHIAWLDKRIVKLDDDLSKRLRASDAWRTKDNLLQGIPGVGAITSLTMLAKCPELGQMNRREIAALVGVAPRANDSGKHRGKRFVWGGRADVRAVLYMATVSAIRCNNDIQAFAARLKQAGKPAKVILVACMRKLLTIMNAMVKNNAQWAPKTA

SEQ ID NO: 337817 - protein, 297 aa, unidentified
MSQSSTLFIGMDVHKDSIAVADVAQDHGAEVMYLGAIGPRQCDSDQLIRKMPSNAKHLIFVYEAGPWGYWLSRYLSKTGYDCGVVAPSLIPQKPGARVKTDRRDAVQLARLARSGDLTAVYVPKVEDEAIRDRPRAREDAISDLKDAKCRLKALLLRQDSRSVGRATWGPAHLRWLSEMGCPPPAQPIVCQEDVRAVHEQTERLQRLEQERQEHVKAWRLNPAVEALQAVRGVQCTVAVTLVSESGDLTRVDHPRELMNFLGLIPAEYSSGEQRRQGAITNAGTTHARRALVEGAWA

SEQ ID NO: 337818 - protein, 379 aa, unidentified
MYRILKIGMDVHTTNFTLCALESKFGEEDQIIANITVGPDHKNVLDFIKRIKEKMDPKGQDEIDVECGYEAGCLGYSLYHTLTACKLKCRILAPTTMLSEQGPRIKTDRRDAKLIAQCLSNGGYHAVHIPTAEDNAVKEYVRMRDDHKLALKKVKQQTNALCLRFGFFYDGTHWTGMHLKWLRALELPELIREALNEYLATYDELTAKIDRYDKRIQEIAAQSEYQEKVKKLECFLGIKTHTALSLIVETGDFIRFRKGNIYAAYLGLAPGEHSSAESGGRLGITKAGNSHLRRLLIEAAGGICKGQIGKKSKDLIARQKGNPADVIAYADKANVRLRSKYYRLTRHGKKRNVAVAAVARELACFVWGMMIDNIHGNAA

SEQ ID NO: 337819 - protein, 320 aa, unidentified
MNQESYFIGIDVAKARLDIAVRPTDQRWQVDYIEERIQELVKQITKLHPTLVLLEASGGLELPVVTALAVASLPVVVVNPRQVRDFARATGKLAKTDSLDAMALAQFAEVIRPLPRSLPDKETQALNTLVTRRNQVMGMLVAEKNRLHTSRPPVRQRIQLHIDWLEKELDEIDQDLKETLANIPIWREKENLLRTVPGVGPQVAVSILAYLPELGTLDRKRIAALVGVAPFNRDSGTLRGKRTVWGGRSHIRAALYMAALVASRHNPVISTFYQRLLAAGKAKKVALTACMRKLLVILNAMLKHRCSWHYLNPQVFGPCS

SEQ ID NO: 337820 - protein, 367 aa, unidentified
MLYLGIDQHKRQLTVNLRGEDGEVILKRQVSTQWEKVRAFFADLAEKARPEGGFLAILEVCGMNPWLLDMLQEYGCREIVVIQPTERSKQKTDRRDAGELAHSLWVHRQQFLEGRHPLGLRRIQPPTAQEADDRQLTMLRARLTKKRTAVLNGIHKILRKHNLEQACPTKRFQTQKVHRWLGEMELPALDRLEMNLLVLQWELLDEQLAVVEAKIAERAAADEQVQLLESVPGLGHYSAVAISSRIGGIDRFRRPDSLANFFGLTPGCRNSGEATQRLGSITKRGSKMVRHLLNQAVIKVLRFDGAMRTWFQRIKKRRGSKIARVAVMRRLATILWHMLKKKQKYRYDAPLKKYPEFEALEGKTEAA

SEQ ID NO: 337821 - protein, 413 aa, unidentified
MESGYRLMVGIDWATEAHQVCVLDSQGRLLEQRRVEHRAEAIAAMIDRLIELAGGDPASIAVAIEVPRGAVVETLVERGLHVFAINPKQLDRFRDRHTVAGAKDDRRDAFVLGDSLRTDLSAFRRVHLDDAWTIQIRELTRIEEDLNTEINRLANQLRDLLLRFYPQLLRLCPAADQPWLLGLLKLAPTPTKAQRLRRSSIERLLHQYRIRKWTADQVRAELQTAPLPVAPGVTEATSAHIALLVPRMELLMAQLKLCAKAVQTALDERIVEEQRREHRDVEIILSLPGVGRVVAATMLAEAPQLLAQRNYHALRTLGGIAPVTRQSGKRLAVRRRYGCNHRLSNALYHWARISSQCDPKAKHHYQTLRQHGHSHGRALRGVADRLLALLVAMLRDQTLYDTTRAHAPKPIAA

SEQ ID NO: 337822 - protein, 315 aa, unidentified
MAEPLFAGIDVSKSQLDVAINQGDELLEFCSVPHTDEGISALIQKFRNTMPRLIVVERSGGLERTLVALLAEAGLPIVANNPRQIRDFAKAMGILAKTDKIDARTMAHFAAAVKPPERPIKDAERQQLSDRVARRRQLVKMLAQEKNRLSRAAGPIRHDIEHHINYLKERLDKTNKDIEQMIANTPVYQETLDILVTFPGLGRVTSAALVADCPELGSLNRRKIGTLTGTAPLNDDSGTRTGQRYIRGGRKTVRIHLYMATISAIQCNYKIKDFYQRLIAAGKKPKVAITACMHKIITILNAMVKHRKPWQTEAV

SEQ ID NO: 337823 - protein, 380 aa, unidentified
MLLTANSAVGVDGPQRHRLCQNEVVADLRQRRPSVEQISRVGMDTSKRFFQLHGVNAAEEVVLRKKLRRKEMVEFFQALAPTVIGIEACGSSHHWARLLRSFGHEVKLIAPQLVKPYVKRGKNDGADAEALCEAMSRPTMRFVPVKTAEQQAALMLIGLRERLIGNCTQLSNAIRGYAAEFGFTAAKGMAHLDPLLERIQADESLPLAARELFAVQSKEYAQLRGQINEVEAKLKAWHKSDECSQRLIKIPGVGPIGAVLLKMKTPAPEQFRTGRQFAAWIGLTPQDHSTAGKVRHGGITRAGDEALRAVLVAGATAVIQQAVRYGGRASLWLDALLKRKPPKLAAVALANKMARVAWKLMVTGDSYSTKSAPAALASRV

SEQ ID NO: 337824 - protein, 397 aa, unidentified
MYIVGIDIAKRKHEAAVIDGEGAVIIKPFSFTNNCSGYNRLLAMLAKAKLPLDEVSFAMEATGHYWLALFTRLQKESFRVQVINPVQTNAIRSFYIRQAKTDPRDALLIAEVIRFGHFSESTLHPENIYELRELCRGRHAIVSMQADVKRKVVALLDQVFPEYETAFTNMFGDTSMAILQTCPTPKELSEMPLEELCHLIEVSSHKRFRMAKAQELQVLARNSFGFAMAGDVFSTIIRLYAKHLDFLKQQVREMDRKIAEIMEALDTPITTITGIGPTLGAYILSEIGDISRFSSAAKLAAYAGIDPTMRQSGEYNGVRNRMSKRGSPYLRHAIWLATSSAVLHDPALKLYFQKKRDEGKPYMASVGHACRKMVSIIYAVMRDNKAYTPYIPNEISA

SEQ ID NO: 337825 - protein, 352 aa, unidentified
MKYVGLDWAYRTAQWCALDPGGEIAGEGRFAADRDGLARLVLELGDEVTACLEMMSGALWARDQLVACGWQVQVADARKVKTVAPLAAKTDKVDARLLAELSRRQLVPALWLPSLDERALRERLRRRMHLVRLRTSAKGRIFALQTQWGVRISLARLRRADGMTLLERAGMPAVWRHSISECLALIDFLDARIVPLDAELRPFAQADPRAVLLDTIPGVAELLALTIAVEIGEISRFAGPEKLVSYGRLAPRVRQSGEGRPHTGPLNKSGSRLLGWAAVEAAQHAWRESNPWHQLYLDVSRRSRNHNSAKAAVARKILIAAWHMLSRNEPFKPAPRTGATSVPASSRLALAA

SEQ ID NO: 337826 - protein, 359 aa, unidentified
MSTITIGVDLAKSVFSVCEVDGAGRVVRRQELKRDAFSAWLSQRPAGTGVAMEACSGAHYWARRCLEYGLQPRIMAAQFVVPFRKSSRSKNDRNDAEAIATAARQGNMRFVPVKSIDQQVRLSWHRVREGYKTESLAIGNRIRGLLAEFGVIVAQSGVALRRLLGDLDAQLGLPAELKELLRDLADHWKRVRAALDACEARIAAHAHQDERCMRLRAIIGIGPMTADAAVATVGNAREFKQGRQLAAWLGLVPTQHSSGGKARLGEISCRGDAYLRTLLIQGARSSLQRAKAVSLEKATPEQVWIRTLDGRMPFGKVIVAIANKHARQIWAMLAHDVDYDPCACLNHPMHRQAHAARAA

SEQ ID NO: 337827 - protein, 320 aa, unidentified
MKELTAGIDVSKETLDISLYNGGKHDNITIANNKKSFVKFLKKYSSDDLQIVMEATGIYHLRIALEAHDLGYFVSVVNPLIIKRYGEMKMLRAKTDRVDARLIAEYGYEQSPKEFTPHSDDRMVLFQLLKAIEDLYKTRTEFRNRLESYTHGYPVSKEVGKTYRSMVQKIDREIERLKKKLQDSLDTHFPDQSSKLTSIKGVGKMTASMIMAFYGNFEQFETAKQAVSFAGLNPHPRQSGTSVKRGSSISKRGHALIRKTLYMSALSAKKHNPVYREYYERLLASGKSKKVALVAVAHKLLRHIFAIVKYDREWDPQYAK

SEQ ID NO: 337828 - protein, 340 aa, unidentified
MTSFKESSSSSSSSSSSSLSSSLYVGIDVAKATLDLARSDELKDVQHFDNDAAGIAEIVEHLRQARPVMIVIESTGGLERPLLAALLDAELPASLVHPGRVRDLARALGILAKTDRIDARVLVLFGQKAEPRLTERASRARTELAELVNCRRQLSMTLVQQTNRRGSTVSVSARRSLDAIIAALEKQIERLDRQIRQLLDADDDFRDLDRILRSVPGVGPTLAATLVAELPELGKADRQPISAVVGVAPFADESGTTIGQRRIRGGRSHVRNVLYMATLAAIRFNPIIKAFAARLAAKGKRKKVVIVAAMRKLLSLLNVMARDRLTWQQLNVVKKLAVAD

SEQ ID NO: 337829 - protein, 386 aa, unidentified
MIVIGADTHKGSHALAAVDDGTGKVRGSRQIKAEEPGHLAAVRWARELDEERVWAIEDCRSCSRRLEQALLAADERVVRVPPNRMGASRKGEREPGKSDEIDALAVARAVVKDGVERFPVAYLNEQAMEIRLLVEHRNDLVAERTRTVNRLRWHLLELSPELEASLKRKALNQPRTLDRVERQLRKLPAGARVRIAREQISNLRGLNRDIERLAAELAELVTAHRPRLLAEQGCGALTAAILIGHTAGNERFRSEAAFALQTGTAPIPCSSGKRTQHRLNRGGDRQLNHALHIIAVTRAQHDPATKEYLARKEAEGKTKKGALHSLKRHLARRFHQLLSEPPADQQPTPEPAPIIEPKLPSIPDRPKPRREVEQIAAAPSPMVCIS

SEQ ID NO: 337830 - protein, 340 aa, unidentified
MKVITIGIDLAKSVFQVHGVDTAGEVTVRKKLRRAEVLKFFEGLPPCLVGMEACATAHYWAREIGALGHDVRLMPPSYVKAYVRRQKNDAADAEAICEAVTRPTMRFVPVKSAERQGVLVLHRTRDLLVRQRTMLINAIRGHCAEFGMIAPQGAYRASELIEQVRKAEGSVLPELARSALLMLAAQLDALAVQIHALERQLLVWHRQDEASQRLATIPGVGIITATALAASVTDPGLFRSGREFAAFLGLVPRQNSSGGKDRLGRISKMGDGYLRKLLVIGATSVIRRAINNTSATGAWVRSLMERKPARVVTVAMANKTARIAWAVLARGDIYRAPAMT

SEQ ID NO: 337831 - protein, 392 aa, unidentified
MIYVGIDIASEKHDCCILDANGIVLRAFTFTNDKKGFSEFLSSVTENCDLNDFSNVKVGLESTGHYGINLTNFLLAKRLSVKIYNPLQVNMLRKAQSLRKTKTDKSDAKFLAQLLFSDDSKPYLQPLYHISELKTLTRSRFRLIQMRSRLKISINRLVTVLFPELPNVVWSVNQKSCYALLLEFPTAKAIAEAHLTRLTNLLSTNSHGKYGRDKALEIRELAEQSIGLDSRATGFELKQTIRLVQGLQKEIDEVDREIKAIMLEIDSPVLSIPGIGFTLGAIILSEIGCIDNFDSPSKLLKFAGLEPSVYESGKFKASNTPMVKRGSKYLRWALLQAARLVAYRDETFKAYMIKKRNEGKHFYVAKSHVAKKLVRVLFHLLRSGEIFATQFS

SEQ ID NO: 337832 - protein, 338 aa, unidentified
MNNCIGFDISKSTINVHIPNGSLDLEIENLNKAIKSLYSKLKKIYNKEIDNLIFIYEPTGSYSYQLEFFCSVKSIKVFMINPKQSHNYSKAIGQRGKSDKVDARMLSSCLHVAKETEIKVPVINPVEQEIKELISYYKFTTKRKVQTSNHLEALTVKDGSSYAIKDLQKEIKNFIDKEKSILEKIKELIKSDIQLESKFTNIKSIAGIGDVGAIALIHLFIKYPYANQREIISLCGLDPIEKTSGSSIRGKSRISKAGSRLYRGTLFMSAMTAIRFNDEIKAFYDRLKENGKHTTVAQIAVVKKLIIIAHSLYKNNSAYDKEFYQKQCGKNEKIVQSA

SEQ ID NO: 337833 - protein, 309 aa, unidentified
MEHFVGIDVAKDRLDVHLRPSGETFAVARDGEGLVQLVDRLGALAPRLVVMEATGGYETIVASAVAAAHLPLAVVNPRQIRDFARATGRLAKTDAIDAAAIAHFAEAVRPPIRPIADAEAQALGELVARRRQVIQMIVAERNRRRRATQSRVLRAIDRHLKLLQTELSELEHDVDGAIRKSPVWQADAELLVSVPGVGPATLRTLIADLPELGRLDRRKIAALVGVAPINRDSGTMRGRRSIAGGRPAVRTALFMAAMVASRKNPVIAPYYAKLRAAGKTAKQALTACIRKLVVILNAILRDRKPWQPA

SEQ ID NO: 337834 - protein, 421 aa, unidentified
MKAVGLDIHRDFCEVAFMERGELRSGGRVVTSPEAIEEFAATLGSEDWVALEVSGNAGEIARILERHVARVVVVSPSDTGIRQARAKTDRLDARTLARLLAAGSLEAVWMADERTRVMRRRLQRRSQLVGSRSRSKNEIHAALMRRLIPRPNVSDLFGHAGLRFLRELELPVEERESVDGSLRQIEFLDREISEVDRLIALDALASPEIKRLMSVPGVNVVCAASFLAAIGDIRRFKDPRKLVGYLGLDPRIRQSGPGPGTSGHISKQGSASARWALVEACWSAVRQPGPIRAFYERVRSRRGHQIAIVASARKLVCLFWCLLTREEDYAYQQPSLTKKKLRRLELAAGAPRHKGRSDVWSINEAMRAAERALAEQGELAYKNTVRDWQAAQAKKVGASATTGRASNKPTGGKAARQTTSP

SEQ ID NO: 337835 - protein, 346 aa, unidentified
MIIIGCDFHPSWEQVAWLDTETGETAERRLVHAAGEAGPFYRQWPAPTLIGMESTGNCQWLIDLLTELGHEVWIGEAAQIRATMVRQQKTDRRDAAHLLELLVEGRFPRIWVPSSGERDQRQLLIHRYKLVTLRARVKNELQHLALNQGMQKKRKLWSEAGQKLLRELPLKPWASRRREDLLKVLSMLDGQIKPLDEAAKEAAEKSEMARLLMTQPGVGPITSLAFVLTIGDVKRFARGKQVASYLGLIPREYSSGGRQRLGSISKQGNRFLRMLLVEAAQGAVRYDPGFRQEYLHRCHQKAKGVAKVAAARKLAIRLYWMLRTQTPYPEVVRIESSPRVPLVGRS

SEQ ID NO: 337836 - protein, 451 aa, unidentified
MKIKTDGESPQDSQSFEAINQNAAGIDIGSGEHWVCVPPEKAEQNVRRFGCFTPDLMVLADWLIECQVETVAMEATGVYWIPLFQILETKGLKVNLVNAHHVKTVPGRKSDVLDCQWLQKLHTFGLLSGSFRPDDQVCVLRSYLRQRETLIKEAATHVQRMQKALIQMNLQLHKVVSDIAGVTGMAIIRAMVAGERNPHQLAALKDRRIQSSTSEIAQALTGDYRAEHLFVLQQELTLYDIYQQQITAIDREIEQCLSTFESKTEDSPPPRKGKKRKKPPGNEPNFDLHRHLFRLTGVDFTQIDGLNVLTVQTILSEVGLDPSRFPTVKHFCSWLGLCPGSKITGGKVKSSQTRKVGNRAANAFRIAAQSLSRSRSALGAFYRRLCSRLGAPKAITATAHKLARMFYRLWTTGEPYADPGADYYQQQYRERTVNNLKKKALSLGFELVAQS

SEQ ID NO: 337837 - protein, 405 aa, unidentified
MSNDVFVGLDWAVHTHAVCLIDSAGSVLERFEITHDHEGLAELMRRLARHGQRLRIAIERPSGLIVDALVDAGHGVFPIHPNAVKASRPRYRSHGAKSDASDAYLLADLLRTDGHRWRALAAQSDDIRALRALVRSRDDLVAARIAAANQLTSTLQAFWPGAAVIFADVASPIALAFLRRYPSPGSAKRLSEAQLQRFCKAQHYSGRRSAAELLVRLRGAAAGHAGKRTEQALAEVVRTQVKVLVPIVTQIAGLTGRIEQFMQQLPDGLLMMSFPRAGQVCAAQILAELGDVRERFPSADQLAAEAGTVPVTYQSGKTRSVAFRWACNHRLRQAITCLADNSRHANAWAKSVYQAARARGCDHTHAIRILARAWLRVIWRAWTDHKPYHPSLHGNAVALASAEGG

SEQ ID NO: 337838 - protein, 355 aa, unidentified
MIIIGVDFHPEFQQIALMDSDSGEFQEKRLGHREEAETFYRGLTAAGQKVRVGMEASGHGRWFERLLSELQIELWIGDAAEIRARRVRKQKTDRQDAQLILKLMLKDDFPQIWVPSWENRDLRQLLWHRHRMVQARTRIMNQLQAVALNEGLRCKKRLWREQGRQQLEAFRLAPWASRRRHDLLELMDRLNPTIAELSQAIEQEAEKWPEARRLRTHPGVGALTALAFVLIIGQAERFSSGKQVASYLGLVPLEDSSGNRRRLGHITKQGSSMMRFLLVEAAQVTVRSVPEWRSKYLHLMMRRGRKTAKVAMARKLAVRLYWMMRKGWDYEQWKKFGSQGRKLSFHTVLTKGSTR

SEQ ID NO: 337839 - protein, 310 aa, unidentified
MENVVVGIDISKEQLDIHILPSQDSFSVSRDSEGLGQLITQLSSLQPKLVVMEATGGFETIVAAALAAARLPLAVVNPRRIRAFAQALGYLAKTDRLDARIIALFGEAAKIEPQTVPDEAALALGELVARRRQIVETIGVERNRKRSLTQRRLLKGVDRILALLQKELSDLERDIDQAVRGTPAWREKDELLQSVPGVGSKVSSMLIAELPELGTLTRRKIAALAGVAPMADDSGKHHGRRHIQGGRAQVRSGLYMAALVAARHNPILAAFYQRLRAKGKTPKQALTACMRKLLVILNAIIRDNRSWQSA

SEQ ID NO: 337840 - protein, 420 aa, unidentified
MTRRKSTPPEAALVAIDVAKHRNEVLIEAVRGGRRRRMTILNTRADHDKLVTTLQAMQMPVVVGLEPTGNYHRVLAHRLIDAGFTVRLISSMALARTREALHNGWDKNDPKDAQVILHMLGIGATMVYQDPLAAGINDLQELSKTHEVVSKAKTELWHRLLTHYLPLYFPEIERFVGNSRSDWFLAFLERFPTPASITAMAKEDFVEAAWDVVGRKVSKARLLGDIYETACSSAALPVALDSPAIAMFRLVLAEARNLIQQRNIIEAHAHELLREQPDYLRLRQVPGIGPIHALTILAEAGDLRRFRHHRQFLKFCGLDLATHQSGQFRGQTRLSKYGNARLRRTFWLAAQVAIRQRDNSLRDCFGRHVAKDRENKDLRRKATVAVASKIARVAHALIKTGTDYRPFPEAPVPSGRTLPL

SEQ ID NO: 337841 - protein, 421 aa, unidentified
MENTAARKRKQVPEGYLIIGIDPHKKRHAAVAITQDFAIRDKFKLDNTREGLETMLRRTRTEMVKADCRGVMFAIETGGHYWRNIAYFLDEQGIPFRFINQYTLKRRREGKDINHKKNDYRDSEVAAQLLCTGEFTESTIPQGVYAELRTAHNAYRRLVKERTRITNLVKGLLDGLFPEFTQVFKDPCGLTALSVLSTCSIPRVITGIMENEFVAAIEAKHQGRLMRKKLKELHYKAKTSIGIAAGARSVSSEISFLVEKHDLIRKHICIIERTLVSLVDEAEEGKYLLSIRGLNYIAVAGLLAELGCFKSYRSAKQMIKMAGSNPTESESAGKRGTHTPMSKQGRPVLRYCAWTSVIPMLRFNSDFRAWAKQRRERPAHANPLNGREVVGAALNRLFRLAFAMVKNQTYYLSPQLVQVTG

SEQ ID NO: 337842 - protein, 343 aa, unidentified
MQIRSVGIDLGKTSFHLVALGDNGKVLLKKKFTQKQLITFTANLQTSLIGMEACSGAHFLARALRAQGHEVKLIPAQFVKPFVKSNKNDFLDAEAIAEAVDRHNMRFVPIKTDDQLDLQALHRVRDRLMIRRTSVINQIRAFLLERGMVFAKSPIRLREAIPEVLENANENLTPRMRNLVAMLWSEWKDLELQIVEMNDEVERIASSDAACIRLRQIPGIGPLVATAIVASIGNGAAFQKGREFAAWMGLVPKQHSTGGKAKLYGISKRGNSYLRKILVHGARAVVLRSKRDRIAMGTWITALETRAPRNVLIVAMANKLARIAWAVLSTGQDYRAVPSAMAA

SEQ ID NO: 337843 - protein, 527 aa, unidentified
MKLLVRLRRLAVVINPERRVSLRFAGRPMPSRRGGELPCQSHPNNSKEKRTRRSTLKLPKRKARGSHRPQGEGDQRRSQLRITNPDAAGIDIGSQVHYVAVPEGRAERAVRSFGAFSAQLDEIAQWLKECAVKTVAMESTGIYWVPLYQKLEEAGFEVLLVDARQAKHVPGRKSDVQDCQWLQQLHTYGLLRAAFRPEDSICRLRTLQRHRKNLVEGAGVWVQHMQKALNEMNLHLHHVLSDISGYSGLAILDAILAGERDPRKLASLADYRVKKSRAQIEAALTGDYRPELLFVLNQSLQDYRQIQQQLAQCDLSIEKQLAQIADCANPSQDCGPRPQGPGSAGGKRVKIKPKDALEVSLAGHLKRILGVDLTTIPGLNVLAILTLVSEIGTNMAKWRNEKAFVSWLGISPNNKISGQRVLSSRTRKVVNRAATTLRLAAMVLGHTNTPLGSFYRRKRAQLGAPKAITATARKLGCLIYRLIKNGESYQEPDLHAYELKYKAQILNSLRKRANSFGFDLVEVPKAA

SEQ ID NO: 337844 - protein, 334 aa, unidentified
MNNVTTVGIDLAKNVFSLHGVDGCGVVVLRKSVSRAKLAGVVAQLPPCLIGMEACSGAHEWARRFAVFGHTVKLMAGKFVAPYRKSGKNDGNDAEAICEAVSRPNMRFVPVKSREQQAQLCVHRVREGFVQERTATLNRLRGLLAEFGHVLPLGAIQVQRQVPPLLEELPETVAGIARDLLEHVRQLEERIRQYAHQIEAHVHSSELARRAQTQMGVGPITASAIVASVGEAREFKNGRQFAAWLGLVPRQHSTGGKPRLGQITRSGDAYLRTLLVLGARSVLKRAQRERDPLSRWALALRERRGYHRACVAIAAKNARRVWALLAGRSPALTA

SEQ ID NO: 337845 - protein, 411 aa, unidentified
MRRVIGMDIHRTFAEVVFWEDGNLRPAGRVSMTRIGLEAFGRSLTKEDEVVIEATGNAMAAVRVLAPHVARVIVANPLQVKAIAHAHVKTDKIDAGVLASLRAADFLPEIWLPDADTERLRRLVARRNQVVRHRTRIKNEVHAILHAHLIPPCPHAALFGRLGRIWLARQVIPDDERAAIDRHLRELDRLSEDLESLDREIAQAAIGDPAVKRLLTITGVNLIVAAGLAAAIGDVRRFPDPQKLVSYVGLNPRVRQSGLGLAQHGRISKRGRSHARAMLVEAAWAASKAPGPLRAFFLRIRARRGHQIAAVAVARKLAVLCWHLLTKGADYQWARPALVANKLRAMELQAGQPTRKGNKRGAAYAYNVKELRDREIELARHAEQAYVRFVSQWQRRGSARQRTGAAREERR

SEQ ID NO: 337846 - protein, 377 aa, unidentified
MDCTSTAAESILHCALELSKNTWLLGIQFPDRPQPSLYPIKGGNTEDLMSKLTAARDRRAKLSGRAPSIVLCYEAGYDAFWLARFLKARGIECLVVDSASMQVNRRARRAKTDRIDVGKLLRGLIAWFRGDRHVWSVVRIPSVDEEDLRRSHRERDYLVHERTAHINRIKGLLFAQGIRGINVKRQYKTLNVDKLVTGNGHPIPPRLASEIVREIARLALVQEQIAILERERDERPTPCTATEKKRAQLMQLNSIGPAISAVMTREVYYRQFDNRRQVAGFLGLAPSPYDSGETERSQGISRAGRGQVRGTMIQAAWLWIKHQPRSTLTRWFLERTVGQGGRVKRIMIVAVARKLAIALWRFLEHGLVPQGAILSSK

SEQ ID NO: 337847 - protein, 462 aa, unidentified
MKLYLGGDVSKGYADWVILSEKKQAVLDNFQLDDTYAGHCKLYAMLETYFGKHQGLEIYAAVESTGGYENNWFSTLKSYQKVFNLKVARVNPAGVNFNRRAGLKRNVTDAISALSIAEYLINHPDNIKYDQDDKWKSLCRHWNFVEMQKQQRVQTINQLETILYSANPTLMRFKKDNLPNWLLELIILCPTSVTLAKARPEKLAKIPYLSLARARTLVAEAKQSIASAIDKNAEILVSQIARQIKSFDQNIKSQMQLIERDLTCPEIELLKTFKGIDTISAIGLLLEIETIERFPRVKSFSCYYGLHPKFKQSGDKVIGVRMSKQGGKNMRKILFNIAKGAITYNPLITAVYEKKLSHGMKKMAAIGVCMHKILRIIYGILKNKQAYNPLIDKQNCEKSKDKQQEKQQQENANIDKSRRYQEFDIKAPISRKQTKKRREHDLSQCEITSQNTGSTCSSETKL

SEQ ID NO: 337848 - protein, 429 aa, unidentified
MQIKTLQPEIKSLNYLIVAYDISKYKHNFYTHFTIDSESMESEGEIKSPMKSVISHFEDLVKLKETYNFHGVQIVCEPTGGYEKALLRKAREFGFLTQYVSGEATNKAKVIESNDSGKNDQKDARVIHMLAAQGKTLSCTESHDHYGELKFYNRKYEDLSLEAARRKNRINSLVEELFPDISITARQLYNKTMQCVIDTYKLNPYVIANLEWEVFLDVITACYGRKLSKVAAALLERVWRASLSSRLNIMPDWKSNALAEELENSYRLWTAIEDRKKAYKDKMITLVEKTEEWQQVNKAPVSAFMFSRILAESGSWKAYPGIRQLMRYAGLNLREKQSGTYQGQVRLSKKGNSLMRKCLGQMVFSCLVKKKRLYGDFYRQKKEKRNGFYALTCVMRKALRMLFGTYQSGAGYQGQRVFDQTFETNKAAA

SEQ ID NO: 337849 - protein, 318 aa, unidentified
MEPQVSFNQVVSKGCGIDVHKKIVVATISGEGLKKETREFGTFTRSLTELKDWLLVNGITHVAMESTGVYWKPVYHVLESSPIKVWIVNARHIKYVPGHKTDKQDSAWICKLLLAGLLKPSYIPPREQRELRDLTRYRIKMIQHVSSEKNRIIRVLEDCNVKLSSVLSNTHGAVGMKLIGKLCEGKTITKSDIDEVYHRKLEVSKEDLYEACQGILTEHHIYLLQTIQEDIRSTDTVIESLNVRIRNKLMEYENVLENLKAIPGLSTKTVEDLVAEIGLDMDVFPTDKHLASWAGMCPGNNESGGKKKVDAPTTETNK

SEQ ID NO: 337850 - protein, 408 aa, unidentified
MWFAGIDWADDHHDAVVLTDQGQLLGALRVPHTAEGLDHLTRFLRGGASTSGAAEPVICLVETQHGLLITALLEAGFTVCPVNPLAVGRLRPPSGVKTDALDARLLARLGRNDWPALRVLPPDGPLLQELKTLTRDLEGVLREQTRLVNQLTACLKAYSPAALRCFDGLTRQVTLAFLQAFPTPEAAAAAALDQLDQLTQVLAQGHYPHPRQKAEQLAALLQAPQLHALPGVARAKARLMAALRAQLAVLTTQVAAFDQAIQQLFAQPADSAVFASLPGAGRRLAPRLVAEWGEDRTRSARAASVRALAGTAPVLFQSGAFRGVRRRRACVNAWRQALSHFAWESVLCEPWATASSQRKRAQGKTSAMALRAVAHQWVRSIYAMWQARQPYQRAIFLAAQHAHGGMVA

SEQ ID NO: 337851 - protein, 346 aa, unidentified
MRNSNTIGVDLAKNVIQVAVVSPTNKELSNKELTRIKFAEFLAKQKPGLVAFEACATAHHWARVATTHGHQVKIIPAMAVAPFRQGHKTDKNDALAVAEAANRPNIKIAPMKSIDHQAMQSIQRSRELIIQERTATSNHIRGLLLEFGIAIPKGLVSLRRQVPLILEDAENGLPMSNRPTLHRMLMRFCAAEEDLAFMDEQIKQLVKSNDDCRRLTALEGVGPIGAILLYATLGSGDAFQNGREFSAYLGLTPKQYSSGGKTNVIGISKHVANRRLRSVLVQGARAYVHKRKHVASSKDEWLFALVARGGTGRAAVALANKNVRTAWAMLTQGTDYCCKPCVGNAA

SEQ ID NO: 337852 - protein, 402 aa, unidentified
MAYDFVIGVDVGKYFHHACVLDPQGRQVLSKRINQHEGSLRKLFGQFLANNASVLVIVDQPNNIGRLTVTVAQDMGADARYLPGLAMRQLSRIHVGNSKTDVRDAYVIAHAGLNLPDALRSVDRVEEVFIQLKVLNGIDEDLARAYTRLINQMRSALVGAYPAFEHVLRGQMIHRKWILHLLAKYGGPTKIRRVGKARLAAFARSHKARNPEPVIDAMLVAIHAQTVSIAGAEYAELGVAMSAKDALAKLEHRKEIEAQVLKLIQDIPQTEILLSMPGIGPRSAAQILMTVGDMSDFPDAAHLASYAGLSPRTNQSGTSIMSNSPNRAGNKKLKNALWQSSFASIRFHERSRQFYERKRKEGKRHNAAVVALARRRLNVLFAMMRSGELYRDIPTAQEAAAA

SEQ ID NO: 337853 - protein, 326 aa, unidentified
MEHELHYIGIDTAKEKLDVDVLRPDGRHRTKKFANTTKGHDELVSWLKGHKIDHAHICIEATGTYMEPVAECLYDAGYIVSVINPALGKAFAQSEGLRNKTDTVDARMLAEFCRQKRPAAWEAPHPLERALRALVVRHQALTDMHTQELNRTETAREVQRPSIDAHLLWLEAELKRLEKQIKDQTDDDPDMKHRRKLLESIPGIGEKTSAVLLAYIGLKDRFAHARQFAAFAGLTPRRYESGSSVRGASRMSKAGHVSLRRALYMPAMVATSKTEWGRAFRDRLAANGKKGKVILGAMMRKLAQVAYGVLKSGVPFDASRHNPVAA

SEQ ID NO: 337854 - protein, 342 aa, unidentified
MSISYVGLDLGSSKFHQVAINHRGAQTRNRELATSEASLVKAFSGMRGEIHVHLEAGELAPWASEIIRPLVTRVVCSHPQKNAWIARDRDKSDRVDAYKLASLLRLNEFKEVRYPQSQLRRDFKAVVQHYDELTQQQARLKTKIKARLRMQGVITRGQLVFSARGRKAVLQGVKSVVVRTAIQQLYGMLDQSLESQAEARLLMLRAAQALPEINIMRTAPGMGPIGACRFSAYVHAPQRFSSTRKLWKYCRLSVSHRSSNGKPLRRPRIDRSGCGRLKDVSRKAFEAALRRKDNNGFQRAYYRALAQTHDATHARLTVQRKIVSTLRAMWINQTPYSDQMTP

SEQ ID NO: 337855 - protein, 287 aa, unidentified
MTSNQNTDTVPGARAGVIKLGLDIHASLIVVVRQVDGQASQPPQRFSEEAFVGFVHRQLAAAEAVHSCYEAGPFGYVLHRRLTALGVHNLVVRPRDWSTYGERVKTDARDAGALCSSLDRHLAGNRGALAVVRVPSEAEEAARGVSRQRQSLVRDRVRFTLRGKGIARLRGIALPPEWWRERAFARLDIPADLREQLSGLRRVILSIDAEAVALTTQIEAAAPAALPAYLGPLTWEILRREVGDWSRFANRRQVASYTGLCPSEHSSGASRLQGSINRHGNPVCATS

SEQ ID NO: 337856 - protein, 456 aa, unidentified
MAARKRQDTAPRPPSPRDLPVVQLDAAGIDVGAAEHWVAVAPGRDPRPVRRFAAFTADLNRLADWLAACGVRTVAMEATGVYWIPLFELLESRGFEVSLVDPRQTKAVKGRPKTDRLDCQWIQRLHACGLLAGSFRPRDAIVALRGYLRQRQMLIRYAGSHVQHMQKALEQMNIKLTEVVSDITGKTGMDIIRAILAGVRDPVELAKLRNTHCKVNEAGLAQALAGHWRAEHLFELKQALDLWEHLQGKLRECDAEIERHLSSLPDRAGAAALPPRPKVRKLKPREPGYDARGLVYRAMGVDLTAIEGIDQTTALVLLGEIGPDLGRFPTAKKFCAWLGLCPQPRESGKGRRPGRVRPGINRAAQALRLAARGLHHSRSALGAFYRRMRARLGAPKAIVAAAHKLARLVYALLTKGEAYVAQAMEDYERTYAARRLSGLGRQAAALGYRLEPLAGT

SEQ ID NO: 337857 - protein, 402 aa, unidentified
MNPVVGLDISKEESHGQAFLARGKPFRGTFYFEHTRDGLANLHQVLKDVETASKLRPLLILEATGHYQSPVVQFLEEHHYIYIIINPLISNRLRKSQLRKVKTDAADAYLLGELYYKEEFEPFKKRGVQLLNLRYLTRQYESLSKMCVQTKLQFQAVLDQVFPAYKGVFGAMYSRISLRFLSKFPTSYSVLQTDEITLKAKMKELLSSKRGRSEGWINQRVQRLLDAAKQNPFQQTMYASHLINLKVLITLILQYQEHLAELEQNIDALAEEIEEYELIQSIPGIGHKIAATILSEIGEVDRFDHPKKLVAFAGIDPSVFASGKFTATRNRITKRGSRQLRYALVMAVQCGLIRSRNMRLKAFYDRKRAEGKPHKVALIACANKLIHWLYAILKNKKEFRPI

SEQ ID NO: 337858 - protein, 472 aa, unidentified
MRVPKTRRGQLPRWRNERRREDWTRAVIGTTVCCGPEVFSRSSTQSSISLGTAAYAFWALNRKEGVMEVVVEIGAGLDVHKKRIVACCLDGRSTPPKRIRRTFGTFFNQLQSLRDWLVTAGVTDVAMESTGVYWMPVYRVLEGHVRIILGNARLMANVPGRKTDESDAEWIAVLLRHGLIRPSFVPPKAIRELRQLTRCRRKLVQMRTTAQLRVDKLLQMANIKLSSVASDLFGVSCRKMLRALTDGITDPVVLSELSYSTLRNKRPQLIQALTGTLSVEDRQLLKIQLDLVDDLKRELGRVDELIQQKVIPYEAIVQLLDTVPGINRTIAQEILGEIGTDISIWPSQRHFSAWAGVCPGNRESAGVRRRARSREGDRYLKSILAQAATSAAHVRGSYCAARFRSLKFRLGERRAILALAHELALSIYFILLRQQPYREPLAADPPLVRDQRRRSLIKQLQKLGYEVTCSDL

SEQ ID NO: 337859 - protein, 412 aa, unidentified
MLYVGDDWAEDHHDIEVQDEDGRRLVKARFAEGIEGLTRLHELLAEHLEENEVDPVTGLVSGQVVLGIETDRGAWVSALVAAGYQVHAINPMSVARYRERHSTSGAKSDAGDAHVLAEIVRLDRAHHRPVAGDSPEVEALKLVSRTHQSFIWDRTRQLLRLRSALREFFPAALAAFEDLTAPDALELLQRAPAPDRAARLSISQISAALKRARRRDVPSKAAAIQAALRAPALRQASAIEQAYAVIVASQVRLIAQLNQQIEELQAVVAEGFGRHPVAEIVTSQPGLGLVLGARVLAEFGDDPNRYADAKARKNYAGTSPITRASGTRRVVLARYARNKHLADATHQWAFCALTASPGARAYYDTTRARGAGHHAALRQLGNRLVGILHGCLKTNTPYNETIAWPPSPAVAA

SEQ ID NO: 337860 - protein, 352 aa, unidentified
MYYVGLDLHKKYVTGCVLDSQGVVVAEQRRLPPVLETMLGWLAPLGQPVAVALEATLYWAWLHDRLTAAGYQVAVAHPQQVKLICHARCKTDPVDAHKLADLLRTDLLPAIWIPDAATRARRTQLRGRAWVVRMRTRVKARIQAYLAAENERVPVSDLFSRGGRAWLATVVLPAAVREQVDRLLALVEQLDGQIAEQDRAVRELARATPEAALLQTIPGIGPFGALLLLAEIGTITRFSSSHELAAYAGLVPSTRSSGGKTAHGSVGPAGSAWLKWLLVEAVQTLKRQPGPVRSQYERLLRAKGKPKATVAAARKLCCYVYWMMKEGRSYDDWLRQRQQREVRPIQAVASVA

SEQ ID NO: 337861 - protein, 337 aa, unidentified
MENYTRLNVSIGLDVSKETVSVFIPINKLDYEIKNSVDGLNKLISKLKKLYKKEYNDLVFVYEPTGSYSDLLKKICSKKSIKTFAINPKRSHNFAKASGNRNKTDIDDARLLSNAIVLAKEDEIVVPVINPAVEHIKELMSYYKFVVKQRVMANNHLESIAVKDGNNYVIASLEDGIKLLKEKENSIVITMKDIIKSDDELVTAYDNVKSIIGIGELGAIVLLHLFLKYPDANKKQIVSLVGLDPTRFDSGSSIHKHAKISKAGAKIYRSVLFMGTMTATRCNPEMKIFYDRLKQNGKQTTQAQIAVMRKMIIIAHSLYKNNEKYSSKVYQKACGIL

SEQ ID NO: 337862 - protein, 343 aa, unidentified
MTPPPRRPPQKTAVCVVDEAGEVICEHKVPTEPDDIAVLLTSIGGDYVRVGIEAGPLSQWLVNGLTGAGLPVVCVETRHMKALLKAQQINKSDRNDARGIAQMMRVRLFKPVHVKTLAAQEQRMLLTSRKLIQRKLLDIECDMRGTLRNFGLKVGVVSTRNYEARIRELVDSLPTLAAIVGPLLAVRQVMRQQLAVLHKMLLDAVREDPICRRFMTVPGVGPIVALTYRASVDQPHRFAHSRDVGAHAGLTPRRHQSGEIDYDAGISKCGDVMLRTMLYEAAQSMLTHSRKWSWLKAWALRVAQRRGMRRATVALARRIAVILHRMWIDGTDFRFSNSAAKEA

SEQ ID NO: 337863 - protein, 478 aa, unidentified
MRAGRRWRTRKEKKEWARRLQSNDPGLDVIHPQAAGIDVGNASHYVAVRPDRDPEPVRQFECFPADLHRLADWLKNCGVRTVAMQSTGVYWIPLYDILEERGFEVYLVNARHTKNLPGRKSDVQECQWLLKLHTYGLLNNSFQPASQIRVVRTYWRQRAEPVQATASCIQRMQKALTQMNVQLANVISDLSGLTGQLIVRAIVAGERDPQKLAKLRDPRIQASPEEVAKSLEGNWRPELLFLVKQELDTYDTYQKRIAECDEQLQQQLASFASVAPGVAAAPVTQPQGDEPLKKAQAKRKKPAKNAPRFNLEQELQRVAGVDLTRIDGIDVMVAQTIVAEVGLDMGRWKTEAHFVSWLGLCPDNRITGDKVVGRGTRHVVNRAATSLRMAANALLRSQTYLGAQYRRLRTKLGAPKAITAMAHRLARLVYRMLKYGQRYVDKGAEYYEQRYRNQQLQFLRKKATQLGFHLTEAQAQTA

SEQ ID NO: 337864 - protein, 377 aa, unidentified
MSNVRFLGLDVHADTIAVAVAEPNGEVRSIGTIPNRLESIRKIVAKLGPAKDLQACYEAGPTGYVLYWQLTALGVACEVVAPSLVPVKAGDRVKTDRRDAEKLARSRRAGDLSAVWVPDADHEALRDLVRTREDARQDQHRARHRLSKFLLRHGRRPPEEVKKSWTPKYLTWIKEQVHFDQPALEVTWLDYVHEVDHMAERIQRLEKAIAEAIQKAPPAMRAVVEALQALRGMAQITAVTVVAELGTLSRFDSPRQLMRCSGLVSREFSSGNRIRRGSITKTGNAHLRRVMVESAWAYQYWPWLGGFLLKRQQGLDQDIKDIAWKAQWRLHKRYKKLAAAGKKKPQIVTAVGRELLGFIWAIAVQTEAKFQVGRKAA

SEQ ID NO: 337865 - protein, 351 aa, unidentified
MSHKTAATVAHTIGIDTGKNTLHLIGLDDQGAIVLREKIARGRIAARLANVPRCLIGIEAGMATHYVARELGALGHDVKQVPAAYSKPFRQGHKNDFRDAHAIAEAVQRPSTRCVPVKTDDQLDLQALHRVRSRLVGQRTAVINQIRGFLLEHGIAVRQGLRFLRQQLPDILAKRSDVLSPRMIRIMEDLSGDWRRLDERIEHITKEIEVLADTDVNCGQLMTVPGIGPIVASATVAAIGNGAAFARGRDFAAWLGPVPKQMSTGDRTILGRITKRGNRYLRMLFVQGARAILLRPKSWVKHSFGPWLTTAVRRLHRNILTIALANKLARIALSVLIQGRSYETRIVPAAA

SEQ ID NO: 337866 - protein, 370 aa, unidentified
MLDTTTFVGLDVHARSIKAVSLDVMTGEVRGATFGYDAGAVAEWVRSADPKARCVYESGVTGFDLQKRLSGLGVDCVVGAVSKMIKPSADRRRKNDRNDAEFLARMLSVGNVVEVWVPDDECEAARDLTRALEDARDDLSRSKQRLSKFLLRHGLVFDERTPTGRRKGNWTRAHWSWIESIEFAEKADNDVLAYYVDAVRRAAEEKARLEGLVGGEARRPSWRRRVDALRCLKGVDTASAADLVFEAGEFSRFRNARSFAAWVGLTPSEHSSGESDRRGAITKAGNKHLRKTLVEAAWHYLTCSGRPKDLAKGQAPDPGARRHAAKGVRRLVERREALLARGVHGSKANVATARELACWVWAVGLMAEEA

SEQ ID NO: 337867 - protein, 377 aa, unidentified
MKRIKFVGLDVHAETIAVAVAEQGGEVRSLGVIPNREESIRKLVKKLGPVEQLRFCYEAGPTGYVVYWQLTALGAKCEVVAPTLVPVKSGERVKTDRRDAVKLARNYRAGELTAVWVPDAAHEALRDLVRAREAAKKDQLRAKHRLGKFLLRHGRRPPTGVKPWTLNYLSWVKHEVRFEQPAQEATLLDYLHEVEHAEARIDRLDLAIEEAVKSTPPKMRAVIEALQALRGIAQVAAVTIVAELGEISRFPGARQLMGYGGIVASEHSSGESTRRGGITKTGNAHLRRVVVEAAWASRHRPNVGAALRKRQELVSEEVREIAWKAQHRLHTRYRKLTARGKDKGKVVTAIGRELLGFIWAIGVKVEAAQKETERRAA

SEQ ID NO: 337868 - protein, 452 aa, unidentified
MSKGSGLSRGDRNRNARLARLRELVPLSNAIVGIDLADDTQAAVVTDHDSRVIARRRVSARAWELGEVLDWALTRAAGAGFASVTVACEPTGHRWRVLDQLAAARGLALVCVQPLLVYRARESEDLTRDKSDPKDAVLIARLASELRCYEPERASAVWARLRHLGARRSQLTTGATAAVNQIRDLLECAWPAVLAASGSPFRSVTWCASLAVVLDRCAGDLSRVRRGGLDRFTAAVRRELPRWGGIRPCLRIIRAVFAALSDTAGVTAHRPGALERAHLALGDWRDTLARLADTETRMCTVMDELGLADLVTTIAGLTVIGAAAILAETGDPARFATPRALVKHAGLCPRDNSSGAAQGKTSISGRGRPGLRVAAWRAVWAAMPNNPVMAARFGYLTTRQDNRLARQQARTACAAALLRWIHVVVTRHVTWDPAIAAGGQPGAPDQALSTNS

SEQ ID NO: 337869 - protein, 342 aa, unidentified
MQVTTIGLDIAKNVFQVHGIDAAEKVVVRKQLRRRQVLEFFKALPACLVGMEACATAHYWARELTKLGHRVRLMPAKDVKAYVKRNKNDAADAEAICEAVRRPTMRFVQIKSTEQQGRLMLHRARDLLMRQRTQVINAMRAHLAELGIVAAQGRDGIKELLKIIASEADARLPVDAHTSLVVLAAELQAMQTLIGSIEKRIMVQHRLSEASKRLESIPGIGLIGATAIAATVPDPKVFGSGRAFAAWIGLVPREDSTGGKQKLGPISKRGDRYLRRILVVGACAVLRYARHKPEKYPWLTKLLERKPFKVVAVALANKMARIAWALLAKGDTYRVPALAAAA

SEQ ID NO: 337870 - protein, 285 aa, unidentified
MNTTSIAYKKSKERNVGIDVGKGLLDIYILELELHWQEENNAEGIKRLVSKLNRYNLTRVLVEATGGYERAVVEACAEKGLPIIIVPPLKVRQYAKAQGILAKTDKIDARLIALFAFTIRPEIRPMPTKKVRSIRDLLARLRQLNEARTQELNRQHKSPKVLERSHARMLKFLNNEIVVIKKKLAKEVAEVTEWQRTHEVICSVPGIVDGVAYTLLGELPELGHLSHRQISALCGLAPYNHDSGKMKGKRRIRGGRAPIRTVLYMAMLSSIQHNPIIKNLLVCEK

SEQ ID NO: 337871 - protein, 415 aa, unidentified
MTEQIHVSVGLDLHKKFILATLLSDTGLKKQLRFERTEFGLLALKEWTIEHKCEVVACESTSDYWVPVYDMLEGHVTVIVGNARDIKMFSHKKTDKVDSELIAQLALKGMIRPSRVFPREHREFRSLVRLRHKLVQKRTDIKNEIHHILDSELFRLSSVLTDLFGKSGLLILRALVNGIPMDEVIKMLPPNVRKKTDQLIEIVQTTVSPGAIFRLKHCLNLLKCMNEEIDALTKGIFQFANENFNHEMKILKSVPGIGNIAAFTLIAEIGNFSDFSSGDKLASWLGIVPNVYQSADKLRTGSITKRGSDHARWILTQVAHAATRSHNNVFRRFYDRKKPIIGTGKAIIALARKIATLIWHLITNDEFFNHKTDGPPSNLSKMVKVRIPSIVSLEEILKIFKEAAIVLKEPDPGNG

SEQ ID NO: 337872 - protein, 442 aa, unidentified
MKQKKVLKKVVRGLPKNLQHINVHAAGIDIGSRSHFVAVPEGIDEMPVREFSSFTEDLEHMAAWLMSCGVTTVAMESTGIYWIPAFEILERHGIEVKLVNARHVKNVPGRKSDILDCQWLQQLHTYGLLRGAFRPDAQVCTLRAYVRHRAMMVRSAASYIQRMQKALSQMNLQLHNVVADITGLTGMRIIKAILSGERKPEVLAAMRDRRCKNSVATIARSLQGSYRPEHLFSLQQAVEFYEFHQEKISACDLRILEHLKSFDSQNDKPPKNVEEALQLMSGVDLTSIDGIDTNTALKILAEIGTDMSRWKSAKHFASWLGLSPGTKVSGGKVLSSATKPVANKAAAALRIAAFALLNSKSALGAYLRRQKARLGAPKAITATAHKLARLVYMMLKQGTAYVDAGQEYYEKRYRGRVVQNLKRRAQELGFKLVAIQEAMTPA

SEQ ID NO: 337873 - protein, 403 aa, unidentified
MRGKRDPYGSVAYGGMDVHYKFSNVTWRDAAGRIVCREKLRHEDRVAVREQIGRWPRGTPVVLEASFGWGWLSDELAAAGLEPRLSNCYKVEQMRKARGQAKTNTKDADLLSLLPAEAEPWWQVWPAPPEVRDQREWLRYRMGLVAMQTQTKNRIHAHFHRHGIYHGFSDLFGGQGRRFLLALCATGRHAGGELPPGALASLSGQVRLLFGLRAELASVAVQLRQSLERSPLVRRLKTIPGVGVILSHVIAAEVGRIERFAGHKALASYAGLAPQSRDTGEADPSRAPLGRRLGVRCNRTLRWAFVEAAHAAVRHGGRWRALFDRVTSGGTRDRQRGVIKVARELVKVVFVVWSRNVAYQEMPPSRPGDDASRSRRVGQDSRSGTGQPFHPRVPAACGREASL

SEQ ID NO: 337874 - protein, 316 aa, unidentified
MKTSEVFVGIDVSKAGLDGGVLPLAQFWTAPNDEAGCRSLAERLKALSPTLIVLEATGGFEVSVVARIVAAGLPVVVVNPRQVRDFAKATGSLAKTDRLDARVLALFAQRVRPAVRPLKDTQSRELDALFNRRHQLVEMLTMEKNRLSLAAAPVRKDLKAHIVWLVKRLKDVDGELKTLIESSPVWREKDDLLQSAPGIGPVAAVALLAQLPELGTLNRRQIGALVGVAPLNNDSGKYKGQRHVWGGRAMVRAVLYMATLAAIRCNPSVKAFYQRLRATGKKPKVAIVACMRKLLTILNAMLKTKTPWCDKMAAGA

SEQ ID NO: 337875 - protein, 349 aa, unidentified
MSQIIRIGMDTSKHIFQLHGVDASERVVLRKRLGRSAMLAFFAKLPPTIVAIEACGAAHYLARELGKLGHTAKLIAPQLVKPYVSRNKNDGRDAEGLCEAASRPRMRYVPVKTAEQQAALMLLGIRDQLVARRTQLSNTIRGHAAEFGLIEAKGLDKLAGFLKAIEQDANVPALARELFAVLAREYARVDVELKAIEGKLLAWHRADALSRRLAQIPGIGPVTAAALVMKAPDPHAFHSGRLFAAWLGLTPKDHSTAGKTRLGKITRAGDERLRQLLVVGATSVVKYAKARGRGPLWLIELLKRKSPKLAAVALANKMARIAWKLMTTGESYESARFDARTDAQATAAA

SEQ ID NO: 337876 - protein, 337 aa, unidentified
MEREYVGIDFHRRRSVVVQVGASGERLSVARIDNTPATLAAAVTAAGDHPEVVIEATYGWYWAVDVLQELGASVHLANPNGLNWGERRVKNDIVDAADLADMLRLGRLPEAWIAPPAVRELRELVRYRAKLVQLRSGLKAQVHAVMAKEGVLPTVGDMFCAAGQVQLDQMGLAESYTIRVESLRDLIEIYDREVLMLEREIHRRLRHDRGYQAVQAINGVGRTIAAIIVVEVGDVTRFPTPRHLCSWAGLTPGRRESDRKGHDTGITKHGSKLLRWALIEGISRYHGGPQLAVEFHRIADRRGRNKARVAIARRVLTLAYYGLRDGEIRCLTQQEAA

SEQ ID NO: 337877 - protein, 423 aa, unidentified
MSYRIAGIDVHKKMLAVVVADVEVESEYQFERRLFGSNPDHLRLLANWLIEQQVEEVVMESTAQYWKPVWGALEQYWKPSGQKPETTGPMSGTLHLAQAQSNRGPRGRKKDFPDAERLVKRLVANELSLSFVPDAEQRLWRTVMRRKYQLTRNRVQLQNRLEALLEEAHIKLSSLVSDLLGASARRMLKALADGETDPAALASLADKNLRATPAQLCDALGACTELNPVYRRLLKMFLEELQLIDQQIGQLDKEMATLLGQHQAAVERLAEVPGLGVDSAQQIIAEVGATAATFPSAKQLSSWVGACPGDEESAGVSKSHRSPKGNRHMRRILNQCANAAAKSKGTIFEIVYRRLVSRLGHNQTIGAIAHRLCRLIWIILHQNVRYEERGPSVSAKSRQRRTHRMIRELRNLGYRVEPVVTTL

SEQ ID NO: 337878 - protein, 341 aa, unidentified
MGEVNTIGLDIAKSVFQVHGVDAAGAVVIRKRINRAKVLEYFGELPPCLVGIEACPSAHHWGRELQGLGHTVRLIPPSYVKAYLKRGKNDANDAAAICEAVTRPSMRFVPIKTKEQQTALMLHRARQLLVRQRTMLSNALRGHLAELGIVSAKGRNGTAELLRIIADGRVSPAACGILKVLARQYSAIGIEIVSIDKSIMALHRRCEASRRLAEIPGIGPIGATALVAEIGDWKTFSSGRSVAAWIGLVPKQHTTGGKDRLGSITKQGNRYLRWLLVVGAMAVIRYARKHGTQKRPWLGRLMERRPTKVAAVALANKMARMAWAIMAGGERYKEPRLLLAA

SEQ ID NO: 337879 - protein, 329 aa, unidentified
MHTTVHHTPKTICLGLDIAKAKLDACLLHSGKRHRAQFDNTPAGLRALLAWLRPLHDGPLPVIMESTGSYSLLAATVLYEAGHAVSVLNPRWIKDHARSDGRRNKTDTLDAEIIAHYGLTHDPDLWQPASPAQAALRALLRRLAALGELAQMEARRAEASDAVVGKSIARLQKHIARETAAIEAAIAEHLAANATLHADCERLCAIPGIGLKTARWLVAELPRHLPNSRTAAAWCGLTPRLSQSGSSVRGASSIGREGNRFLRKILYMPALVARRANPRLKAFADSLEARGKSKMSALLAVEHKLLRHAFALLKHQSSYDPNHHPLNHS

SEQ ID NO: 337880 - protein, 445 aa, unidentified
MHYKRLLTFIDGVSSYLSVGLDVGADFTWMSIALPNGSFVGKPFKIIHSDSRSRDLAVTKIKEAQETYSLKSRCFLESTGIYHIPLLCFLRDKGFDCSVINPIITKNSTNINIRKLHNDKFDSKKAALVGLNVSLKTSILPDDSVVDLRNLVRDYYYFKDLQSAVALKLTAELKVSFPAYAKVFSKVTTQSSLKLLSSYPLPADMLAASKEDIVDIIRSTARFGEAYALRKYDAIIAAAQDAAVFGRALPSNAVRIRLYIDTYQEYQKHLDALLKALHETIEKLQDTLIYDQICLLQSLRGIGFLSAVVLIAEMGNFKLFSSPKKLYAYFGLDPAVKQSGKLNGDKVHMSKRGSSLARRVLHMAALNNVKVDKGSGTPVNPVVYDYYTRKCSGKKKPVAMGAVMHKICNIIFAMLRDNKPFEIITPEEHCRRFATEHPDKIRKAA

SEQ ID NO: 337881 - protein, 344 aa, unidentified
MDHYAGIDVSLKSSAVCVMDASGKIVREGSVGSEPELLIAWFQGLPAKPVRIGLEAGPLSQWLYAALREAGLAVELLETRQLKEAFKTMPVKTDRNDARRIAQLVRVGWFRPVHCKSLAAQEMRALLASRTLLQSKLNDVEMHLRGILRGFGLKVGETTRVRFAIRIRELVFGHPMLERIAAAMLPVREVLLREYKAVDTQVRQTARVDARARLLMSAPGVGAIVALGYVAAIDDPTRFKSSKAVGPHFGLTPRKYQSGETNYDGRISKLGDSSVRALLYDAAHTILTRPIKGGALKSWAAKLARRRGMMKAKVALARRLAVILHRMLVDGTKFRFETPTQAAA

SEQ ID NO: 337882 - protein, 417 aa, unidentified
MKKNSKSPMNKEQKAKRAKSQRPVQREPKQVLAELLEKLSGKLEVRAASASPAETGPRGELSPNLDRLTVGVDLGDQWSHYCILGLHGETLSEGQLQTREAEVGEFFQALPPARVVIEVGTHSPWMQEILAGEGHEVVVANPRLMEGSKRRKRKNDRIDAKKLARLGRVDPQSLHPIRHRSREVRQDLVVLRAREALVAARTELINATRGLVKSMGARLPQCSSPSFGHKVKDAIPEKVREALLPLVQFADALSDSIQSYDQKIEELGNGKYGHTKLLRQVKGVGPLTALAYGLTLENPEHFAKSREVGPYLGLVPKQEDSGESQPQLGISKTGDTMLRKLLVGSAQYILGPFGPDSDLRSYGQRLCERGGKNAKKRAAVAVARKLAVLLHRLWVSGEVYEPLGYASSRGIVQPAAA

SEQ ID NO: 337883 - protein, 356 aa, unidentified
MPTVARKPAHHHTDATREVAGGVDTHKDTHTAAVVDELGRLLAHQTFPATPAGYRALLGWLTTFGKLLIVGIEGTGSYGAGLARYLTSQQIGLAEIDRPDRKTRRGRGKSDPIDAEAAARAALHHPRLGIPKARDGRVEALRNLRLARRSAVSQRADVTRQLKSLLITAPDALRERLRGLSTTKLITACAGLRPDPTRAGEPEHATKIALRTLAHRHQHLSTEINQLQRHITPLVAAINPTLLALNGVGPDTAGQLLITAGENPDRIHTEAAFAMLCGVAPLPASSGTTHRHRLNRGGDRQANAALYRLTLSRLRWHPATQAYAQRRKTEGLSKPETIRCLKRYLAREIYTAITNP

SEQ ID NO: 337884 - protein, 350 aa, unidentified
MLIIGCDYHPSFQQIAFVNTETGELGERRLVHAEEAEQFYGELKQRNVAVRVGMEASGHARWFERLLRQFEFELWIGDAAEIRTKRVRKQKTDRQDAQLLLRLLMEDRFPRIWVADAENRDLRQLLWHRHRLVQMRTRVMNQLHVVALNEGLQRKKALWRPAGRKELESLALAPWASRRRQDLLELLDQLTPQIQNLTQALEGEVEKRVVTRRLMTHPGVGPLTALAFELVIGTPERFHCGKQIASYVGLVPEENSSGDRRRLGHISKQGNALLRFLLVEAAQVTVRSQPQWRSKFFHLAMRRGRKIAKVAMARKLAVHLYWMWRQGWDYGQFKYFGSHAGEPGNLDGGN

SEQ ID NO: 337885 - protein, 404 aa, unidentified
MYNAVGIDVSKGKSTVAVLQPGGTVIRKPFDVSHTSQSLNELTDYLDTLEGDTRIVMECTGRYHEPVLKALSEAGLFVTVVNPHLIKNFGNNSLRKVKSDPADARKIARYTLDNWAELRQYSGMDNTRTQLKTLNSQFSFFMKQKVAAKANLIALLDNTYPGVNKLFDSPAREDGSEKWVDYAYSFWHADCVRGIGLKAFTDRYQAFCKKHHYNFQPDKPQKLFAASKELVAVFPKEKTYKLLIQQSIQQLNLASAHVERLRREMNELASTLPEYSTVMGIYGVGKTYGPQLIAEIGDVSRFTHREALTAFAGVDPGVDESGQHKSKSNRASKVGSARLRKTLFQIMTTLLQNAPADDPVYRFLDKKRSQGKPYYVYMTAGANKFLRIYYGKVKECLHNLEQES

SEQ ID NO: 337886 - protein, 413 aa, unidentified
MEVKEKVKRYYLGVDWADEVHQVWVSDPQGSKVAEMKVTQSPEGMSELGRWLHERRAEGIELWASIEKPEGRIVDFLLDDGVVVYPINPKAVDRARDRFRMSGAKSDLFDAYVLSEFLRTDHGHLRALRPNSEQAQELKMLTRDYQRLVTQRTRLLNQVVATLKEYYPRPLDLFTDISTEKALDFIKQCPTPETVKELSRKQWNRFARAHRFSQNETEELWKTVKAPQLPIPQHVVRAKAKLIAVLVEQLEVLVKATTHYSGEVQRFFASMPAAKLVSSLPGAKSGTTLASVWAEIGDAPERWQSFRHLQAQAGSVPLTKESGKVRVVHFRFSCNKRLRHAVYWLAFTSLNQSEWAKTYYREQRSKGHTHHRAIRALGAKWLKIIFVLWKDHKPYDENYHLANITRQRMRQAA

SEQ ID NO: 337887 - protein, 344 aa, unidentified
MEHFAGLDVSVNETSICIVDEAGRIVREAKVASEPNALLSVLKNGGYHFKRIGLEAGPLSQWLYSSLSEANLPVVCVETRHLRAVLKAQINKTDRNDARGIAQMLRAGLYRPVHVKTLRSQKLRTLLTHRKLLQSKAIAIENDLRGTLRNFGLKVGVVGAAKFEARIKELVDSHPDLAALVEPLLVVRRVLREQIAVLHKRVLAIVRDDEVCRRLMTVPGVGPVVALTFRASVDVPARFRNSRAVGAVLGLTPCKYQSGESDRTGAISKCGDKMMRVMLYEAAQSMLTRTIKWSWLKAWAMQIARRRGMKKAIVALARRLAVIMHRIWVDGTEFSWTRKEAAAA

SEQ ID NO: 337888 - protein, 359 aa, unidentified
MQGQSNKLDFKGENIYVGFDVHLKNWQVTIMTENLTHKTFSHPPDPKLLYEYLARNFPGGTYYSAYEAGFCGYWIHNQLKSLGINSIVVNPADIPTTDKEKVQKEDSRDSRKIARTLRSGDLVAIYVPCLKTLEDRSLVRTRAALVKDATRNKNRVKSFLHFHGIAIPEVFKEGRWSNRFVYWLDSIELIEPSGKVSLQAIVSATKNLRVSLLDITRKIRTLSQTGPYIENVKLLRSIPGIGLITAMTLLTELESMERFENFDSLCAYVGLIPSTHSSGENDVIGDITRRGHGVLRTALIESAWMAARLDPALAKSYNSYCKRMEPNKAVTRIAKKLLSRIRFVLKNKKSYVCSVVTKD

SEQ ID NO: 337889 - protein, 371 aa, unidentified
MKSILSVGMDVHKNSFSLCAYDGYTGEIVSESTFASNVKLVIKFIEKLKSRYENDVEIKCGYEAGCLGYSLYKSLTSRGVDCVILAPTTMQVSAKNKMVKNDRMDALNIAKNLASGSYKAVYVPDEEDVEIKEYIRMIHDFKKELKRVKQEIYAFVLRHGYQYDGKSKWTIRYMNWIRELEMSEIQRETLDEYLAEMDNINDKIERFMNRIDEMYQSDRYNEKVSELRCFKGIDTFAAMTIQVETADFERYPNAKAYASYTGLTTGEHSSGDKNNRIGITKQGNTVIRKTLVECAQSLVKGNVYTPKSKRPKSRQKGMDVNIIAYADKATERLKKKYQKLIERNVPRNKAIVAVARELACFIWGMETGNIH

SEQ ID NO: 337890 - protein, 383 aa, unidentified
MIFVAVDWAEDHHDLCVMDVEGMVLGGRQVQDSIRGIGQMHELIGAHAEEPSDVVVGIEIDRGLLVSALVGAGYEVYAINPMASSRYRDRHAVSGAKSDPGDAKVLADLVRTDRHNHRPVAGDSDLAGGIKILARAHQTAIWGRQRQVNALRSALREYYPAALDAFGTDLSHHDAIAVLTVAPTPALGRQLSRSKIASALRRGGRTRNIEAKTQHIQTALRADHLEAPAVIASAYGNVARSALRLIEVFTAEIEALETAVTENFDQHPAAGIVHSLPGIATVLGARVLGEFGDDRTRFADAKSRKNYAGTSPVTRASGRSRIVLARHARNRRLAVALERWAFCSLTHSPGARRYYDRLRRRGKTHNQAIRQLTNRWVDPPWVP

SEQ ID NO: 337891 - protein, 331 aa, unidentified
MIYIGMDIHKEFTVAVAKDRDGNIFSKGKFTNTKKNFENFLKDFPQKETLIVMESSSVWEYIYEILEEMGYNVKLANPVKTRAIAEARIKTDSIDANTLCDLLRANLICECYIHTKEIRSLRELVRGRNTFEKQGTQIKNRIHAILIKKGIIIPTQKLGTGALKYLIDTQKDNYILMQYIEELKEHEKRVALIEGKIREIASENPNAILLMSIPGIAEIRALEIITEIGTIERFPTAEKLCSYSGLVPGIRQSGSTLVMGRLVKQASMNLKHVLIEASWNLIRQKGKNRYREFYDKLAKKKGKQKAICAVARKLCCTIHAMLRKNQQFILL

SEQ ID NO: 337892 - protein, 344 aa, unidentified
MKHYAGLDVSIKETSVCVIDGAGQVVTEVKVPTEPEAILAVLADEAFAIERIGLEAGPLSQWLYSALADAGLPVICVETRHMKAALSAQINKSDRNDARGIAHMMRVGLYRPVHVKTLASQKRRMLLTSRTLLQAKAIDIESDLRGTLRNFGLKVGMVSVAKFEARIRELVADHPDLATITEPLLIARRVLREQLGVLHRLLLAAVRHDEVCRRLMTTPGVGPVVALTFRATVDVPARFASSKAVGAVFGLTPRRHQSGEIDRMGGISKCGDAMMRTMLFEAAQSMLTRTIKWSWLKAWGMKIARRRGMRRAIVAVARRMAVVMHRMWVDGTEFRWTNSATAAT

SEQ ID NO: 337893 - protein, 353 aa, unidentified
MEQFIGCDAHKKFSVFVAVNEKGQAGEALRVAHDRQLYREFLERLPAHSAIAVEASGSYSWLVDEMERSGHHPRLCNPFEAKRRMGLTNKTDKLDARGLAILLRNGTLPEVWIPPGELRDQRELLRLRIFLVRLRTRVKNRIHGTLARYNIQVPGADLFGVQARLELGARLPELPVHSREAVEQELATLDFLETQIDSAEHRLEAIMKVSAEADLLKTLPCVGKILSMVLMLEIGRVDRFPTAAHLASYAGLVPRVHSSGGHTRMGQVCGNVNRTLKWAFVETGNLIVINQRRFAGTHVVRLYQRIKRAKNHQKAVVAMARHLAEAAWWVLTKQEVYREPQGPRQQAVSSTHG

SEQ ID NO: 337894 - protein, 346 aa, unidentified
MKITTIGIDLAKIVFQIHGVDERGKVGVRKQLKRAEMSVYFSNLESCLIGMEACGSAHYWARKLEGYGHTVKLMAPQFVKPYVKTNKNDMADAEAICEAVARPNMRFVAIKTVEQQAILSVHRARQGFVKARTAQGNQIRGLLSEFGIIIPQGIRSITKQIPEILEDGENGLPGTMRNLLERLTDNLKEMDRQVSELEAKIQSWHRENAASRKLAEIPGLGPITASAIVATVGDAREFKNGRQLAAWMGLVPKQHSSGGKQNLLGISKRGDTYLRTLMIHGARAVIRFVESKAEPESWLRKLMARRNKNVAAVALANKNARIVWALLANDRMFRPDYTPAAVVAGM

SEQ ID NO: 337895 - protein, 320 aa, unidentified
MDASLGIDIAKAKFEVALLTPDGRVRHKSCANTPTGFADLAAWLQRQHVTRVHACLEATGTYGEGLALWLHDTGHVVSVVNPAVIHAYARTQLARSKTDRIDAELIARFTATQQPSAWTPPAPEIRQLQALVRRLDALQGMRIQELNRLEAGMVVADVRASIEAVLANLDAQIAHVKQLIRDHLDRHPGLRAQRELLTTIPGIGEMTAAVLIAELFDKSYASARQAAAFAGLVPRLVESGTLRRRSRLSKIGPARLRKALYMPAVAALRWNPTIRAVRARLAAAGKPPMVIIGAAMRKLIHLAYGVLKSGRAYEPTWAHP

SEQ ID NO: 337896 - protein, 388 aa, unidentified
MYLIGIDISKYKHDCFIATEAGESIKAFSFENNRLGFDLFLKTLKSLDQSKEIRIGLESTGHYGANLKQFITTSGYTYLEFNPYLTHMFSKALSLRKTKTDKVDAKTISSMLGSVDYKTLHTRFYHINELKQLVRYRHIQMVNRSKTLIEMTNILDRIFPEFKPSFNERLAGTAIFILRKFKSVARISKLSNKDYEAIRSYSKGRLSYAKVQKLKSLASSSVGYETKSDLLLLKHSIKHYEDLTQVIDSIEQEIISIMEQMDQILTTIPGITLISAAIIIAELGDFKNFTNPAQIVSFSGLDTSVNQSGMMETRGHLVKRGSGLLRMTFWQITFTNLRLNPKLYDYYLKKRAEGKHHKVAMVHCARKLIRTIYYLGVNQLAFDYSQFK

SEQ ID NO: 337897 - protein, 441 aa, unidentified
MSTGEKHLHGDRPAYLSACKSPDPFPSACINKLKNQMDQNATSNPRVIGLDSHPDTFTAALLRGQTPAAAVTEKMFNRVPVAQLQSWAKKHTAPEDLFVLEASGNSFQIVRLLAAVERKALVLESCQMGKLKETHANNDKISAVRIGKAYLAGTAKVVWVPDPKTQERRDWFHAHRKAVKRTTQMRNRLLSYLSDNGVRLKKDTPLATGKEAAERLRQSRNWSARQWQVLEGLLMELRHADEQRAHWRSLIAQEVLADPQLLSLVRLCGVREMVAFALGALIGDIHRFSEPRKLVKYIGLNPAFDDSGENKWTGGIQGHGRKDLRSLLIESAQAILRSKHPLAKWGKKLLSRKGSLNLAAGAVARKLAVAVWYLMMGRWTPLEEIDSRLALKVGKIIGGVGTNGLKQLQKTRKTFKEEVYASLKAGRTYQLDPNTKFIPAT

SEQ ID NO: 337898 - protein, 337 aa, unidentified
MKYSGIDLHSNNCLIVVSDETDKVLEQKRVPNDLTAILKLLEPHKESLVGVVVESTYNWYWLVDGLMEAGYVVKLANASAIKKYDGLKHSGDEEDARFLAHLLRLNLLPTGAILPKELRATRDLLRKRMQLVRSRTTHILAVENITARQFGTRISSNQVKQLEVEGINTMLLPEDVKWAIKANVAVIQTLSEQIELIEKRLQERVKPNTKYKLLNSVPGIGKILASMILLETGPVERFKEVGNYASYARCVDSVYTSNGKKKGAGNTKNGNKYLAWAFIEAANFARRYNDQAKRFYERKKAKTNNAVAVKALAHKLARACYHIMKEEKPFDVARCFA

SEQ ID NO: 337899 - protein, 331 aa, unidentified
MEIKETIGIDVSKLTLDAHIHSNKQSTVFENSEKGFAKLVKWAYANSPHSKDHILFIFEHTGLYSERLSEHLSKEGIPYSIVSGLEIKRSLGIVRGKDDRVDAARIALYGYRLRDEVTLFKSPSRTIRTLKKLLSLRERLIRQRAGYKASIKEQKKVLGQKDFKLLFKVQEKMIRELTVHIDALDIEMEANIKSDRELDRIFSLLMSIKCIGKQAAMLLLVYTEGFTKFKSARQFAAYCGIAPYPHQSGSSIRGKSRVSQMANKNIKSLLNMCALSSIRHDAEIKGYYDKRIASGKNKMSTVNIVRNKLVSRAFAVVHRGTPYVNVYKHAS

SEQ ID NO: 337900 - protein, 403 aa, unidentified
MFYLGIDVSLKSHRCALLDAEGERVGNSFSIDASQEGFCLLLATLEKRGVPKEDLTVGLEATGHLWENLLAYLESKGFTVKLLNPFQTNRYRELLAKKAKTDDIDAYVIAGLLRSGEARSCYVPNDQIQGLRDLVRLRNTYLDNLQTYRRQATSLLQLVFPEVGSVVKDPFGKAMRAILQQYPTAADLARVHPRKIEKIARSFQGNTFDRAKAEALVAAAKNSIYAGRAKFSRGKVLASLLSQIAQLESAIEELDATIAASLDDSTKGRSDTDRLTSIPGIGPKTAAVLLAEIGEVCRFHSADHLVGYFGLFPVLAESGGKPLTTPRISKRGPKHFRRALYMASVAALKHNPQLRGLYHRKRSQGKAPKQALIVVARKLLTIVYSLLRYQTEYNPSRLFLAAE

SEQ ID NO: 337901 - protein, 321 aa, unidentified
MEPTIVGIDVAKKKFDVAVLLGERVKSGAFHNTVDGFAVFGRWLTKLGVESVHACMEATGTYGEELATYLHSAGHVVSVVNPAKIKGFAQSELSRTKTDKTDAALIARFCRAMRPEAWQPPAPEVKELQSLVRRLESLNDMLTQEKNRLTITHGGARASVERIMNHLETEIETTRRLIREHIDQDPDLRSRRDLLESIPGIGPATSAMILAEFGDVSRFDDARRMASFCGLTPRHRQSGSSVRGKSMLSKTGSSRIRKGLYMPALSAIRCNPAIVTFRARLLANGKSKMVIVGAIMRKLVHIIYGVLKSGKPFDLSIAAAA

SEQ ID NO: 337902 - protein, 369 aa, unidentified
MGKFITYVGLDVHKNSIAIAYADDGRDGEVRAYGSINTDLSSLDKSIRKLVSRGSEPRFVYEAGPCGYEIYRHLIQKNFVCMVAAPSLIPKKSGDRIKNDRRDAMMLARLYRAGELSPVYVPRSEDEAMRDLSRAREDAKRAERKARQQLNAFLLRHGFPYHGKSHWSLAHWRWISDIKMEHAAQQFTLQEYIDAVRSSSERIERITEQIRSLIALWRLGPVVEALQALRGVSLVVAVTVVAELGDLSRFDNPRQVMSYLGLIPSEHSSGESTKRGGITKTGNGHARQMLTEAAWTYRMPARVSRRLRDRQQNLPEKIWEIAWKAQVRLCARYRRLVARGKLSQVAIIAIARELAAFMWAIARKVELSA

SEQ ID NO: 337903 - protein, 347 aa, unidentified
MDHVGMDLGKRESQIAILTDDGELINMRIRTERHRLVEVFGRRPKAKIIVEASTESEWVARCLEDLGHEVIVADPNYAPMYAQRTRRVKTDRRDAHALAHAGKAGTYRPAHRTSTERRDLRARLAVREAVVRTRAAWITRIQSLVRREGSRLRTGAPETFLTRVKELALPPTLTTVIAPLLELLGPLNKQIAALDEELERIVAADEVTRPLTTVPGVGPVTATAFVATVDDVTRFRDAHQVEAYLGLIPCEWSSSEAQRRGHITKAGNGRMRWLLVQAAWCILRRRKRPETAALRDWADRIAGRRGRSIAAVALARRLAGILFAIWRDGTVYDATKVRGPMTARRAA

SEQ ID NO: 337904 - protein, 351 aa, unidentified
MKIVAQNQDVAMGIDAAAKHLAIAVWIEGEVVKQATIAHTRPAIESFLARFSGCRIRAAYEAGCFGYWLYDTLTELGVMTIVTPPSLLERAPRERVKTDRRDSIKLAEQLAAGRLKSVAVPSKEERATRQLGRVYEEVKQMRTASMVRIRSFLEFHHIAVPKEVGAKWTGRLVEWLETFAFDGMGGAEYLRQSLDALVRVYRELTTQKSLLNKQFCKLAKTKRYERAATVLTSNTGVGTLSAMVVLTEVRNVRRFKTSQEFTSNLGLVPSEHSTGETRRQGHITKAGNRHIRGILVECAWSWIRYDKAAYAVFRRLARRRESKRAIVAMARRLAVKMYWQLKQIHFGERAA

SEQ ID NO: 337905 - protein, 348 aa, unidentified
MTVTIVETRAITGGVDTHADVHVAAALDPLGGLLGVAEFPATAAGYTRLLGWLGGFGTVCLVGIEGTGSYGAGLARHIAAAGVRVVEVDRSDRQDRRRKGKSDPLDAVSAARAAQSGRAAGEPKGRDGQVEAIRALMVAKRTARSERIQTINQARSLIVTGPEDLRARFAHHAADDLVAELAALRPRPGSMIRYHTLLSLRELGRRVAFPDGQLQRLDDLIVPLVTARAPGLLSLYGVGHDTAAKLLIAAGDHPERLRSEAAWAHLCATAPIPASSGKVTRHRLNPGGDRQANHALYRIVITRMSSHPPTRAYVNRRSKEGLSKKEIIRCLKRYVAREVYPHLRPGVG

SEQ ID NO: 337906 - protein, 316 aa, unidentified
MTKIICGVDVASRSLQARIGPEGPAGRFANTAKGIAELAMFCRQHQVDLVAMEATGGYEKRPFALLWAQEVAVAILNPRAVRHFAEGMGWLEKTDRIDAGMIAWFAQVKRVAAMAPLSAEQQRLKALVVRLRQLTAMRTVQQNQQRLVEDPLVLKSFTRVLAVLATQMGKLELAIAELIAADPLWRKLDQAFRSIKGVADRTVAHLMAEMPEIGTVSNKAISKLAGLAPMARDSGQLEGKRKVRGGRRPMRSLLFVVAMIVRRFNPDFAAFHQRLKAAGKPKKVIRIAVAHKLLVRLNAKARQVRSELAWCPGPAS

SEQ ID NO: 337907 - protein, 356 aa, unidentified
MNHVNKIDFTGQQIYVGMDVHKKSWSISIYTDQFEHKTFSQPPEVGVLVNYLKRNFPGAAYKSVYEAGYSGFWIHDRLQEQGVQCLVVNPADVPTKDKERAGKTDRVDCRKLARSLRSGEIEGIYVPSRPKAEDRSLLRTRHSVVRKQTRCKNQIKAILCFYGIHIPDELANSHWSKRFITWIESIRMERASGDLALKVHLVELMHIRQTIAELNRAIRALAGTDDYRNNVRILKTVPGVSVLTAMTLLTELYDVNRFKTLDKLCSYVGLIPNTDSSGETDRKTGMTGRRNAQLRVILIESAWTAVRKDPALMMTFDGLSKHMTKTKAIVRIARKLLNRIRFVLKNQQEYVSAVVQ

SEQ ID NO: 337908 - protein, 338 aa, unidentified
MLYSGIDLHKRSLVIHTVAEDGTRVREAELATARPALTAYFATLPAPHQAVVECLGSWYWVRDLLEPQGIDLRLAHAKYLKAISYAKVKTDRVDARRLAQLLRVGLIPEAHMVSPEHREVRDLLRARLKLVTRASRARHAVTGLFTQYNVARAGELPALVQLQVRLLEEEHALLRAQVKRCETELRPRLLPRADVQRLVWIPGIGAVIAYMLVLEIDDIHRFPTVKHFHSYCRLVPGADNSGGKTRHKRSRDGNRYLKLAFHHAAVRAIQYVPEIKAEYQRWRRRKGNAIARALVAKELASIVYAVLRKGEPYNGTFHGHVLTTRKRQQWPRLASPPA

SEQ ID NO: 337909 - protein, 394 aa, unidentified
MNTITKTASTGTASTNRAILAIDLGKYKCVACILDQATGEVRFTTFETTRTELESLLAGTQPAVVVIEACLLAGWVHDLCGELGVRCLVANTASEAWKFKHLKRKTDKDDALRLAQLYLLGQLPTVTLPPTTVRQWRALIACRQALVGRRTAVQNRIRALFVAQGLPAPRGAKAWSATGLAGMASRAKALADCGPDELWRGLLALALTEYRQVSELVAQAEARLDALGQHNADVILLETAPGLGPRTAETVAAYLHDAGRFRTGKQVSAYSGLVPRQHQSGEMDRRGRITKRGPALLRKMLVECAWCMLRYNGWARAIYGRLTGGGQRRKKQAIVALARKILVRCWAMLRDRQPWRDPQAGPKQPLPPSKRRRQQEAQRRRQAKQQATLAPTAT

SEQ ID NO: 337910 - protein, 533 aa, unidentified
MSAPATPTGRRHRRRQSRQQSLIQKPHGGVSPRVQKVGPEHFGIVSVDCAKARSKWMLADFYGNVLIPPTLVEHNQAGFAAAIGALRQAIAKHDIRDVIVAVERTGRYHHPVQRAYAAAGFEARTVHPFATKQFRVPADPGVKTFGSGTVAAIHRAAVNGFALLEAQWDPSWRELQLLTRHRRDLVIKSSILSCQIKEHLDAALPGYAACFNNIWENQAALRLALELGSAQGMLEVGIDGMSELLRKSQIRFQKRTLENVLKWAAQAAPPDVAANHHRRIALALNNDRAQKELEIQGLERQIAAGLVRTPYILLLSIPGINVVSAAEYAAEMGPIRNYANSRCITGRAGLYPCRYQSDQVDHPDGPLVRTANHRLRFTILQIADNLILCNRYFQGLVNTWKARGIDDPRDRHIRVGQRFSRISFHMVSGGGVFNHPCVKSRDYILQKLVLFYAEHQTPPDLMLIDLRAATEQLPTNEHAAEAEALRKRCAPPPAPGERRTSGPQRLGVILAELLVRLAGAVVQSGKSGPSDPM

SEQ ID NO: 337911 - protein, 355 aa, unidentified
MCAKKTGSIEDLAVVGIDIGKDTFHLVGFDRSGQVVLRKQIKRLALDATFEKLPRCVVGMEACLSAHFVSRRLRDMGFEPRIIPAIYVKPFNKGQKNDYNDAEAIAEAALRPNLRTVTEKSQDQLDLQALHRVRARLVSRRTATINQIRAFLIEQGIAVRSGLRALRNSFEAILEQRRDEISARMRSILIGLYGDWLWLDDRIAAVSREIEEISRTEENCANIMSIPGIGPVISTAMVAAVGRGDAFDRGRDFAAWVGLVPRQFSTGGRTILGRITKRGSRYLRMLFVQAAKVIMMRPHRWQAFSFGAWLERAVSRMPRNKAAIALANKLARTAWSILRHGTRFDTPRDVAMEAI

SEQ ID NO: 337912 - protein, 347 aa, unidentified
MRFYTKQHRYSCGIDLHAKTMYVCILNQDGETAFHRNLPSTPEGFLKAIAPYREDLVVAVECIFTWYWLADLCAREGIPFVLGHALYMKAIHGGKAKNDKIDAHKIAILLRGGMLPMAYVYPAEMRATRDLLRRRCHLMRKRSELLTHIQNTNSQYCLPPFGKKIAYRKNRDGVAGRFADPSVSKSMELDVALIDHYDRLLNEVELYITQTAKVHDANAFYRLRSVPGIGKILALVILYEIHDIARFPTVQDFASYARLVKCAKESAGKRHGSGGAKIGNAHLKWAFSEASVLFLRQNPPAQRYLDQLASKHGKAKALSILAHKLGRAVYYMLQRREAFDMKKFLCS

SEQ ID NO: 337913 - protein, 476 aa, unidentified
MANLGGRAQKGRRSKMSEKTNVESSEKRRQLQGLPVIRPNVAGIDLGSERHWACAPTLDGSGREIASFGATTPELIRMAEWLKARKVESVAMESTGVYWIAPHEVMEAQGLQVLLVDTRQLARVPGRDKKTDPTDCEWIQRLHSCGLLRGSFRPEEAVCMLRTLVRDKANLVAEAGDWLRRMQKSLDQMNVRVHRAVSDLDGVTGMAILRAIVGGERDAQKLAQLRDRRCSKTEQEIAEQLSGHWREDHLFSLQQALKMYDAVQERIAAYEKEILRKLGEMERDEHRGQTAPPVQNPTKTKTIQKRGQELKRQALYRMSGVDVTQIDAIGVETVEVVLSEYGSDLSRFPTEKEFVAHVTLAPHVARSGKKSFKRRKRNSASTRVAAALRMAALSLRHSRTALGAYYRRTAQRIGGDIAVFATARKLATLIYRLLRWGQPYVDEGAEAYENRYRQQRVSSLMAKAKDLGYELTPVSA

SEQ ID NO: 337914 - protein, 343 aa, unidentified
MQHASVPIAVGIDVAKATLSVCFRSREGTEIALTFRNIEADINKKLITNLHGFTGRIVLEATSYYHWLVTLLLADAGYHVYVVNPLLAKQYTTGNIRKVKTDPADAASLARMAAIADNLPPVFQETRETLAIKRKLSCIARLTNQIQSLGGMLTQLKESHDILGIPLSKGEKALYKTLQTLRKQKKILEQETIQGSQPIAVTHLDTIPGITPFVAKACFTYFSYRPDQTVKSWIGFAGLDVSSRESGVWKGRCKLTKRGNNFLRHRLFSAAWGAVMTNADFKSYYTTLRLQGRSHVESLLIVARRIVRIMFKIVEQNRSYDPSRMAPSKKETIPATLSTAITC

SEQ ID NO: 337915 - protein, 354 aa, unidentified
MMIVGCDYHPGFQQIAFVDTDTGELQERRLEHPEVAEKFYRDLAAQGMKVRVGMEASGHARWFERLLAELNMELWIGDAAEIRAKRVRKHKTDRQDAQHMLALLLENRFPRIWVASAENRDLRQLLWHRHRMVQARTRIMNQLQAVALNEGLRCKKRLWRGQRREQLESFRLAPWASRRRQDLLALLDRLDPMIAELSQAIEQEVEKCPAARRLTTHPGVGPLTALAYVLIIGQAERFQCGKQIAAYLGLVPLEDSSGNRRRLGHITKQGSSMLRFLLVEAAQVTARSLPQWRSKYFHLMMRRGRKIAKVAMARRLAIGLYWMWRKGWDYEQVKKFGSHAGQLGTGDGVRLNTE

SEQ ID NO: 337916 - protein, 350 aa, unidentified
MLIIGCDYHPSFQQIAFVDTDTGELQERRLEHREEAEKFYRGLGVQGMKVRVGMEASGHARWFERRLGELNFELWIGDATEIARKRARKQKTDRQDAQHILRLLLKDDFPRIWVASWENRDLRQLLWHRHRMVQARTRIMNQLQAVALNEGLRSKKRLWREHGREQLESFRLAPWASRRRQDLLELLNRLNPTIAELSQAIEHEAEKFSEARWLMSHPGVGPLTALAFVLIIGEADRFQCGKQVASYLGLVPLEDSSGHRRRLGHITKQGSSMLRFLLVEAAQVTVRSLPEWRSKYFHLMMRRGRKIAKVAMARRLAIRLYWMWRKGWDYEQVKKFGSHAGQLGTGDGVQ

SEQ ID NO: 337917 - protein, 324 aa, unidentified
MIDGRLGIDVSKNTLDASMASCNKVRARSFANSSDGWRHLLDWLISQKVQRVHACLESTGRYSLGIACALYEAGHVVSIVNPAQIRDFARTKLGRNKTDGVDASHIREYCELFKPQPWAPPSEAHRRLGELQTIRAGVIAGLTEWKNRKSSGMVDVVAQSLADVTISHFNNQLEAVDEAIAQTIDNDSGLRRKRDLLLSISGVGEILAGVVLAELPGPDVLRSSAAVVAYAGLNPRQHQSGTSIDRVTRISKIGNAVLRAALYMPAMSAMRFNPAIVALVTRLKSRGRLNPKQIVVAAMRKLLVLCFGVLKTGKPFDPAIAMGC

SEQ ID NO: 337918 - protein, 345 aa, unidentified
MNVKVLGIDLGKTVFHLIGMDEHGKIVLKKRYSRSQLFKFLANTPVCLIGMEASCGCHHVGRTLSSFGHDVRLIPAQFVKPFVKSQKNDYRDAEAIAEAVQRPTMRFVPIKSEEQLDVQAVHRVRERLLAQRTSLVNQLRAFFLERGLMVRTGRAYLWRALPEVLARAEETVSPCMFRLMQSIVQQWRNLEMQIVELEEEIARVAQADPACQRLQTVPGVGPLAATAIVAAVGNGGAFRKGREFSAWLGLVPHQCSTGGQTKLLGISKRGNEYLRRLFIHGARSVCLHVNRERHAWGGWITELKDRKPSNVATVAMANKLARIAWSVLYRNEVYRSHGSVVPATA

SEQ ID NO: 337919 - protein, 361 aa, unidentified
MRKIALDLGVRKTAFCEVKNGAVVQRATVTSVETLSSLLGPQEQPAVVAIEACREAWHVHDLLRSWGNEVVLVDTTRSRRLGIGQHGRKTDRIDAEVLALALERGGIPMAHVLSPHRRELRRWLGVRRALVESRANLITTCRGLAREQGVVLPKCNVAIFARKARGAAGNALAVLEPLLKQLDAINPELATAEAKLAELSETEPVVKLLMTAPGVGPIIAACFVSVIDDAKRFRSPHQVESYVGLVPSEDSSGGKRRLGAITKKGNPYLRSLLVEGAWGILIHGDRHDPLRVWAEAIAERRSRKIAVTALARRLVGVLWAMWRDSKPYDSKLLAAASSRGTRQLARTLQAQARTLEVQVQP

SEQ ID NO: 337920 - protein, 410 aa, unidentified
MYGKAGPMIYAGIDIAKNDHVVGATDEHGRDASKPMKFANSAGGFDRCVAYLEGLAESKSDLLVGMEATGHYWLPLFCRLQDAGYAVVVINPMRTDAMRRFKGSSRVKTDIVDCVLVAETLRCGGFQPSRLGDEAVIELRQLTRLHQALKESVADLKRQVIVALDQVFPEYDSVFSDTFGESSKAFLKRCPTPEECLAVRADSLAKTLERASHGKLGRPKADEIKGIAKASCGIGLATSAFSFQIKLLIDQIDFIEGQASEVEARIRAGIEKVEPLILTIPGIGYTLGAQIVSEIGDVRRFRNASSIVKYAGINPSISQSGKFSSEENHITKQGSPYLRRALYLAAMAQLKLKSPFYDYYAKKRADGKSHREALVAVARKLVHVIYAVLSKQEPYDPNAAKSPELASRSE

SEQ ID NO: 337921 - protein, 348 aa, unidentified
MQVTTLGIDLAKNVFGLHGCDANGKPVLRKQLSRGQLRRFVANLPRCLVAMEACASAHYWAREIEKLGHQVRLISPKFVKPYVKANKNDASDAEAICEAAGRPTMRFVAIKSAGQQDVQAVHRVRQQLVKARTALANQVRGLLAEHGIVIGRGFAQLRRALPVILEDRDNGLSAVMRELLGEIGERLRFIDDRLRRYDLTIQRLFRHDERCQRVAAVEGVGPVTATALVAAVGNATDFKSGRELAAYLGLVPRHRASGGRTVLLGISKRGDRYLRTLLIHGARSALHRIERHRGARANWAAGLKLRRGANVAAVALANKNARVLWALLSRGQNYQPTPFSARVPQTGG

SEQ ID NO: 337922 - protein, 357 aa, unidentified
MSEGTWVGLDVHARKVVAGVLDARSGELGMLRVPPGSEEIVAWLAGFPGPVRVAYEAGPTGYGLARACAAAGIACTVAAPSKIPRASGDRVKTDRRDAERLARLLRLGELVPVRVPEPHEEAARDLVRAREDARGDLMRARHRLSKLLLRHGLVYDATAWTLAHDGWLRRQRFVSKPLALTFDECYGTVLQAKTRRDALDVAIVELAMEPPFTEIVGRLCCLRGVSTLTAFGLTVELGDWGRFRPQSLGPFLGLTPSEDSSGERRSLGAITKTGNTHARRLLVEAAWHQRRPLRVSTTLERRRQGQPAAVRARADQSARRLHARWHALEGRGKRRTIVAVAVARELAAHCWALATME

SEQ ID NO: 337923 - protein, 405 aa, unidentified
MKKYTIFTQKKIGSELLREQDLRSIPRISLPTFPFESTVEMASNRMIDVRGLIKVLKQFNTFINLKHRESMKNFEFYVGIDVSKLTLDVTVLYECENTTKTEYYKIENNEKSIARFVKKRLSGFSPEQILFCFEDTGIYSIPLAFYLSANGFLYWKVPGLEIKRSKGISRGGDDKVASKDIADYAFTKKHKFIPSRMPAKAIQQLRLLFTEREKILKSLLSFEKTSEIKGFASKEIFNSVAPINRMVIKQLKNALKRIEDKMLVVIASEEELKQQYKLITSIPGIGKQTAIYLIIATKGFTTFKNCRQLACYAGVAPFFNQSGTSIKTRAKVHHFADRKLKSLLNMCAISAVKCDKELKAYYERKVKGGKCKMLALNNVRCKLLARVFAVINRKTPFINTFKFAS

SEQ ID NO: 337924 - protein, 411 aa, unidentified
MDTINERCAGLDVHKDSIVACVRTTDEQGGRRQVTATFNTTTSALLALHDWLERQHVTTIGMESTGVYWKPVYYLLEDTFDCWLLNARHMHNVPGRKTDVADAAWIAQLVEHGLVRPSFVPPREIRELRNYTRYRKAQIAERSREVQRLQKALEDAGIKLASVATDVMGVSGRAMIEAIIDGTDDPVILADLAKGRLRKKIPALREALEGRVRQSHRLLMRAMLNHIEFLEDGIERLSAEIETLTAPLLAQVELLDTIPGVNRRSAEVILAEIGTDMSRFPSANHLASWSGMCPGNNESAGKRFSGKTRKGSKWLRACLTESAEAAARTKGTYFAAQYARIKSRRGHKKAIVAVAHSILIIAYHILKDGQPYNELGADYFAQRRSTDAYRTRLVHQLERLGYDVTIAPRAA

SEQ ID NO: 337925 - protein, 347 aa, unidentified
MQRTVIAVDLAKNVFQIAVSSSPGTVDEQARVSRKKFLEFFANREPATIVMEACGSAHHWGRELMELGHEVRLLPAQYVRPYVVRNKTDRTDTKGLLEAYRNEEIQPVPIKSVTQQSLVVLHRLRSGWIESRTAWVNALRGHLRELGLFIPVGRRKVVPQVREWIADADLGVPMAIRDALHRVCEEVDRATEEIEALDRQIESLGRQIEEVRRLETIPGIGWLTATAVFMVVGDIERFASARHLASYLGLTPRESSSGGKRWLGGISKRGDAYLRTLLVHGARGVLSWAKRRGPKGRLEEWALEIEKRRGPNKAAVALANKQARVVWAVWKRHQTFEHLPLVDDAAA

SEQ ID NO: 337926 - protein, 399 aa, unidentified
MANRLFKHFLGIDISKEKFDVCCINNEGEKLFRSSLSMEKEGFDELSKKLSSLSVPKESILVGMESTACYHINLFSFLTHLGYTVFIINPLLISQFAKLQLRKTKTDKKDAFVIAQFLSLNRKSLTEGSVSSDIADLRDLSRQRESLVHQMNAVKHDIKRVLTITFPELERIAGIFSQSMLRLLQQYPSAYAIRKAKHKKIAKVLIEGSYGKQDDESVKKIREAAKRSIGTTSPAREVILKQKAALLMQMEEHLQELTHILINQCKAMIKEDVEILKSIKGIGDKTATNFLIELGGNISKFKRYKQVLAMAGIDPTVYQSGKYTGQGKISKRGNRHLRRVIWIMATKVIQFNRIFRQYHAKRMKEGLPYKKAVLATAHKLVRVMFSMLTNKTVFIAKAN

SEQ ID NO: 337927 - protein, 343 aa, unidentified
MNDVITIGVDLAKNVFQVHGVDAEGSVIVRRRLRRGQVLPFFKKQRPCLVGMEACATSHHWAREIAALGHQVRLMPPRYVKPYVKRNKNDMADAEAICEAVTRPTMRFVEIKTADQQSVLMLHRTRHLFVRQRTTLINALRAHLAEFGIVAGVGRNGLERLLKVIEDGEDDRVPPSARDCLLALRDQLEMVKHRIFEADRRILAWHGASEVSQRLDDIPGVGPLIATALVASIPNPHAFKSGRDLAAWIGLVPRQNSTGGKERLGHISKAGNRYLRMLLVVGALSVIRRAKQTGYTRRPWLTELLQRRSTKIAAIALANKNARTAWAMMAHGTFYQEPESQAA

SEQ ID NO: 337928 - protein, 426 aa, unidentified
MMFQREAHVYVGIDIHKRSNVAVMVDCFGEAMGKPVKFDNAPAAFPDWLEKVRKRASGKGIIFGLEDCHGLGRQLALFLLEQGAVVKFVNAYSTKKMRESINKSDALDAHAVAKATAEKNVRLPDADMDPLQWAMLSTVAFRKGLVQEVIRIKNRLHYLLLNNWPDYDKFFSEPFESKTALAFWQDFPSVYRLAGVSLEELTAYLRAQSHFAMGEKKAVVILAAVDGSQEPAYQFQQDTLIRSSVEGLRSLQKQLADVDKQLGLLLEETDYRLTHIPGIDVVMAAELVALVGDVTRFNNVDKFMAYTGIAPTTQGTGETETRYRSQYGRRELNSFFYRIATTQLVVHAKTGEPRNPEAKAYYDRLLGAEAALPAKQRNRKVVKKALLSLMRQQAKRFYRLMKQQKCEALVRRAGAVTEAVEAPEAA

SEQ ID NO: 337929 - protein, 428 aa, unidentified
MNGEDLSRLEEFRQFRREVRGSDEYLLVGVDIAKDKHYAFFGTAQGKALFRRLVFENNLEGFQKFLVQARAMRDQNGLKRMVFGMEPTGNYHKPLGEHLIRCGHLVVLVSGVAASENRKTLDGRWDTSDPRDAANVADLMSQGKCLFYEFPVGPLQDLRNLLSLKRRFKRVEHGYRVRIRNHLVAKYFPELDRYYEQSPVTSLAIVRWCLDPSVIAGLEYPEFSQRVGTGRRRVAQEKRLQAIWKLAVDSVGCEAGPVVEFEAQVMVEGLKQIQKALEEIEEKIQEVCSSFPEYECLLSIPGFGPDVASKVLGAIGDPLRFENGRQVLKLAGLDLSAKRSGKKSESVIPVISRKGKTDLRYALYQAAFIASIRNQDFMVYYTHKLRGREREPGIKIKMRVKLAAKFLLIAWTLMKKKESFNPDYLANQ

SEQ ID NO: 337930 - protein, 346 aa, unidentified
MEVTYYTGIDVSLRSVSICVVNDKGKVCLEAKVAAEIDAIVDRLRRFSSDVKSVGFEAGTLTQYLTYGLQAAGFEVICLEARQVSVTLAAMRNKTDRNDARGLAQILRTGWYSRVHVKSLHSHQVRALLASRKAILKKCVDLENELRGLLKVFGIRLPSRVGHGSFDAELRDTVSGDEMLACALVPLLDARTVLYKTYLKLDNAVKGLVRVDPVCRRLMSIPGVGPVTALTFKAAVDDPNRFKSSRTVAAHFGLTPRRFQSGELDNPGHISRAGDADVRSALYVAAHSLLTRNAQWSTLKAWGVGLAKVRGHRRAVVAVARKLAVILHRMWIDGSEFRWGPAPASA

SEQ ID NO: 337931 - protein, 363 aa, unidentified
MHSITNTELSSLEETRCQFNGGRCTIKLGIDVHQDFHVVAEQVGGTNPKPPQRFQKQAFLHWAAKLKQSGAEVHAVYEACGFGFSLQRQLSGLGINCYVVCPQKLDERNKRVKTDGLDAKALCLKLDRFVQGNRDALATVRVPTEEEERSRAIHRQREQLVGARKRLEAQGRSLMVNYGVEPVQNWWKPRTFAVLPIPQWMRELLLNSQPILLALQEKIAALTLQLQSAAAPNQPRGLGKMTSVVIDREIGNWHRFSNRRQIASYTGLCPGEYSSGNTRLQSCVTKHGNPRLRAALVELAWRLVRFQPNYKPIVKWRATLAKGALATGAARKKAIVAVARQLAVDLWRVRTGRCKPEVLGLEI

SEQ ID NO: 337932 - protein, 338 aa, unidentified
MEVAVIGIDLAKDVFQVFGVDARGRAVLTKRLRRPQLAPFVAALSPCLIGLEACASAFHWARQFQARGHTVRIISPQFVKPFIRGNKNDGNDAAAICEAVQRPNMRFVPLKSVEQQDVQSLHRARQRLVNHRTALISQMRGILLDRGIVFAKSATRARRFLPLILSDPTSELSPLMRETLASLLELLRELDARVKRFDRQIADVFQASPVCQRIAQVEGVGPKTATAVVAAVGNAHDFKNGRHLAAWLGLVPRHRASGDRITLGGISKRGDQHLRTLLVHGARAVVRTAVRKTDARSQWVNALVARRGVNRAIVAVANKNARIIWVLLARQQDYRRAA

SEQ ID NO: 337933 - protein, 417 aa, unidentified
MNTMTVQPYAAFVGIDWADTKHDVCIQSADSLRREFAVIPHKAEEIDEWARSLHRRFSGPIAIALELSKGPIVYALQKYDYFVIFPINPSTLAKYREAFQPSRAKDDPTDAELALDLILRHPERFEPLQPQSVEIRTLAALVEQRRRLVSDRVRLTNRLRNTLKQYYPQTLEWFDRIDTKLFCNFVERWPTLIQVKRARTTTLTTFFRAGHTRNPALLETRIASIRASQHLTLDEAVIAPNKLLALMLVGMLQVILDAIRTYDQAIAELAPKHDDYDLFRSLPGAGPSLAPRLLVAFGEQRNRFKNAAELQKYSGIAPVTERSGTKHWVHWRWRCPNFVRQTFVEWAAQTINKSYWAGEYYRQQREKGSGHQSALRALAFKWIRVLYCCWQTKTQYDEATYLKALQRRGSPLVAKAV

SEQ ID NO: 337934 - protein, 406 aa, unidentified
MISVGIDVSKGKSTVCMMKPGGEILKPPFEILHTIEGVLSLVKLIKDYNEDVKVVLEDTGYYHWPIVTLLVEKEIFVCAVNALRMKKFCSQNIRRAKTDRIDSINIAAFGITYWNELTAIMPSEDIYRELKLLARQYYQTTSMLIKAKINFSNLCDQIMPGIQNVIYDYKGNKKLTGFAKRYRHFENILKMSKTRFKNDYCKWAQKQGYRNCEQIAERIYAIAQNGIPVLPNSLSTTIAVTEAVRVLHEIETSRNTILTQMQALAKTLPEYQVVREISCIGDTLAPRLIAEVGDIRKFHNKHSLIAYAGIDAPPYQSGRFYSNERHISKRGNRYLRKTGFEIMQSYIQHKPVGEPVFDFIEKKRSEGKCGKEAMIAGLNKFLRMYYGKVSEIYNSIDEQLIFGSKI

SEQ ID NO: 337935 - protein, 389 aa, unidentified
MLLDHPSDGLTAIRTHIGAIFVSLELSRSNWLVTSLSPGKGEKMSKHSVAAGNVAGLLTLFAELKRKTEVRTGQSYPIITIQEAGLDGFWLHRVLQQEGIESHVVDPASIATPRRRRRAKTDRLDGETLLRALLAYKRGEPRVCAMVVAPSPEEEDRRRLCRERRTLIEERVTHGNRIKGLLFAQGISGYAPMRRDRRARLETLRTGDGRELPSHLKAQIGRELDRIELLLGQIKAVEAAQDALLAAARKPASEEAAPDPVTMLLALKGMGTNFAAVLWSEAFYRQFANRRQVAAYAGLAATPWQSGGIRHEQGVSKAGNPRLRTTMIQLAWLWTRHQPQSALTRWFKERSQQGRKRALVALARKLLVALWKYVTQGVVIEGAVMKPAA

SEQ ID NO: 337936 - protein, 356 aa, unidentified
MLYSGIDLHRRLIVVCTVDNNGAIIARIRMKTDPALVSEYFHRWPDQHRAVVECTTGWYWLADLLRSLSVDLVLAHAKYLKAISYAKVKTDAVDALTLAQLLRMGYIPEAHQLPLEYRAMRDLLRQRMVIDHNRTTIIRRVTSILAQFNITTLPLSPHQSGFADFINQCPIPEEYRIPLLMYHQQCLQATEHRKRLEKYFKAQLRPLPSVQRLISIPGIGDITGSIIAMETGDIHRFADAKHYCSYCRLVPGAKDSGGKHSHRSGSKDGNRYLKFAFTESAVKAMQFYPEIKHFASRLEHRSTKAIARTVVAKELAKISYYVLSRQQEFKTFKGIEINKLRNWPRARKPVRLTGGP

SEQ ID NO: 337937 - protein, 350 aa, unidentified
MPRKVGTAIVTIGIDPGKNILHLVGLDARGEIVLREKVARTKIVSRLANMPPCLIGIEAGMGTHYMTRDLLALDHDVRQVPPAYAKPFRQTHKNDFRDAHAVAEAVQRPTTRCVPPKTDEQLDLQALHRVRYRLVGQRTAIINQIRCFLLEHGITVRQRLHWLRHALPDILAQRTDVLSPRMVRILEDLAQDWRRLDDRIEAVSGEIDALSKNTELCRHLMTIPGVGPIISSAVVAAIGDGAAFARGRDFAAWLGLVPKQISTGDRTILGRITKRGNRYLRTLFLQAARVVLLRPRNWMQHGFGPWLAAAAQRLHHNVLATALANKLARIAWSVLAQHHEYEARLRVAAT

SEQ ID NO: 337938 - protein, 458 aa, unidentified
MYRELQPLRRTLSEELRSSLLPGLPGIQPDKLLETYLDQLTLFVGADVADLTLSLLAIDASKEELGSLLNVANDPSGFRQIIAWLEKLRCQHQLRIIAVACEATGVYYWGFWDALAEQPNLARILYNPRTTEHMGEVLSKRVRTELVDAYLLAEQLRLGSTPEVVLSQDADLLSARFCSRCARDLAQQINRKKNQLRALLRAYSPAFSQAFPGDKFHHPAVYALYAQHLFPDEIVAAGPEAIAAILTSHCRTAFDATVAQQLVELCRTVLLRPITRAVIRQRALDLADDITTAQSRQRYFIRTGYDLIKQRSETKLLKQTSGAGLSNTLALVSEVGDVRRFPDGAHLASFLGLTTSKHISGATVYKATHITKQGAPNARYAAVNMADHLRHKVPYYHTMYQRITDRKPPHKGHFVALVAIARHFTTNVLYDMWRHQRPFFLETEDYRQYLKEHPHTDH

SEQ ID NO: 337939 - protein, 471 aa, unidentified
MEANLLPPTNKCAIKRVRTVRQENVLLPGSQNPDYSLFPASLSHDKMIGPTKSPCDAGGLVGRHILSCRKTNQGGGVMPKLFVGIDVAKDTSSAQGIDSTGRGCFSLTVTMDSSGFMELWTAITSHCKDLSEVIVAVESTACYHINLFSFFTAKGVNTVVINPLLISNFAKLSLRKTKTDKKDAMTIAQFLLVHRDAISHLTLSQDLQDFRDIARERESVSHMMSAHKVEIKRILQSTFPELENLCNITTRVMLDFIQEFPSARLVKAARPKAIQKALQRKGVDTRLTYTAEDLIEAARSSVATISPAKELIVKGKVATLQHLQQRRDELTAVLTDYCKSAMLEDLEIITSIDGISTGTATTFLAEIGCIGNFASHRNLIAFAGIDPTVYQSGKFEGASRISKRGNRHLRRVIWLMTVNVIQHNSIFKNYFSKKRKEGQPFKKAVFATAHKLMRVIFAMLSQRTKFREACA

SEQ ID NO: 337940 - protein, 353 aa, unidentified
MDSRKYIGMDVHQASIFVAVRDAAGKLLMECIIETKAATILEFIQGLHGSLWVAFEEGTSAAWLYDLLKPHVAHLVVCDPRKNALLKAGNKNDRVDARKLSDLLRAGLLTPVYHGESGVRTLRELGRSYLTVTKDLTRVMNRLKALYRSWAIPCAGQKLYSPRHRSAWLEKLSEAGVRRRAERLYQQFDILVRIRREARRELLTESQKHPANQLLRQIPRLGPIRVALLIALLQTPHRFRTKRQLWAYCGLALQTRSSGEYRFTGGQRQHSKKLPALRGLNDNHNHDLKNLFKSAATHTSTDPLGDFYQNLLAKGMKPAMARLTLARKMAAIVLKIWKKGERFDPGQLKRQAA

SEQ ID NO: 337941 - protein, 388 aa, unidentified
MEPVVGLDVSKGTSVAQAFTSRNEVVGKSKSIAHTEEGFKEFGEWLGELRQKTGKEPVVVLEATGHYHRGLVAYMDRSGFSHMVINPLQSKRAKGTQLRKVKTDAADAWHLAEMYYRGDVKPHRKGDEQLLELQHLTRQHEFVTAMYVQAKLNMRALLDQVFPAYEGVFYDLYTQTAMRVLQQYLSGMVITEETIRETVQRSHSQIWIQEKLAQLQSIAPIEGRSPAQTIALQSMLGLLLGFQEQLEHLEQQIEETVAMIPEVALLKTIPGVGDKLAAALVAEIGDATQFLHAKQLVAFAGLDPSVFSSGKFSASSSKITKRGSKRLRRALYLAVQCGLRKGKNERIKAYYDKKKKEGKPYKVAVIACANKLLHHVYAILTRGEPYRI

SEQ ID NO: 337942 - protein, 477 aa, unidentified
MTAFCGRPSWASMTLPPPASPEPLIDDRGTRRRAPVSDHWTVGSFASAWRLPWVASRKATGLSSELLLEDGPLFFVGIDWAAAEHAVCVLDQAGRRVGAFTVEHTADGFAMLARRLGKLGGAERVPVAIERPDGRLVDALLAAGHPVMPVKPNAIKTWREAEVLSGAKSDPGDAMVIADSLRVRIHRLRPATPYSGATKGLRTVVRTRGDLVDARVAATNQLAAVLDAHWPGAKAIFASVSSAIALALLTKYPTAASAAGLTEKRLATFCAQQGYSGKKPASVLLARLRCAPAGVTDPALSEGVRDAVLAQTTVLTALNTAIKNLDRSIADRTDTHPDGPIFRSFPRTGTVNAAQILAEWGDARAAFDHPDAIAALAGITPVTKTSGKQRGVSFRWACNKRLRQAITTFADNSRHASPWAAGIYNRARAQGKDHPHAVRILARAWVRVMWRCWQNGTPYDPTLHGRANQTINTQAAA

SEQ ID NO: 337943 - protein, 370 aa, unidentified
MKQYSEAFIGFDTAKKKHAVAIADVGREGEIRYLGEIDSSPAAVERMIRKLAGRYEKLHFCYEAGPTGYGLYRQLRALGHHCAVVAPSLIPKKSGERVKTNRRDAVTLARLLRAGELTSVWVPDTVHEAVRDLVRAREAASQDLRRKRQQLLSFLLRHGRIFGGRQHWSRAHLHWLAQQKFDHPAQQIVFQDAVDTIDDAATRLRRLDEQVAAIVPSWSMAPVVEAYQAMRGVSFVVAVTFVAEIGDLRRFDNPRQLMAFLGLVPSERSTGERVRRAGLTLAGNKRARRVLIEGAWSYRYPARVSQTLQARLEGLPKAVRAIAWKAQIRLCARYRRLNAAGKKLPVVIAAIAREMAAFLWAIARHVAPAV

SEQ ID NO: 337944 - protein, 341 aa, unidentified
MKNLFIGIDFSKEKVDVAIIFAENLSETASRVFNEFKTTVSGYKQLVKWVEQNSYGIDSSLWLFCGENTGDYSKGLCNFLYGKGYDMWLENAKSIKDASGLRRLKSDRADASMIAEYAMRNYDKAIMYEPLSESLAQLRELFLYRQIVVRHRCSFQVRRGEKRLTMEKSPVKTMISQSGRHIVSELNKEVAKIDKRIAELIKSDEELSEVYTIVTSVPGIGTQNAVCLMIYTDNFRKFNYNSRKIACYYGIAPFGKDSGTSVHSDPHVHYMANRQIKAMLTQAALSAVNFNPIMARYYMRLVECGKKKQVALNNVKNKLIHLVTAMVRNHQLFSPEYKISA

SEQ ID NO: 337945 - protein, 479 aa, unidentified
MATTRPSGVNRKQRRELARRLQAADPGLEVMHPHAAGIDVGNSTHYVAVRPDRDPDPVRRFDCFTADLHRLADWLQHCGVTTVALQSTGVYWIPIYEILEAHGFEVYLVNARHTKNLPGRKTDVQESQWLLKLHTYGLLRNSVHPSAEIRVVRTYWRQRGDHVRAISTCIQRMQKVLTQMNIQLANVISDLSGWTGQRIVRAILAGERDPETLAALSHPGIHATPAEIAKSLEGTWQPDLLFVLKQEVDLYDTYQLRIAECDQELERHLKSFADKTPDPPADPEPSPTLAPSDARAHRPTRRRKAGSHAPQFDLGRELHRISGVDLTRIDGIDVGVAQTVISEVGLDMSRWEDEDHFASWLGLCPDNRITGGKVLRRGTRHVINRAATALRLGASTLLRSQSYLGAQYRRFRSKLGAPKAITAMAQKLAVLVYRMLRWGHAYVDKGLQYYEERHRQQQIHLLKKRAAKLGLQIVEPQVA

SEQ ID NO: 337946 - protein, 427 aa, unidentified
MSGKEKVPEPEFVAFVGIDWADQKHVWSWQNADSTQQESGELEHRPEAVEAWVGELCRRFGHGPIAVAVEQTKGALVYMLRKYECLHLYPVPSTMSASMRAALYPSGAKDDPRDADLLLELLVLHRDKLRRLTPDNEATRRVQNLVEERRKLVEEKTAQLNRLIGYLKVYFPQMLEWFAKLDTKLVCDFLERWPSLEELQQVRAGEVKKFFRHRRGRHGELTEWRMEGISQAMPAIQDRSVIEAKRTVVQVIAQLLRTLLEGIATLDRKIGEAVEAHPDFFLFQSLPGAGAALAPRLLAAFGSQRDRYGSANEVQKYSGIAPVTERSGKRKWVHFRWACSKFLRQSFHEWAGHSIGQSAWARAYYQQQRERGKEHHAAVRGLAFKWIRIVFRCWQDGVAYDESRYLAALAKRGSHLISTYAAAAVSM

SEQ ID NO: 337947 - protein, 452 aa, unidentified
MNLVNRLSAFFLVALALVLIGFSLSLYALARIYLLGQADERLTAALETLVKRLRQAGDGPIKFCYEAGPCGYGIHRALTKMGEDCMVVAPSMIPRKSGERQKNDKRDAGGLAVLHRGGLLTAVWVPDAAHEAMRDLIRARLAAVRAVRAARQQLSAFLLRHERIYPGNRTPWTKAHRGWLADQTFAQPAQQIVLEESIEAVRLSEQRRDRVDGYLRAQIPSWSLFPLVQNLCALRGLDMIAAAGLAAAIGDPSRFATAPHFTAYLGMVPSEHTSGPKRRIGGITKAGDIHARSLLIEAAHSYRYPARIARHKLAAVDAVPDTVRDIAWKAQTRLCQRYRHMMARGKLNQVVVTAIGRELAGFVWSIACITSDPAVVENTVTTLHEEVTAYCGGVTTASEEVARQVQEIVPTKAPAVVRPRGILANQGGIGRKEPGRDDRAASFQRLTDQSGS

SEQ ID NO: 337948 - protein, 351 aa, unidentified
MENQAYFVGIDLHKDLIQLCVLDARGEKITEQRFTGGTLGQGHAVVKFLGQWKDGGRYAVEALGMNRWMVNAMREQGMDVIVVDAVKLNLRMLGKKTDRRDAYEIARRLWLGDIDRNAKTYYPREEEYGWRKLLRTRHKLVQIRQQLVNQVRGLLNAYRVASPKGELTSKRNLEQLSRIELSGKLLTDCLRGLEQTLRSVQGSIDALTLRIEEEASNEKVSSLHENLEGVGPQTALTIVCELGDVNRFTSTRAVASYVGLAPRVANSADKAHHGKITKRGNSELRWILSEWAVRLMAKNSLVQRWAEPLLRRMHKNKVRIALARRLLIGVYFMLRRGELFSLERCLATRAA

SEQ ID NO: 337949 - protein, 395 aa, unidentified
MFIVGIDIAKRSHEAIIIAEDGQVVRKAFSFRNNCTGYNLLLEQVRRLTLVKSQIVFAMESTAHYWLALYARLLKDGYTVLVLNPIQSHSLRELYIRKTKTDARDSLIIADLVRFGRCKASNVPQDKILALRELCRSRAYLVDMAADLKRKLIALLDRIFPEYESLFDSVFSKASIAVLSKYSTPQKVKNANLRKLTDILMESSNGHFGEWKAHQLKEAACSSFGIDDSGGVYSTLLGMFLEQILSLTAQADSLEKQISVFFQEFNNPLTSIPGVGTVLAATILSEIGDITRFSSADKLLAYAGLDPSVKQSGEFKSNQNRMSKRGSPYLRRAIWLASTVAVHRDPMFQTYYEKKISEGLHYMNVIGHVSRKMTAVIFAVLRDGQPYQPILQSAG

SEQ ID NO: 337950 - protein, 367 aa, unidentified
MSNYVTAIGLDVHARSISACAFDPMTGEVSRARFGYDPASVAEWALGFESPMAVYESGPTGFHLCRALRALGLGCVVGAVSKMHRPAADRGRKTDRRDAEWLARMLACRNVVEVWVPDERAEAARDLSRALEDARDDLQRAKQRMSKFLLRHGLVFDEATPAGRRRGAWTRAYWDWAESLSFDEPDDAAAYEHYMDAVRACGEAKRALERKVAEAAGRPEWAPVVDALCLVKGIDVASAFLLAAEAGDFSRFPSAPSFASWCGLAPSERSSGETESRGGITRAGNGHVRRALVEASWHVPMSTRHPKRPRPGHGAAPAVSRHAAKCNRRLQERREEMSAAGKRPCVANCATAREMACWVWAIAGMAS

SEQ ID NO: 337951 - protein, 370 aa, unidentified
MKKSIMYVGLDVHKNSIEVAFADAGRDGEVRSYGKIDGNLTDLDKVIRKLESKGSELHFAYEAGPSGYEIYRHLRRHGYNCIVVAPSLIPRQSGKRIKTDRRDAQMLARLHRAGELTSVYVPALDDEAMRDLTRAREDAKSVERKAKQRILAFLLRHGHRYGGKTPWSRAHFRWIATLKMPHPAQQIVLQESLDALSECTERVNRLTEQIRQLLPEWRMSPVVEALQTLRGVSLIVATTTIAELGDLTRFASPVELMSYLGLVPSEHSSGEKAKRGSITKTGNGHVRRVLVEAAWAYRRPARISAKLHGRQEGRPQKVCAISWQAQLRLCGRYKRLLAKGKASPLITTAIARELCGFMWAIANEVDTRTA

SEQ ID NO: 337952 - protein, 340 aa, unidentified
MNAMTYGLDIAKSVFQMYWVDPASGEIHNRRFQRRELIEFLSNCPAGKVALETCGGAHWWARKIQSLGHRPVLINAAYVRAFVRTNKTDAADARAIWTAAQQPGMPLVPVKTEEQQALLSLHRIREGLVQTRTRECNQLRGLLGEYGLHFAKGRIALLAELQTRRAEIEQSIPATLLRAIERQQMALRQLDEQIQLIERDITAWLKSEPAAQAVEGIPGIGAITATALVATMGSAQAFRSGRAFAASLGLVPAQSGTGGNVHLGHISKRGDSYLRRLLIHGARVVLTRSRHPPAWAEALLARRPKNVVIVALANKMARAAWALLAHGRQYDPNYVSQRPA

SEQ ID NO: 337953 - protein, 311 aa, unidentified
MTCFVGIDVSKAQLEVACRPSGERLQVANSDQGFAELIRWLSERGPALVVLEATGGYQAAVVASLGLAKIATAVVNPRQVRDFARATGQLAKTDTLDADVLALFGEVLQPQPKPLLDEETLALDALLGRRRQVTEMITAEKNRLAQSHPSLRPSIKAHINFLERELKDIHRDLDERLRKSPLWREKENLLRSVPGVGRVIAATLLAQLPELGTLNRKQIAALVGVAPLNCDSGTHRGKRTTWGGRASVRAALYMGALVASRWNPVIRSFYHRLRAAGKAKKVVLTACMRKLLTMLNAMARSNTTWRTLEAG

SEQ ID NO: 337954 - protein, 424 aa, unidentified
MNVTYQTCCGVDVHKSFLVATIVKTTGGIEPSYQKKRFSTFNNSIFEFKQWLLDNDCRDVCMESTGKYWVPVFNLLEDEINVVIANPKWVKAVKGNKDDTKDSKWIGDLFRLGLVKGSYIPCKIVRILREYTRYRCKLVSCRSSEKNRYQNALTVCNVALDSVVSDIFGKSSTSIIDYLLEQSGTSINHEEIASKLLRSLKSKEDAVIESVEGYQMTDAQKYRMRLVRAHMDYITAEIKDVDKMIENMISSNPDFENAVQFLCTIPGVKCDSAITIISEIGTDMSQFSSSKRLCCWAGLTPGSNESAGKKKSVRITRAGVYLKPALVQCAHAAVKSDQSPYYKKKYESLVKRRGKKRAIIAIARMILTAIYQMLSTGEQWNPSDLYKIDVPEALIEKQKAKAIKQAKKLLQREGLLPPDEPVAS

SEQ ID NO: 337955 - protein, 425 aa, unidentified
MLAVGIDWSEEFHLVALGRPSEGVFEVRRVEHSPKAVDALCARIAALEPDPAEVRVVLEARHGLLVERLIDAGYVVVPVNPDLIARRRGPAKKKDDAEDARIACLLALDRFERLRPLVPHGELAGELRAIARDDERATKDARRLLNRLRQDLLATFPGALAIAGDDLGSPTFLRALERWPSAEALGAASRAELVAFARGCKHGWPERFADKVEAALAGDHFQARPYLVRAKADTIRLTASQLLAIGKQRRAWERRMGELLLGAPRRGRSKTPRPDELGEGFPDGEIYLSFPGLGDRLAARVAGEIGDHPSQFESPNALQCYGGKAPVTRRSGKSELVVSCRLAYNRHLGDAVQQWAFCSLRRSSWARAFYDGKRAQGKGHHAALRALGNRWLGLLWHCLRRGLPYDEAVHVANRERARSSQLLAA

SEQ ID NO: 337956 - protein, 373 aa, unidentified
MKKAKYYGSIDVDDSNFNVALIKTVGEELLHFKCRSNVSAMIKKIKQKNIHLEDIQLCYEATYLGYTLYRELKSKGISCEVIAPSLIPKTSGKKVKTDRLDCIKLAKYYFKGMLTPVHIPDEEDETVRDLIRSRKLLVDQVKKIKTHIISLCKRMGFDYRKQREVSNAAYWTQIHYKWLEKEINQLPENSPLRLNLSGLLSTCNNIETFISSYDEQISVIAERPKYKDKVKALNCFRGLKTLSSLTLTTELGDIRRFPHPSKVTAYSGLSIREYSSGGKELRFGITKQGNHILRTVVVEACQFSFKPPNVSNNLKERRIGADPEYINIADRCMHRLSKKSIRMFMNKKHRNKIKVACAREMLCFVWEALHKAA

SEQ ID NO: 337957 - protein, 367 aa, unidentified
MSRMKRLAVQQLDVSKDYLGSGLDLAKTDTAVIAITTDGELYAIDRLKYSDLLNQARQLGSTVFAMEPCNGMTYLVHELEELGHECRVINGEAVKDYVKSHFAGQKNDLNDAQAIAFLAQDEMLKFIRVKAKSEMTMQTLQVVRQQLIKQRTCSVVCIKGICQNYGLVISKSIMSEAKIRPIIEETQKLPDEIKEPLKRLLRNAARFTIDIKQIDKAIEQGLKGNETAERLLEVPGLGPQCVSRLLTTIGDINRFEGPKNLAAYYGLVPRSHTTGHNEKMGKITKHGDRLMRAFLVQGAHAVLIQHTKGRLPKSALKKWIDKKLSAGMPCSKLSIALAAKLLRIAFAVLKYKKKFDIKKAGVARCSL

SEQ ID NO: 337958 - protein, 450 aa, unidentified
MRRGLRCAGSAEPPAVGLTPDTATMDRSTDNMKTYILGPTQPVQPQNPTRSAGPAATPAVPATPPAPRGPALYLGLDVHSDSIAVSLAPWDSVEVRRYGVIGGTHDDVLKLARKLAAAHPGLPLRFCYEAGPHGYPLCRCLRAHGYECELIAPSKIPTAPADRIKTNRRDADQLARLHRAGELTPIFVPEPEDEAVRDLLRARWQTAKAQHRARQQLKSFLLRLNFRYAGTKPWGPKHLRHLATLKLPFVEQQFVFQETLNAITEEGQRLERYDTQIERAVTTWRYEPVVRALMTMRGLARLNAATLAAELGDLHRFASPRQLMSYLGLVPSEDSTGDTRHQGGLTKMGNGIARRALIEAAWNYRSPARLGRGLLARQEGQPKAVTDAAWNAQTRLHHRYQHLTGALHKKSPVAAAALGRELCGFVWAIGRMVPPRPPQPAPAPSPKSVT

SEQ ID NO: 337959 - protein, 408 aa, unidentified
MVTPIVKRCAGLDVHKMVVMVTVILEQEDGSITEQTKEFGTFRKHRRQMCRWLKGHEVELAVMESTGIFWKSIFSSLEECGINTYVVNARYVKKVPGRKTDVSDSQWLATLGRLGLLKPSFIPPKDLRELRLIARHRVKLHGMLAAETNRLHKVLDDAGIRLGGVVSDINGMSARGLIGGLIDGREPAEIVPDVRGRLKKKIPQLLDALDEPLGGRHRFLLQALEQHICYLEQEISNLDRYLFAAMSPYQRQWEILQTIPGVDAISAAMLLVEIGVDMTCFGRAERLASWAGMCPGNNESAGKRKGGRIRKGNWALRRLLCEISNAANKTKSQFRGQYQGLVIRRGHKRAIIAVGHKVLRVVYAMLKSLQPYRDPEIDYTGIVVQRNAPRWLAALKKYGFLPDMIKAA

SEQ ID NO: 337960 - protein, 343 aa, unidentified
MSGVVTIGLDLAKSIFQIHGVDDAGRTVLRRRLSRHELVSYFAKMSPCLIGMEACSAAHHWARELSRVGHSVRLIPPQYVRPYVKRNKTDAADAEAICEAVAKPNMRYVPVKTLDQQGALSLHRVRSLFVRQRTAAINAVRGLLTEFGIVAGKGIQRVTELRQRTRKASRELLPDEARAAVEEVFDHIDDLTARIESVESRIVALHKNSEASQRLASAPGVGPITASAILASVGDGRQFQSARHFAAWLGLTPRVHASGRKEHIGRISKGGDRYLRALLIHGARAIVGTSFRKDVTPRPWLKQLLARRSVNVAAVAVAHKTARALWAMITREEGYRRIAVQTA

SEQ ID NO: 337961 - protein, 312 aa, unidentified
MNNITSQVGIDVAKDMLDVSIDQAKPFRITNSEPGISKFIPTLPVGCVVYVEASGGYERLLRRMLNDAGITCVRHDPLRVRRLAQSQSINAKTDALDARILSSMGSKLPVREAKSKEKEDCTDISRAVEDLKAQAADFKKKARAPELEPGVKKSFLRVVKTLEKEATNLQEKFEIACKKCQEVQNRYELGQTVPGVGPNLARTCACELPDLRGATTAQISAYGAVAPLDRSSGKKQGFTSLGRGCVRIKRALYMPALSAVRHQVWATTLYKKLRKKGKSHQSAMIAVMRRLLVRIAAVLIRGSAWQPEPPRP

SEQ ID NO: 337962 - protein, 304 aa, unidentified
MENKKEVYIGIDVSKDFIDIVDGESHHKIVNNMKEIVQFLRKYKQQKVYVCAEFTGPYHRPLVEACHKTKITLFLCDAFKVSYAKKAIGCRSKSDKEDAEFLRLYAMKNELKPYVIPESFHRLKELMNRQDLKTGYVRSLKNLRDSITTLDERKNLEKDIQRTTKEIADIQKKINALIDADKELREKKTILCSVYGIGEKIATTLLILLPELGHISRTQIAALCGLAPFNNESGKYKGHRCIKGGRFRVREALYMAALSAKKSSYYRPAYDRMIKKDKRPKKVAIIMIARKLVCYLNSLMRKVG

SEQ ID NO: 337963 - protein, 399 aa, unidentified
MGVRYGLAFFYLLEFEQNVRSYRLYNIQDIRQEKRRWEIHHFITANLYRMNLLKQVLGIDVSQKELVVSLGKMNADLSIDLYAKRIFANKETGFKALVKWVDKLTSDEIAVHYVMEATGVYHQKFAYFLDDEKHPLSIVLPNKISSYMRTLDNKTITDSTCADAIAQFGLERKLDRWKRPNIIYKRIQQLTRERSQVVDERVIAKCQLHAENTEVQPNANSIKRLKARIKFLSQQEKEIKQDIEKCIKEDCSIEKNIENLTSIPGIGRLTAAIVLAETNGFELIRNKKQLTSYAGLDVREKQSGTSVKGKPRISKKGNRNLRKSMYLPALTAVKHIQDYKELYARLVSKSGIKMKGLVAVQRKLLELTYILFKNGTSFQNDYKQGKSAATKADTLLKLA

SEQ ID NO: 337964 - protein, 276 aa, unidentified
MEHIGIDVHKEESQLCVVTEEGTVLEQRIRTRRERFAAVLGARARARILLEASTESEWVARCLEELGHEVIVADPNFAAMYATRSRRVKTDRRDARTLAEACRLGAYRAAHRTSDSQRQVRALLAVRQALVRTRTRYITVVRALLRREGLRVASGQAQTFAARVQRLALPELLRGTITPLLALLVPLNEQIAGLNAHFAALAEDEDVLTRLCTVPSIGALTAATFRATLDRVDRFHGAHHVEAYLGLVPQEYSSAERHHRGSITKAGSPHVRWLLA

SEQ ID NO: 337965 - protein, 355 aa, unidentified
MMIIGVDFRPAFQQIALLDTDTGEFQEKRLVHREEAEKFYRALAAGSQGVRIGMEASGHARWFERLLAELNFELWIGDAAAIRAKQVRKRKTDREDAQLILKLMLKDDFPRIWVPSWENRDLRQLLWHRHRMVQARTRIMNQLQAVALNEGLRCKKRLWREPGRQQLESFRLAPWASRRRKDLLDLLDRLNPTITELTQAIEQEADKSPEAKRLMTHPGVGPLTALAFVLIIGKAERFPCGKRIGSYLGLVPSEDSSGNRRRLGHITKQGSAMLRFLLVEAAQVTARSIPQWRSKYFHLMMRRGRKIAKVAMARRLAVALYWMWRKGCNYEQSTSSVRTRASSEIAMVCSKTSSN

SEQ ID NO: 337966 - protein, 352 aa, unidentified
MKYFIGCDLHTRYQVVAWLDQETGEICARRLEHAGKELEKFYGQFAPGAVVGIEATIPALWFERLLEGLGHEWWVGDAAVIRAHDVRAQKYDERDARNIEDLLRTGRFPRVWVPSREERDLRQLLVHRMKQVRARTQVKNQLHALAISQGLCWKRRLWSQKGRVELEKLPLLPWAGRRRKELLEWLDRLDEQVRDLDRAVEEAGRARPAVALLRTHPGVGMVVALAYVLKVGPVERFARSRKLVSYWGLNPSEHSSGGRQRLGAISKQGNSMMRWLLIEAAQTAARFDPQLRRIYQRLKSRRNSGVAKVAIARRLAVRLFWMLRTGNNYAQLVRMSGSSSSAVVPPQAESNV

SEQ ID NO: 337967 - protein, 324 aa, unidentified
MQNQTIVGIDVSNATLDICVSNHEQRSFVINNEVKAICQFFKAYKEKLVIGMENTGRYNWALYEALKETNHRIFVISPLHLKKSMGLVRGKNDKIDAVRIADFTAKNYNELPQWKPSSQAVQKLKILLTERSCRVKSKRQLLKQQYDYAKMKHLGMDKYLMGLNKQELALINKQIAMIETEIEALIKTDEQMHNQAKLIRSVPGAGKVLCWMMLAKTEGFTTITEPRKMACYSGVVPFSNQSGTSIRGKNRISPYADKAIKAVLHLAAMSAIRLKNDLREYYLRKIAEGKNKMSALNAVRNKIVHRIFAVIKNQTHYQNHLLLS

SEQ ID NO: 337968 - protein, 355 aa, unidentified
MSSEKYIGLDVHQATISVAVLDSRGKLVMESIVETKAATILDFLAGLRGTLSVTFEEGTWAAWLYDLLKPHVDKLVVCNPRKNALLKDGNKSDRIDARKLDELLRLDNLEPVYHGETGVRMLRELARSYLTIVKDLSRVMNRLKALYRSWAIPCAGRDVYYTRHRSEWLGKIPEAGTRRRAEQLYQQLDMLQHLRQQARRELLAESRKHTITAKLRQIPSLGPIRSALAVALIQTPHRFRTKRQLWTYSGLGLETRDSGEYHYVQGQLRRRKKQVSIRGLNKDHNHDLKGLFKAAATRASVQPGPFQDFYQRSLAKGIKPTMARLTLARKIAAITLTLWKKGENFDADKLKSQAA

SEQ ID NO: 337969 - protein, 332 aa, unidentified
MSIIGCDLHSRYQVIAMLETGTGEVITRRLEHEDGEAKGFYAGLAKPVLIGIEATGYTQWFERLAAELGHELWVGDPAEIRARAVRRQKTDTRDAEHLLDLLLSKRFPRVWVPRPEERDFRQLLKHRDKLVKMQTSVRNQLHFLAMSQGVCRKQKLWSVRGRQELEGLELGPWASRRRQELLELLDRLGPRIEELEAAVKAEAARRPEAVLLMEQKGVGPVMALAFVLTVGPVERFATSRKLTSYLGLNPREDSSGGHQRLGHISKQGNEMLRWLLVEAGHTAARLDPELRRVYQRLKFRRGGKVAKVAIARRLAVRLYWSLRRYAAGSHVQ

SEQ ID NO: 337970 - protein, 338 aa, unidentified
MKNKFNYETIMGIDISKKTLDICLTNNNKPIFQDKIDNTAQGLKSILKKLKSLHIRLEETLFCCENTGIYTSPLLFFAQKHTLNLWVENPLSIKKSLGLTRGKSDKADAHRIAQYAYRYQDQYRRWTPARESIKNLETLWKRRKSVVKIQNQLNNKLKEIKSMQGKTAYNQEKSAYKGILQGIKKDITKIEKELKEAIVSDKELKHLHEIITSVDGVGSVTATYLIVLTDGFKTLNNPRKLACYAGVAPFEHTSGTSVRGKQRTSSFANKELKALLHLCTLSLLKTKNTFSDFIQRKKAAGKHMMSILNALRNKLLHTICACVRKNQKYEKNYANSLA

SEQ ID NO: 337971 - protein, 398 aa, unidentified
MGGNLTGGKMKIYVGIDMAKDKFDYCTMDDDLNILFRGDNCHNDRSAFDSFGKTLEDLKPMTRQMTIGMESTGIYHLPLYMFLRNNGYHVRILNGLEVRGIKKARVRKTTNDGIDAQSIARYLMVSKDMDSYDYPEELKNLRELVTALDILNTKVVATKNNIIRIMDMEFRGLSNILDLDHDTVNLLSKYHTASDFISADESEMEKYVTKAKIKRIRSVAEKAPELGNEKKALDIELKSLLRILDLLLVEKENITEAMEKEFVTLGQIITTIPGIGPITGAVIMAKIGNIERFENAGKLVAFSGIDPIIKESGKIRSERSISKRGDPMLRTAIYQSTVSAIRCNPVISDFYHRLTGRGVPKKKALIASSRKMCHIIFSVMHNNKPFEVPEKFRKESAS

SEQ ID NO: 337972 - protein, 394 aa, unidentified
MKLIGIDIGKNKHFFCVMDQQTGEIISQPVSFSNDKEGFDFLVQEIKSYPKDSILIGMEDTGHYHFALLKYLLDLQYTVALINPKTTDFNRKMQGGITKNDKLDTINICDVLDTPERKKQYRITKVNSFDLYEQKQLTRHHHSLKEEENVYKNRLQKCIDIVFPEFNKLFNSKYGTVYMNILKTFGSAENIANTDIRTIRKCFEIEGRGNRISLTPERLKECAGSSIGISSSAEVIQIKHLTAQIELIEEQLTEIDKKIEEFSIQNNSPILSIPGISHFSGTSILAELGDISNYSKPSQIIKFAGVAPLHYESSQFNAQHTAITKKGSKYLRKTLYQIILPVIRHNPVFNKYYQLKISQGKGHRCAQGHCVRKLLRIIYHLLKTNQQFDPQLLR

SEQ ID NO: 337973 - protein, 375 aa, unidentified
MGDYSEAFVGLDTSKLTNAVAIADAGRGGEVRFLGEIENTPSATAKLVRKLSTKYKRLTFCYEAGPTGYGLHRQIKDLGFECVVVAPSLIPKRPGDKVKTNRRDALSLAKLLRADELTAVWVPDGRHEAMRDLTRARETAMLDLRTKRQHVSAFLLRLGRPYPESRKTWTKAHMSWIASQTLEHPQQRLVLEEMMLAIRQAQERLQRLEQAVAAAVGEWSLAPVVTALMAMRGMDLISAATLLAEIGDLSRFQTPHELMAYLGLVPSEQSTGEDVRRGPITKAGNRRARRMLVECSWSYQHPPRVGQAKQPKVDAAPPAVREIAWKAQCRLYRRYRALIRNGKLKTVAIVAIARELAGFIWAVARAVTTARAAVA

SEQ ID NO: 337974 - protein, 412 aa, unidentified
MTSLKQGIIQDNMRVVFGIDVSKASSEVAILVNGEKVHGYTISNDAIGFARILGDLRTVYKPEIIFEATGVYSRRLQTFLDDNGYAYTRLNPLETKKQLDSLRVRKTDQIDAEKLAQSQFVLNRKPTYVQEEVYQNLRDLSRFYQNLTEDIVRAKNRLHRVLQVTFPELENILSTPSGEQYWNLVIAFPCKDCVLELSNDELSKSIRLSTSKRISDKRVAYLAEKLIALANQSYCAVKKTSPILEEVRYYAKELLRLYEQRQAVLDEMVELAQPLPEYDILLSIPGIAETTATSIIGELGDIRRFQSANQINAFIGIDLRHYESGNFLAKEHITKRGNPYARKILFKCIHNIASASHTNPCHIADFYEKRKRQSQTTSTKPHTIASIHRLIRTMYYLIMHNKLYDYASTQNR

SEQ ID NO: 337975 - protein, 343 aa, unidentified
MQDTIGIDISKDTLDCFQLSSSKHSQYRNGKLGHKALIKWLKSQGATLVVFEATGAYHRSLEATLARYEYPFVKVNPRQARRFAEATGKLAKTDRVDAAMLAKMGAVLDLPAQEPKSENINILRELLTARRALTKDNAAAKTRSHTTLHAVLKMQIGARQKQITLQLKQIDKIIAKMIDGNQELSRKFEILLSIPGIGQVTAFSMLIEMPELGTMTGKQSASLAGLAPISRQSGKWQGKERIQGGRAFFRRAMYMPALCIIRHNLSSKQKYDQMIKRGKPTKVAITAIMRKLVVLANVLLRDDRKWTEKPTRPTRILLSAFATQKPAGQRTATRYRSPRRIAA

SEQ ID NO: 337976 - protein, 476 aa, unidentified
MNTAFTAGVDWGGREHHVCLMDHTGKVVKERAFDHGGRGLAAMSDWLLDCARRPANLIRVAIEVPHGPVVEALMETGFPVHSINPMQLDRFRDRFSAAGAKDDRRDAKALASALRTDPDCLRPVREPDDAVIEMRGAARARKELVKDRNRIANRIRQLLRDYYPQFLDAVDGDVSTPWAIALWKQAPTPQKALRTRKTTLAKLLRKHRIRRMDADELADRLQAQPIKRRNASIECARNRILRLLPILRQYNDQIRQARCELQRTLQLAKECLPNDSELRDAAILASIPGVGDHVLATLLTEAEQALGQRDRAALRCLAGVAPVTVRSGNRLVVRQRRAKNQRLADAVYHWARVAVQRDAVCRNRYNLARARGKTHGHALRIVGDRLLRIACAMLRNRTTFHPGTGPRDNAENAPMPAPEHEHPRRPHDDHPDGTPRNPQPCISSPESQPRRPMQRPTRRPDNTINKPPIDTPQRST

SEQ ID NO: 337977 - protein, 338 aa, unidentified
MFYVGLDIHAKQITVCVLDGDGKVYQRCHVRQVDQMMRFLEKLPGPCQACYEASTGYGMYFECLSKVAQRVVVAHPGLLRLIFRSKQKNDRRDAEKLAKLLYVDQVPAVHVPSADVRVWREIINFRRRLIEKRTRAKNGLRGLLRSLGIQAPPKAGLWTKRGMAWLRQLEFASPMHAMKRDLLIGEIEGFSAQLRRVEKELARYSAGSVAVQILRSIPGVGPRTAEAVAAFIDNPHRFPNSKRIGAYFGLVPSQDQSGSRNRLGHITREGSATVRKLLVEAVWQASRRSPTVRAYLERVQRGEKDRRKIAIVATSHYLVRVMWSMLKNGTLWQETVAA

SEQ ID NO: 337978 - protein, 320 aa, unidentified
MMYIGIDVSKDTFVAAYPRKSGYTTKTFKNDTKGVRSFITSLPEDCHCVMEATGNYSMLLLYLLQQAGIPTSMENPQKIKHFSRAMMTVTKTDEIDAKLIAMYGEKMTPETYKIPAESILLLKQKRTVLRQLKKHLVATKNLQQSLAVLPKQDGASKRAVEKTIKFLERQIAELEDEITNLSNKEYKRQMELLTSIKGIGKTLASALIVATGGFTYFSNAKQISRYLGLCPTYQQSGTSVNVKGHINRNGDTHLRSQLYLVACKCTQCNAACKETYDRLRANGKSGKAAVVAVANKLIRQAFAVVTKNQPYVDGFVSSIA

SEQ ID NO: 337979 - protein, 389 aa, unidentified
MLLEHPSDGLAAIRTHIGAIFVSLELSRKNWLVTSLSPGKGEKMSRHSVTAGDVAGLLALFAELGRKAEAATGQSYPIITIQEAGLDGFWLHRVLQQNGIESHVVDPASIAVPRRRKRAKTDKIDGETLLRTLLAYKRGEPRVCAMVVAPSPEEEDRRRLCRERQALIAERIRHVNRIKGLLFAQGISDYKPLRRDRRARLEALRTGDGRELPSHLKAQIGRELDLIELLLKQITSVEAERDAQLAAARKPASEAAAPNPVTMLLALKGMGANFAAVLWSEAFYRQFANRRQVAAYAGLAATPWQSGGIRHEQGVSKAGNSRLRTTMIQVAWLWIGHQPNSALTRWFKERSPQGRKRAIVALARKLLVALWKYVTQGVVIEGAVMKTAA

SEQ ID NO: 337980 - protein, 405 aa, unidentified
MAIIGMDIHRSFAQAAFLQDGQIKREQRVELVHDRLVKFAKTLSIEDEVVIEATGNSTAVERILRPFVKRIVVANSRMVRAIAYARVKTDKIDAVILAKLHAGGFLPEVWIPDEDTQRQRRHTAERMGVLEQVVRTKGRIHSILHANLIPKYSGHLFGKTGKKWLAGLPLPDDEKAIVGRLVDELERNSDQLAKLDMTIIRNALEDPRVVRLMTIPGIGPVVASTVLASIGDVSRFETPEKLSSYFGLTPKVRQSGDRPARHGRISKQGNTHARKMLVEAAWSAKTAPGPLRAFFGRVQRNRGAPAAAVATARKLSVMIWHVLTEGTEYAYARPAFTAMKLRKAALKAGAPREYGKAGPGRDYWIKEIREREADYVQRAEQAYEHMVAAWKEKPPKAPAKAAAPA

SEQ ID NO: 337981 - protein, 384 aa, unidentified
MNNDSIIFIGLDTHKSFIQVAVLQGHRGAQPQQLGRIKSNKSALVKLAQQLQSKYPKATFHFVYEAGPCGYWTYRLLTSLGHCCFVIAPSLIPKKPGDRVKTDKRDAAKLAKLFKAEELTPIYVPEAEDEAIRDLSRARETAMKDLKDAKFQLKGFLLRNNVQATVNDNWSKKHLRWLTDLILPHHSQQIVLQEMIITISERMQRLQRLDNELLHQVKNWRYYPVVKAVQAMRGVRLLVALGTIAELGDLRRFDHPRKLMAYLGLVPTESSSGGKTRRGSLTKCGNSRARRLLVEGAHTYKHKANISVELQLRQEGLPKEIVDIAWQAQQRLCRRYQRLLQKGKHRNVVVVAIAREMIAYIWAIAREVVVSDVDPKTRIARLPA

SEQ ID NO: 337982 - protein, 356 aa, unidentified
MSSVKYIGMDVHAATIIICVLNANGRLLKEDIIATGAEAILNFVASQRGSLHVTFEEGEQAAWLYDLLGDRVERVIVCDARRNAALRQSGHKDDRSDARHLAEWLRTGNLTAVYHGERSLRTLQELKRVYTTLVEDCVRTMNRLKSLFRGRGIACSGRSVYRPSQRTEWLQRLPDDGVRQHADLLYQELEAQQQLRRRARHDLLAESRRRPAQRILRRIPGWGPLRVALLMAIVQTPYRFRSKRQLWTYACLALVTAATGEYLLQQGRVVRARRPAQVRGLNPNGHRELKALFKGAVFTACHRDPVWQELWASRVARGQKPQNVHLTLSRKMAALVLHLWKKGETYDARQLKAQAV

SEQ ID NO: 337983 - protein, 336 aa, unidentified
MQITTIGLDLAKHVFQVHGVDANDAVVEKRRLRRGQVLGYFAKLAPCRVGLEACATAHFWARELRRLGHEVRLIPPQYVKAYLKRGKNDAADAAAICEAATRPSMRFVPIKSEEQQAVLIMHRARDLLVRQRTQLINALRGHLAEFGLIEAQGPSHVRRLLAGMRTDLTVPELARETLDLLATALEAVDAQIDAVEAKITTWHKANPTSQRLATIPGIGPLIASAITATVPDPAAFRSGREFAAWLGLTPRQKSTGGKQRLGRITRKGDQYLRRLLIVGAQTVLLRSKAAKANLWIQGLLARCARLKVAVALANKTARIAWAVMIRGECYRPVAAA

SEQ ID NO: 337984 - protein, 453 aa, unidentified
MEREEKRLEQFQQLRKEIRGSQDYLVVGIDISKDTHNALMRTIPGKILYRRLIFNNTREGFEALLLQVEAVRVKHGLKEVVFGMEPTANYHKPLGEFLINQEHQVVLVSPEAVKHNRPLLDGRWNKHDGKDCANIADLMCQGKCLFYEYPSSELRDLRNLLSLNRKLKKLEQGLRLRIRNHLVAQFFPEMDQYCHWGAQEGLALVRWCLDPALMGKLSDQELVKRLHTQGRTLAQRKRLSALKDKASSSIGCQFGWSAEFEGQSVVKLLKEVRHTLADTQEQIEQVCLKFKEYPCLLSIPGFGPSLSAMVLGAIGNPWRFHNGAQVIKMVGLDLSASQSGKSQGLPVVSKKGKAEIRYALYQAAMVASSRDKHFVGYFTEQLRGREKEKGIKTKKRVKLAAKMLMIAWTLMKKQESFDPRYLLACTQQSTSHKSAGFKKGAIPKVQPERDRGL

SEQ ID NO: 337985 - protein, 349 aa, unidentified
MIVGIDVHKHTHAAALIDQRGVQMATLTLRNSPSGYRHLIDWLADHHAAGAVIGVESPGSYGRCLVAALAGAGFEVLQVPPWRTHRERHRRGPGKTDPGDALSIAKVVLSAREDLGPAEQPELVRALGTLELQRRRFVRDRTKAIQRLRADWTQIDPVAEAGTIRCDRQRELRALKVIHLGESLVERTAARCIRELAHDIEDLNGRIAALDTEIAELLGEYNNPFEDLHGVGTNLAATIIAQAGDVRRFRDASAFARFCGAAPIPCGSGQTSGRHRLHRGGNRQLNAALYRIAIVQQRHHPQAKAYLARKLAEGKTPREARRALKRHLANIVYRRLLAWAENTLPAQIT

SEQ ID NO: 337986 - protein, 341 aa, unidentified
MNHPKVVVGLDVGAETFSAAALRTAGEAVEMKGSFENTPEGFDAFAVWMKEYRITKEKSAVCLEATGVYGEALCYDLISRGYRVAVESPLKVKRAFAASAHKNDTVDARQIAEYGHRFYDELQWWSPPSEVMEQVQMLLSAREQFVTQRTANINALKTMQRKVIKTVTGMKAYEQAIKQLSENIEEIEREMKRLMKEDDSFHRLIKTLTSTPGIGLLLATNLAVTTNGFLRTSNHKRIASYAGISPIEHTSGTSVYRRPRSRSFGPPRMRKLLYLAAMSVSTHNPEFRRYYLRKVAEGKSKKLVLNNISNKLLKVVCALVRTETEYIPNYRSVNPILLKSA

SEQ ID NO: 337987 - protein, 315 aa, unidentified
MELTKQCVGIDVSKDSLEVKFKEKSTKGIKIKGSSKFDNTSNGFIKLLEWCNKREKTENVVYVMEATGIYHEEVLYFLFDKGKKVSVELPQRIKYFAKSKGVKTKNDVIDSGVIADYGLERELKVWQPPGKEFKTLRDLSREHNTLTNSKSEAKNRLHAARHSHDKNPRVIERLQSTIEFYTNQLDEIEKDIKTTVNADKELSGKIKKVATIKGIGLMTVVKIIAETGGFYLFQNINQLISYAGLDVIENQSGNHNGKTWISKKGNADLRTALYMPALSAIRFNEKMKSFNERIMETHSYKKQGIVAVMRKLLIT

SEQ ID NO: 337988 - protein, 349 aa, unidentified
MKHFAGLDVSLEETAICVVDEAGGIVREARLPSEPEALVAFFRGLGLVMDRIGLEACSLAAWLHEGLTAAGLPAVCLETRRAKAAMGAMPNKTDRNDARGIAQIVRTGWYRAVHVKSPACRSWRALLAARRLVLNKMRDVENGLRALLREAGLKLGRPGRKEFAARVRELVGTDAVLSASAEPLLAIIAAMAGELARLTKRVLDIVRDEPVCRRLMGVPGVGPLTALTFRATIDRPDRFRRSRDVGAHLGLTPKRYQSGETDVQGGISRCGDELARTALYEAAHSLLVRSRKWSTLRAWGMQVAKRRGMARARVAVARKLAVVLHRVWADGAEFRWGKEDADVAPAAPA

SEQ ID NO: 337989 - protein, 369 aa, unidentified
MVWIPHPATASRCAKMVMLKRTSMEEVSVEEVTVIGIDLAKSVFQLHGAAASGRPVFRKKLSRAQLTRFMADHPPCLVAMEACASSHYWGREFMKLGHEVRLIPPIYVKPFVKRQKNDANDAEAIAEAVVRPTMRFVPVKSAEQQARSMVFKTRDLLVRQRNALINALRGHLMEYGIIAPPGRTFVRQLEAQLDAPESTLPSGVTELCRLHLEQIGSLDIRIMRIEKHLKEEAKSDPETIRLQTAPGVGPVSAMAIQAFAPPMEGFRRGRDFAAWLGLVPVQKSTGGRQILGRTSKMGQRDIRRLLIIGAMTRVRWAVKNGPPKGSWLEQMLGRKPRMLVAIALANKTARAIWAMMTKQEDYRDPALAA

SEQ ID NO: 337990 - protein, 332 aa, unidentified
MVAGTYGSFNKAGSTKMTQISRTAGIDTSKAKLDIAVHGGGEHWQVDNTSVGWRRLAADLSKAGVTRVGIEASGGYESGVVGYLRDKGFVVLVLQPIQVKAYARVHLRRAKNDKLDAVLIAACTATIDQPRIKPDDRLAKLAHHLTFVEQIEEDIARFKVRLEHIGDPRLRRMVMADIARLKARRSAELLRIVAALRAHDDLGRRLDLVLSIPGLGERTALALIIRMPELGRVSREHAAALAGLAPFDDDSGKRTGERHIAGGRRRLRRSLFAAALPAAFRWNKALIELYARLTARGKAHNEALIACARKLLIYANTVVQRGTPWTERTLSA

SEQ ID NO: 337991 - protein, 374 aa, unidentified
MENSTTETIGCDLGDKMSDVCLMDAAGCTRRARVASTRRGMTNFFTREPAHVVIEVGGHSRWVSELLEQLGHRVTIANARRVKLISASDNKTDEHDAELLARLGRADPSLLAPMVHRRSELQADLAIAKARDTLVATRTKLVNHARGTVKSFGERLPKCSAISFARHTRALIPAALEAALAPVYETIAKLDEQIRAQDKLIQRKAEQHQDVAVLEQVDGVGVLTALVYVLTLEDKGRFASSRMAGAYLGLRPRKQKSGNDDPQLRITKAGDPFVRRLLVLSANYILGPFGKDSDLRRWGLKLAERGGKNAKKRAKVAVARKLAVLLHRLWVTGEVYEPLGYQARRLEEATPPATPAPAATDPADPSTTATPAAV

SEQ ID NO: 337992 - protein, 416 aa, unidentified
MEVIVSRCAGLDVHKNTVMACVRVPGPNGGRTSTVRQFRTFTAGLCQLRDWLVAEQVSQVVMEATGVYWKPVWHVLDATPGLELMLVNAHAVKNMPGRKTDVADAVWLAELGECGLLRPSFVPPPVIAQLRDLTRYRKKLIEERARETQRIQKLLEDAGIKLDSVVSDILGVSARQMLEALIAGVRDVAALAELARTRMRPKIPQLRQALEGRFGAHHALMLRMHLEHVDQLSVSIDRLDSEVDRVIRPFSSALQRLITIPGVGRRTAEVIIAETGADMRRFRTAGHLASWAGMCPGNHESGGKRRSGRARKGNAALRAALCEAAWAASHARSGYLPAQYRHLLRTFGKKGQTRAVFAVGHSILVIAWHLMAHDRDYADLGGDHFTRATDAEARERYLVRQLEALGHKVTLEPAAA

SEQ ID NO: 337993 - protein, 343 aa, unidentified
MQAVTTIGLDIAKSVFRIHGVDATGNVVIRRQLKRRHVLGFFQKLPRCVVGIEACASSHHWSRELKALGHTVRLMPPAYVKPYVKRQKNDAADAEAICEAVTRANMRFVKTKTPEQQSCLMLHRTRHLFIRQQTAVINSIRAHLAEFGIVARVGRKGVADLLEVVADPRDRRLPEVARACLVALGVQLRMLKAQILEFDRRIMAWHRSNETSKRLDEIPGVGPALATALVASVADPKAFRSGRNFSAWVGLVPKQHSSGGKDRLGSISKQGDRYLRSLFTTGALAVIRYAKIHGTRHRPWLTALLARRPTKVAAIALANKIARMAWAMMAKGERYKEPTALAA

SEQ ID NO: 337994 - protein, 341 aa, unidentified
MQHIAIDLGSKESQICIRTEQGEILHEGKVQTSSLDRYLKRQPQSRIILESCAEAFRIADFALGCEHQVRVVPATLVRSLGVGSRRIKTDRRDAQVLSEVSCRIDLPSVHIPTDVARQRRSMCGTREILVASRTSLICCVRGWARTQLLKVRSGESETFTKRVLDAAATTPDGIPEYIERLLTSINSLHEQIAAADKELEQLTEQEPICQLLMSVPGVGPVTSMRFVAAIDDVSRFANAHAVQAYLGLTPGENSSSTRQQRTGITKAGPAPVRRTLMQAAWNIRRLRPMDPISQWAMEIEKRRGKFVATVAVARKLAGILFALWRDGARYEPNHQLRKANK

SEQ ID NO: 337995 - protein, 438 aa, unidentified
MSNKVIFNLDELFISVGIDVGADFSWMSIALPNQQFVGKPYKILHNSIDSLTTAVSKIKEAEELYSLESRIFLESTGIYHYPLFCYLRDKGFNCSVINPIITKNSTNINIRKVHNDRFDSKKAALVGLKPDLKVSLMPSDLALNCRNLCREYYDLIDNRSAYVNKLQGELRMAFPQYLGIFSKVTINTSLTLLETYTSPSAFLKADKQEIIDIIKSTARFGLTYAQNKYNAIIQAATDANQFGYIIDSNIKRIRLYISFIRKYDEEINSILESLHELVDANEDSDFVKQIHLIETFKGAGFLSAVSIMGEIGDFSAFSKPKQLFAYFGLDPSVKQSGKFEGTKVQMSKRGSAIARRVIHTLTLQSISISRNREAKNPVLREYYLKKCDSKPKLVAMGAVSHKVCNMIFAILRDNKPFKIIAPQEHIQQYNAAKCDIAA

SEQ ID NO: 337996 - protein, 346 aa, unidentified
MNETTTIGLDIAKQVFQVHGVAVDGTVTVKRQLRRSEVIRFFDKLPRCRVGLEACGGAHFWARELTVLGHDVRLIPASYVKPYVKRGKTDAIDAEAICEAVSRPTMRFVPIKTVDCQAGVMLLKTRYLLVKHRTQSINSLRGHLSELGIIAARGTGKVETLIAIIRDKTDERIPAVARRALEMLAEQVEALVRRIATLENEIVSEVRRDDTMRRLATIPGVGPITAATIVALVPDPGAFNSGRHFAAWIGLTPKMHSTGGKERLGRISKMGNPVLRSLLVVGATAVSRHARRGATVSPWLTGLLARRPAKVAAIALANKMARVIWALLTKGGVFTRRPATAAQHAA

SEQ ID NO: 337997 - protein, 445 aa, unidentified
MTHRTIGIDLAIRGDHVAQIFDDGRPNGRPIRFRHDPASLSSFVLRARDKLNEGDRVQAIMEPTGMSWFPIAHQLIDAGVEVARVKGKRVKALRRYLSEHAKTDLADAQVLAAIPGFGGPRLDPVHIPAARSHALQRLTKQRSRFQDDISAAKRRLLDLVRWASPALEAVLPDLATRLSLTSLQRWLDPEAVLSVRRSTLRKFVAEHASGNHPHSGPFVETLIDGLRHAAEQARALHGRHVDFAELQAEVALEINIMLTKMAAVSALEHRIATLYEELDPQSLLKSIPGIGQHLAPTILGVLHTSRRFHSERHMRGFCGLFPKRSDSGGTERPGQQITQGGNDRIKRALMLAADTARRIDPELAAIYWRLMTAKGHHHKQALCAVANRLANRILSVLRRGKPYVLRDKDGNALTIEQAKAIVRTSYTVPDEIRAGRRVSRSAAAA

SEQ ID NO: 337998 - protein, 341 aa, unidentified
MNITTVGLDLAKSVSHVVCCNQAGKIVRKKMLRRTQILHFFSELPPCLVGVESCASAHYWAREIAKYGHQVKQIAPQHVKAYVRGNKTDFNDALAIAEAVVRPEMRFVRTKTQTQQDIQALHVMRKKCERDRTANSNEIRGLLNEYGIILPVGISHVYKSLPELFDRQVENGLSELFKELLERHYQKLVELDEHLNWYTKKIKQLSQHEACRRLQSIPGVGPIIASALYQHIGNGSEFKNGRAVSSSLGLVPKQHSSGGKHNLQGISKRGDSYLRTLLIHGARAVMRVSKHKETPLSQWIKRIEQTRGRNKAAVALANKLARIAWALLAQGGDYQPELTTA

SEQ ID NO: 337999 - protein, 347 aa, unidentified
MKVLIGVDPHKASVAVAAIDEVAGELLERASFPQNSAGLRSLECWAKRFGERRWAVENSGGLGRHLAGRLAAAGESVVDVPPKLSARVRVLSRGNARKNDGLDALATALAASRNGRLAAVDPEIGSEVLRLLSERREDLVAERTRALNRLHGLLRDFLPGGVAGTLSAHRAARILRGIRPQEGASANLRRRLASEILRDVRTLDRKIADLNGRIEAEVEASYTTLTEIFGVGPILAAKIIGTVGNVARFPSKGHFASYSGTAPVEASSGEVVRHRLSLAGNRRLNNVLHMAAICQARSETRSGAYYRKKIAEGKSRKEALRCLKRRISDAAFSSLMADSQSPSRSAA

SEQ ID NO: 338000 - protein, 422 aa, unidentified
MNFGPVAGIDVSKRFSDMCILSPDNKIFAQEKIYHDETSINRANTLLQKAEQIFSSKPVIVMESTSRYHLILFQFFSEHGYDVIVVNPLQSSSMKDFSIRKRKTDRVDAFKLAMMYRTKTLRPSQVPQTALRALRQLCRERVEFLNDVSSYKNRLTAFLDQAFPGYDKVFSDLGGITSCAVLVRFPTPAILLAAEEAELVEVIAAASKAGYGFAKKKAELLVSVAQKAQTLGIHSCADETLIVCTIQMLRTLSESVFQIEKAIDNLLVQIKEMRNNVSLLQSIPGVGSHSAALLLGEIGDFTLFKKPKQLAAYFGLDPSERQSGTFRGTKNKISKRGSPYARASLHMAVVNAICKHGKQPAPNPVLLSYYEKKCKNKPAKVALAASMHKLVFIIFAVLRDQKPFELKTPEQHAAEQGFVKAA

SEQ ID NO: 338001 - protein, 402 aa, unidentified
MNCVGIDVSKGKSMIAVMRPFGEVVISPFEVQHTASELSELAKLLKSLDGETRVVMESTGNYHTPVAWLLHDAGFYVSVVNAMLVHDYGNNSLRRGKTDKKDAVKLANYGLDHWLTLPRYVPEEDTRLMLKTCYRQYQQYSKVQTMLKNNLISLLDTAFPDANRLFTSPPRTDGSEKWVDFVATFWHCECVCGLSKKAFTAKYQKWCRKHGYNFSQDKALDIYASACGRFGVMPKTNTAKLLVEQAISQLQTTSAALAALKQEMQSLAASLPEYPVVMGMFGVGPTLGPQLIAEIGDVRRFHSKKALVAFAGIDAPPYQSGQIDVRSRSISKRGSASLRRTLFLVMGVLLQCAPMDEPVYQFMNKKRSEGKPYRVYMMASANKFLRIYYASVKAYLDSLEHD

SEQ ID NO: 338002 - protein, 411 aa, unidentified
MVEYGLTEIFKKGEIFMKHILSFDIAKGKSVYCFIDELRNTIIGATLIEHKKDEFDSLYKTIKKYDNLIVIMESTSIYHLPVENYFRSKGVKTIVINPKLVKQFKDTLNKSKTDKLDCFKIARCYLGTIDIFYYKNDEYFIYNSLARQYWSLIEGQTRLKNRYKQLIEIVFPEFNLIFNDLYDDLALNFIHDFPHPVLFANRRIDYLMNYLKEKNGTTQAFRFKNKVLKMKELASNSLCFVSFDSLQVQNLVQVIEMIQYHKSEINKIKNQLINEMKDKKLFKIINSIPGFGEFSTALFLAEVGDITRFDNKYQFISFIGIDSVTSQSGVSAYHGPISKTGCKFGRTILFNVVTTLIQISAHSDKTNPIYLFFRKKQSEGKHHYKCIIACETKLCKIIYKLCSSDCLYKNK

SEQ ID NO: 338003 - protein, 458 aa, unidentified
MTTKKRKHVRIPRDFTRLDIMHPVAAGIDIGSSSHFVAVSPHLCEESVREFGALTPDLVSLVGWFKGLGIQSVVMESTGIYWVPLYEMLEAEGIDVQLVNAHHVRSVPGRKSDVLDCQWLLKLHTFGLLRGSFRPTAEIVTLRTYLRQRDSLVVRSGVEVQHMHKALNLMNIKLSTVLSDITGKTGLNIIRAIVAGQRDPAVLASMRDGRCKACEQTLLDSLTGNYVPEHLFALRQALRLYDMLQALIEECDQESTKLLSELTESLPTPAPIPKAKKRGHKQPQVDYRTPATQLLNVDLTAIPGISEYTAITLMSEIGTDMSRWPTVKRFCAWLRLAPGTKITGGKVLSSRTLPTTSRAVELLRTAAVNAGRTRTAIGAFYRRMTLRLDSGRAVVATAHKIARIIYHLISTAQPFQEPGQDAYDAQQRERAVRRIQHQAAALGLALVPANKSGAAAGC

SEQ ID NO: 338004 - protein, 403 aa, unidentified
MADLLEGTLPLNLVAIDIARYSNAVLIELSDGKRQRFRMTNSASDFDRLLSYLQALPGNCRVALEPTGDYHRPLAHRLLTAGHEVVSINSVAQARYREAMFNSWDKNDPKDAQIIQEMLKRGTYQRYVDPQIAGHHDLQELAKTYYQVSRARTKVQHSLINHSLPLYFPEMHRYWCTTRNEWFVRFLLEFPTPTHVRALDRESFVTAAWDLVGRKVNKRAKLEEIWETAGHTAALPHAPDCLAVETFRITLRRYQELNVLRAAIEARAEAELHDNATDFAHLKTLPGIGSVIAMTILAEAGDLRRFGHHRQFLKYCGFDLAKIQSGTQRGREQLSKRGNARLRLAFWMAGMAAVHMKENSFRSKYERYVHADPDDADLKRKALTAVAAKMARVAYSMIKRNQP

SEQ ID NO: 338005 - protein, 347 aa, unidentified
MSITMIGLDTAKSVFQVHGVNETGRVEIRRKLRRSELIPFFEKQEACTVVMEACGAAHHWARVLSSLGHEVKLIAPEAVRPFVKKGKKNDPADAAALCEAASRPDRMFVPIKTIEQQGILALHSARSLLVKQQTMLVNAMRGLATEFGLTVPQGIGKLDELFVLVDADKAIPEKARQVFTELFGQCSVRAASISALEAEIVAHARHDETARRLATIPGVGPITASLIAATVVDIGPFKSARHFAAWLGLVPRQYSTGGKTRLGRITKTGNREIRRLLVLGATSMVYRAPQWNSVVGMWTRGILERRPVRLVTVALANKMARIAWALMTRKEVYRANGRVAAATEVAA

SEQ ID NO: 338006 - protein, 408 aa, unidentified
MRASIISGSRVRVACGQSVTRFAVRQIVHKSTDIATAKVESCCAVRLNLGRMSPQSSNRRTAVFIDLDPEQLSDLRSHKQGWAMMNVDLIYVGIDVSKTSLDVCVGVAGNVSTLSNDSAGHDALCKMLLPLKVGLVVLEATGGYEFACASALQTAGLPVAIINPRQARDFAKAMGKLAKTDRIDAQGLAHLAQVWAARPDAAKLVKPLPNEQQQKLAALVGRRRQLVELRVMENNHLGTAHRSTHKSIKSVIKSLGTQLRHIESELESHLKQYHADLSALLSDVKGIGAVTVATLVGELPELGTLNRRQISALAGVAPYNHDSGRLKGQRSISGGRATLRTALYMATLVATRYNAPIKAFYQRLVDAGKPKKVALVAAMRKLLTILNAMVRDGKPWDESIHVKGAKMA

SEQ ID NO: 338007 - protein, 311 aa, unidentified
MEKIITVGLDLAKSIFQVHGIGNDGRVLVRRMLRRSQVLPFFRALSSCLVGMEACASAHHWAREIAALGHSVRMMPPAYVKPYVKRNKTDMADAEAICEAVTRPTMRFVPMKTAEQQAAGMILRARELLIRQRSQTANALRAHMAELGIIAGTGMASIAKLLGLLREGEDDRIPATARFALIHFAEQIELLTNRIEKLDREILVAVRKDPDARRLMSIPGVGPLIAATVRTSVLDARGFATARDFAAWMGLTPRAQSSGGKERLGAISKRGNRQLRTLLIVGATSIIKLAKRGSGFGPCCNAGRSRSYQWR

SEQ ID NO: 338008 - protein, 364 aa, unidentified
MVIIGCDYHPSGQQVFGIDTESGEVVADRWIAHSGDELDQFYRALPAGTVVGVESSGNMLWFERRLQQYGHRLRLGDAAQIRSKETRKQKHDRRDAELIARLLLENNFPDLQWVPSLAERDQRQLLMHRHKLVRMRAQVKNQLQHIAMNQGEQQKRQLWTQAGRELLEKLQLDPWTRRRRDDLLRWLDLLNRDCASLEMAVEQAAEARADARLLMTHPGIGPVISLGFVLTIGPIERFERSRQLVSYLGLNPSEESSGERRRLGGISKQGNGFMRMLLIQGAQTAVRGDEALHRQYRRLASEKHRAVAKVMVARKLAVRMFWMLKTQKTHAELVRMRGSSSHSVVDKTDALSERPASPRIQPQG

SEQ ID NO: 338009 - protein, 389 aa, unidentified
MSQPFDAHKSLTALEQHNTIIAVIEMGQSKWLVAAGVPGIKRQPLKKLDADQESLLKLLHRWRKEAEQAGHPIKRVVVAYEAGRDGFWLARWLRMRDVEVYVIHPTSVAVSREHRRAKTDRLDTELLLRALLGWLRGEKRHCSMVAIPTIEEEDAKRPNRERASLVTEQTRIVNRIKAILTRFGIGTFRPKLRKAEVKLKELRTVEGSPLPDNTRAELNRHLARLRMVRDQIQAIEKERLQKLKADHGRKASPHAMVWLIARVFGIGVETADMLVTEVFSRQFRDRKAVARYAGLTGSPDESGQRRREKGLARAGNARVRTGMIQFAWRFLKFQQDSALAQWFQTRAADGRGGTRKTMIVALARKLLIALWRLVTTGEMSDDIVMRPAS

SEQ ID NO: 338010 - protein, 338 aa, unidentified
MKNVSTIGLDLAKKVFQVHGVDADGNVVVRRNLKRGQVLDWFAKLPPCLIGMEACGTAHYWARELRKLGHEVRLIPPIYAKAYVRRNKNDPADAAAICEAVSRPAMRFVAIKSEEQQAAAGIHKVRALLMKQRIMTMNALRSQMAEFGIVVAEGARHIAELEAILADPNEGRIPAPLHDGLKLLAETLRSLERRIESIDKAILAWGRSNATCRHLITIPGYGPILSSAMAAMVVDPRAFRSARDFAASLGLVPRQDGTGGKVKLGPISKRGNGYLRRLLVNGAMAVLCTKRAKQEPWLTKLLATKKRKVVAVALANKMARIGWAMMMRQEDYRARAAA

SEQ ID NO: 338011 - protein, 361 aa, unidentified
MKKISKSEHAVNVSAQPERTVGLDLGDRYSHYCIVTGRGECMEEGRIQSTEAALRKQFGNQDPLRIALEAGTHSPWVSQLLEQLGHQVIVANTRKIPVITSSKSKNDRNDARDLARFAAFDPELLSPIQHRGRERQQDLNLLRTRSVLVRARTMLVNALRGLVKNTGQRLPTCSTESFPVKARAAVPAELKLACDPLIDQVKQLNLSIRELDKQVVQLDKKYPEIAILRTVPGVGPVVAACYVLTLDSPHRIHDHRQAGAYLGLRPSQSQSGDSDPQQNISRTGNTYLRSLLVQSAQYILGRFGPDSALRRWGLKLAASGGKRGKKRAIVAVARKLAVMLHSMWRNRKPFQPFPEPVAKAA

SEQ ID NO: 338012 - protein, 419 aa, unidentified
MSYRIAGIDVHKRMLAMVVADVTVEGEYQFERRMVGTSPDQLRALAEWFVVDEVDEVVMESTAQYWRPVWETLERYWQPIRRTREGAGALAGTLHLAQAQSNRGARGRKKDFPDAERLVKRLVAHELTLSFVPEVEQRLWRTVTRRKYQLTCNRVQLQNRLECLLEEAHIKLSSLVTDLLGLSARRMLQALADGETNPDTLVTLADRRLHATHDQLRDALGACTDLHPVYRRLLQLALEELRLIEQQIETLDQELARLLRQQQEAVQRLAGVPGLGVDSAQQIIAEVGPTAATFPSAKQLASWVGACPGNDESAGVNYSRRSPHGNRQMRRLLNQAANAAVKTKGSIFELVYRRLVVRLGHAQTIGAIAHRLCRLVWKILHHGVTYEERGPAVTKERAHRRAANMIRELRSLGYRVEPA

SEQ ID NO: 338013 - protein, 356 aa, unidentified
MNSLTDLRDVVDVVIGVDTHVYTRSAAVLDTATGGVLDEITVDATPEGYAELVEFANTHAMLRAWAIEGTGGHGAGLSRHLGKASEIVVELDRPKRAARRNGAKSDPLDAIRAAREAMARPRLGTPRSGGERQALSVLLAARRSAVNASTEAQLQVFSLVIAAPEPIRARFRGQKLAAMLNTAASLRVHASWDTETTATVVALWTLARRAHAMLKEARELQKAILAIIRSWRPDLLEEFGVGPIVAATVLCAWSHPGRIHSEAAFAMLAGVAPIPANSGQITTRYRLNRYGDRNLNNALHTVVQIRIQYQQPTREYIARRVAEGKTDREIKRCLARYVARDLYRLLESGPVRLDEA

SEQ ID NO: 338014 - protein, 350 aa, unidentified
MLIIGCDYHPGFQQIALVDTQTGELGERRLAHREEAELFYRELKQQSLSVRVGMEASGHARWFERLLSELQFELWIGDAAEIRTKRVRKQKTDRQDAQLLLRLMVEDRFPRIWVADAENRDLRQLLWHRHRLVQMRTRLMNQLHVVALNEGLRRKKALWRPAGGNELESLKLAPWASRRRQDLLDLLDQLTPKIQELTRALEEEVEKRPVTRRLMTHPGVGPLTALAYELVIGTPERFHNGKQIASYVGLVPSEESSGDRRRLGHISKQGNSLLRFLLVEAAQVTVRSSPQWRSKFFHLAMRRGRKIAKVAMARKLAVHLYWMWRQGRDYGQFEKFGSHAGEPGNRHGVQ

SEQ ID NO: 338015 - protein, 396 aa, unidentified
MRLFCGLDWAKDEHAICVIDEGGRVRARFRAAHTAAGIAELLRQLQRLAGATELPVAIERPSGALVDALVEAGHPVMPIHPNVVKAARPRYSAAGAKSDPGDAYLLADLLRTDGHRFRPLQPLADQTRALRALVRCRDDLVAHRVALANQLRALLESFWAGAAVIFADVESPIALAFLAEYPTPAHAAKLGPKRLARFLARNSYCGRRPPEQLLDRLHSAVAIEVGELEMQARGELVRSLIAILEPLVAQLQKLSAAVEHAVCEHSDAWITSFPRIGRVNAAQLLAELGENRARFLSDAHLAAEAGVAPVTRASGKHRAVSFRWACNKRLRQALICWADNSRHASPWAARIYESARGRGCDHPHAIRVLARAWVRVLWRCWQDSQPYRVEKHRAAA

SEQ ID NO: 338016 - protein, 426 aa, unidentified
MTEDVSRYKHFCQFRSTIRSATDTLIVGIDIAKDRHHAFFGTPLGKTLWRRLIFDNNKAGYDKLITQVNSLCAQHRLSKIVFGLEPTGNYHKPLASWLIQKEFMVVLVSGKAVSDNRDLLNGRWDKNDTKDSANVADLVGRGKCQFYDNPGPEIMALRNLLSLRKRLKREEHSIRMRIRNSLLSKFFPEMDCHWGSALEENLAIIKWYLDPKKIAATDFDIFVRHVTKTDRGIRQTRRLKAIYDAAGISVGMPVTASDLFEANMLVEKLGQIRAGISETMEQIKKISSSMQEDKPLQSIPGFGPYIAALVLSVIGNPFRFNNRKQVIRLSGFDLNANRSGRTSNSAVPVISKRGNGDLRYALYQAALIASYHNEHFRRIYHRMLKGREAERGIRTKMRVKLAAKMLIIAWTLMKKNEVFDPAYLSS

SEQ ID NO: 338017 - protein, 338 aa, unidentified
MNVTTYGLDVAKRVFQMYWIEAQTGEMVNRRFGREELIAFLAQRPAGRVALEACGSGHWWARQIKSLGHQVVLLHAKFIRPFVQTNQTDAADAKAICTAAGQPGMRTVAAKTEDQQAMLSLHRMRAQLVKIRTMQVNQLRGLLYEFGVTFRAGRLAGLGEIRRRMGEMEAMLPGKVLKGLHDQLKRIDGLEQQIDELETQIGTCQKQEAACCAIMEIPGIGRLTALVAMIGDARTFKSGREFASYLGLVPRQSGTGGKVKLGAISKRGDPYLRTLLIHGARSALSHAKAPTDWQKQIQARRPANVAAVALANKMARTAWALLAHDRAYQRHYVSVRPA

SEQ ID NO: 338018 - protein, 412 aa, unidentified
MLKIVYPICCGMDVHKSFVVACIATTNDHGVTNYKSKRFSTFTGDLRRCADWLSENNCKDVCMESTGKYWIPIYNILEHTCNIVLAHPKYVKAIRGKKTDKRDAKWIADIFKHDLVSGSFIPPADIRQLRDLVRYHWKLTNFNVGEKNRAQNCLTVSNIKLDDVFSDVFGKAASAITTRLLESNEPFDVKPYLTKNIKKPIEQIQAAVDGEMCAEQAEKLRIIRSHMDSLELCKLNLESLILSTAEKYIPQLNLVMTAPGIQSFAAIGIISEIGVDMSVFPTSKHLCSWAGLTPQNSESAGKKKTTRISRAGAYIKPLLVQCALCAIRTKQFPEVRNRYLALKKRRGHKKAIIAIARMLLTAIYNILKWNEVYNSELYRKADRPPAHREVSVEEAVFILQRQGYLVTAPAVT

SEQ ID NO: 338019 - protein, 326 aa, unidentified
MALKTSTIGTLAQPVIGVDVASKHLDAAVHGEPAIKRLNNRPASIAKWLDALPPGSVIAVESTSRYHEALVHQAHARGFVVYLLNPRDVRHYARGLGMRGKTDTLDARVLARYAAHEGSELRPWQPLSPEQRLLEELLRRRGVLVKHQGAIEQSLADNPGLRAASAALMGEFAKLLKQLDTQIKQACVALTRDSGDFERITSVPGIGLLTGAALLTLFLRLASRGADAVIAFLGLDPRPMDSGQKTGVRRLSKRGPAEWRRLLFNAAKSASRTKAWKAVYQHELSKRLSTTAAFNILARKLVRVAFSLYKSKSSFDASRVIAPEKA

SEQ ID NO: 338020 - protein, 344 aa, unidentified
MGEVITIGLDIAKNVFQVHCVDSGGAVVIRKRVSRLKVLEFFAGLPSCLVGIEACPSAHHWGRELQSLGHTVKLLPPSYVKAYLKRSKNDANDAAAICEAVTRPSMRFVPLKTREQQAALMLHRTRQLLVRQRTMLSNALRGHLAELGIVSGKGRNGTVELLGVIADAEDHRVPPAARAILEVLARQYRAIAVEIGLIDKSILAWHRTCEASRRLAEIPGIGPIVATALVAEVGDWQSFSSGRSLAAWIGLVPKQHTTGGKERLGHITKQGNRYLRWLLVVGAMAVIRYAKQHGAKNRPWLARLMQRRPAKVAAVALANKIARIAWAIMVRGERYREPKLLMAA

SEQ ID NO: 338021 - protein, 369 aa, unidentified
MNKFSKYVGLDVHQETIAVAVADTAGEVRYMGEIVNTPEAIAKVVGQLKRGTGRLAFCYEAGPCGYTICRQLRQLKLDCQVVAPSLIPKKPGERVKTDRRDALSLARLHRAGELSPVWIPDEAQEALRDLTRAREDMKHLQRQAKQRLLSFLSRHGHRYTGRSRWTQAHWRWLEGIKFARPEQQIVLQEYIDTVQACGGRVASLDREVETAAHASAVWPVIEALMALRGIGLLAAVTVVAELGDLARFSGAPQLMAYLGLVPSEHSSGKRERRGGITKTGNGHVRRVLIEAAWTYRHAARKTAILQRRAERTPPEVQEIAWSAQKRLCQRFRNLMARGKLKNQVCTAIARELVGFIWAVGQHVIPLSRA

SEQ ID NO: 338022 - protein, 313 aa, unidentified
MRFIGIDVAKAQLEFACRPTGETGTVPNAEAGIRDLVARCQTLGPALIVLEATGGYEAAVVAALATAGLAVVVANPRQVRDFAKATGQLAKTDALDAQVLAGFAERVRPTPRPLPDAAVQALDARLTRRRQLVEMLTAERNRLLIARPAVRRDLQQHIRFLERRLHDADHDLHRAVKASPLWRVRDDLLQSVPGVGRVVSLTLLAELPELGRLSHKEIAALAGVAPLNRDSGTLRGKRLVYGGRAPVRAALYMAALVASKWNPVIRVFYRRLRAAGKPAKVALTACMRKLLTILNAMARSGTPWQPDRSLARP

SEQ ID NO: 338023 - protein, 344 aa, unidentified
MTVATIGLDIAKSVFQVHGVDSAGQVVVRQRLTRRRVLAFFEKLAPCLIGIESCSSSHYWARELIARGHEVRLMPAQYVKPYVKRGKNDAADAEAICEAVTRPTMRFVPVKTPEQQSVMMLHRVRLMLNRQRTQLSNSIRAHLSEFGIVAPIGRRGLDQLLAIVADEDDARVPADARLCLQMLAAQIGVVKQQILENDRRVRASARETELGRRLMEVPGVGPLLASALVATVADPAAFKTGRDLAAWIGLVPKQNSSGGKERLGSISKAGNRYLRQMLVVGATAVIRYAERHGTRRPWLVQLMQRRSAKVAAVALANKMARIIWALMTSGEHYREPATVSAMAA

SEQ ID NO: 338024 - protein, 422 aa, unidentified
MLEETHDTEEIIARVAALDIGKAELVCCVRVPGEGKRGRRLQEVRTYTTMTRSLLVLADRLRQLGVTRVVMEATSDYWRPAFYLLEAQGFETWLVNARDVKHLPGRPKTDRLDAVWLCKVAERQMLRPSFVPPPPIRRLRDLTRYRADLVAARTAEKNRVEKLLEDAQIKLSVVASDIFGVSGRDMMAALIAGQRGPKVLAQLARRRLRAKLSLLEEAFVGHFSDHHGFLLATMLGRIDQASADIAELDRKIEAEITPFAAAADRLDEITGVGRTAACVIIAEVGTDMGRFPTPAHLASWARFAPGVRESAGKRKGTAATGHGNPYLARVLGEAAVAAGRTDTFLGERYRRIARRRGAKKAIVAVGRSILVIVWHLLADPNARFHHLGPGFYDTRSNPDRRKRNHVRQLEALGYKVTLQPAA

SEQ ID NO: 338025 - protein, 342 aa, unidentified
MDHFAGLDVSVKETSVCIVDETGKIVREVKLASEPDALAAVLANPAYHFKRIGLEAGPLSQWLYSALAEAGLPVICVETRHMRALLKAQINKTDRNDARGMAQMMRAGLYRLVHVKTLRSQKLRMLLTHRKLLQSKAIAIDNDLRGTLRNFGLKVGVVSAMKFEARIKELVENFPDLAVMVEPLLIVRRVLREQIGILHRRLLAVVRDDEVCRRLMTVPGVGPVVALTYRATVDVPARFRKSKSVGAVFGLTCAKYQSGEIDRSGAISRCGDEMMRVMLYEAAQSMLRSTKWSWLKAWAMQIARRRGMKKAIVALARRLAVIMHRIWVDGTEFRWTREVTVA

SEQ ID NO: 338026 - protein, 331 aa, unidentified
MAKVGKIIGTDISKSTFCVAYRKGTSVETRTWDYTQEQMDAFVETLDEECTVVMEATGVYHTRLAYYLYHKGIGVSVVNPLAAKNFARTLMRRAKTDKADSKLLMEYGETMYLEPWAPRETWCVEVQQTYAMLESKGKELTAARNRMEALTHSEVASGVCIKMVKADIKRLERDMACLEKEIERLVKANAGEDMRRIEAMPGIGRRTACVLIALTGSMKRFDSHRQVASYLGLCPRVYESGTSVRGKAKICKMGLESVRRMLYLCALSAKKYNKACRELYERLLEKGKAKKLALVAVANKLIKQAFAILKSGMDYDENHISEKKVQKMLAY

SEQ ID NO: 338027 - protein, 345 aa, unidentified
MKHTTTIAVDLAKSVFEIAVSDRPGRVSERHRLSRAVFLDFFAQRRPAMVLLEACGSAHHWARQIRKLGHQVRLLPPHRTRPYVTGNKTDQSDAKGLLEAQRNEQIQSVPVKSVDQQAISALHRLRSAWLAARTARINTVRGLLREFGIVIALGSKRVVPRVQELLEDAASGLPDSIRPALNEARLEILELERRMHSVEQELRDLSRQLPVVAKLSSIPGIGLITSTALFAFVGDVNRFSSARHFSSYLGLTPREHSSGLRRRLGAISKRGDGYLRMLLTHGARAVLWRAKLREDPDRLRAWVLRVEQRRGHNKATIGLANKLARIVWAVWRRDVEFVEQAVQAA

SEQ ID NO: 338028 - protein, 338 aa, unidentified
MSIVMGLDQHRGQITGEWIDTDTGEVQRTRVTPADRAHVRKWLTRFRGSELEVALEATTGWRFVVEELRRVGASVHLAEPAETAGLKGPKKRAKNDRADARHLRELLMVKRLPESWIPPDHILDLRARVRLRHTLSEQRGEWQQRIQATLYHHGCPQRRQLMTGDGREWLAAQSLPAAARETVAVALAMIDSLDRQLAPLDRELRAYARRQAGCKALMGHYGIGPLVAVTILAELGDCTRFSSSRLAVRYAGMDITVYQSDQHRAPGHLSRQGPPALRWALFEAAQSACRRGSPDLEYYRQAAARVGHNRACLSVARKLLKRSYHTLRELGEEALQPA

SEQ ID NO: 338029 - protein, 355 aa, unidentified
MNQEKYIGMDVHQATISAAVMDSSGKLIMECILETKAATILEFIDGLRGTLSVTFEEGTPAAWLHDLLKPHVSHLVVCDPRRNALLRDGSKSDRIDARKLAELLHANKLHAVYHGEHGVRTLKELGRSYLTITKDLARVMSRIKALYRGWAIPCSGATVYAPRHRDEWLAKIPHPGVRLRAERLYQQLDVLQPVRQEARRDLLAESHKHHAVKLLRQIPSIGPIRAALLVALLQTPHRFRTKRQLWAYSGFAVEIHDSGEYRYVRGKLQRNRERITVRGLNRNHNHDLKNLFKGAAQSASTRPGPLCDFYVALVEKGMRPTMARLTLARKMAAITLIIWKKGVDFDAKQLNQQAA

SEQ ID NO: 338030 - protein, 416 aa, unidentified
MNAVGIDVSSRKSTVAVLRPLGEVVCLPFDVTHDIAGLASLAEKLKALDGETRVVMEHTGRYYEAVAKALHEAGLFVCAVNPLLIKEYGANSLRRVKTDKADAVKIARYALDNWADLRDFTPMDAIRYDLKTLNRQFQLASKQRTASANNLIALLEQSFPGIRKCFDSPVRSDGTQKWVDFAHSFWHVDCVRKQPFAAFCERYRKWCKRHAYLFKQSNAEEVYALAKRAVVLTPKSKVVKVLVQEAANQLISISRSVEVYRAEMDRLAAMLPEYPVVMAMYGVGKSYGPQLMAEIGDVRRFERKQALVAFAGIDPMPNQSGDKNVRSNKSSKRGSPYLRKTLFNVIRTYLQCAPQDEPVFQFLNRKRAEGKPFYVYMLAAANKFLRRYYAKLRDYFASLDTLQSVDPIPATLKASL

SEQ ID NO: 338031 - protein, 401 aa, unidentified
MAFVAGLDWGGAQHAVCVLDRESGAVVDRFEVRHDAEGLRALARRLARFGDAADLPVAIERPSGLIVDALIAAGHPVVPIHPNAAKAARPRYRASGARDDRGDAYLLADLLRTDGHRFRPLAPVSEAIRALRALTRGRDDLVGTRVALANQLRSLLEGFWPGAAAIFADIDSPIALAFLARYPTPQSAARLGGKRLAAFLAAHAYCGRRSPAELLARLRAAPAGLAGEAEAEAKGELVRALVAVLAPLVARIAELSARIRHAVADLPDGRILMSFPRSGQVCAAAILAELGEDRARYQSADQLAADAGLCPVTYQSGRSRGVGFRWACNRRLRAALTCFADNSRHASPWAARVYADARARGCRHPHAIRILGRAWTRVLWRAWIDRRPYDPAKHPAPAARG

SEQ ID NO: 338032 - protein, 320 aa, unidentified
MKQAIFVGVDVSKKQLDVAIRPLGQVFGVSNDRRGIAQLVKRLKKLQPVCIAIDATGGLEKELAYALAAENLPVAVVNPRQVSNFAKSTGQRAKTDAIDAAVLAHFAEVMKPEVRPLPDAASRELSALVTRHRQLVEMMTAESNRRDLASKAVRKLINSLLRSLKDQLAVVDREIRKAISASETWRRKAELLRSVPGVGKVTTATLLAGLPELGELDRRQIAALVGVAPFNRESGTWKGKRMIAGGRGWIRSVLYMSTVVAVRRNPVLKEFYERLRAKGKPAKQALTACMRKLLVILNAMFRRQTHWSAPNSLLSLSVAS

SEQ ID NO: 338033 - protein, 350 aa, unidentified
MNNSLSAFDPCGIEVSHLTLLVALRCGDHDQSPREFPNTAEGHQSVLRFLARSGRRVQVAVESTGLYGLDLALALHHAGVSVMVANPRAVRHFAQAMLQRSKNDQLDSVVLREFAARMPFEPWRPPSAAALKLVSVARRLEALTDMMAAEKNRLHAALLSEALPAIIRRDIQRSIQTQQRAIDRLTRAAQEFIAEDPTLARRYELLISIPGFGATSAVHILAELNMLPAGMDVRQWVAYAGLDPREYSSGTSVHKKVRISKAGNKHLRRALYMPALVAVQHQAQVRGYYEHIQARGKNKMQALVATMRKLLHAIYGMFKHDQLFDGRKFYAALDVTAPAPVLEPQEVLCP

SEQ ID NO: 338034 - protein, 384 aa, unidentified
MQASNVRTPIACHSGTIFVAIELSQRRWLVTMHSPDRNRFSRHPVEGGDAPKLLGLIERIRARAMQALGSQPRVVSCYEAGFSGFWLHRRLEAAGITNFVFDPASIAVDQRARRVKTDRIDGELLLRTLMAYCRGEPRVVRIVRVPSPEQEDARRATRERERLVKEQTAHTNRIKGLLRLWGVAAGNPRRRDWATWLKVQRDGNGCLLQPQQLAELEREHARLMLVSEQLRELSQDGQAPASAAAAEMARRSATLQRLKGLGPVFATTLTNEALYKDFHNRREVGSYVGLAPSPWCSGGTNREQGISKAGNPRARATAIELAWLWLEHQPQSALSRWFHERTAHGRGRIRRIAIVALARKLIVALWRFLTTGLVPEGAVLKAVA

SEQ ID NO: 338035 - protein, 336 aa, unidentified
MFQLGIDVSKKTLDLCLLREGVKGSVKTRKLQNDINAVNAVIAWLSKQHCKPEDVHIIMEATGVYHESLAYGLHKAGGRISLANPHRAREFARGMGMLTKNDRVDAYMLACYGALKAPEPWLPPPEEVRHLSALLRRRDALVADSTREKNRLEKYLTTDTPSVIAESVEAMIGQLNAEIKRLDRLIRSHLNQHPELKKDFDLLTSIKSVGYQLGLNMLVILRSHDFATAEQAAAFLGVVPVEKYSGTSVRGCPKLSKIGPPEIRAKLYLASLCGLRFNPLMKAMYERLCLRGKGKMCAIGALMRKLVHWCYGVLKTQKPFDVGYLSSYARSACKAA

SEQ ID NO: 338036 - protein, 353 aa, unidentified
MKNSSKTRTARADREWRTEGGLTIGMDLGDKESSVCVLGADGEIRHQDRVRTTEPALQAAFSRVEPSLIVIEVGTHSPWVSRLLRALGHKVIVANPRRLKLISQSDSKSDRVDALMLAELGRAMPRLLNPVQHRSAEAQADLAMVRARTRMVEARTKLWNSLRGIAKSMGPRLPRKVKREHLGCYGDRLDPLWEAVQKLSDGIQEYDELLEKLEEKYPAVQRLKKITGVGTIIALTFVLTLDDATRFHKSRQVGSYLGLRPQQRDSGQRQPQLPITKTGDRYLRSLLIQGAQYILGKFGPDTDLRRWGLSLASRGGKAAKKRAVVAVARKLAVLMHRLWVSEQEYQPLRMGLA

SEQ ID NO: 338037 - protein, 341 aa, unidentified
MQTKRYIGVDLHRNCFTACVRLENGREYLKEWKLREIEKFVVKLRTTDQVAVEVTGNTRLFHDAVAPHVERLVAVNPSQFKVITHSVKKTDPNDARNLALYLAKDLLPEVRMKDKTQAQIASLTQTRDTMVKVRTSLKNKVNNICSAQGVNLNKETLSSDKGLNAVLKMHFDVLINLEIKIIVDQIRSLNKSIAELEETISNEGQKLEGHKNLTSIKGIGGLSGSILLSIIGNINDFAHEGKLAAYFGIVPRVSNSNETEHSGRITKRGTKLGRTTLIQCALIAQRYNPYLKAYYERMKSRRGTGKAIVALARKFLGIIYRTLKNNWVFADFPNFVLAEQA

SEQ ID NO: 338038 - protein, 420 aa, unidentified
MSVQEAAVSLLQRVLFYVGIDWAAETHAVCVLDATGRIRAQFTIGHTAAGFADLLRRLARLAGDPAEVAVGIERPDGRLVDVLLEAGYPVVPVSPNAIKTWRDGEVLSGAKSDAGDAAVIAEYVRLRAHRLQPATPYTAETKALRTVVRTREDIVDMRVAAANQLSALLDAHWPGAKAIFADVESAIALAFLTRYPTYLSARQLGEKRLHAFCVKHGYSGRRSAAELLTRLRGAPAGSTDEALTDAVRDAVLAQVAVLTALTAAEKNLGRSVIAHLGEHPDAAIFTSLPRSGQINAAQVLAEWGDSRAAYDSPDAVAALAGVTPVTKASGKYRAVHFRWACNKHLRKAITCFADNSRHASPWAADVYARAIARGHDHPHAVRVLARAWIRVIYRCWIDGVPYDPNKHGNAGKLRETATAA

SEQ ID NO: 338039 - protein, 316 aa, unidentified
MLYVGIDIAKNKHDVTALNVRGKTVLKPLTFSNNKAGFELLDLSLRQLNQDYLIALEDTGHYAFNLLNFLHEQEYKVYTYNPLLIKKFAKSLSLRKTKTDKKDAHGIALKLLSDPNREQFQHDNRQVELKILARHIHRLKRKQSDWKVQYTRCLDIIFPELDKIVGKHSEYTYQLLTRYPNPQKRLEARFDKLIEIKRLTASKIQDILSVAPRSIGTTSPAREFEIIEIIKHYKRLIDKAETCVNDLMAEFNSVITTVTGIGGRLGAVILAEIRNIHAFDNPAQLQAFAGLDSSIYQSGQIDLAGRMVKRGSPHLR

SEQ ID NO: 338040 - protein, 330 aa, unidentified
MKKYVDVIGIDVSKLTIDAHIYNRGVHRVFSNTSKGYKALLSWVEKHLGKDLCFFCFENTGHYSTNLSVYLSENNIDYVEESPLTIKRSSGIVRGKTDQLDSAMIARYAWLYKEELTLSSPKAQDIQELGRLLSFREQLVRDRTGKMSSLKEMQTLLSSPSTDDCCIIVKKMIHYLTKQITTLEQSIKKLIRSDELLEKNYQLLNTLKGVGLILSCQLLYHTNNFKRFDSWRQFSSYCGVAPFEHSSGTSIYRKNRIHKIGDRKMKTLLTLASVSAIQCDKELKQYYEKKVAEGKPKLVALNNVRNKILSRAFAVVKRGTPYVELQKFAA

SEQ ID NO: 338041 - protein, 464 aa, unidentified
MSIDQKRQNRKERKELARRLRSQDPGLEVVHPQAAGIDVGNSAHYVAVRPDCDPEPVRRFECFTADLHRLADWLQSHNVKTVALQSTGVYWIPLYDILEERGFEVYLVNARHTKNLPGRKSDVQESQWLLKLHTYGLLNNSFQPTSEIRVLRTYWRQRAEHVGGLTTCIQRMQKALTQMNLQLANVISDLSGVTGQRIVRAILAGERDPRRLAELSHWRIQASKEDIAKSLEGNWRAELLFVLQQEVEMYDIYQQRISECDSQLQKHLVHFESIAFPQPKQKEFKTKKGRRNKNTPQFNLRDELERITGVDLTRIDGIDVMVAQTLVSEVGLDMSRWKTEAHFASWLGLCPDNRVSGDKVLSRGTRRVVNRAATALRVAATTLLKSLTYLGAQYRRLRTKLGAPKAITAMAHRLARLVYRLLKYGQHYVDKGAEYYEQRHREQQIAFLSKKAAQLGLQVTALHP

SEQ ID NO: 338042 - protein, 350 aa, unidentified
MIIIGCDYHPSFQQIAFVDTDTGELQERRLQHREEAERFYRDLAGQRVKVRLGMEASGHARWFERLLAELQFELWTGDAAAIGAKRVRKQKTDRQDAQLILRLMLKDDFPKIWMPDGENRDVRQLLWHRHRMVQARTRIMNQLQAVALNEGLHCKKRLWRDAGREQLESFRLAPWASRRREDLLELLDRLTPTIAELSAAIEKEVERCPAAQRLQTHPGVGALTALAFVLIIGRADRFECGKQIAAYLGLVPLEDSSGKRRRLGHITKQGNSLLRFLLVEAAQVTVRSLPEWRSKYCHMALRRGRKIAKVALARRLAVRLYWMMRKGWDYEQLRKFGSYAGKPGNRDGVM

SEQ ID NO: 338043 - protein, 337 aa, unidentified
MLTCHAQIPPMKKNTAHTYVGMDVAKATLQVHLNSHQFEFPNNAKGHAQLCKKLAPLSLPQVICEATGGYEGAVVEAFHKAKILVSVLNPAHTLAASQAQGKRAKSDPCDAEALTDYGRRFQPQPTAALPPAQRAITELTLWLKQLIDNRAVVKAQAEHHANPFVVEQHAALLAHYQSQIETVEQEIKKLVQAQPKFQQRVDCLTEIKGVGFRTALLTLVYLPELGSMNRGGTGALAGLAPWARDSGTKKGKRSIGGGRTHVRPVLYMAALSASRSNPVLAPFYKGLVKRGKLKKVALTAVMRKLLVYMNGELKKLAAKPAPEIPEKSNKPRKSLAK

SEQ ID NO: 338044 - protein, 319 aa, unidentified
MNTTNRKHIKSSERNIGIDVGKETLDIYVYETDGYWQETNTEDGIRRLIHRLKRFHLTRVLVEATGGYERSFVEASTEHDIPVIIVQPIQVRQFARAQGLFAKTDKIDARLIAQFGVRMEPRVKSLPGKKVRLVKDLLARKRQLMEMRTMELNRYQKAQKIVEPSHRRLIKLLDKEIESINQKLTTEVASVEAWQRTYEIVSSVPGIGDGVAFTLLGELPELGRINNRQIGALCGLAPFNRDSGKMKGKRRIRGGRAPIRTVLFMAMLSAIQHNPVIQRFYKRLVALGKHKKVAITACMRKMMTILNTMVHNNAEWQMN

SEQ ID NO: 338045 - protein, 371 aa, unidentified
MGKSITFVGLDVHKNSIEVALADAGREGEVRHYGAIDGDLDSFSRLLRKLVSTGKELHFVYEAGPCGYEIYRYLTAKNFDCAVVAAPAGDPTKGGRKRIKNDRRDAMTLARLHRAGELTYVFVPRADDEAMRDLTRAREDVSNAQRVARQQLSGMLLRTGVRYNGKTSWGLAHFRWLAKIKMPTPAQQVVIQEYIHAINETTDRLERLTQQIAELAPAWRMFPVLQAYQALRGVSLIVAATVVAELGDLTRFDNPKQVMAFLGLVPSEHSSGEKTRKGGITKAGNGHARRVLTEAAHAYQFPARVSRAILQRQEGLDKAILDIAWKCQVRLCSRFRRLMAKGKNRKTVVTATARELIAFMWAIAKQVPVAA

SEQ ID NO: 338046 - protein, 419 aa, unidentified
MSFKILKNNCCGLDIHKTWIYACIGITDSFKRTEYKEARFSSFSKGLQELCDWLSKYNCTDVCMESTGKYWIPVFNILEKNNIWVTLSHPKYTKPQKGNKTDRKDAKWICDLYMCGMVKPSFIPPADIRELRDLVRYRFKLTCMITGEKNRAHNCLTVSNLKLDDVFSDIFGKSSRSITEQILQHPGETFDVSPFVDGRCKTPIEEIQAAVDGAISKEQAAKLRQCLNHIDELEMHKAEIEREIFRLSDKYECVLNLIRTIPGFDKNPLTAIQVLSEIGGDMSVFPTAKNLVSWAGCCPRNDQSNQKIKSTRISRAGSYFKPVLVQVANALIKSKKHPEFTTRYRRIKARRGHKKAIIAICRMILTAIWHILTDLKPYTSDGFLEARSVNKEKVLTTSQALNLLKQRGYIIKDVVVPVT

SEQ ID NO: 338047 - protein, 366 aa, unidentified
MSKEELDKKIEVVEKELRSYTWRELEANGKFAKNDKLSFITDDMLIVGCDIGSENHYIRAIDVRGRELSRGAFEFSNTSEGFENAKAWVLALAAKHDKKQIVLGLEPTGHYWFALAAWMISNGISVVQVNPYAVKQSKEIENNSQLKDDRKDPKLIANLVKDGNYGMPYLPEKVYADMRRLSMFRDQLTEDRIRNINRLHRELKIYFPEYMDAFGKIDGAFTLEILKVSAIPSDITALGAEGMKNIWHNAKLRGRGYSRANEIVSYAEKSVGLTDGTDAGREAVKWYAEQILRLDEQLAEIESALHEKCREIPYAENILAINGVGENILAGILAEMGDISRFDDVKEIQKLSGMGLVACSSGKHKG

SEQ ID NO: 338048 - protein, 337 aa, unidentified
MKFSGIDLHSNNSVVVVSDEEDRIVYQKRLPNNLEQIRAALAPYREELAGVVMESTYNWYFLVDGLMDAGYRVHLANTTAIKKYEGLKYSGDFADAAYLAQLLRLGLLPEGYIYPREERAGRDLGRKRMQLVRCQTMQILAIENILARQTGGRMSSERVKRLTAKQVEELDLVPDVALAVEANRAVSAALQQQIAVLEKRLKQRVKLRPEYRLLKTVPGIGETLATTIMLETGTITRFASVGNFSSYCRCVESRRESNGKKKGEGNVKNGNKYLAWAFVEAANFALRYCPEAKRFYERKKRKTNRIVAIKAIAHKLARACYHMLREQKPFDVQRCFV

SEQ ID NO: 338049 - protein, 417 aa, unidentified
MQDNYRLKHTFVGVDLHKATHTAVMVNCWGDKIEEITIENRPAEFDKLLKFAKKHTPKGMTAVFGLEDVGGYGRSLAVYLLEKNQVVKEVNASLAHDRRKSNPMYRKNDSWDAQCVADVLKDKMLELPDANPQDIYWTISQLVNRRDAIVKAQTALKNQLHGQLGHNYPSYKKFFSKLDGKSALAFWEQYPSPKTLVGVDVEELAKYLRKASRNACSTKKAKAILELVKADGDTEREYQETRDFLIKSHVRDIRFKVEELSLIEAELEQLMSKLDYQLETMPGISTVIASQLVSHIGDINRFANANKLARYAGIAPVNFSSGGKGKDSKCKLGHRPLHGIFYNLAKQQIQISKGSGEKRNEAFRDYFDKRVSEGKTSGQAMVCIMRRLVNIIYGMMKNKTAYRPYIASKEPIPAKVA

SEQ ID NO: 338050 - protein, 332 aa, unidentified
MLDGAGEVTEEGTVAMARPAMTKFFAEQASSRVVLEASGSSRWTAQLALAAGHEVIIGNPRKLRHITRSYTKSDRNDAYKLADLGQVRPRLLSPVGLRLDKSHCGRMRQRVRTQLIEIRTSLIHLVRGCARSSGHALPKCSTPSFTRMCAKHQPEGYKQILGPALAQPAALQEQIVAVDKETARLGEDVFPEAAIMRQVVGVGPVLSLAFVCAVDEPTDFAESRSVGAYFGLAPKSKQSGDRSPQPRISTQGDPEVRRLLVSAATYILGPFGPDCDLRRYGERIRASGSQGARAKARIAVARKLAVLLHRLWMTGEVYEPLREQRLATRVAN

SEQ ID NO: 338051 - protein, 342 aa, unidentified
MSVYVGIDVHRKRSQVAVINQDGQVLANRNVPNGAEPILKVIGGLPPGTPAAFEAACGTSWLAGLLEDYGFAPHLVHPSRCKAIASARLKNDKVDAAILGQLLRADLLPEAWIAPAPVRQLRALLRHRVALVRLRTRLRNRIHAIVADYGYDRPGGGYWTGPGRAWLASLELPAVSRELVEDYLGVIDALQQRIDRLDWEIRQRARAGPRVKVLTQLPGVGPFTALVILAEVGDISRFGSARQLASWAGLTPTVRGSDRVAHCGHISKEGSGRLRWVLCEAAQTAKRSPEFAVTFQRIAKRRGKKIATTAVARKLATRAWHLLADAGHAAAPPPAAPQTAAR

SEQ ID NO: 338052 - protein, 345 aa, unidentified
MVTTIGIDPHKATHTAVAIDESETVLGELTVPADRDQTKKLMDWAAGLNGDGRLWAVESAGGLGYLLSQQLVAGGEQVVDVPAVLASRVRVLSSGKSDKNDPNDARSVAIAALRQPGLAVVRREDHAAVLRMLAKRHLELTSLRTQAVCRLHAVLMVLKPGGMRRRLSAKAASRMLQGMRSLDTVGEQRRLGARAHLGDIRRLDRDIKANKTLIRHAVAVSETTVTDVYGVGPIVAAFLIGYTGDPGRFATSDRYAAYNGTAPIEVSSGGNKRHRLSLRGNRRLNHAIHMAAVTQIRFDTPGRVYYDKKLTEGKTKKEALRALKRHISDAVYRRLITDQQHATTS

SEQ ID NO: 338053 - protein, 403 aa, unidentified
MEDNPMKYYVGLDISNIDTSICIVDQEGNIVKEAKVLSDPASIDAYLQKTGMQFEAIGLEAGALSHWLVNGLREKKWNVICIDSRFMAAILTTNINKTDRNDARAIANAIRCKNYREVHIKSIESVKTNCLLTARKILVRQKQQLKGTIRGLLKTFGIKLGKGSECIRSDIQGVLLLEESTPNEYTLSAHVDWSVFESLIVCVEKLGEQLKVLDHKLDALARSDKVVQRFLTHPGVGVVTAFSFKAEIDDPTRFKKSRSVGAYLGMSPRQFSSGETIKQGRVSKHGSSEVRALLHEAGVVLITRTKAKSKLKKWGLKKKQKMKTQKTGMAVGRRIAINLHQMWIKDRDFDPQMDVGELDCGESVQRKPKEKKTKQRNVDECCHKMKSKKREAEKKEKKGNKVA

SEQ ID NO: 338054 - protein, 275 aa, unidentified
MYYIGLDIHKKTISYCVKDAAGCVHREGKIGSSRRELDAWIGTLPQPRMMAMEATIFTGWIYDYLLPHAEKVKVAHPLMLRAIAAAKKKNDKIDAAKIADCLRCDFLPECHIAPTEIRDRRRVLRYRNLVVKQMTQMKNRVSGLLMETGVSYNKQRLHKVGYFGEMMSTNADINDAVRPLLNLSRGMIRRSGKLEYDLVSSLERDPLLKERLRRLRTVPGVGSITALTWALEIGDYTRFSSNRQAISYCGLCADEKSSADKVMRMPLSKQRNKHI

SEQ ID NO: 338055 - protein, 482 aa, unidentified
MKKKNIYTNQSQELLTLFEEAGNGVKVMCVPIDYAKKDHVAMLCNGHGHILRKPFSVKNSLEGIEYLTKQVTRSCSHRQIDLKHVFFGGEDVGSYAENFVNTLRSGGWIVAGVNAHDAKEQRANMQASTDRLDLMGIASMLLNRRGNCSPAQSGIYRNLRTVVRHRRKLVAMSTEVKNRMHTVVDRLFPGFLDEKKSGICSFSKSSLYLMENRFSPHQIRRRKRKKLIEILDRCGTAKPESTAAKLQEYATRVLNTPNEYINTLQFSLAQHVKHLRCLQDSINQLEHEVAVWLAQTQGAFLTTFRGIGIVLAAGVSAEIGNPHEQKPLNNLVSYTGIIPKVKQTGGSEGKTYTGKVAKRCNHILKDYVVQSGNHMGLHGPGDLMADYKRREAAGQHADFGIGRRYLRTAMCLMRTSQIYMPERLRNTEVKPEERATYYLAIWPYLRGKWNKAGALKAAFGKDRPLGQWRCMVQELYEIKLKL

SEQ ID NO: 338056 - protein, 391 aa, unidentified
MSMYFVGIDISKYKHDCCIISAVDQQIVSKFTITNDKDGFEQLLISLNSLSNPEDIKIGFESTAHYALNLELFLENANHSFMEVNPVLIKEYKKSTTLRRTKTDSVDCESIARWLMTVEYKPHSKGFYHAYSLKSLTRLRDRLIRQRSFYLVKITNVLDHTFPEFKPFFNERLSKTAIYLLENYGSAEKMAHMNSASYDKLRCISRGKFSIQQFLHLKELAANTVGVNNSIFDIELNSLLTLYNSLCKEIKNLEAEITRLIEEVHPHYMSIPGIGPISAAVIYAEYGDISNFSNPSQMLAFAGIEPGINDSGTESHGGRMVKHGSSQLRYVLLNACLPLIRFDLTFATYYAKKRAEGKKHRVAITHVAKKLIRVIYALELSLIHISEPTRH

SEQ ID NO: 338057 - protein, 463 aa, unidentified
MQENRNTNSKPENEAAVEGLPVIRPNVAGIDLGSETHWVCAPNVDRTDVEVETFGATTPELERMAEWLKERKIESVAMESTGVYWIAPHEVLERHGLEVVLVNTRELARVPGRKKSDRVDCRWTQRLHSCGLLSGSFRPSEPVCMLRTLVRDKANLLAEAADWLRRMQKSLDQMNVRVHRAVSDIDGVTGMRIVRAIVAGERDARQLAKLRDRRCGKSEEEIAEQLSGHWREDHLFSLAQALKMYEAIQERIGEYEREILRQLGEMERAECRGQEPPKVTNPQKAKAIKKRGEEPLREALYRISGVDLTGIDAIGVETVQVVLSEYGPDLSKFPTEKQFVSHVTLAPHKPMSGGKAVKKKKRGSASTRVAAALRMAALSMRHSQTALGAYYRHIARRIDGDVAVFATARKLAQLIYRLLRWGQPYVDEGAAAAEKRYQEAYIQRLAAQAKSVGFQLTPKISTT

SEQ ID NO: 338058 - protein, 417 aa, unidentified
MSQSFLFFVGIDWGTENHSVCVLDREGNKVAECQARHSGTGLQQLVDWLRQQTGVAPDQVAFGIEAPAGAVVDTLLEHSYPGFHINPKQMDRFRDRHTVAGAKDDSLDAYVIADSLRTDRPCFHPIQLDDPQIHRLRTLSRLEDDLGQDWSRLTNQLRQQLHRYFPQMLELSPAADEPWLWELLQTAPLPAMARKLRCSQVQKILARYRIRRFSAQQVREKFQTPPLPVAPGVAEAASEACLLLILRLHLLAQQRKHVAQCMKAILADLAEDSHRKGHRDVQVLSSLPGVGRIIAATMLVEASQPLANRDYHALRAYGGVAPVTRQSGKRRQVIMRYACNQRLRNALYHWARVSLQNDDRSRAHYHGLRKKGHSHGRALRGVADRLLAMLVSMLRSGNSYDPRRRSPNQLDAELLAS

SEQ ID NO: 338059 - protein, 404 aa, unidentified
MYNAVGIDVSKGKSTVAVLQPGGTVIRKPFDVFHTSHSLNELTNYLDTLDGDTRIVMEGTGRYHEPVLKALFQAGLFVSVVNPHLIKNFGNNSLRKVKSDPADAKKIARYTLDNWAELRQYSGMDNTRTQLKTLNSQFSFFMKQKVAAKANLIALLDNTYPGVNKLFDSPTREDGSEKWVDYAYSFWHVDCVRKIGLKTFTDRYRAFCKKHHYIFQTDKPEKLFNASKDLIAVFPKEKTYKLLIQQIIQQLNLASEHVERLRIEMNELASTLPEYNTVMGIYGVGKTYGPQLIAEIGDVSRFTHREALTAFAGVDPGVDESGQHKSKSNRSSKVGSARLRKTLFQIMTTLLQNAPEDDPVYRFLDKKRSQGKPYYVYMTAGANKFLRIYYGKVKECLRNLEQES

SEQ ID NO: 338060 - protein, 355 aa, unidentified
MNKIRTNFEGQTIYIGMDVHKSSWNLGIHLNDIFVKNVHQKPNPQLMVDYLHKNFPGAIYKAAYEAGKFGFWIQRQLTALGINCLVVNPADIPKSQKDSLQKTDPRDARNISLRLQSGFLRGIHIPDEQQEADRVLFRHRKKILKDLNRCKNRIKGLLAFTGIDIPEPYDNANWSHNFINWLKALDCKQTARRRALDYQIRQMEFMRKELLSISNEIRKMMREQRYKNNYYLLRTIPGIGPLTAASILVEIGDVKRFNTFSHLNSFIGLLPMEHSSGQSENKMSLTVRKHRQLRSDLVESAWTAKRTDPAMALYFDQQIKRKDSKVVIIKIARKLLNRVRYVLLSQQPYQFGIVK

SEQ ID NO: 338061 - protein, 334 aa, unidentified
MAKITTVGIDLAKNVFSVHAIDENGAVLIRKTVSRAKLTAMVAQWPACVIGMEACSGGHEWARRFQALGHTVRIMAARFVAPYRKSSKNDGNDAEAICEAVLRPNMRFVPVKSAEQQALLSLHRVRQGFVEERTATVNRIRGLLTEFGAVLPNRVIEVRRGAARAAESLPGLARHAIEDLLEHLRALDARISAYERELEQLARSSEAATRLMAINGVGPMTALATVASVGAAHEFANGRQFAAWLGLVPRQWSTGGKTRLGHITKRGDAYLRTLLILGARAMLQMAAHRTDKLSRWALAVKARCGYHKAVVAVAAKNARIIWALLASGSTFRNT

SEQ ID NO: 338062 - protein, 414 aa, unidentified
MKTLSKTLLVGCDVSSQLNTVCLMDPEGKKIGSQTFSNTLSGAQALESWLLKTLKENDFSELKIATEATSFLDLHLVDFLASSQLLAPFRPSIYQFNPRIVRNFKKAYSEKEKTDKVDAFVITDRLRFGRLPEPYETHQPYLPLRRLTRYRFHIVKAINREKAYFLTHLYLKFSAFSMEKPFASLFGATSLAVITDFSPDELVHLPLEELTQFIIDNGKNRFKDPQKVVETLQRAARESYRLRPALASSIDLILATILQTLRALQEALKEVDRAIEKEFKAFPNTLQSIKGIGPVYSAGIFSEIGEITRFPREDALAKFAGLTWKRYQSGNFEAEETRMSKTGNDYLRYYFIEAANALRVHNAEYQAYYETKFKEVTKHQHKRALALTARKLVRLVYALLKKGQLYRANYQQEA

SEQ ID NO: 338063 - protein, 400 aa, unidentified
MNAVGIDVFKGKSTVAIMRPFGEVVAEPFEVLHTDTELRKLACFLEKLPGETKIVMEYTGNYWQPIANVLHDAGIFVSIVNALLIYKYGNNSIRKGKTDKLDAVKIANYCLDRWTVLERYTPVDQIRQALKTCRRQYDQYIRLKVNLKNNLIALLDGTFPGLNILFKSAPRDMDGHEKWVDFAEKFWHRECICGNSEKAFTNQYKKWCAKAGYRFKEEKASSIYAHAVSQVNTLPMTDSIKCLVTLAVSQLNTIIETISVIQHEMLTLAAQLPEYPVVMRMFGVGPVLGPQLMAEIGDVRRFDRKQSLVAFAGVDAPPCQSGTFESKNRHISKRGSPRLRKTLFQVMSTIIQHAPTDDPVFQFLDRKRREGKHYYVYMTAAANKFLRIYYGTVMAYLKKL

SEQ ID NO: 338064 - protein, 424 aa, unidentified
MSKKKSRVAGLQALYARACGLDVHKKLVVACVRILDSKDGTVQSTLRKFGTMTADLLELRQWLAELKVTHVAMESTGVYWQPVFNLLEGHFKVWVVNAQHIKKVPGRKTDMKDAEWIAQLLQCGLLRPSFVPERQQRELRDLTRQQTKLVQQRNAVDNRIQKVLETANIKLGSVASDVLGVSGRKMIEGLIAGEKDVTALADLAQRQLRGKIPELQRALEGELTEHHRFLLRQLLGQYDFLEKEIASISERLGAVAPPSFRAAVEQLDAIAGVGERGARALLAETGTDMSRFPTHKHFASWAGRCPGNHESAGKRRSGKTPAANRHLDAVLTEMAHAAVRTKNSYFKAQYHRLAGRRGKKRAIGAVKHSLLVTVYFMLRDNRPYKDLGVDYFDKLNPQQRIRYHVRRLQELGQEVELSPMADAA

SEQ ID NO: 338065 - protein, 408 aa, unidentified
MNPLFVGIDVSSRSNVAYLMKPDGSKHSSFSVQNNLGGAKMLSERIVSALSSMRLSDVVIGLEATSIYGNNLVYALREDGSLSRFQRKIHVLNPKQVKKFKEAYPDLPKNDFVDAFVIADHLRFGRIAKEVYMDDYRYQALRTLTRARFDVIQNLTREKQRFANYLFLKCSGIAQEKDIQNTSATTIALMEHFETVDDLANTDLDELTDFIAQAGRGRFVDPDATARAVRAAAKGSYRLPKTVNDTVNQAMSVSIASMRALKEQVKVLDKAIEQQLEIIPNTLTSIPGIGKVYSAGIIAEIGDIHRFDSQASVAKFAGLVWTQYQSGEFEAEHSRMIKSGNRYLRYYLLEAANSVRRCDSEFRRYYDLKFKEVNKYQHKRALALTARKLVRLVFRLLKDNRLYIPSEG

SEQ ID NO: 338066 - protein, 414 aa, unidentified
MKETSFAAYIGIDWADRKHDFAIYDVASGNIRRDFVAQTPEAMQSWLNELTQSYAGQLIAVALEQTRGALFSALMMRENLVLFPINPAALSSFRDALYPSHAKDDPVDADLLMRLIRDHGDRLRPWKPDSVATRTLRRLGEDRRRLVEARTALTNQLTASLKESFPQALQWAGGLQTKQACDFLETWPTFSDVQKASKSQLIKFYREHRHSLRWAEERVAEVRAAVPATHDQALIEVGSFVVESVVGRLRALSVSIASYDARIAELFAAHADAPIFASLPHAGAALAPRLLAAFGDDRQRFASAQEVAEFTGIAPVQRRSGRTKTIHMRIACPKFIRQTFHEYARLSIGASSWAKAFHDEQRSRKKGRHAILRELAYRWIRILFRCWKDSVAYDEAVYLEQLIRRGSPYAKQAA

SEQ ID NO: 338067 - protein, 460 aa, unidentified
MGKRNKSLENLVVVQPNAAGLDIGAQEIWACVPAGRDTETVRRFSTFTPDLQALVAWLIACGVETVAMESTGVYWIPVFEMLEARGLKVYLVNAWHLKHVPGRKSDYLDCQWIQKLHSLGLLNGSFRPDRELVGLRGYLRHRAQLLEHRAPHILHIQKALQQMNIQLHHVLSDVTGVSGLAILRAIVAGERDPLKLAQLRNPGCKSSDETMVKALTGDWKAEQLFILQQSLELYDFYTRQVAACDAAIEKYYSAMKPRWDGPAEPPEVPRVKPGSKSKNQPQLNVRQEIIRLTGVDLVAVDGISASLAQIILSESGTDMRQWLNDKHFGSWLGVAPHNDISGGKVLRSRTLPTNNRAGQAFRQAAASVTRSQSAFGAFYRRKKAQLGPMQALVATAYKIARTVYAMLKNRVQYHDLGAEMYETKQQERELAYLKKKAAKLGFDLSPHDPAKAVAQAVAMV

SEQ ID NO: 338068 - protein, 401 aa, unidentified
MAAGQVWAGVDVGKEHHWVCVVDDSGKVVLSRRLVNDEQPIRELVAEIDELAERVSWTVDLTTVYAALVLTVLTDTGKTVRYLAGRAVWQASATYRGGEAKTDAKDARVIADQARMRGQDLPVLHPDDDLISELRMLTGHRADLVADRTRTINRLRQQLVAVCPALERAAQLSQDRGWVILLTRYQRPKAIRQSGVSRLTKVLTDAGVRNAASIAAAAVAAVKTQTVRLPGEEVAAGLVADLAREVIALDDRIKTTDADIEGRFRRHPLAEVITSMPGMGFRLGAEFLAAVGDPALIGSADQLAAWAGLAPVSRDSGKRTGRLHTPKRYSRRLRRVMYMSALTAIRCDPDSKSYYQRKRDEGKRPIPATICLARRRTNVLYALIRDNRTWQPDSPPITAAA

SEQ ID NO: 338069 - protein, 335 aa, unidentified
MIGIDTAKNVFEVHGRNAAGEVVLRRRLKRAQMEKFFADHPKAVIGMEACGAAHYWGRLLEGLGHEVRLMAPTYVKPYVKRNKNDAHDAAACCEAMGRPGMRFVRIKAAEQQASLSLHRSRQLLVRQRTQLGNAFRSLLAEFGVVAAKGREGLAKLATDLRAGVLDLPEAACSAALALADQRANLGPAIKDLERQIAEQAKAEPRAKMLQTAPGVGPMTAHATLATVPDPAMFRSGRDFAAWIGLTPRESSSGGKQRLGSITKQGDQTLRRLLVLGATAWLRQVETHPEKASPWLRGMMARRPKKVVAVAQAARTARILWAMLTHNQPYRAPASA

SEQ ID NO: 338070 - protein, 381 aa, unidentified
MTIIKQIGIDLHTNCFTIAYRDKTGNFIFEEFNLFKNDEIEGFKKLLSKETTIAVEATINSSYFYEAFSPFVKKVMIVNTSKHDHKKTKRKTDKEDAKRILIFLEANMLSEIWVAPKKVVHLRKLLSIQKQIESIQTGCKNMLGNILIETATKRKRSEITHRDNIALFYNEKFNENQQLISRNLIEITKYMELKNAVMKHAIVKYLGENEHVKLLMSIPGISYYSAVCILAEIGDIHRFDSAKKLCSYAGLVPILEESNGKRKNRGITKSGRRKLRYFATFAVLNAIKSSKTLRDFYNKIALKGSKKKAMVATGRKLLTIIYHILTTKEPFREMKESLYNMKIFKWKKALMTNSSNMNKLMKKFIDKEIYEAVFIDDRLKC

SEQ ID NO: 338071 - protein, 391 aa, unidentified
MFLLGIDIAKLNHVASCIDSSTNEVVFSNFKFKNDFKGFSALLNKIKSFDAKNLIIGLESTSHYGENLINFLFIHNFKVALINPLQTSHLRKANIRDAKNDNIDSLNIAKSLIFTKLNFVSKKNIECFSLKKLTRFRSNLIKQRSKAKIQLTSLLDLLFPELQYLFKSKIHSKAIYSLLKKYPSAEEIAALKDDEISNLLYASSKGHFKKEKSIELKSLAKTTVGIKDTSISLHLIQLIELIELYTKQIKDIEIKITDIVKNLDTTLLSVPGISVIACAIILGETNNFENFSSSKKLLAFAGLDPKIRQSGNFNASSCRMSKKGSPYLRYALIFTAWNIVRHSEKFNKYYSLKRSQGKSHYNALGHVAHKLVRILFTLIKKNISYQEEKLE

SEQ ID NO: 338072 - protein, 385 aa, unidentified
MAQFEDLSRCLAAFDQNSTLVAVVEMSQSSWLVAGLVPGVARQPLKKLEPDGAGLLRLVQRWRSEAVKAGRMIDRIVLAYEAGRDGFWLARWLRSHGIESYVIHPTSIPVSREHRRAKTDRLDAAMLLRALLGWLRGEPKHCTMAAIPTIEEEDAKRPSRERESLVSERTRIVNRMKGALARLGIRGFKPELRKAAQHLDGLRTPESTPIPPNTLGEFRRGTARLAVIHEQIKAIEVARLEHLQQAPDSGPPAMVRLLARVLGIGVETADMLVHEILYRKLRDEKAVARYAGVTGSPDESGTKRREKGLAKAGNARVRRGLIQLAWRVLLFQPDSALVQWYRARIAEGACKTSTIVALARKLLIALWRMVNTGEIPVGFVLRPAV

SEQ ID NO: 338073 - protein, 412 aa, unidentified
MDILHTCCCGLDVHKETVVACLIHPAAQGQRPKEVRTFGTTTAALRELADWLRAAGCTHVALESTGVYWRPVYNVLEDEFTLLVVNAAHLKAVPGRKTDVKDCEWIADLLQHGLLRASFIPDQAQRELRDLTRTRTTLIDERSAAVCRLQKVLEDANLKLAGVATDILGVSGRAILQALVDGNTDPASLADLAKGRLRRKRAALEQALDGRLRAHHRLLITTHLAHIDFLDETIAQLSQEIAERLRPVEAELERLDTIPGVGRRTAEILAAEIGLDMSRFPSAGHLASWAGMCPGNYESAGKRKGGKTRKGSKWLRRALTEAAQAAARNTHCYLAARYRRLVVRRGKRKAAVAVGHTILLTAYYLLVRQDTYHDRSPAQLDALRRERARQRAVAQLQALGFDVSLTPTEPAA

SEQ ID NO: 338074 - protein, 387 aa, unidentified
MYFVGIDISKFKHDCAIVDEFGDVITPSWSFQNDREGFSLLKELLDALDGEKKIGLEATGHYGQNLKLFLENNDFSFMEFNPLLINRFVHSKSLRKTKTDSIDALMIAQYLMTVEYKPYPPSFYTFEKLKSLTRFRDSLIRQRSRQLVELTNILDKVFPEFKPFFKGRFSATALYILSHYASPEKISNMNSKSYEPLRCLSRGRFSMVDFVELKTLARNTVGSTCDYLLQEMEITIDIYNQLQSKVEEIELQIHDCVLALAPPILTIPGIGAASAAVILSEFGDLSKFNNPSKLLSFAGMEPGYFQSGTSESTGKMVKHGSSHLRYAMMNCAQTVINNEPTFAAYYAKKRAEGKEHRVALTHVAKKLLRVIYTLQTKELSYNPDLVR

SEQ ID NO: 338075 - protein, 345 aa, unidentified
MTIVETRAVTGGVDTHAEVHVAAALDSIGGLLGVKEFAATAAGYADLLDWLGGFGTVALVGIEGTGSYGAGLARHLAKAGVRVVEVDRADRQDRHRAGKSDPLDAVSAARAALSGRAAGAPKGRDGAVEAIRALMADGRSARHERTQASSQARSLIVTGPDELRARFARHTPAQLVSELAAMRPRPGEVPGYATRVALRELGRRARFLDAQIEHLDELIVPLVTARAPGLLGLYGVGPDTAALLLIAAGDHPGRLRSEAAWAHLCAAAPIPASSGKVTRWRLNRGGNREANHALWRIVITRMSSHPATRAYIDRRSKEGLSKKEIIRCLKRYVAREVYPCLRPAR

SEQ ID NO: 338076 - protein, 397 aa, unidentified
MYIVGIDIAKRKHEAAVIDGEGTVIIKPFSFTNNCSGYNRLLAMLTKAKLPLDEVSFAMEATGHYWLALFTRLQKEGFRVQVINPVQTNSIRSFYIRQAKTDPRDALLIAEVIRFGHFSESTLHPENIYELRELCRGRHAIVSMQADVKRKVVALLDQVFPEYETAFTNLFGDTSMAILQTCPTPKELSEMPFEELCHLIEVSSHKRFRMAKAQELQALARNSFGFAMAGDVFSTMIRLYAKHLVFLKQQVQEMDRKIAEIMDTLDTPITTITGIGPTLGAYILSEIGDISRFSSAAKLAAYAGIDPTMRQSGEYNGVRNRMSKRGSPYLRHAIWLAASSAVLHDPALKLYFQKKRDEGKPYMASVGHACRKMVSIIYAVMRGNKAYTPYIPNEISA

SEQ ID NO: 338077 - protein, 355 aa, unidentified
MNKIKYIGLDVHQTSISAAVLDEEGKQLMQLVFPTRADALLEFLGGLRGTLHLTFEEGTHAAWLYDLLVRRVAKLVVCNPRKNALLKVGSKSDPIDAWKLAELLRGGMLSPVYHGENSTRTLHELGRSYMALTEDTTRIMSRLKALYRGQAIPCAGKKLYTVRHRGEWLQQLTQAGIVRRAERLYEQLDAVQKLRRQARGDLLVESRKHPVCERLRTVPFLGPIRVAILVARMQTPYRFRTKRQFWAYCGLALETRSSADYRWVDGQLQRSRKKVLIRGLNVNHNQDLKNIFKGAALSGSIFPGPLKDFYEQRRAAGIEPEMARLTLARKIAAIALILWKKGENFDATKLNAQAA

SEQ ID NO: 338078 - protein, 339 aa, unidentified
MQKKYFIGIDVSKHTIDVAFIIRKQEDYSKIVWKQFANKLPGLQSMKKWLTEMEVPLSDETIVVIENTGIYHRLLWQYFSQLQVDLCIENAAQVKWSMGIARGKNDKVDSRRLTLYAVRHADRLKPTPVLQRSVMPLKDLMALRTKLLVQIKGITTGLKELSGLSASAAFDKATAKLLHPALKGMQQSLKKIENEIKAIIKKDTAISDMYRRLITVPGIGHITAVYFICCSNAFTMCKSGKQLACYCGVVPFDYQSGISIKGKHQVHKMANKELKHLLHMCALTSIKNHPEFKDYYNRKKAEGKHALSILNAIKNKLVLRAFAVVKNERPYVDNYKKVA

SEQ ID NO: 338079 - protein, 340 aa, unidentified
MKLYSAIDLHSSSNHLAIMNEEMKRVLVKKLANNTQLILDTLAPHREEIAGIVVESTYNWYWLVDALMEAGYRVHLANPSAIQRYKGLKYTDDTHDACWLARLLSLGILPEGYIYPKQDRPVRDLLRKRGHLVRLRTSLLLSLQNIITRSSNVKVAAKDLKKLTEDRVSAHMCGHDALELCGTVSKETIDVLTRQIQRIESSVLKKLKPTASYRTLVTLPGVGPVLALTIALETGPISRFSTVGSYASYCRKVASIWLSNDKRKGTGNRKNGNRYLAWAFSEAAEHARQSHRVSRRFYDRKRSQSNLWVAHNALAHKLSRAAYYIMRDNVPFAAHKLYCS

SEQ ID NO: 338080 - protein, 343 aa, unidentified
MQTITTIGLDIAKSVFQVHGVDAGGQVVVRRQLKRRSVLAFFQKLPPCVVGIEACASSHHWSRELQALGHSVRLMPPAYVKPYVKRQKNDMADAEAICEAVARANMRFVPTKTPEQQSCLMLHRTRHLFIRQQTAVINSIRAHLAEFGIVAPVGRKGVAELLLIVADPSDKRVSEVARTCLAALGNQLLGLKQQILEFDRMILAWHRSNQTSKRLHYIPGVGPMLATALVASVADPSTFRSGRNFSAWIGLVPKQHSSGGKDRLGSISKQGDRYLRSLFVAGALAVIRYAKIHGTGHRPWLTALLARKPTKVAAIALANKIARMAWAMMVKGERYRNPVALAR

SEQ ID NO: 338081 - protein, 337 aa, unidentified
MENVALIGIDLGKHSFHIHCQDRFGKALLRKKFNRTKLIESLATFPVCTIVMEACAGAHYMARRLAEFGHESKLISPQFVRPFVKSNKNDFIDAEAICEAACRPSMRFVTPKTESQQTLGALHRVRESFVRDRVKTSNQIHGFLLEFGISLPIGHAAIKRLPSVMAEHELPARLIAMLERLHAHFKYLEQQIAEIDKELASQLGDDDLGQRLMTIPGVGPITASVLAAELGDGKHYRCSRDFAASVGLVPRQYSTGGRANLKGISKRGDKNLRRLLVQCARAYMQRLERQTGRLADWVRSMLTRRHSNVVACALANKLARTAWALAARHTEFRAMPT

SEQ ID NO: 338082 - protein, 372 aa, unidentified
MKKNNTAQNHKEAKGNKSWQAMEGLTIGIDLGDKRSCYCVLDGAGNKIEEGSLSNTAAALAKHFGGLRPARMAMETGAQTGWISRELAALGHEVIVANARELRAISGNARKSDRRDAEKLARYARVDPSILRPVRVRGAQAQLDLGRIRARDALVRTRTLLVNAARGLAKTRGQRLVRSVTASFGERSQALLDAELATVLEPLLEQIDALGKQIQRYDKQIEQQAAERYPETAALDAVPGVGPLTALSFVLTLEDAGRFPHSREVGPYLGLCSRRRQSSSSDPKLRISKQGDEYLRRLLVQCAHWILGPFGADSALRRWGLRLAESGGKDGPKRARVAVARKLAVLLHHLWVTQQPYRAFPQSEAAVEPVSS

SEQ ID NO: 338083 - protein, 432 aa, unidentified
MEKMHFHAAGIDIGSRKVFVGFEGHPVRSFETFTSDLVSLKDYLLSHSVNTVAMEATGVYWYVLHDILLDAGLDVWLVDGRQTRQLPGRKTDVKDCQWIQQLHSYGLLNRCFVSEGHIKELKSYQRLREDHLRSAAMHIQHMQKALIEMNIRLPEVLSQIHGASGMAMIEAILKGERSADKLFSLCHKKIRESKGEEILKALQGHYTAQGLFALGQAYKGYEFYQDQILECDSQIDGVLQRINSDKQLPPGTGGGKRKPIRHNKPNIDGLGDHLLKIFDGKDATRLPGITDYNWLQLYTEVGSDLSRWPSEKHFTSWLALSPGHDRSGKKNKSKSKGKTTVGQIFKQMAHGLLNSKHIGWGAFARRLRGRKGPAIAIKATARKLAAQYWRLMVKGADFVEKGLQGYESIIKQQKQRRLEKLALELNMELVPV

SEQ ID NO: 338084 - protein, 454 aa, unidentified
MAKRKVKGNPNATITMPIVNPGAAGIDIGSRSHFVCVSQDNVKEFKSFTSGLHEIAEHLLYYEIKTIALESTGFYWQQLFVLLQSYGFEVILVNARHVKNVKGHKTDVVDSKWLQLLHSIGLLSNSFQPDFFTKELRQYVRHRKSLIETGSMYIAKMNKSLVLMNIQLKTVLRDLTGESGLKVIEVIVKGVRDPDVLESLVGKRVKASRQDIKDALNGDWRGEHLFELSQNYSFYQFTREKIKETDNRIEALLEQWKEKNGDEKIRKGYSKNKHSHGHKNDPGFDIKAYAYEMAGGVDLSQIEGVDVGTILTLVSETGLDLKSKFKTAKHFASWLGFSPNRKITGGKTMSSHTPKVKSSLSHAIRQAANAAGNSKSRLGDFFRRLSFRKGRTVAIIATARKIAVIIYKMLETHQPYCYEYTQEDSERFKQMQIKKTIKNIKKHGIAQSDLVMAF

SEQ ID NO: 338085 - protein, 349 aa, unidentified
MLKYSLGIDISQKDFHACLSVIDASQQVKVKASRKFSNQATGFKELLLWMGNHRKELNVPLIIVMEATGVYYESCAMYLFKAGFEVAVVLPNKAKKYMQALGLKTKNDKIDATGLARMGAEQCLELWQPMDEFFYTLRALTRHHQSLQEVKTNISNQLHADEHSIYSNKKVMKQLKKLISTIEKEMLEMKQEIDKQLYSNPEIAEKVKHITDIKGLGNITVATILAETNGFTLFRSISQLVSFSGYDVVENQSGKHTGKTRISKKGNSHIRRALHLPAFNMIRYDVGNFRIFFDRILNRHGQKMKAYVAVQKKLLVLIYTLWKKNEAFKIDKATTQNISGEKETEPSFA

SEQ ID NO: 338086 - protein, 345 aa, unidentified
MEITTIGLDLAKNVYQVHAINGVGEVVVRKAMRRAQVLRFFERLDPCLVGIEACGTSHYWAREISTFGHEVRLMPPAYVKPYVKRGKTDASDAEAICEAVSRPTMRYVAIKSCEQQAALTIHRTRDLFVKQRTQLVNMIRGLLAEFGIEIRRGITHALSLAERIAAGDMPGIPALAAKMIASLAGQILDLEARLREIERELLAWHRSSEIARRLATIPGVGTVCATAFAASVTDPHQFRSGRQFAAWLGLTPLQHSSGGKERLGRISKMGDKYLRRLLVVGMTSLVRRAKYKPDAVDRWLTDLLSRKPARVVTVALANKAARVIWAIMARGGTYRAPQPAGAAVA

SEQ ID NO: 338087 - protein, 317 aa, unidentified
MQASTLCIGVDVAKAELVVAVAGQRPYSVPNEAASISRWLRTVPAHALIAMESTGRYHGLLAGLANQMGLSVYVLNARDVFFYARALGTRAKTDGVDATVIARYLSERHLQLHPWRPADSTHRQVQELLTRRAQVVMHRSALCQAFKATDLQDSIDTSALHGAFDALLRSIDAQVQRLIASDTQLAEGYHRLCTITGIGAQTGALLATLLSRIPFANADALVAYSGVDPRPNDSGTRRGRRRLSKKGPAFLRRQMYLAGLAASHSKALGPLYRAIRAKGFASTEAIVILGRKLLRVAFAVWKGSEGFDAARFAPRTT

SEQ ID NO: 338088 - protein, 430 aa, unidentified
MQEKQTDVTKELNYAAFIGLDWSDKKHDVYLHVCATGEEESKVIASTPEALDEWILQLRERFESRPVAICLEQARGVLVYMLMAHDFITLYPINPAMSAKYRQAFTPSHAKDDPTDARIMMELLLHHRDRLSAWKPDNVQTRMLARLCEERRAAVNLRTKLVQKLNAKLKMYYPQALTLVGENLSSTLACDFLQKWPSLAEVKKAKPAKVRAFYYGHNCRSESLIQERIKLATTAKAATTDEAILIPLVASVKMLARLIRDLDPAIKDFDEQIKVLFAQHPDAAIFGNLPGAGDALAPRLLVSFGSDRDRYSSAAEVQQFSGIAPVTERSGQRQWVHRRWQCSKFTLQSFHEFAQHSMGWSVWAKAYYQFYKSKGKKHNTIVRSLAFKWIRIIFACWKEHRPYDEARYLETLQRRGSPLCQHLGLPALVA

SEQ ID NO: 338089 - protein, 411 aa, unidentified
MNGRLLSRPLGRCIGLDVHLDFIEIAICEEGKVYAAGRVPSTPEGLKTLADSLLPTDRVALEVTGSSWEIVRLLEPHVSKVIVVSPGDTGISQARAKTDRLDARTLARMLWTGELEAVWVPPEWIARMRRRLSRRQQLVRARSRAKNEIHAVLMRRLKGRPPVSDLFGVKGREWLRGLELPVEEAETVHAGLRHIEFLDTEIEQVERLICQEALKSRQIRRLLTVPGVNVICAAVFLAAVGDIRRFKGSRPVVAYLGLDPRVYQSGSAPARSGRISKQGSPQARWALVEAAQSVVQQPGPLHAFYERIRARKGHNVAVVAVARKLAVLFWCMLTREEDYAHQQPSLTAQKLRRVELAAGATVRKGQPSGVWATRERMRQAEKQLAAQAEATSARSPTGKPHRPRNRRRARA

SEQ ID NO: 338090 - protein, 326 aa, unidentified
MEARTLNHLPPATSHDGAVRCLLAIELSKKSWIVAVNTPLSDKISRHTLQACDWKGLLELIERIRTRVSQTFSRPVEVISCYEAGYDGFWLHRLLEAHGVRNFVIDPASVQVDRRARRVKTDNIDVGRLLRSLMAYLRGEPKVWSVVRVPSVTEEDDRRLHRERDRLINERVQHVNRIKGLCAVHGIYDYEPLRPNRLARLEQLRAAGKRELPPRVKAEIARELQRLELVLNMIKTIEAERDAIASAGKSSTHANAKKIQNLTRLKSIGPEIGTTLVGEVFYRQFNNRQQLGSYVGLTPSHFQSGPLSRDQGIIPLPELIESASLR

SEQ ID NO: 338091 - protein, 424 aa, unidentified
MGRSIGLDVHRDFCQVAIVDGGRARSAGKIKTAPAELELFAQSLAPEDRVVLEATGNALAIARILEPHVAQVLLAHAKDVRAISHAKVKTDKLDAKVLADLLAADLIPAVWIGDEQTRMMRRLVSRRRGLVKRRTQIKNEATAVLHRNLKGRPPVTDTFGVKGRAWLSGQELPIDERLTLDGCLRQLDFHRDELAAVDRIIAEHALKDADVHRLMTIPGIDVVTASTLMAVIGDVRRFPTSRHLVGYLGLHPTVRQSGNQPGRYGRVSKEGSAAARHVLVEAAWSAAKSPGPLRAFAERTAARRGRHVATVAVARKLAVLAWNLLTRGEDYAFARPALVARKIRALELAAGAPRRKPGPKPNPVWKTAAQDAAERRLAEQAEHAYRRLVADWQSSGPKVGAGATPGRASNRPSKGKAARQVTSP

SEQ ID NO: 338092 - protein, 335 aa, unidentified
MSHAQRPAPAAWVGIDVSKDTLDACFLPAGGKPRSRSFGNDPAGHAELLTWAGDGGPADGPLGFCLESTGAYGEALAQSWAGAGRHVSVVNPARVKYAGLMRGQGNKTDRADAKLIAEYAARERPPAWQPPRPEVRELQALVRRRDDLRAPAAGEKGRLAAPGLSRAARQSIRRTAAFLGREADRLQRQADGVITATAALQADRELLESIPGVGAVAAQAILAELPDPARFASAQQAAAYAGLAPREYGSGTSVRRRTRLSKAGNARLRKALYLPTLTAIRFNPRLKAFFERLVAAGKARMAAVGACMRKLLMIAYGVLKNRAPFDPSWSSRSAP

SEQ ID NO: 338093 - protein, 325 aa, unidentified
MEYVGIDISKAKFDCLWLRDSSKNKVKTKVFKNNRTGFQEVESWLLKNTQSQPDDIFVTLEATGVYHEAVAFYLFDKGFKVSVVNPARPKQFARALGIAHKTDKSDSLLLARFGSQTEPVLWKPEPIEVRELTALIQRVEAIEKDIQREENRKEQADISKSSQLVVESLEKVIGLLVDEKARLIKELDDHIDKHPSLKSDRSLLETIPGVGPVVSRLMLSVLRKKDFESAGSLSAYLGLIPRIRESGTLKGRSTLTKVGPSRIRAKIYMAAVVAKKCNPDIKAQYERLVANGKTHMQALGAAMRKLTQICFGVIKHQIEYQPQSI

SEQ ID NO: 338094 - protein, 465 aa, unidentified
MKQKKNGTPQPDRAKRRLSKHLEQINLYAAGIDVGSETHYVAVPEGLDDNPVRSFSCFTGDLEHLADWLVEIGIQTVVMESTGVYWIPVFEVLEERGLVVLLVDARRVKNVAGRKTDVLDCQWLQQLHTYGLLEGAFRPPEQVCALRAYLRQRDNLVRQKATHVQHIQKALRQMNLLLDNVITDITGATGMKIIRAIVGGERDPEHLAKHRDPRCKNPKETIVKSLQGHYRDEHLFALRQAVELYDIFQEKIRACDGAIAQHLDTFASKADPGDLPQGKKRKKKQGHAALFDVRAYLYRITGVDLTQIEGIDESIALKVISEIGIDMSRWKTEKHFSSWLGLSPGNKISGGKVLNSRTKRTANRAAAALRMAAYAVSNSKSAVGAYYRRLRARLGAPKAITATAHKLARIFYSMLKHGTEYVDQGQDYYEQQYRERAVKNLRRRAADFGYSLVQNGIEEPTALNA

SEQ ID NO: 338095 - protein, 391 aa, unidentified
MSMYFIGIDISKYKHDCCIISAADQKVVSKVTIKNNKAGFNELLTIIHSLANPADIRIGFESTAHYALNLELFLENSLLTFMEVNPVLISEYKKSKTLRRTKTDSVDCESIARWLMTVEYKPHSKGFYHAYSLKSLTRLRDKLIRQRSFYLIKITNVLDHTFPEFKPFFNERLSKTALYLLENYGSAEKMARMNSASYEKLRSLSRGRVSPQQFLRLKELAANTVGVNNSIFDVELNSLLSLYKSLVKEINTIEKEINKLIEEVHPHYMSVPGIGPLSAAVIYSEYGDISNFTNPGQMLAFAGIEPGINESGTESHGGKMVKRGSSQLRYTLINCCLPLIRFDMTFATYYAKKRGEGKPHRVAITHVAKKLIRVIYALERQDIDFNAQKLR

SEQ ID NO: 338096 - protein, 356 aa, unidentified
MSSNCQYIGLDVHKEAISIAVLNGTGKLVMESIIETKAVNLVQFLHSLGGELQVTLEEGTWAAWLYDVLKPHVAEIVVCNPRRNAYLKEGSKSDRVDARKLAELLRAGMLRAVYHGENGLRTLRELARSYQVISKDLRRVMNRLKATYRGWGIPCTGPKVYAPHSREEWLNKIKETGVRRRAQLFYQPLDGLQILRRQVRREFLAESRKHQEVKVLRQIPCIGPIRAGLLLAMIQTPHRFRSKRQLWTYSGLGVETHDSAQHRYVDGRLQRSQKPQQIRGLHENHNHEMKHIFKSTATRASACPGPFRDFYLALLAKGMKPEMARLTLARKIAAITLTLWKKGGRFDTQHLKAQAA

SEQ ID NO: 338097 - protein, 320 aa, unidentified
MQFTLFVGVDVSKAKLDIFVPDCPTRMSIDNSEQAIGCELIKRLGRKKKKTLVVVEATGGYETTLVKVLQKHKIAVAVVNPRQVRDFAKGIGREAKTDSIDAEVLSQFGSVVKPEPVAARSEADERLGALNTGRTQLLDLISQEKDRVQQTAVKEIQHLIRENLTSLKKQLKEIDAKLKQCLATDTVNERKIEIISSVKGFGCVSTCTFLADLPELGKLNREEIAKLVGVAPLNRDSGTTQGKRFIFGGRSSVRRVLYMAALVATKRNARIKACYQHLLAQGKAKKVAIVACMRKLLTILNTLIKTDTLWSDERSVSVTH

SEQ ID NO: 338098 - protein, 344 aa, unidentified
MANLNQFCDFTKLIGIDIAKSVFQIYSCDTQTGEITNVQIKRDKVLESFANCGKCLIGMEACGSSQYWARKLQALGHTVRLMDPKLVKPFVRHNKSDKADAEGVYHALISGVRSVAVKTETERDIQTLLTMRALLVKQRTARINHVRGLLAEYGHVMPKNVAQFDKKVDECINSLEGDAVQLVIDMLRDAVKSIRDDQDRIKTLQCEISKLANQTKNAKHFLTVPGVGDTIMAYMCVRLADPTQFSSARQFAAYLGLVPMHTGSGGKTVTTKIPGRCDKALRAVLVQGAHAVARSKYRTEWVENILAKKPKKVAMVAIANRMARQCWAVASKGQDWRRMPVTAA

SEQ ID NO: 338099 - protein, 451 aa, unidentified
MLPGLPAIVTIDVEEVFAVRTVALDVHKRFAEIAVHEDGELRRLGRIETGQLRAFAQSLGPEDHVVLESTSMTWAIAELLSEHAGRVTVSNPMRTRAIASAKVKTDKIDAKVLAQLGAADFLPEVWAPDQTTRALRRRIAHRSSLVRQRTRLRNQIHAVLARNLIDAPFTDVFGQGGRRWLADVALPDHEREQVDSNLRLHDALNSEIELVERQLAEQALAREDVRRLMTIPGVGAITALALVAVVGDISRFPSARHLVGYLGLDPRVRQSGDKKARHGHISREGQAHARGLLVEAAHTAIRTPGPLRAFHARIAPRRGKQIALCATARKLTVLVWHLLTKQEDYAFGAPTITQRKLRALQRKARDTGPAISLAGETKRRALEQRWLKEAESNYQNYVALRARRGAGATSGDTTAMAVSAADDARQAPQSPDACSSRSGSPAPRGILAPNP

SEQ ID NO: 338100 - protein, 340 aa, unidentified
MRVRKVARSCDSGKSAVLYDQYVALDWPLKTMAIAHMSRRDDHPQIFERETDMKELKQYLGSLKGRTIMTLEESGTAHWLYLELLDCVGRIIVCDPFHNRLLWHGPKTDKIDAGKLCELLRAGLLKEVYHSDNGVYELRTLVSAYQDVVCAGVRALNQKRALTLGHRDKGKSASFIGGMLQENIDLYRRSKQQYERRLEDVARRNTLVRYQRGIDGIGTIGAVRIVATVVDARRFPYAGKYLCYCGLVKHDKLSGGRSYGQRKPRYNRVLKSVYKTAALAAIRGANPIREYYHHLLVQGVAEHNARHAVARYIARISYGMLKSGTRYEPYRWKDEAQNVI

SEQ ID NO: 338101 - protein, 424 aa, unidentified
MRMETFYKIILGIRETICNDPQVCRIVDLPVYYELETNNGNRDYRIQIGGHYMNYNTVYVGMDVHKESFTLCSCKYEDEKASHYQRTPASYKNVLRYLAFLRTIYGEDTRFVCGYEAGCLGYSLYHQLENFNVECVILAPTTMLEQRSKRRIKTDKRDAEIIARSLAQHNYSPVHIPTETDNQTKEFIRMRDDHKAELKKIKQQILSFCLRQGYQYDGSGNWTAKHVKWLRSLKPAGLYKEILDEYLLTYTILTDKLNRLDQRIEELASKEEYKESVSKLTCFLGIKTHTALSVIVEVGDFQRFVSARKFAGYLGLVPGQHSSGDDRNGLGITKAGNPHVRRLLVESAQSYTRGKIGYKSRVLRSRQAGNSPQVINYADRANERLRRRYYKMVLKDGKKYNIAKTAIARELACFIWGMMTDNIY

SEQ ID NO: 338102 - protein, 386 aa, unidentified
MQKLNDLSRSLTALEPDGTLIAVIEMSLSSWLIGGILPGVERQPLKKLTVDEGALLKLPHRWREEAEKAGHRIERIVVAFEAGRDGFWLARWLKARSIEAYVIHAASVAVSREHRRAKTDRLDSELLKRAFLGWLRGERDHCKMVAIPSIMDEDAKRPNRERESLIGEQSRIVNRMKAALIRLGIRGFNPKLKRAAGRLDGLHTPEGEPIPPNTLAELRRDMERRRLVSNQIRRIEQARLQRLEQEPDDGPHAMVRLLARVIGVGIETADMLVREVLSRNMRDRRAVARYAGLTGSPDESGRKCREKGLARSGNARVRRGMIQLAWRLLMFQKNSALAQWFRARTENARGTRKTMIVALARKLLIALWRLVHEGVVPDGVVLRPAQ

SEQ ID NO: 338103 - protein, 326 aa, unidentified
MQGKESSEQKTKGKSNAGIDVCKNWLDAHLVPQGCSLRVRNDAQGHQQLKRWLMKHDVTLIAIEATGKWHRQVHRSLHASAFRVAIVNPLRARLFAEAIGLLAKTDRLDARMLALLAESLSPQAKAPASEAVEALQELVTGRDSAVAEQTALQNQLAAANSSFLRRQLKARIVRIAKDIASLQAEIERSIGNDEALARRHAILLSIPGVGPVTAATLIATMAELGSCTAKQIAMLAGLAPVADQSGAREGQRVIRAGRAAARRVLYLCALSAKRCNPAMMALYDRLTAAGRPHKVALVAVARKLVVLANTLITQNRLWQPEAPSYA

SEQ ID NO: 338104 - protein, 343 aa, unidentified
MRYIGIDVSKATLMVAYPKGEDKYKTTEFKNTASGIHSLINTLNADDHCVMEATGNYSYLLLYLLSEAQITVSMENPLKVKNFSRVLLSVIKTDKKDAELLSLYGERMKPAPYKVPSESLLLLKQKRTVIRQFKKQLLANNNMKQALEALPKVDHKAIKAIEKVSIALEKQIKAMEEELQNLTMAEFEQQMKRLTSIKGVGTTLAAALIITTGGFTYFDNAKQVSRYLGLCPTYQQSGTSVNIRGHINRNGDPYLRSQLYIASWSMSQHNAACKEFYTRLREKGKPGKLALIAVANKVIRQCFAVVKQDKEYIDGFVSEKPHTLPAGNACRQGSVGTLPTRQK

SEQ ID NO: 338105 - protein, 393 aa, unidentified
MHEPKKQQKQLNDLSRSLTPFDPNQTLTAVVELSKESWLVAGIIPGVERQPLKKLRADENDLLKLLERWRGEAEKAGHKINRIAVAFEAGRDGFWLARWLRARGIEAHVIHAASVAVSREHRRAKTDRLDTEGLKRAFLGWLRGEREHCKMAAIPTSAEEDAKRPHRERETLVGEHTSVINRIKATLARLGIRNLNPKLKKAAERLEHVRTPEGEPIPPNTLAELKRDMERKQFIAEQIRQIEKARLEQLKQAPQAGPNLMVLLLVRVIGIGIETADMLVKEILSRNMRDRRAVARYGGLTGSPNESGSKSREKGLARSGNARVRRGMIQLAWRFLEFQKESALAKWFEARTENARGSRKKMIVALARKLLIALWHFVRDGVVPEGVVLRPVH

SEQ ID NO: 338106 - protein, 389 aa, unidentified
MYLIGIDISKYKHDCFIATEAGEIIKDSFSFDNNAKGFGQLLDVLQALDQSQLKKISLEATGHYGYNLKVFLDRHGFDYMEFNPILVKKLSTGLSLRKTKTDKADARLLSMILLSVDYKTYPVKSYHIQELKSLTRYYKSLVKKRSKELVELTNTLDLLFPEFKPFFQNKFSQTAYFILEHYQTPRKISRMSYQNYEKLHSISKGHFSYAKFLRLKELAKNTVGSSSNLLLFELESNIRLLHGINHEIKSLESLLNDWSSKIDSPIFSIKGIGFISALSLIAEYGNFTSFDSPAQMLSFAGMEPSIIQSGTSNKQGHMVKRGSGYLRDTLMNVAIPFMMHNPIIYDYYLKKKNEGKPHRVALSHVAKKLIRIIFYLIKSNQQFNETKLA

SEQ ID NO: 338107 - protein, 395 aa, unidentified
MLYLAIDQHKTQLTINVRNEQGDVTQKGQISTQHTDIDDFFASFTAQARRHRGFMAIVEICGFNDWLLAKLEHVGCSEIVVIQPEGSAVHKTDKRDANTLGELLWNNRKRLQGGQHPNGLRRIIPAGPADAEVRQLANFRQHLVKHRTKIVNKIKGIINKHNLAQDAPTEKCSTKKFREWIAKVALPVVDRFEVDQHLEQWELYDKQITLVEAELVKRSEAKKTEVYRLVAVPGISVMGAITLLSRIGDIQRFKNPDSLANYFGLTPGCDNTGGKHRVGGITKRGNAVARQVLNFAVSHVVRKDPAMKVWHKKIKNRKGAKTARVAVMRRLATIIWHMLRWEKPYQFRYDPPAPAPKPGDLRSPGEVFQGIDNKNHFREKKKKETLSNRRSKARA

SEQ ID NO: 338108 - protein, 420 aa, unidentified
MAPLSNQQFTAYVGIDWADTKHDICLQAAGDIRREFDCIPHQVARIDEWAKTLHRRFGGPIAVALELAKGPIVAALQKYDFFTLFPINPSTLARYREAFKPSRAKDDPTDAELALDLLLRHPERFAPLRPQSVAMRSLLSLVEQRRELVGDKTRFTNRLCDALKQYYPQALEWFEDRGTILFCDFLTRWPTLAAVRRARRTTLEVFFHAHNCRHAGLIEVRLESIRAATPLTEDPGIVAPCRLHVLALVEQLRTVLTVIDRFDREIAAVACTLPDYALFQGLPGAGPQLAPRLLAAFGEQRERFHGADELQKYSGIAPVTERSGKKSWVHWRWQCPTFLRQTFVEWAGQTINRSFWAGAYYRQQRAKGSSHQAAVRALAFKWIRILYRCWQTRTPYDETIYLNALRKRGSPLIRNLGLPG

SEQ ID NO: 338109 - protein, 329 aa, unidentified
MQPCVGIDVSWDHFHAAIYGAQGKVSCKRFDNTLSGLEALVQWCEAQHVPLQRAWFVVENTGVYSATVCYGLHERGLRVALLSPLQVRDGFRARKTDEVDAARLAEYGYRFADRLVAWEPPREAVVRLEHLLQARAQFRDGWQRLHNLLESIRRHPRHDASLVQQLAQQVTQLQRWQCEVEEQIAQLIAGDAELSVRREQVCSVRGCGEGMFWQLAMVTDGFVDIPSGRRLASWAGVCPHERRSGRRVYKGVHRRGYGNEEFLRVLHMAALAAVRLPGELRSYYLRKVSEGKPKLLVLNNVKNKLLHRLAACLRDGRCYVAEYAPSCGG

SEQ ID NO: 338110 - protein, 328 aa, unidentified
MLYVCIIDQEGNTCVHQEIPADPDKLRPLLEPYIGNIVVGVECMHCWYWVSDFCEDIGVDFILGHALYMKAIHGGKAKNDRIDSYKIASLMRGGNFPLAYVYPKEMRATRDLLRRRMKLVRHGANLKAHVANTTSQYNLPPNKVNLKNVCAREQLRSTFPDPVVQRNIDFDMSMLEHYAKELSKLEWFLEQQAKQHNPVHYHILRSISGIGRILALTIIYEVGDIRRFDSVQKFASYARLVKCKAESAGKSYGTQGNKIGNAHLKWAFSEAAMLYLRGNKKAQKYLQKLQKRMTKAKAISVLAHKIGRCVYFMMKNEKVFDENRFITG

SEQ ID NO: 338111 - protein, 346 aa, unidentified
MLYAGLDLSRKRLDVHILDEDGRTVEVTAVSPDAAGLRRLAAHVLHFGHEVYGAIESMTGARFVHDTLERYGWDVAIADAAKVKGIAPLAAKTDRIDARVLAELARRELVPEIWLPDPTVRAERERARFRLHLVHHRTALKNRIHATLMTFGHPVPVADLFGAGGRELLARLALPEPWTGTLATSLRMVDVLGAEIDACEADLRRLGADHPSIPLLLTVPGIGPILAYTIASEIGDIGRFSSPKKLTGYTGLCPIVRQSGNRDVRGPLAKNGPKYLRWALIEAATHAARDAHYRDRYERTKRRLGRQRGAKVARIDIARKLAEAIWHILTKNEPFAPAGPTMLLVA

SEQ ID NO: 338112 - protein, 420 aa, unidentified
MDVLIERCAGVDIGKDEVVACVRTPAPDGRGRRKLIRTFATFTGALEEMADWFGEHGVTDVAMEATGPYWKPVWYVLEDRTFTLKLVNAHHVKILPGRKSDVLDAEWLAELLEHGLLRGSFVPPAAIRELRDLTRYRKRLIQASTAEEQRIQKTLEDAGIKLDSVASDVLGASGRAMLDALVAGERDPVVLADLARGTLRKKIPALRQALRGRFRDHHALLIGLCLEHTDHLQAAITRLDERIDALITAHTSEAGVPFARARDRLTTIPGVGKRAAECILAEIGADMTRFPSPGHLASWAGMCPGNNITGGKRGSGKTTDGDVWLRDILTQCAWAAARTRETYLSAQFWRLARRIGRKKAALAVGHSILVICWHLLTNDTDYDDLGGDYFTRRANPDRQRDRLIGRLHALGYRVTLDRVA

SEQ ID NO: 338113 - protein, 393 aa, unidentified
MICVGIDVAKDKHDCFILSSDGEVLADVFTIPNNAEGFGQLLQTIRRCTSPQSKIKVGLEATGHYCYNILGFLLDKGMPTYIINPLHTNLYRKSLSLRKTKTDRVDARTIATMLMSDVDLKSYTDAAYHNEELKSLTRYRFEKVRERAKLKQSVSRLVTILFPELEKLVPSLHIVSVYVLLSEFPGAKQIAGAHLTRLKSLLEDASKGRYGRDMATILRDAARCSVGSVMPAKSLELQHTIRLIRELDAEIDDIETAIQDMMEKIQSPITTIPGIGVRMGAMILAEIGDFSRFDSPDKILAYAGMSPSTYQSGQLSLSGAYSHMEKRGSRYLRYALYNAAKYVCLWDPIFAAYLAKKRAEGKHYNVALSHAAKKLVRLIFAMEKSRQPYNAAV

SEQ ID NO: 338114 - protein, 613 aa, unidentified
MSLVMLGVDPHKQSHTATALVAGSHQQLATLRVPASPSGYRQLLGWARQFPQRRWAVENARGLGCHLTQWLLARGESVQDVRTTATARVRELSRGRGRKTDALDAAAAAGIAALQGDAAQLQPEDETVVLAVLEERRSNLVGQRTRSVNQLHALLRELIPGGAPRKLRADRAAALLRTVHPLTAADRARKQVAWDLVAEVRGLDRRLAMIGIRIQDSVAALGSRLPETVGVGPVIAGRLLGRTGRASRFPTAAHFASYTGAAPVEVASGERARHRLSRAGDRQLNHALHLIALVQVGTPGCAGTTTSGAHWPRARPPGKPCAASSAESPITSGESCAATNRPATTTNPRRLDRQRRPRSVGVNSADAAWALAMHRSDRLVQLQQVSPVMAGDGLGGQAKARRPALLVDAQPVPPGHRGPPDQHQVGGAQRHEGRQQLRNWRPGKRRPRLLVIVDQRRPVPGQNDPCPEPIGDLGIPQMAQQFRHRPLPSRRSPGKRLPCERPGPLVDRRRGGGQHLHRVAGSQQCQQLPLIALGVGHRVGGDDALLHLASLAGPAPQPSGRMPCPPSRRHHRGPGDPAGQHAGGAVSPGRFSAFPTEGDTGGPRNSPSLTQHA

SEQ ID NO: 338115 - protein, 426 aa, unidentified
MPYRIAGIDVHKKMLAVVVADVEVEGEYVFERCRFSTSPEHLRLLAEWLIEKQVEEAVMESTAQYWKPVWGALERYWTLGCKQREGTGPMSGALHLAQALSNRGRRGRKNDFRDAERLVKRLVAEELILSFVPDTEQRLWRTVMRAKCQLTRNHVRLQNRLEALLEEAHIKLSSVVSDLLGVSARRMLKALAEGETNPTALAILADKQLRATSAQLCDALGACTELNPVYRRLLKMALEQLQLIEQQIGKLDQEMASLLSQHQDAVRRLAEIPGLGPDSAQQIIAEVGASAATFPTAKNLSSWVGVCSGDEESAGVNPNHRSPKGSRHMRRILNQAANAAVMHKGSIFEIVYRRLVPRLGHNQTIGAIAHRLCRLIWLILHQGVRYEERGPAVSQRSKQRRTAKMIRELRSLGYRIEPISVQASNA

SEQ ID NO: 338116 - protein, 350 aa, unidentified
MEKRSMKHYAGLDVSVKETSVCIIDEAGKICREVKVPSHPEDLVDVLKDPAWRLERIGLEAGPLSQWLFSGLVEAGLPAVCIETRHTKAFLKAQVNKSDRNDARGIAQMMRVNLFRPVHVKTLTSQKRRALLTARKILQDKAVAIENDIRGLLRNFGLKVGVVGVAKFDERIRELVEGMAELVEIMEPLLAARQKLREMFTALHRKLLSIVRDDGVCRRLMTIPGVGPVISLAFCATIDVPARFRNSKAVGPSLGLTPVLNQSGESLRVGRVSLCGDDMMRALLYEAAQVMMTRVQKWSWLKAWAMNVAKRRGLKKAVVALARRLAVIMHRIWVDGTVFRWTKEAAPATA

SEQ ID NO: 338117 - protein, 441 aa, unidentified
MNSTTISVSTTAKYRVNPEQLASSAVRIVNVAFDVGSESLHWAMELPDQTLSGKCDNTSCDIRTTLRQISAKAAKHGYGELRVICESTGIYHRRLLQLAGSLGMRTCLVHGEAVAKFRTIQFADHGKTDDRDPRAALTVAKVGKLIRDRKLDKLYAQLRELHRLVHRCEARIKVAKCELHADLRNLFADLRLDKSVLYGPTGQALIEEFAGNSHRIVAAGEEVFCAAMKARSKHTKQATLKKIWNAAVESADGDNDGLAATLAEIQAAAVQQLYAEITAFLQQRDELEQRMQQLYLQLQADDARLPSPCKGVVTLRLLSRLVAEIGPPDDFRTLSQLMRYAGLNLCERQSGKWRGRTKISRRGRRELRYVLNLMAIPLVGRQKLFGDYYWKKKETDKMPGQKANVCVMRKILKMFFGWYHSGKPFDRERVFVMASEYSKAA

SEQ ID NO: 338118 - protein, 316 aa, unidentified
MSNNNAGFKKIGSWVAKVSKGFDIVLFCMEYTGLYTQDFRLWLEEKHYIYRMVEPRKMHRFEPDLDDGLRSLDRIKTDELDSFRIAIYCEQNHRKILRNPSKLPPPVYFKLKRLLAERKQTVKQSVLYKQQLHDICAYDTDLSVERKNGQLKTLNDALKGIDNEIDMYIKEDADISKNFSLLTSIPGIGRVVALETIVLTENFMAIDNPRKYACYIGVAPFKKESGTSVRKGSSVSKKGFKQAKADLSIACLVCMQHIPNIRDYWEHKRKEKCSGIVFNAIKFKMILRMFAVIKRGTPYVETDNYRNGKNKQPGVN

SEQ ID NO: 338119 - protein, 310 aa, unidentified
MDQSFIGIDVSKDRLDVHVLPSGEAFAVARNGEGLAELNERLQPLAPAVIGVEATGGFERVVAASLASAGLPVAVVNPAQVRAFAQAMGKRAKTDPIDATVIARFIEATKPVVRPLPDEQTQALADLVARRRQIIQMMVAERQREKRTQVRRLQKSMRRIVSVLEKELNELDREIGDAVGGSPVWREKEDLLASVPGIGPTIARTLLAELPELGTLDRRQIAALAGLAPWTRQSGQWRGKSFIGGGRVSVRSALFMGALVATRFNPVLKAFHQRLIAAGKPKMVAVIAVARKLLTILNAILRDKQPWQHA

SEQ ID NO: 338120 - protein, 347 aa, unidentified
MAMTTIEAVRAVTGGVDTHGEVHVAAALDPVGGVLGTAAFDTTPAGYRQLLEWLRGFGPVSTVGVEGTGAYGCGLSRFLCRQGVVVVEVDRPNRQVRRKQGKSDPLDAVEAARAALSGRAGVAKTKDGAVEAIRVLVVTRRSATQARVKALVQMRHLIYTAPDQLRERLKGLSTPRLVVEAASLRAGRAPDPVTAATKTALHSLASRVRTFDKEIQAIDSLLGPLVATTAGELVALTGVGTVVAATLLVAAGDNPERLSSEGAWARLCGVAPLPASSGKVTRHRLDRGGNRQANSALWRIVIVRLTCDPNTQAYVERRLKEGRTKREVIRILKRYVAREVYRHLPRR

SEQ ID NO: 338121 - protein, 337 aa, unidentified
MNNSIGLDISKSLISVYIPINNQSIEIKNSIKGLNRLLSKLKKLYKKEFDKLVFVYEPTGSYSDLLKKFCFDRELKCFMINPKQSSNFAKSMGERNKTDEVDAKLLSRAIVLANDEDIKIPIYDQRVEDMNTLMSYYKFIVKSRVQSNNHLESIVAKDGLLYAIDSLKDEIKEYRLKEKDILSQIIDIINQDDKLKQDYENIQSITGIGEKSAIVLLHLFLKYPNANQREITSLVGLDPIEKSSGTSLRGKVRISKAGSKIYRGSMFMSAMVAIRHSTHFQLFFDRLQSKGKHTTLIQIAVMRKMILIAHSLYKNNQKFNDERYTKDCGRSLETEAA

SEQ ID NO: 338122 - protein, 492 aa, unidentified
MKLRKDQPKQSQKLKQEKTARTAHCPQTVGWHQMNRKQRREMARKIQAEDLSLEVVHPHAAGIDIGNESHYVAVPPARDEQPVRRFGCTTAELKAMAVWLKQCEIRTVAMQSTGVYWIAVYDILEAAGLEVYLVNARETKNLPGRKTDVQESQWLMKLHCYGLLRTSFRPSQEVRTMRTYWRQHQDLVQAGGRHIQRMQKALTQMNIQLANVLSDITGKSGQAILHAILEGERDPYELAALCNPNVKASEEEIARSLEGNWQEDLLFMLRQEQEGYEFCQKQMAECDEQLQQYLRQRKDQSAGARLPEEKRKARRNKNRKNRPQFDVREQLFRTTGVDLSRIDGIDVLTAMTVISEAGWDMSKWPDEDHFVSWLRLSPDNRVSGDRVIGKGRLPTNNRLSVALRMAANTLRESNSYLGAQFRRLKRRLDAPVAIKAMAAKLARLIYRMLRYGMQFVDQGAEVYEAAHRQREIHYLKHKAASLGFHIIEAAAS

SEQ ID NO: 338123 - protein, 344 aa, unidentified
MTTKLMAGIDLHSNNLFCAIVDMDGKRVFEKKLPCELARVLGALKPFKKQLEKIAVESTYNWYWLVDGLQDHGYPVVLANPAAMQQYDGLKHADDKSDGFFLAEMLRLKILPTGHICDRAVRPVRDLLRRRMGLVHKRTSLILSLKSLHTRMTGRDLGTGAIKALEAKEAEKLFEHPADQLITRLDLQLVEQLGQSIKSIEDTILGTVKSLPDYQVLQTMPGVGKILGMTITLETVDPKRFASPGDYASYCRCVDSRRMSNGKKKGENNGKCGNKYLAWAFVEAANFAQRHDTACRRFYDRKKAQVNGIVATKALACKLAKAAWHMMSQNTDYDPGRMFPGVKK

SEQ ID NO: 338124 - protein, 413 aa, unidentified
MPQKTDYVYVGLDIHKETHTAVLMTYMEERLGKIKITNNIAGYRRLQAYVDKFRGELIPLYGLEDVSHYGRDLAIYLLDQDYTVKEVNSALSCMERNSYATVKKSDEWDAQCISAVLSRRSAILPDANPQDYYWTMKHLVGRRDALVKNTSSLIQQFHEQIQKQYPSYKQFFHDIECQTSLAFFERFPSTGHLNGVTVEELGAFLREKSHNTCSDKRAELILKLVEQDHTKEREYQSGRDLILQSISRQIYFNQQEIKQLERMQGELLKELGYHLETIPGISTVTASALVAHIGDIKRFKNADKLANYAGVAPICHSSAGKGKDLQNKGMGNRNLYNVLYLLAMQQIQINRDGKARNPLLRAYFECKVSQGKTKIQAMICIMRRLVSIIYSMMKNQTSYRKPELEDQKEQMIS

SEQ ID NO: 338125 - protein, 411 aa, unidentified
MKYYTSTTEYNCGIDLHARQMYVCVMDRQGKKLVHTNVRDNDFSFFLKLIEPYKHSLTVCCECMFGWYWLADACHEAGLTFVLAHALYVKAIHGGKNKNDRVDSEKLTHLLRSNLIPPAYVYPTDKRPLRALLRQRIFYVWRRSELLARIYSHQLAHNRIPAKQTRRNRDPWKEQLLAAEDNELRRDALKNDLAMIQHYDDQIQSMEQQLMRLTKDLQGRDYELLQGVPGIGRSLGLTILYEIGDINRFPTVKDFVSYCRLVKGTVASAGKIKGLRGAKLGNPYLRWAFGEAAVIAKRDHYLIGPLSQRLEAHMGGNKFKSNTVVAIKLARAVYFMLKNKTVFDPERLVASMQKCFRPGRRQPGSLTGRDKKVMPPLVTDHVSCAPSTPVCVGQASSPADSIGTCGQVLCP

SEQ ID NO: 338126 - protein, 390 aa, unidentified
MIVVGVDTHKCSHALCAVDEGTGRGRGSREIKADEPGHVAAVRWARGLDEERVWAIEDCRHVSRRLEQALLAAGERVIRVAPKMMGSSRKGERERGKSDPIDAQAVARAVVKDGVDRFPAAYLDERAMEIRLLFDHREDLVKERTRAQNRLRWHLLELCPELEARLGRGALSAPRQLERLDRKLRRLGSSVRLRIAREQLAQIRALTRQADQLEAELAVLISRYRPKLLEEQGCGALTAALMIGHTAGAERFASDACFARQAGTAPIPCSSGQKSQHRLDRGGDRQLNRALHTIAITRASRDPATKEYLERKRAEGNTDKGALRCLKRYLARHFWRLLAEPPLEPAQAATSEQPAAPTEPQPTAPIPERPAPRREVDRASAAPIPMPCVT

SEQ ID NO: 338127 - protein, 347 aa, unidentified
MRFVGIDIGKAKCRAAIMDPGGAILEEFTFTNNHEGIEGLASRLTLDDRVVMESTGSVWTNLYNHLDERHISVALANPLKTKAIASAKIKSDKVDARILAHLLRSNLVAESYVPPKHLREIRALVRHRVGIIKIRTMVKNEIHALIDKHGLKHEFSDLFGKHGLEWLRNIELPPLDRLILNNHLTHLESLNQQTERVDEEIHSKACEDPDVRLLLSMTGIDIYSALLIRSEIGSVDRFPDYKKLVSWAGIAPSLHQSGSVEYHGSITKQGSRTLRWIIVEAARVAVNHDARMRSFYERVKHRRGDQKAIIAVANKMLKIIWFMLTRREPYESRNEKRYQQKLNSIAS

SEQ ID NO: 338128 - protein, 344 aa, unidentified
MDQISRIGMDTSKHVFQLHGVNAAEEVVLRRKLRRKEMVTFFEKLAPTVIAIEACGASHHWARLLHSFGHTVKLIPPQLVKPYVKRGKNDAADAEALCEAMSRPTMRFVPVKSPEQQAALMLVGVRDRLIRHRTQLANAIRGHAAKFGLTAAKGMAHLVPLLERIQTDESLPALARELFAIQAKEYEQLQTQIDEVDAQLMARHRADECSRRLAKIPGVGPIGAMLLTMKTPAPELFRSGRQFAAWIGLTPRDHSTAGKVRLGVITRAGDEGLRSVLVVGATAVIQHARRHGKALLWLAGLLKRKSPKLAAVALANKMARIAWKLMLSGETYTATPAPAAAGAA

SEQ ID NO: 338129 - protein, 375 aa, unidentified
MQEKLRFLGLDVHAETIAVAVAEPDGEVRSLGTIPNRAESIRKLIKKLGPAEKLRVCYEAGPTGYVVYWQLAELGVQCEVVAPTLVPVKAGDRVKTDRRDAEKLARCYRSGDLTAVWVPDEGSEALRDLVRAREAAKQDQMRARHRLGKFLLRSGQRPPSGVRPWTRPYLIWVAQLRFMQIAQEATRQDYLHEVEHMRERVARLEQAITEAVKMASPALQQVINDLQALRGIADISAVTIAAELGSVSRFDSARQLMGYCGAVPSEDSSGKRTRRGGITKTGNAHLRRIVVEAAWSYRRPPCIWYGLRRRQESISEEIKEIAWKAQHRLHKRYRKLGAAGKDRRKIATAVARELLGFIWAIGTRAETVVRQRTAA

SEQ ID NO: 338130 - protein, 362 aa, unidentified
MNDSITWVGMDVHKDSLVVAAVDGEAGSLLWRGEYPNMDKGLRRLVAQLKKSGSPRCVYEAGPCGYHVRRFLQSHGIACDVIAPALIPRKPGDRVKTDRRDAEKLARMHRMGELTTVHVPTPAQEALRDLVRTREDAMEDLLRRRHRLSKFLLRHGLRFEGRSWSKSHRLWLRSRKFQDGNLETVFTEYLLSVEQEEDRLRRLDRRIEEESLRPEIAAVVGRLKTLRGIQTLTAMTLISELIDLRRFAQPRELMAFVGLVPSERSSGGRERRGSITKTGNAHVRRVLLEAAWHYRHPYRGGGKAIPRRRKDQPPAIVEIARKADLRLNRKYFRLVLKGKRTPVAATAVARELAGFVWAAGRA

SEQ ID NO: 338131 - protein, 370 aa, unidentified
MKKLNKYVGLDVHKDTIAVAVAEAGRDGEVRLYGTISSDLHAVEKVLHKLGGENITLRVVYEAGPTGFVLYRRLRQLGIDCIVVAPSKIPQPKGPRQKTDRRDAQQLARLHRAGDLTAIYVPDAVDESVRDLTRARADAVHDLTRAKLRLKSFLLRQGYHYKGKANWSEAHQRYLRELALPLPAMKAVLEEYLLAIDQAVQRVSRLDQLIEVQVPQWRLYPCVQALMGLRGFQLTAAAVLVAELGDLRRFHHPRHLMAYLGLVPREHTTGDSRQLGGITKAGNAHARWILIEAIQHAFLPPKVSAPLALRQRELPPAYRELSWKVQVRLHKRGWHLLHRGVMKPKVCVALARELCGFVWDLLRRVPAPTA

SEQ ID NO: 338132 - protein, 427 aa, unidentified
MNNMPIPVAGVDISKRFSDMCMLAPDNSVFRRVKIIHDLTSMQQSLSALQDAQTTFGDKPVIVMESTSHYHRLLWQFMTEAGYEVIVINPIQSGGLKNIHIRKVKNDKVDAYKIATLYRLKLLRPSHMPVQAIADLQALSRQHQDIKEDITRQSNRLTAVLDQAFPGYDTIFSRITAVSSLAVLEQYPTPFHILAAGEGDLMALLVKASKCGVKFAAAKTAKLLEASRKAVWMGIRRDADALLIRSCVATIRTMLANVQIIDAAMRRILADNPAIDMNVRLLQTIPGIGEYGAIVLLSEIGDISLFQKPKQLTAYFGLDPSERQSGKFKGTKNKLSKRGSRYVRCVLNMAAVNSIYASAHGKVGNPVLAAYFEKKRASKPHKVAICAAMHKIVNIVFAVLRDQKPFELRLPEEHDRMLKERNKLAAA

SEQ ID NO: 338133 - protein, 343 aa, unidentified
MEHYVGIDVSLKESSVCVVDSKGKVVRETKVASEPEALCRVVAEIGLPLTRIGLEAGPLSRWLREGLVDAGFEVVLLETRHVKAALSAMTVKTDRKDARGIAQLLRMGWYRPVHAKSVGSQEVRALLVGRKLLQAKLLDVELSVRGILRGFGLKVGEVSRGRFEARIRERAEGHAMLEAVTGAMLQARAALWSEFTRLHRQMLQIARADHVCRRLTSAPGIGALVAITYRSAVDDPGRFDKSRTVGAYFGLTPKKYQSGETDIDGGISRVGDAMVRTALFEAAHIMLTRATRFSALKRWAMGVAERRGTKRAKVALARKLAVVLHRMWADATEFRWTKGAAAA

SEQ ID NO: 338134 - protein, 459 aa, unidentified
MGRKRAAGQGWAGVQVIHPNAAGLDIGSTEIWGAVAPMRTAVAVRKFGTYTPDLEALADWLMACGVDTVAMESTGVYWIPIFEILEARGLAVFVVNARHVKNVPGRKSDVQDCQWIQGLHSVGLLRGSFRPAGEITALRAYLRHRATLIKYRAGHIQHMQKALAQMNVQLTQAVRDIVGVTGMAIIRAIVAGERDPKRLAAFRRPGVKKTETEIAKALTGNYRPEHLFALQQALTLYDTYSAQLAACDAEIERQFSNLKPISDDLPPLPPSTKRDSHSKNGPRYDARSHLYRITGVDLVAIAGLNESTVQTIISEVGTDLSAFPTEKHFCSWLGLAPHNDVSGGKRLRSQTLKTDNRAGQAFRLAAQSVAKSPATAFGAFYRRMKIRLGPKQAIVATAHKIARTFYHMLKHRTPFHDMGGDEYQRRAREREIKTLQKRAAKLGFALVEPAPVSVAAGSF

SEQ ID NO: 338135 - protein, 363 aa, unidentified
MKIVGCDLHARQQSIAMVDTETGVLTEKVLKHEGNAVREFYAALEGPVVVGIEATGAMQWFLELLEQLGIECRVGHPAKIRAAETRKQKHDRRDAEVILDLLLMNRFPDIWMPSTAQRDLRTLLRDRHQWVKMRTRLQHTLQAIALNHALREGRALWTAAGRRNLQDLTLPKYTAQRRDELLSLYTQLDKRIQQLDKQVETEARQRSQARRLLTHPGVGPVTALATEVFLGDPHRFAGAHQVASYIGMIPCEHSSGKRQRLGKLSKEGNSLLRYLWIEATLHAVVKDPELKRFYRRKLVQKGMGKARVATARQLGIRLWIMLRDEIEYEEFCRRGKLPQKGKAHAGMPDYNSGPARAVTGSTE

SEQ ID NO: 338136 - protein, 377 aa, unidentified
MSKIRFVGLDVHAETIAVAVAETGGEVRSHGVIPNRLESVRKLIGKLGPVGALKACYEAGPTGYVLYWQLTQLGVACELIAPSLVPTKAGDRVKTDRRDAEKLARCYRAGELTAVWVPDAAHEALRDLVRAREAAKKDQLRARHRLGKFLLRHGRRPEGLKAWTKKYLEWIKTHVHFDQAALEVTLADYLEEVDHVAARILKLEKAIDEAVRQAPPEIRAVIEALQALRGVAQTTAATIVSELGCVSRFQSPRQLMGYSGLVAREHSSGNRVRRGGITKTGNSHLRRVLVEAAWAYQHRPNVTGFLLRRQKNLALSDEVKKIAWKAQQRLHKRYQAFAARDKNKNQIVTALGRELLGFIWAIAVHIEGQQKQLRKIA

SEQ ID NO: 338137 - protein, 340 aa, unidentified
MNTTQVAVDLAKSVFQVAVSDSPGRIDEQHRLSRAKFHRFFAEHQPVEVLMEACGTAHHWGRELEALGHRVSLLPPADVRRYRDGDKTDRADTKAILEAARNTAIDSVPVKTIDQQAVTALHRLRSGYLSTRTARINCVRGLLREFGVVIPVGARHLAPRARQAIEDEAVPAYLEPVLLDAITEVEELRRKAADIERHLKGLAKHMPEASLLMSVPGIGVLTATALVALVGDVQRFRSARHFAAYLGLTPREHSSGLSRRLGRISKRGNRYLRMLLIHGARSVLRAAKLKEHPDGLRSWALGIECRSGHNTAAVALANKLARITWRVWRDGRPFEQRLVA

SEQ ID NO: 338138 - protein, 320 aa, unidentified
MLSFCGIDVSKDRLDVMVLPDEYSSSVPNDPAGWAILVEQLRGFSITAIGIEASGGYERGAVRSLQAAGMPVRQVNPFKLRQFAKASGVLAKNDPLDARMIASFVGIMPTRPAQRTTPAAEQLVEMLAVRRQLSAEKTAAENASRLLEDLMLQRLSRRRIARLAADIELLDKRLVEIVATDATLAHRYRLLTSMPGVGPVLACTLIALLPELGGMSRKQVAALVGVAPYAFESGTLKGRRCIWGGRANVRQVLYMAAMSASNWNPALKLFHDRLKRAGKLPKVVIVAVMRKMITTLNAMVRDDIAWADRLSGRHSVTTAR

SEQ ID NO: 338139 - protein, 345 aa, unidentified
MKYIGIDYHKQYFVATMMNEQGEVIRRDKASTDRSSIRHYFKNADLSGGVKAVMEACYGWEYFYDEASELVDELIMAHPLKTRLIAEARIKTDTIDSETLAHLLRADLIPQAYAPDSETRSKKNLLRYRSSLVAMKVRIKNIIHSVLTRNHIEDQLFTSLSDKFGKRGLSYLRAISLKGNDTVILNDYLDLLEETGRKIKEAEKRIQGVCHEDKICTLLNSIPGIGPILAVTIRYEIDDIERFMSAGKLCSYAGLVPSTYSSGNRTYQGKITKQGNKWLRWAMIEAAQQAPAKDLWLRGFYQRISKNGKKIARVAVARKLLEIVYRIWKEEKPYYKKGTVALPFV

SEQ ID NO: 338140 - protein, 363 aa, unidentified
MYSERTSVGLDVHARSVAAAAIDSVTGELKQARLTPSHDHIRSWLDGLAGPVAVTYEAGPTGFGLYRSLTEAGVRCVVAAPSKLQRPAGDRVKTDAKDAVYLARLLRLGEVTPVTVPSVNQEAARDLVRAREDCRGDLMRARHRLSKLLLRQGIVYSGGQAWTGAHDAWLRRQRFDNRATQLAFESDYDAVLAVSARRDRLDTAINDRAADSEFTPVVRRLACLRGVSTLTAFALAVEIGDWHRFSGNSIGSFVGLVPSEHSSGASRAQGSITKTGNTHARRLLVEAAWHHRARYAPGKTMHDRWELAPPAARARGDAGNRRLHARWVTFNLRRKRPVIANVAIARELAGWCWSLAVLDSDTS

SEQ ID NO: 338141 - protein, 330 aa, unidentified
MIKYSNKESGMETWIGIDISKDTFDAAWEQDGKKEHEKFSNTTAGFKALLKWVPDGSKFVMEATGTYHLRCATFLAGSGLHVSVENPLAIKRFIQSDLRRCKNDVSDSFSIAKYGREKSPRAWMVPSEEAREARRLQGLIELLREQISAQTNYFHALQQEDLKDDAQKLCKASIAKMKVAIADAEDRFKSIVSRFWKDDVERISSIPGVGKMSACKLIAKVEDFNRFENSRQFMSWLGMTPRNMQSGTSIHVNGGVTKMGDGRLRTQFYMCAVSAIQSNGRCRAMYERMVSKGKPVKVALVAVACKLLKTAYALVTKKQMYNANFLQFAP

SEQ ID NO: 338142 - protein, 319 aa, unidentified
MAQNDLVVVGIDVAKDKVDACIRSLSQRQTFPNTAQGHRKVVAWLRKHEVSKAVMEASGGYERAWARVLREAGIEVRIVDPKRVRSFALSAGRLAKNDVIDAEMIAWFAETFSDAPGQKYDAAREELQTLVKARLSLIDLRMRLVSQSEHAAPGLVQKAHAHILKSLANEIAKLEAAICAKIKSMPDFAERAEIIESVPGFAETSSANLVAGMPELGQVSDEIAAALIGVAPYDDDSGKRRGERHIKGGRRWVRNAIYMPCVGAATLNNPVLKAYYQRLLAKGKEPKVAIIACMRKLIIILNTMIARRQKWDPSHYALS

SEQ ID NO: 338143 - protein, 326 aa, unidentified
MRQPGSHTSKIKTQIALDVSSKALDVYFKTDGKAFSVPNSEEGLNRILKSLRVYDVSLVLMESTGGYEDLAACFFQSHGFDVAVVNARHARNFARAMGKLAKTDRIDAVVLADMAFMIDASNDRDRYIKPLTDEQRKRLSVMTVRRRQVVGLISTEKQRLTCADDWTRASIKRTIKSLTTELRHIEQQISDHVKKNFVDLSKILLSIPGVGEHAMAVLIGEVPELGKADRRTVSALIGVAPFNHDSGNFRGKRRIWGGRQSVRNVLYMGIISATRFNPVIRTFYNRLVSAGKPKKVALIACMRKLLTIINAMMRTGQPFDVALHGV

SEQ ID NO: 338144 - protein, 414 aa, unidentified
MLKIVYRICCGMDVHKSFVVACIASTNEYGVTTYKRKRFSTFTGDLRRCAVWLAENNCKDVCMESTGKYWIPIYNILEPTCNIVLAHPKYVKAIRGKKTDKRDAKWIADIFKHDLVAGSFIPPADIRQLRDLFRYRWKLTSFTTGEKNRAQNCLTVSNFKLDDVFSDVFGKAASAIIARILENPSEKITDVSGFRTKGMKATNEQVLAAVDGEMCEEQAEKLRIIRSHMDSLQLCKLNLESLILTTAEKYLPQLNLVMTAPGIQSFAAIGIISEIGVDMSVFPTSKHLCSWAGLTPQNNESAGKKKTTRISRAGAYIKPLLVQCALCAIRAKQFPEVRNRYLALKKRRGHKKAIIAIARMLLTAIYNMLKKNEPYNPELYRKGDQPPAHREVSVEEAIFILQRQGYLVTAPTTA

SEQ ID NO: 338145 - protein, 362 aa, unidentified
MLYLAIDQHAKQITVCVRNAAGDEVLRRQVSTRPEKVQTFFQQLTERDSDFMAILEVCGFNDWLLEELRRWNCQEIVLIHPEKPSKKKTDRRDARKLADLLWLNRDRLAAGEPVHGLRRVHMVTQREREDRHLTALRKTLGQRRTRTLNKIHRILNRHNRMWDYPTKTFQTQRGRRWLETLELPEMDRLEMDMLLQEWTIWEEQIAQVDAQIVQRASHQEEGEVVNATQILMTAPGVSHYSGLTLASRIGPVERFPRPRSLANYFGLTPGCRNTGQAKDRLGSITKEGSKIARFILGQLVLHFLKQDPRMRAWYRRIKTRRGSKIARVAVMRRITTIFWHMLTHREAYSVGEPPPRLRSKVA

SEQ ID NO: 338146 - protein, 347 aa, unidentified
MRFYTKQHRYYCGIDLHARSMYVCILDPQGEILLHRNMPCAPELFLKAVAPYREDMAVAVECIFTWYWLADLCSKENIPFVLGHALYMKAIHGGKAKNDKIDAHKIAVLLRGGMLPMAYVYPALMRSTRDLLRRRMHLMHKRSELLTHIQNTNSQYCLPQFGKKIAYKKNRQGVAEHFADSSVRKSIEMDLSLIDHYDKLLTEVELYITQNAKIHDVNAFNRLRSVHGIGKILALVILYEIHEIDRFPTVQDFVSYARLVKCSKESAGKRHGSSGAKIGNVHLKWAFSEASVLFLRANPAGQRYADKLTSKHGKAKALSILAHKLGRAVYYMLKRDKAFDMNKFLNS

SEQ ID NO: 338147 - protein, 417 aa, unidentified
MKTENYAALVALDWGETEHAFAAQVAESSIETGTIPASSETLHSWLEELHERTHGGLVAVALEGGKSAVVHALLAHPWVVIYPVHPATSERFRTAFTPSGAKDDVPDALVLLDILRQHRNLLRPLTLDSPQTRKLSALVAVRRAAVDQRTRFSSELASTLKSYYPQALDLCGRDMAASLALDLLTRWPELKALRAARAVTVQAFYTAHNSRRCDVLAERIAVIAKSRPLTEDRAVIEPAVLRVKLLVDILRPLQRNIALIEEHIAEAFEAHPEADLYRGLPGAGPATAPRLLVAFGTDRGRYPQASSMQKFGGIPPVKVKSGHQLWIHWRWNAPKFLRQTFVEWAGQSIPKCPWAKAFYLQQRAAGKHHQAALRSLAFKWIRILWRCWQDRIPYDEARYIASLRQRKSPIAAHLYTA

SEQ ID NO: 338148 - protein, 300 aa, unidentified
MSSNIKYIGLDVHKEAISIAVLNGAGKLVIESIIETKAATLVQFLQGLRGELHVTLEEGTWAAWLYDVLRPRVHEVVVCNPRRNALLKEGSKSDKVDARKLAELLRAGLLRAVYHGENGLRTLRELARSYQTISKDLKRVMNRLKALYRSWGIPCAGMQVYAPRYREEWLNKIRQAGVRRRAELFYQHLDGLQVLRRQVRGEFLAESRKHKAAKVLRQIPCIGPIRAALLLALVQTPHRFRSKRQLWTYSGLGVETHDSAQHRYVEGRLQRWKKPQQVRGLNQNHNHEMKEIFKSTATSA

SEQ ID NO: 338149 - protein, 402 aa, unidentified
MNAVGIDVSKGKSMVAIMRPFGEIVSAPFEIKHTTSDINSLVELINSVEGESRIVMEHTGRYYEVLAHQLSEANLFVSAINPKLIKDFDNDSLRKVKSDKADAVKIARYALDKWQNLKQYNVMDELRNQLKTMNRQFGFYIKHKTAMKNNLIGILDQTYPGVNTYFDSPARSDGSQKWVDFASTYWHVDCVRKMSLNSFIDHYQNWCKRKKYNFSQSKAEEIYGKAKELVPVLSKDAITKLIIKQAVDQLNSASTTVESLRTLMNETASKLPEYPVVMAMKGVGTSLGPQLIAEIGDVSRFTHKSAITAFAGVDPGVNESGSYEQKSVPTSKRGSSDLRKTLFQVMDVLIKTHPQDDPVYQFLDKKRAQGKPYYVYMTAGANKFLRIYYGRVKEYLSSLPES

SEQ ID NO: 338150 - protein, 323 aa, unidentified
MQGKIMSEQSAAQPVYVGVDVCKDRLDIFVHPTGQRLGVANDRDGLKRLKRTLAGLDVALVVMEATAKYHRLAQRTLAQAGLLVAVVNPLRARLFAEAAGALAKTDRVDARMLAIMAAALDPQARPPAPVAMEALQELVRARSAATRDLTGLKNRRAATQTPFVKTELGRQIGNLERSIGRLSAEIERRIADDPVLDRRRQILMSIPGVGPAVAAVLLTDCAELGELSPKAAGLLAGLAPIACDTGQTSGQRHIRGGRRTVRNALYMAALSAARANPQLKTFHQRLRDHGKKPKVALTAVMRKLIILANTLIKEDRQWLPSKP

SEQ ID NO: 338151 - protein, 323 aa, unidentified
MSQPNPLCVGIDVSKTTLDIATANNEFAQFTAGNDTDGFELIIAELRKHSVALVLMEATGGLKAAVACSLQAEGFDIAVINPRQARNFSRAMGYLAKTDRIDAKVLSQMAEVINRHPERERFIKAIPDAERQILAAMVVRRRQLITMLVAERNRLHPAHPQNRKSINTIIKALEDELSRIDEAMNNHIKTHFKELAARLSSIKGVGAMTVATLLSEVPELGSLSRREISALIGVAPVNRDSGTMRGRRTIFGGRAGVRTALYMAALVATRFNPVIKDFYTRLITAGKVRKVALVACMRKLLTILNAMIRKNEEWSDSYHKFSL

SEQ ID NO: 338152 - protein, 294 aa, unidentified
MIIVGCDDHPGLPQIAFVDTDTGELQERRLQHPEEAEPFYRDLAAHGIKGRVGMEAGGHARWFERLLAELNFELWIGDATEIARKGEREQKTDRQDAQHILKLLRKDDVPKIWVPSWENRDLRQLLWHRHRMVQARTRIMNQLQAVALNEGLRCKKRLWREQGRQQRESFRRAPWASRRRQDLLELRDRLNPTIGELGQAIEQEAEKFPAARGLMTHPGVGPLTALAFVLIIGRAERFQCGKQIAAYLGLVPLEDSSGKRRRLGQITKQGSSMVALLAGGSGAGHSSQPSRMAQ

SEQ ID NO: 338153 - protein, 459 aa, unidentified
MAQRVDPTKRRADGTPIEPLSIKHPNAAGIDIGGKSHYVAVPPDRVGKGESAVREFGPHTEDLVAIADWLCACRIDTVALESTGVYWIALYELLQAHGFDVWLVDAKSVRHVKARKSDVLDCQWLQQLHSFGLLCKAHRPDEQVCALREMSRLRDITIDERARHTQRMQKALTQMNVQLTNVITDITGETGMKIIRAIVLGERDRMVLAQMRNYRIHASTGQIAKALEGRWSREHLFSLDHELKAYDFASEQVARLDAEIKVLLDAMRVFDKTPAANANKGRRKNTLAFDGRQALMNWCGVDLTEVPGIDVGTAMKILSELGRSLTRFDTVKHFCSWLGLCPGTRISGNKRLSGASKRIPNRVARALKLAAMGLSRSRCAMGAYYRRLALRMGSPKAITAVAHKLARIVYAMLSGQADYVKEDQVRHDARYRERAIKALQKRAQELGLMLSPQAVPAHA

SEQ ID NO: 338154 - protein, 352 aa, unidentified
MRTSQKTQGMITTIGIDIGKNTFHLIGLDERGAIVLQQKVSRSQLERRLANIPHCLIGMEACSGAHHIGRQLIAVGHDVRLIPAQYVKPFLKGHKNDYRDAEAIAEAVQRPTMHFVTIKTPEQMDLLALHRVRSRFVSQRTGVINQIRGFLIERGITVRQGPMPLRKALPEILSADTGVLSPRMVGLIIDLVQEWRRLDERIAAVSAEIEALAEQDDGCERLMTVPGVGPIISSAVVAAIGNGTGFKQGRDFGAWLGLVPKQESTGDRTILGKISKRGNKYLRTLFVQAAHVILARRPSAAMRGLWPWIEQASKRLHRNMLAIALANKLARIAWAVLARGGTYQPRITAHAA

SEQ ID NO: 338155 - protein, 428 aa, unidentified
MIASSATTQKCIFVAIDVAKLVHEVLVEPPTGRRQRWRIRNCQPDYETFRDRLRGLETPVLIGFEATGNYHRPLAYYLGQCGFELRLLSSLAVARTRDALYNSWDKNDPKDTQVLLHLLKTGVSQRYHDPLVHRTNDLQELAQTHYQISLRKVQVQHSIMTHYLPLYFPETERYYTNSRAQWFTQLLHRFPCPAAITRYSPDAFEQEAWTVVGRKVNKRGFLADLYATAHQSIGLAVAEDSEAIQMFRVMLAEHQPLCATRAAIEHQADQALQSHPDYHRLRTLPGVGPILALTILAEAGDLRRFPHHRQFLKFCGFDLSTQQSGQFRGVSRPSKHGNARLRYAFWMAANGAVRMRQNTFREKYARYIKADPENPARKRKALCAVAAKVARVAHGLIKTGTDYRPYFEALPPSGALRSRGPSRQVLTS

SEQ ID NO: 338156 - protein, 478 aa, unidentified
MDDRRRDGIDLGSTSAHTVRVLSGEGATVCRRKAAPTLHGLAEVERAALAGAAPATRLEVVIEPTGPAWLPIAVFFCSRGHTVYRVSSAKAHDLRRFLHRHAKSNGIDADTLARLPLVDPAGLHPLELPDAERAALDRRVRACDRLTQQAATHKRRIKDLVRQLLPCSPLVGELGMADLAVLERYADPHALLAAGRARLARVIVKASGGHLGAARAEQWLQAANAALDLYGDHPAVAFQDLAAEVATEVRLLRVTQAELAAHATQREACYHWVDPLALARSLPGLAEIGGPALTATMGKASRFPAASKFRAFTGLAPRASETGQTDRKPQPISKAGNRLLRTTLVRAADNARHIDPQLARIYYVQMVQRGKDHLGAVCVVAAHLAERAWTVMDRGMPYVVCDTDGVPVTPEQAKAIIAEHWTVPEEVRRRRRSRKGKAPQQVLQGHVTGAQGATRRPSPSPASLGRRAGRVKQARART

SEQ ID NO: 338157 - protein, 363 aa, unidentified
MKIMTGIDLHSNNALCGLMDESGRRLVHKKLPCELPAILQLLEPYKDRIATVAIESTYNWYWLADGLQDHGYPVVLANPARMKPYDGLKHTDDVSDAYFLTELLRLGILPTGHLYDRKHRPVRDLLRRRLLLVRQRTSLILSFKSLNERTLGQRVPLSRVKTMSAEDARARFTEPADQLLGGQQIELMGQLQQAITQIEQHVLGVAGKWNSYQRLQELPGIGKILGLTIALETGDAQRFAGAGNYASYCRCVKSLRQSNGKKKGENNRKCGNRYLAWAFVEAAHFACRYDERCRRFYDRKAKQTNPIIATKALACKLAKAAWHVMKENVSFDADRVFGPGRKEAFGETGREPAKGSGRKSPQD

SEQ ID NO: 338158 - protein, 343 aa, unidentified
MQTVTTIGLDIAKSVFQVHGVDAGGHVVIRRQLKRRYVLAFFQKLPRCLVGIEACGSSHHWSRELQALGHTVRLMPPAYVKPYVKRHKNDAIDAEAICEAVTRVNMRFVATKTPEQQSCLTLHRTRHLFIRQQTSVINAIRAHLAEFGIVAPVGRHGVEQLLGVVADASDKRLPEVARACVAALGAQLQTLKAQILEFDRMIRAWHRSSEASRRLDDIPGVGPVLATALIASVGDPRAFRSGRDFSAWIGLVPRQNSSAGKDRLGSISKRGDRYLRSLFTTGALAVIRYAKIHGTKHRPWLTALLVRRPTKVAAIALANKIARMAWAMMAKGERYKEPAALAA

SEQ ID NO: 338159 - protein, 413 aa, unidentified
MEWIACVGIDWADAEHSYTIRTAKGENRCGRVSSSPEELHGWVRGLREQFPQGTIVIALEQGRASLIDALLAYEFVRIIPINPRASKAYRESLRLSGSSSDPVDAELICDFALKHLDELRVWQPDDAATRKLRALVQTRRTLVDQRTALTHQLSAVLKGYFPQALQWFNGPSSRLLRSILRLWPTLSALRAANPEQITGIMRAHRLHGVPRRVKELGDQMAKAVALINDGAIIEPSSMYAQSLAVMLDVLDEQIDKFDAEVDAAWAAHPDRHIFDSLPGAGRTLAPRLAVAFGTDRSRYKDANEIQCYSGVAPVTEQSGKYKQVHARWGYPKFMHQSFHEFAASSLPHVPWANACYRQQRERGAGHHAAVRAVAFRWIRVLFRLWKDHLEYDDATYIAALVSKGSPLATCIAA

SEQ ID NO: 338160 - protein, 411 aa, unidentified
MAKKTYVGIDIHSKEHTAAIISGEFGHANIAWEKANFVKITNDKDSFEKLLRILYSYTRDPGDVVVAVDYAGSHYAEPLTYYLYDKGFAIYYLEPKGMKAARERFLDLENKSDKIDSISLAYMLYLRDTQGISFSISQTKIDIETKATVLNSLVLQREQFTDLAKQATNRLHQFLLAVFPEGEREYFKTLLRIIRLYPVPAAIVNSDNLKNIPRINIEKRRNIVELARSTVGVPNENYRWLIQEISNLREEFVQRRDILTSKIEQLIEEHPYGQVLLSFPGIGAVTAATLIGLIKDIARWPDKKKLKKAAGVYGREVQSGLHSKYRRGKEGNRRVKKALFHACCSCLRDDIRENDIKDYYIKQIKYGKPKMKAIYKSMGKLIEIIYHCLKENEFYKYTGVYKSNPQSSKLL

SEQ ID NO: 338161 - protein, 343 aa, unidentified
MGRKIGVDLHKNSFRVCYYQNDEKYDFETYHVSVKGLEHFKKGLKKTDELAVESTGNTGHFYRAVEGKVKRIRVINPMQFKVISESVKKTDDEDALKIAKFLSRDMIPEVRVKTKQEGQLASLIGTRDKFVKLRTALKNKVHNILNANGIVTKTELLTSDKSLDKVLGNKLDEACLFELEIIVSEIRNLNEAIKKIDVQVKERGQKLDGFKGVTSITGIGDMSGTILLNTIGDVKYFRDEKALASYFGIVPRIRSSNETTHMGRITKMGNKIARTALVQSTLIAIRYSPYLRAFYDRLKAKKGSGKAIIATARKLLGIVYNTLKNKWVFEDFNNYKLAPQGAY

SEQ ID NO: 338162 - protein, 324 aa, unidentified
MFGEFMDIGIDLGKRRSYVVMQEGEVIVKEGYTDTSKEGFEDFFGDTTNANVVVESSSSTNRVAALLEGHSIIVANPMKVRVIAQSVKKTDKIDAHTLLDLYKKDYLPRSWLPDHKTRDLRDMCRNRDFLVRQRTAVKNRIRYLMYTEGMEFRGFSKRTVSGLKEHPLLNTLVYQLQSLDCKIHENDQQIRREVKGNAYARLLYTIPGVGEYSALVISSEIGDISRFGSASALSAYAGLVPRLRQSGDREWKGRIIKGNVYLKTILVECVQVHIKLCPKSFISYAYRRIMMRRGHNKAKIAAARRLLELIYYMLKRNEEYRTNE

SEQ ID NO: 338163 - protein, 370 aa, unidentified
MAKSTTLFVGLDNHKEFNTVAYTEAATTDPPVYVGPIGTRQADIDKLIRRLHSKASRLVFAYEAGPTGYGLYRYLTGKGEECRVVAPSLIPKRSGVRVKTNRRDAVELARLLRSGDLVSVWVPGIEDEAIRDVCRARDAARITLKAAKLRLKSFLLRLGLQYTGRATWNDAHRRYLARVVCPTPAQQIVFQELLHAVDEQVERLARLERELVELAPSWRLSPVVEAMQALRGVQFLVAITVVAELGDLTRFDNPRQLAAFVGLIPSEHSSGTTRRQGGITKTGNGRARRVLVEAAWAYRFKAKVSEEIRARLEKLPKPIQDISWKAQVRLCARFRRLVSRGKDANVAVTAIARELIAFMWAIAKEVPLQA

SEQ ID NO: 338164 - protein, 366 aa, unidentified
MKKIAYVGVDYHLNSLSIAVLIENDVNFHDLIRIKNQDNLILKYMKKLSKKYDIKTCYEASFSGYSFQRKMTAWGFHCDVIAPSLIPKKKGDRRKNDKRDAKDLAQTYANGMLTVVHVPTEFEESVRGLIRCRLSFKGLEKKTKNQIKSLLMSQDITCPFKNRWSKKYQSWLSNLELPEQHIKTILEEQLGLLNYTQSRIASLDDQIKDIAESRIYASSVKKLRAFKGIGTLTAMILIAEITDFRRFPNARSLMAFLGLIPSENTSGDNFRHGPITKSGNSRVRKHIVEAVQHYPKATKVSQQMKEDLSHVDARTAQIVLNCTERLHKRYWHLALRGKTRSKALTAIAREFVGFIWAMMQPEPIAS

SEQ ID NO: 338165 - protein, 345 aa, unidentified
MTVYIGVDFHARAQTISYLTTEDGEIQRLQLDHGQPDEVRSFYQQFAGQQVVVGFESSGYAAWFEELLEELGCEIWIGHATAIRLFARRRQKNDRRDADLILDLLLRGDFPRIHRYSAESREVLQQLRYRQRLVKMRTMVVNSLLFMASSRGLSLRTQLKSRRGLERLQQLALPQPLTAQRDELCQLLLELKTKIDKVEEWLAAKAGSDVRVKRLRTHYGIGPLTGLCLVHTLECPERFANSRKVTAYVGFDPVEDSSGERRRIGSISKQGSRLLRFYLVEAGQIAVRKDQDLARVYQRVLVRRGHAKAKVAVGRRLLVRAFIMLRDDIDYAEFQRRGVAARSSR

SEQ ID NO: 338166 - protein, 342 aa, unidentified
MTMIGIDPHKATHTAVAVDDNEHVLDGFKVRASTVQVDRLREWADQFDQRQWAVESANGLGYLVAQQLVAAGETVFDVPPVLAARVRLLGSGRTQKNDPNDARSVAVAALRSDRLAVVRPDDHRRVLRLLAKRHRDMARLRTKHCTRLHALLLELEPGGISSHITVTKANQLLSRVVVDDQVTHHRVMIAQELIDDIARSDTALKASKKRISTAVAASGTTLCDIVGIGPVCAGVIIGYTGDISRFPTKGHFATYNGTAPIEVSSGPNAKHRLNLRGNRTINHVIHIAAICQLRHNSEGRVYYDRKIAEGKSSKDAIRALKRRISDRVYRHLIDDTIRTVSA

SEQ ID NO: 338167 - protein, 363 aa, unidentified
METPMINVGVDVHKIFCQACLKDEHGTVLEEFRFRNNLEGADKLASILKKHGEAKVALESTGNLWVKLYDRLDQEENIDVILTNPKKTRVIAEAKIKNDKLDARLLADLVRADLVARSYVPPKDIRMQRALLRERISLVESRTMIKNRIHALLDKYEIHCAYTDLFGKKGREWLRSLNLPGIDQTILEVNLQRLEELEAHIDAFTHKIAQEAVEKPEVRLLMGFTGIDYYSAMLLASEIGDVKRFSSAKKLVSYAGLAPGIRQSADRTVHGHIVKDGNKRIRWILVEAAQHASRHDPRLRPFYLRILKRRGYQRSIVAVARKMLVAMYHVLSKNEAYHGVRGELFERKLKRLEWETSRSLQAT

SEQ ID NO: 338168 - protein, 358 aa, unidentified
MKKIVIGIDISKEKIDASAIDVRDSQLGVVRLDYQVFDNRPMGFRRMLVWTRHLMKGTTLQDVLFCCETTGGYDRCLCDYIYGKGLDIWREGALQIKRSMGVRKGKDDKADSLMIAEYAMRHMDKAVMYESPNETIRELKALFLYRHKLVQEKAEKQVRAAHLTDTASKSKSMKFILHDARKSVKAIQKSIKECEKQILELIESDEELQRNYNHIVSVKGLSIVNATAFIAYSNNFRGITTANKMASYYGIASFRDRSGTSVDKKACVKYYSCSLLRATITQAAEWTVKENGIYRDYYLRLKTEGKPYGVIINNVKNKLIHLVFSLVTNDMDYEQNHEFLRVKRKSEQKMSAQLENIN

SEQ ID NO: 338169 - protein, 400 aa, unidentified
MISVGVDVSKGKSTVCILKPYGEIVCSPFEVQHEEGAMEAFVGLLAKLDGEIRVVMEATGIYHLPVLTFLQDKGYFVSIINPFAMKKYVKDNSIRGAKTDKLDSMMIANYGIEKWYKLQKYEGDEETYAELKLLGRRYRYYMELHVKALQELTHILDYVMPDIKKMFNSWNEANGKDKLSDFVEKFWHYDLITSMNLEEFTEEYLSWAEEKKYHRSRSKAEAVYELACNGIPTLSSNTPSTKMLVQEAVSVLRAVDSSLALILARMQSLAKSLPEYSTVREMGGVGDVLAPKLIAEIGDVRRLHSAKALIAWAGIDPPPYESGQFIGSKRKITKRGSSTLRKVGYEVMRVLKSHPAPKDDAVYNYILKKEAEGKGKKHAKIAGLNKFLRIYYARVTEVYQ

SEQ ID NO: 338170 - protein, 379 aa, unidentified
MKKHSTLFIGLDTHKDSIAVAYATDSRTEPVTYLGAIGTQHYAIRKMVRQFESRHPGCQLQFVYEAGPCGYWLYRLLSSWDYPCFVVAPSLIPKKPGQQVKTDKRDCMQLAQLLRNGDIDPIYVPEPEDEAIRDLSRARETAMWDLKNAKSQLKAFLLRHDIRYTGSANWSAAHIRWLSELVMPTPAQNTVFREMLYTIVERHKRLERLDNELTYQVRRWRFYPLVKAVQALRGVQLLVATSVVAELGDLQRFDNPRKLMAYVGLTPSERSSGSRRRIGPLTCAGNKRARRMLIEAAHAYRYPAKTSKILQLRQEDLPKAIVEKAWDAQVRLCRRYRTLMQRGKHRNVVVAAIARELVGHIWAIAREVVIAKPDPRLML

SEQ ID NO: 338171 - protein, 422 aa, unidentified
MVAVMIGAGPHKAWHTAVAIGVAEEPLCELRVRASAARAQRLLAWAAAWPERTWAVEGAGGVGHLLAQQLLAAGERVLDVAPELGARVRLLAAGDTNKNDPDDARPVAIAALRSAGIAEVRPDDHAAVLKAWSKRHRDLGRTRTQLVCRLHAVLCELIPGGVPKAITAAHTAHLLNSITPSGAVGAARCELAGAFSDDLRRIDAQMRDTHKKLTAAVRATGTSLTGLFGAGPVIAAAVIGDVRNISRFPGRDHFAACNATAPIEVSSGQRKIYRLSSRGNRRLNHAAHMAAVTQIRHRHSAGRAHYDRKLAEGNTPKEALWSLKRQISDAIFACLQADARRAAAARSPGGQPGHHSESRAAGLHPARRLFGQATPGPATHPTTPAGTDAPAAFPAPLPARASEQPGPGPGKARPRSGASRRP

SEQ ID NO: 338172 - protein, 366 aa, unidentified
MKDQLYCGLDLHKRFSYIVVKNSAGFQLAKGRVENNEVDISNFFAPFGGHHIKVALEATSNYYWMFETLDRMNMDVNLSHPLKTKMIADAKIKSDKIDANVLADLLRSNFLPTSYIPPKKTRELREILRHRIRLVTMRSSLKNRLRDILTKNNIKDPYTDITGVKARQFIKELPLAPVFKLQRDDLLDQIDFINKKVENINRILKTYAEDYPEVSRLTEIPGIGIFSALILLAEIGDINRFPSPKKLVNYAGLCPGLHQSGTTCYNRPITNQGDKYLRWILTEAAFHAIRHPGPLKDFYTSLFKTKGCQRAIIAVSRKMLVGIYFVLKDNKPFNPVRRKKLLKYNENLDKPGLGTWSTKETVETIG

SEQ ID NO: 338173 - protein, 346 aa, unidentified
MEHYVGLDVSLKLTAICVVDRSGKIEREGVVTSDPETIAAFVKSHAPHVARIGLEAGATSTWLWTELNKMGLPVICIDARHAKAALKMQINKSDRNDAVGIARIMQCGWYKEVRVKDLDSHAIKALLVSRALLVKIKRDIENQIRGLLKNLGLVIGRAKMNVFAVRAAELADARPAVAAAVEPLLKAREAVGRQIADLDRKVLRLARNNAQVRRFITVPGVGPITALCFLATIDDPARFKRSRSVGAYAGLTARRYASGEIAWTGRISKCGDKMLRSYLYEAANVLLTRVAKWSALKAWGVRLAKRSGLRKAKVAVARKLAVILHRMWIEGTEFKWSSKEAANQPA

SEQ ID NO: 338174 - protein, 408 aa, unidentified
MKHVIALDVSKGKSTVVIYDRYRQCEFEGELNHTRVDFERLHERIKEITRLDGQAPEIIFEATGVYSKPVEKFFIDFGYTYCRMNPLEANLQMASMRRNKTDISDAHELAKTHFKMEREPTYVQDDYYEQMRALTRYYDEIDEEVTLLKSRMHALLHVSFPELEKLITPRSALFLNIVQLYPHPALLLAHSKTMIKNRLKVNTRKNLSLARAEAKAEVLLEAAQNSYPAIQENDIRCDQIRDYAARIMDLVEKKEFIVRQMVEMSEGRNEYEVLRSIPGIGDTTACRLIGELGDIRRFQNAKQLNAYVGIDIMRYQSGNTQYRDRINKRGNKKLRKILYFMICTMITLRKKTNNHLVDYYDKLKTQPQRKPHKVAIVACINKFLKMTFQLLIHGTLYDYESALPAQKS

SEQ ID NO: 338175 - protein, 338 aa, unidentified
MAIVTVGIDLAKNVFAVHGVDATGKPALVRPSVARAKLLELVASLPPCLIGMEACSGAHYWARLFAAHGHTVRLMAPKFVVPYRLSGKRGKNDKADAAAICEAVTRPAMRFVPPKSIEQQSQLLVHRARQGFVVQRTATINRIRGLLSEFGVVLPLKASVVRREAMHQLEDLPGWANTVIGDLLSEVSRLDERIAQYDKHIEAIARESAPARQLMQLPGVGPTTATALVAMIGRGQEFKCGRQLSAWLGLVPGQYSSGGKRRLGRITKAGDPYLRMLLVLGARSVLQNAASKSDAVSRWAVQLAARVGYWKAIVAIAAKNARMCWAVLARGESFKLPA

SEQ ID NO: 338176 - protein, 357 aa, unidentified
MKIVAGKSKKSVVGKDVYVGIDVHKESWQVTVRTGGEEIFNGRIPGQYQSLKKLFERYQGCRMKVAYEAGPFGFWLSDKLVEDGIEALVVPPSLIPTESGNRVKTDKRDSRKLARLLESNMLKRVYVLTPEEREHRDLLRTRRQLVDHRNDVARQIKSKLLFYGITSPFTTTTRWSLTYIEWLKVLRCDTDYLRESFNLLIDLYEYLTRQIVRINKKVALLCRDKKYRDKIKLLCTAPGIGRLTAIEILVELQDITRFESAEELAAYIGLTPSEYSTGERTRQGRITRCGNKRVRTYLVESTWMLITKDPAIRLKYLKLKSLRGGKRATIAIARKLLIRIRRMLLDNVPYRMTAMAA

SEQ ID NO: 338177 - protein, 386 aa, unidentified
MPPAAVPRFTEADYDRTLVLGIELSSKNWVLAAQVPGLAQVKAKRTIEPTKEALLEALASYRARAAAAGHQIERVVSIYEAGWSGFWLARWLITQGVQVYVVQPSSVLTDRRMRRAKSDGIDAELLLRTLLAWLRGEPRVCSMVPIPDRSDEDARRAVRERGELVSERVGLVNRIGAVLATLGAGDYNPLLQSRRRRLNELRTGLGEPLPPHARAKIERLLARLELVLAHITELERERNAVAETAAPDHAARMIQQLAGLRGIGVQSATVLVREAFVRRFANGKALGSYAGLTATPYSSGGLEREQGIGKAGNRRLRSVMVELAWLWQRYQPGAAQVVWFRERVGKTGRRLRKVMVVALARKLLIALWRYVTDGIVPDGAAMKPAI

SEQ ID NO: 338178 - protein, 366 aa, unidentified
MKKISTVAKNGNEIFKEPKLTIGLDLGDRSSYYCILDEAGKVILEHQLPTTPKGIHQVFSRISRSRIALETGTHSPWVSRQLAQLGHEVIVAHARNVRLIGESSRKDDQLDARTLARLARIDPGLLGPVRHRSAKAQIHLTVIRARAGLVSARTALVNTARGLAKSFGERLPKCGTEQMNREIAKELSQELRDALDPLLAEIESLNERIREYDRRIERIAKEVYPEVALLQQVKGVGTLIGLTYILTLDDPHRFRRSRDAGCFLGLRPGRRNSGMSEPQMHISKEGDGYLRTLMVQGAHYILGPFGQDSDLRRWGLKLAERGGKNAKKRAVIAVARKLAVLLHKLWVSGEVYKPLRNNHKVVSAVA

SEQ ID NO: 338179 - protein, 338 aa, unidentified
MFIIGIDPHKGSHTAAVIDRDEQLVGELSVCADRRQRDRLLRWAAPFEPRLWAVEGATGHGALLAQQLVASGETVVDVPAALSARARLLDSGHKDKTDAHDARSAAIVALRNRNLRAVTLEDHRQILRLLARRHHQLTAARTRAICRLHAVLAEMIEGGLSKNLTAKRASVELRKLRPQDLIGIERKRIAVEFLDEVRRHDCSLTELHTRIVTAVKATNTTVTEIYGVGPIIATYLIGYTGDVGRFPTAGHYARYNATAPIEASSGPRVRHRLNPNGNRQLNHAIHITALGQIAHDTPGRAYYLRKQTEGKSRKEAMRCLKRRISDAVYRQLRADLTN

SEQ ID NO: 338180 - protein, 341 aa, unidentified
MEQATTIGLDIAKHVFQVHGADAAGHVLFRKRITRAKLLGFLAAQAPCVVAMEACAGAHYWAREIAKLGHHVRLIAPAYVKPFIKRQKNDAADAEAVCEAAQRPSMRFVPVKTEEQQANGIVFRARDLLVRQRTQCVNALRGHLMEYGHVFPKGITHVETLVAVVEDLQSSLPNSVRVILKLLVDTFTALEAQITALDVEINQRSKSDPTARRLMTIPGVGPIASTAITALVPAAEGFPAGRDFAAWLGLTPLQKSTGGKQKLGAVSKRGERTIRRLLIIGASAVVRQASRRGAPKGSWLAQMLARKPKMLVTVALANKMARIIWALLVKGGTYRAPAVAA

SEQ ID NO: 338181 - protein, 331 aa, unidentified
MEKLDFLYFIGIDISKRTFDVAIIDGKTTKSFLFNNTKKGVRAFLKLLKNQRIDFPDSLICMEHTGIYGKLVITGLIEKQANFCVEMSLRIIRSLGIQRGKNDKIDAIRIAQYVAKNCNEIELYKPIPEVLEKVKILIKIREKLVNFNADLNKYPNEIKNFAPELSKLTQKNIKKTTKCLKDEIKRIETEMKALILSDDKLNATVGLASSVTGIGIITALYFTIFTNFFTRYQNPKQLACYCGVVPFEHSSGSSIQKNPRVHHIANKTLKKQLHMCALSAVRHDPDLKIYYQRKIEEGKNKMLILNNVRNKLVLRVCAVIKRQKPYQKRVA

SEQ ID NO: 338182 - protein, 370 aa, unidentified
MDSIIYVGLDVHKATVSVAVAEGGRSGEIRQIGVFANRADVLTKMVARLVRPGLRLSFCYEAGPCGYGLHRLLTGLGHDCVVIAPSLIPFKAGDRVKTDRRDALMLAKLHRAGELTAVWVPDVAHEAMRDLVRARTTAVRVLGKARQHLGGFLLRHAKIFAGQGAWTLAYRRWLTTVRFDHPAQQIVLQDYIYAVEDAEKRIARLVQQIEQLLEAWSMAPVVKAIQAMRGVAFINAVTLVAEIGDFTRFANPRQLMAYVGLVPSEHSSGASVRRGGVTKAGNGQARRALIEGAWTYRMQARISRKLHDRIEPLPQEIRDIAWKAQLRLCTRYRRLAATGKPAVVVTTAIAREMIGFIWAIAHRVELQPTS

SEQ ID NO: 338183 - protein, 331 aa, unidentified
MKFQEVIGIDVSKSTLDACVHSLEICLIVDNTKVGYRKLVSWATKQTGCLLDQILFCFEHTGLYSFQLASYLAEKHVNFTIVPGLEIKRSLGIQRGKNDKIDAKNIALYAFRRKKEIKPYQMPDKSLTQLRQILSLREKLVKQRAGYEGTLKEQKKFLNKSENMLLFSIPKKLIRQLNKLINTLERKLDLILEENLEIKNNYDLITSITGIGKQTALYLIVITNNFLLFENHRKLASYAGVAPFPYSSGTSIRGRTKVSNLANKKIKSLLSSCAISAIRHDPELSLYYKRRIKKGIHKMNTINAVRNKLLARVFAVVKRGVPYVKTHAFAA

SEQ ID NO: 338184 - protein, 315 aa, unidentified
MEAMIERCAGLDVHQETVVACVLFGPLDKKPKTSIETFSTTTTGLLALSDWLATLQVSDVVMESTGVYWKPIWNILEGSFHLVLANARHVKNVPGRKTDVKDAEWLAKLLRCGLIESNFVPPEDIRDLRDLTRYRKKLIHHRTSEQNRIHKILQDANIKLTSVLSDIFGVSGRRILEAILNGEKIETDGLRKMVDWRTKASITDIANAINGRIRRHHRDMLRYHWEHMSYLEKAIEELEKQIDQLLSPYRKELELLDGIPGVNKAAAATFIAEMGVDMSVFKSAKHLASWAGVSPGNYESAGKKKRVKPHKVIKL

SEQ ID NO: 338185 - protein, 355 aa, unidentified
MQKYSISFKGQNIFVGIDVHLKTWHVTTLTESGYKYSFAQHADARELFERLNKKFPEAHFKSAYEAGFCGFSVHYALTEYGIENIVVNAADIPTTGKEKAMKTDAVDSEKIAWSLKCGELTGIYIKDKRFMDDTNLMRLRQRFIKDLSRQKNRTKHLLYTQGVIYPKRFLNSRTHWSRNFMQWLREEVELLSEEKLTLALLCEQVENTRKAILTVTREIRRLSMTEKYKDNFDLLTSVPGFGLIMAMTMLTEFDNNIMRFSNERKFVSMLGLIPTCHDSGEKKTNGEKTFRGNKQLGPLVVESSWVAIQRDCELASYYSKCCQCMRPPRAIIKVARKLACKAYAVLKNQKAYVQP

SEQ ID NO: 338186 - protein, 412 aa, unidentified
MEVVYECCCGLDVHAKRVVACLITRGRKEIRTFATMTDELLQLGDWLSSVGCTHVAIESTGVYWKPVFNILEGLLTVILVNARHIKAVPGRKTDVRDCEGLADLLRHGLLKASFIPPPEIRELRELVRYRHTVVTEHTAVANRITKLIESANIKLGQVASEVLGRSGQLMLRALAAGETNAETLAEFAQGKLKNKKAELRRALTGSLTPVQRWVLTELLTRVEELEAARGRVETRINEAVAMCTDSFVPEAVELLKSIPGIGQRTAQTIVAEIGVDMSRFPSAKHLASWAGVCPGNHESAGKRKSGQPTKGNKSVRTILTEAAWTATRAKETFLHAKYHRLAKRMSKQKALGAIVHRLLVICYHLLKRRVPYAELGTAPLDEQQVARQRRRLVEQLVGLGLKVTIEEGAVVS

SEQ ID NO: 338187 - protein, 413 aa, unidentified
MLKIVYPICCGMDVHKSFLVACIASTDERGVTTYKSRRFSTFTKDLRLCADWLKSNNCQDVCMESTGKYWIPIYNILEPYCKIVLAHPKYVKAIRGKKTDKKDAKWIADVFKHDLVSGSFIPPADIRQLRDLVRYRWKLNNYIVGEKNRAQNCLTVSNFKLDDVFSDVFGKAATQITSYLLEHPNEPLPDISNFRTKRMKATDAEVRAAADGNICAEQAEKLRIIRSHMHDLNRCKANLESVIISTAEKYTSQLSLVMSVPGIQTFSAISVIAEIGVDMSVFPSAKHLCSWAGLTPQNNESAGKKKTTRISRAGAYIKPLLVQCALNAIRVKSNPEIRSRYLSIKKRRGHKKAIIAIARMLLTAIYNILKKNEPYNAELYHKADVPPAHRSVTMEEAVFILQRQGYLITPCTS

SEQ ID NO: 338188 - protein, 422 aa, unidentified
MDESTRLAMFRQMKEEIRGSRKYLAVGIDIAKEKHNAFFGTSTGTSLLRRLVFDNTQEGFKKLCLHAETLKKQHLLDRIIFGVEPTADYHKPLGEYLIREGYMIVLVSGNAVKKNRELLDGRWDKHDTKDAANVADLITQGKCLFYEFPSLAIRQIRSLLSLKRRLKKNEQGYRVRIRNHCIAQYFPEFDPYYGYGEGPAIVKKCFDPSYIADLPFGEFISLVASRNGGEKQRVRIKQIWDKAHISIGCRVNKAVAFEAAILMEELQLIRMMINKTAKSIAEVCSHLPEYSCLLSIPGFGPDVSAMVIGAIGNPYRFENERQVIKTAGYDLSADRSGKRSDTTPVLSKRGKADLRYALYQAALIASVRNKHFMRYFTNKLAGREREQGIRTKMRVKLAAKMLVIAWTLMKKKEVFDPGYITI

SEQ ID NO: 338189 - protein, 361 aa, unidentified
MKCVQSNKLDFSGQNIYVGIDVHLKSWSVAILSDHSVLKRFSQSPEPEALHKYLVINYPGANYFSVYEAGFCGFWIHEKLTDLGITNIVVNPADVPTMSKEKLRKTDAVDCNKLARELRSGSLVGIYVPGVETLELRSLIRMRNLIVKDSTRAKNRIKSLLRFHGIEIPEEFTRCSIGCWSKRFLSWLQSLELSTEYGKKTLELHLEQFLRLRMMLLQETRAIREISRKSPFEKPIRLLTSVPGIGVTTAATLMVELDDIVRFKNADHLASFIGLIPMCHSSGESNGTGDITVRRHFMLRSLLVEAAWIAIRKDPAMTVAYTEYRKRMNPQKSIIKIARRLVNRIYYVLKHEKEYVPCVVQ

SEQ ID NO: 338190 - protein, 362 aa, unidentified
MESMRWVGVDVHAKESVAVVLDQATGEITAQRIAGRPDEVVEWLSTLEPPFRAVYEAGPTGYGLVRRARERGLDVVVCAPGHILKNATDHIKVDKRDAVRLARLLSAGELRLVRVPEPEEEQLRDLVRSREDLRVDLTRIRNRIGKFLLRREIYAPKHTETWGVLHRKWLQSLRFEDRASELVFEDAMHAHDILVARREQLERALAEDRRDLALGAHHRPAQVLARHRHPIRVGLVAEMGDFRRFQHPRFLSSYLGLVPSEHSSGEKRRQGGITKAGSKHARRLLVEAAWQYRHVPRTSHHISQRQRGQDQRVIDIAWRAQRRLYKRWQRLHDERRKRRTVVAVAVGRELAAYCWEIATLSS

SEQ ID NO: 338191 - protein, 342 aa, unidentified
MSRLVMGCDVHLDTIAAAVVDGTGAEIEGVTVPNTVTGWEQLTGLVADYQIGTVGIEGASGFGRRFAATLVAADIEVREVPTRLTARQRRTDGAGKTDPGDARTIARATARGQGSRWTNDDTLETVRVLHVRREHLVNTQTADINQLRALIVELDPAIASELKRLRSARDFRTLTTFEFPTNTRHQSTVVGLIRSIAQDCLDRLDQIRLLERQLETVMPPAGNALIATLTGCSTVTAARILAEIAGTDRFGTDAKMAAWAGTAPLDASSGRQQRHRLNRGGNRQVNRALHTIIVTQTRHGGEAAHYLTRRLHEGKTRREAIRAAKRHLTRRIWKILHTHQLT

SEQ ID NO: 338192 - protein, 332 aa, unidentified
MSVYVGIDVHRKRSQVAVIDEGGKVLANRNVPNGVKPVLSVIGELPAGTPAAYEAAFGWGWLLELLEDYGFEPHMVHPLQCKAIASARLKNDKVDAAPLAQLLRADLLPEAWIAPPEVRQLRAMLRHRAQLVRLRTLLRNRIHAVLADHGHGRPAGCWSGVGRRWLASLELPPVSREVIDDGLALMDALQQPIDRLDAEVRQRAKTDPRVKVLTQLPGAGMFTALVLLAEIGDITRFGSARKLASWAGLTPTARGSDRTVHHGHISKQGPTWVRWVLCEAAQTAKRHPDFAPGYEALARRRGKKIATTAVARKLITRAHHLLTDASATGEPR

SEQ ID NO: 338193 - protein, 306 aa, unidentified
MFVGIDVSKDRLDVHVRPSGDAFAVMHDGEGITALIERLAAIGPELVVLEATGGLQTRVAASIAAVGLPTAVVNPRQVRDFARAMGRLAKTDALDAEAIARFAEAVHPVPRRLSDESNLALQALVARRRQLVEMRVAEKNRRQQVNEAKLRKRLDAHLDWLAEAIAEIDRDIDEHIKGSPLWRAKEDLLTSVPGIGGTIARALIADLPELGSLTRRRIAALVGVAPFNRDSGSMRGRRSIAGGRHNVRTALFMATLTATRCNPAIRAAYQRLVAAGKPKMTALVACMRKLLVILNAIVRDARAWST

SEQ ID NO: 338194 - protein, 350 aa, unidentified
MTTIARRITGGVDTHLDVHVAAALDERGALLGVESFSTTPSGYRALLGWLKTFGTLELVGVEGTGSYGAGLTRHLLSHKVSVVEVDRPNRQRRRRKGKSDPEDAVAAARAAQGGDATGLAKTRDGNVEAMRVLRVARSSARSSRTQAINQMRSLVSTAPDELRAELRDLSIYKVLQLASAFRHTGKTDVAAVTKLTLRTLARRALSLEDEVKEIDRVLKTLVAETAPELNAVDGVGTDVASALLVAAGDNPERLKNEATFAKLCGVSPLDASSGKQQRHRLNRSGDRQANSALWHIVFTRMVNDPRTKHYVERRMKEGRTKKEAIRCLKRYVAREVFAQLPRSALALDKP

SEQ ID NO: 338195 - protein, 341 aa, unidentified
MNGSKTVVGIDIAKRVFQLHWIDMETGEIVSLQLKREQFLEHFANRHKCLIGMEACGGAQHWARKLTGMGHQVKLLLGKAVKGFVIGNKNDRQDARAIWTAVQQPHVKAVAIKTEAQQAILALHRTRSQLVKFRTAQINGLRGLLTEYGEVMPQGKAGVRKGISDALGKLADRLPAMVIDTLREQWVRIEKMDEEIATIEQRIKHWLKQDDACKRIAEIPGVGPLTATAAVAMMGDPKAFKSGREFAAFAGLVPRQVGTGGRVKLLGISKRGDTYLRTLLIHGARSVLTHAKDPGPWVTELRRRRPLNVAIVALANKMARTIWAVLAHGRTYQKGFVSRPA

SEQ ID NO: 338196 - protein, 370 aa, unidentified
MVEMHGVAGIDPHKNTATVAVIDSCGGRRGSRSFTIDEAGIGELLSFLVDSELIIDRVGIEGSAFLGRPLVLALAAAGYDTREVQANRTAERRSRRRRAKTDNEDAEAIARETLAHADLPPAGKRSTPDEDWEALGAVRNWRESLVLQRVRLLTEAEAVLVALPVAVRATLPLTSRVLPQLKALADGSVDLDGLGLADQIKVDRLVASLTDITTLTTRINELDRKIPALLERLGCTLTSIHGIGVVTAMDLLVEVGDPCRFTSESQFARWCGAAPVALSSGEGDGPPRRHRLDLGGNRAVNSILHGVHVTQVRCHPPAKAYMARQTEQHKPKRSARRSHKRHLANVIIRHMWKDASRLSAVTDQALLTAA

SEQ ID NO: 338197 - protein, 339 aa, unidentified
MAQVTTLGVDIAKNGVCIHGVDAHGHVIVKKRLARQKVLPFVAQLPPCLIGMEASGGAHYWAREFTKRGHTVKLLSPQFVKPYVQSQKNDPNDAAGICEAVARPRMRGVPVKSVAQQDIQALHRIRERQIKARTALINQIRGLLMEYGIVIPQRASQVRHKLPFVLEDAENGLTITAREWLQALAEELQVLDQRLAATDHRIEQVFEADEACQRLAQLGGIGPLTATALVAAGGDATGFKNGRQFAAWLGLVPRQHSTGGKTTLLGITKGGNRYLRMLLIHGARAVLRVVDRKTDAWSRWLQGVQVRRGTNCASVAQANKTARVAWALLAKGDRYRRAA

SEQ ID NO: 338198 - protein, 312 aa, unidentified
MDAIYVGIDVSKDRLDVAVRPTGESFAVGRNGAGIDELAKRLTAISPLLVAIEATGGFETIVAAGLAGSSLPLVIVNPAQVRFFANAVGKRAKTDPIDAMVIAHFAEATKPQVRQLPDETTRLLADLVARRRQIVEMIAAESQRARRVSNPRLKKSIARLHKALEKELAALDDDIGEHVRGTPAWAEKEDLLASVPGIGPTIARSLIAELPELGTLDRRQIAALVGLAPWTRQSGQWRGKSFIGGGRSSVRSVMFMGAMVAARYNPPLKAFRDRLVAAGKPKLVAIIAVARKLLTILNAILRDKTPWQPKNA

SEQ ID NO: 338199 - protein, 339 aa, unidentified
MESFVGVDLHRKVSQLAALREPKPASQLRFPNNTVTVEKVLKKLPQGSKIALEATGSWWWFVELAQKTGHEVVLSHPKQTKAIASARLKSDKVDALMLAKLLKADLLPTVWIPPATQRYVRELLTHRARLVRQRTAVINEVHALYAKRNIDPGMIFHRVRPPAFMAKELSGYGPRIVEEDAELLAFFNRQLRGLDNELQKIAEEDVESKRLMTIPGVGPLSAVAVNCWIGTIERFSKAKKLSSYFGLAPRVRQSGDRERHGHITKEGNRMVRSLLIQAALWHIRLGKGAARKHYLGVLKRRGKQIARVAAANKLLGIMFHMMKERIDYQEFLRRGSSAQ

SEQ ID NO: 338200 - protein, 317 aa, unidentified
MPQSERIVGIDVSKRQVEACLRAERERLSQPSTSEGRQAMIAWLRQHDVAVAVMEASGGYERDWAAALRGAGIAVRIVDPKRVRYFAKSAGRLAKNDPIDAEMIAWFAETFATEAAPAHDPEREAIDRLMTVRAMLVRLESQIGQLGEHRQPPLVERAGRAIARVIVGQRKQLETAIAARIARHADWAERQAIIQSVPGFGPRFAAGIIAWLPELGQIGGKPATALVGLAPYDDDSGGHRGERHIKGGRREIRDLLYMAALAATRCNPVIKAHYQQLRARGKKFKVALVACMRKLMVILNTMLVRGQMWNPPAAAVA

SEQ ID NO: 338201 - protein, 407 aa, unidentified
MEVLHPRCAGLDVHKQTVVACVRIVGNAPPRQEVRTFATTTSGLLALADWLDSLGITVVAMEATGVYWKPVWHVLEGHFELVLANAGHVKNVPGRKTDVNDAMWLADLLAHGLIRASFVPPAAVQELRTLTRTRKQFVRERTAHVQRIDKLLEDANLKLSVVLSDVLGKSGRAVLQAIIDGHTDPERLASCVTTRVKASRAELLEALHGHVSAHHRFMLKLHLGHIDALDQAIAAIEKEVGLGLDPFRQAAKLLSTMPGLSAVGSNVVIAEIGIDMSRFTTPGHLLSWACMCPRNDESAGKRRSTRLRRGGKWLKTTMVQAAWAAVKVKGSYLQAQFHRLRARRGTKKAIIAVAASMLTAAWHMLRNGSEWRELGAAHFDRADAHKTAVRLVHRLQQIGYAVQITPA

SEQ ID NO: 338202 - protein, 348 aa, unidentified
MTVYIGVDFHARQQTISYLTTETGEIRQLELLHEDPAKVRAFYEQFAGQRIIVGFESSGYAAWFEELLEELGCEIWIGHATYIRQFAKRRQKNDRRDADLILELLVSGDFPRIHRYSRSTRQMLQQLRYRQRLVKMRTMVVNMLLFMASSRGHSFRTQLQSKRGQARLGQLPLPEPLAQQRDELLSLLTQLDQKITTIERWLEQQTAEDVAVQRLRTHPGIGLLTSICVRYTLEDVGRFATTRKVSAFAGFDPMEDRSDERRRMGAISKQGSRWLRFYLVEAGQVAMRKDADLARVYQRISRRGGHAKAKVAVARRLLVRAFIMLRDEIDYAEFLRRGVAARSSRGSA

SEQ ID NO: 338203 - protein, 318 aa, unidentified
MMQPILNVGVDVAKDAVVVACAEHSFPVQSVPNQRAPLRAWLKSLPQGSRIGLESTGAYHELLADLAQAQGFTVFLLNPLDTRHYAKAMGTRAKTDRVDAELIARLIAQEHMRLRAYTPPTANQRKLDRLIRRRATIVRLKGTLKLTMRHLGGFAPELKAVVGKLDALLAKIDATMAAIAACSPQHQEAQQRVETIVGVGPVVGISLTNTLERVPFRKADAFVAFTGLDPRANDSGHKAGRRRLSKRGPAELRRLLFNAAMSAIKTTVWKPIYEHYRTQGWSTTASLVIIARKIARAAWSIHHYRTTFNPERITKCLT

SEQ ID NO: 338204 - protein, 316 aa, unidentified
MTDQAIEVFVGIDISKQSLDVHIAPPGHSLKVAYDEAGVAQLVERVEAAKPTLVVMEATGGYEARLAAELAAKGMPVAVINPRQARDYAKATGQLAKTDRVDAIVLCGFARAIRPEARPLKDEDTEELDALVSRRRQLVDMRVQERLRLVSTASKKIRKGINDHILWIGQCIGEVDSELKDRLRRSNMWRPKVQLLESIPGVGAVTTTTLLAKCPELGTLNRRQIAKLVGLAPMANDSGQHRGRRHVWGGRGEIRSVLYMATVTAIRCNPTIRAFAERLKQLHKPPKVVIVACMRKLLTIMNVMIKTGTAWNPQAA

SEQ ID NO: 338205 - protein, 342 aa, unidentified
MYYIGLDVHKKTISYCVKDASGQVHREGTIGATRNELDCWVRTLPQPRIMAMEATIFTGWIYDHLLPHAEQVKVAHPLMLRAIAAAKKKNDRIDAGKIADCLRCDFLPECHMASTEIRDRRRTLRYRHLLVRQMVQMKNRISGLLMETGVSHNKQRLHKVGYFRELISNSAEIHESIRPLLRLSRETIVRCQKTEYARVSSLERDPLLAERLKRLRTVPGVGPITALTWALEMGDVSRFRSVKQAISYCGLCGEEKSSADKVLRTPLSKQRNKHIQHVLVEAAKLAPRQNHELALVHERETQKGNRNRATLAVARKMVAYLLAVDRREREFVPAEGGSTAAA

SEQ ID NO: 338206 - protein, 350 aa, unidentified
MEITTVGLDLAKRVFQVHAIGGSGEVVVRKTLRRAQMIPYFAGLERCLVGIEACGTSHYWAREIGKLGHEVRLMPPAYVKPYVKRGKTDASDAEAICEAVRRPTMRYVAIKSPEQQAALGMHRTRDLFVKQRTQLVNMIRSLLAEFGIEIRQGIGQALMVAKRAAADDMPDIPPLAAKVIAGLAGQVLDLQARLREIEREMLVWHRSNDVARRLATIPGVGVVCATALAASVTDPHQFRSGRQFAAWLGLTPLQHSSGGKERLGRISKMGDKYLRRLLIVGMTSLVRRAKYKPTTVDPRLADLLLRKPVRVVTLALANKTARVVWAIMTRGGTYRTPQPAGASVSQAAVA

SEQ ID NO: 338207 - protein, 397 aa, unidentified
MIAVGIDISKAKSTVAVIDSDGTVLASPFTMAHTQPEMEAFVTYLKGLGEPTTILMEYTGHYHYPVLKKLQDEGFPVCIVNPYQMKKYGDVEIHKAKTDKKDALRIAAYALEKSYKLVPYSSMEQKYEDLKFLSRQYSQRITYVAKLKVQLIALLDQTMPGITRILPLNSRNPEKCALLLFIRRFKSFDEIHRIGKARFLASYDVLAKKTSERSASSKGLSIYELAVDSITTRGEDPYIWLSQNQCVDLLSTTQNAADEIISQMRNIAETIPEYKVLRAMRGVGDRLGPIILAEIGDIRRFHSGKALNSYAGNDAPPYQSGQFESRNRHISKRGSSALRKACYEVMQALKLTKPQDDPVYLFMLKKEQEGKPFNVAKMAGVNKFLRIYYARAMELYK

SEQ ID NO: 338208 - protein, 394 aa, unidentified
MKLVGIDVGKNSHHFCVMDKETGEFNVAPSSFSNNKEGFDFLINSLKPYSKKSILIGMEDTGHYHVALLKFLLSNGYTVALINPKTTDLTRKMEGGITKNDKLDTITICDVLDTPERKKQYRITKVDRFDLYEQRQLTRHHHNLKEELNVYCNRLQKSIDLVFSEFNTLFSSKYSIVYMNLLKTFGSAEAIASTDIRTIRKCFEIKGRGNRISLTPEKLKECAKNSIGISSEVETIQIKHLVSQITLIKEQIAEIDKKIEEFSITNNSPILSIPGISHFSGTSILAELGDIGNYSKPSQIIKFAGVAPYHYESSQYNAQHTGITKKGSKYLRKTLYQIILTVINNNPVFKKYYRLKISQGKGHRCAQGHCIRKLLRIIYHLLETGQSFDPALLR

SEQ ID NO: 338209 - protein, 343 aa, unidentified
MNDVSIIGVDLAKNVFQLHGAAADGTVQFRKKLSRLQFQRFMADHPRCVVAMEACGGAHHWAREMERLGHKVRLLAPRYVKPFIKRQKNDAADAEAIVEAALRPTMRYVEPKTGEQQARALVFRTREQFVKQRTEAINALRSHLYEFGYIAPQGIGHLSRLEVVIEDPVSDLPPLAREICRELLSQIAQLTARIDALKKRIDAIAREGETSRRLQTMPGVGPIGALAVETFAPPMEQFKRGRDFAAWLGLVPRQASTGGKQKLGKTSKMGQRDIRRLLVTGAMAVVRWALRRGAPHNPWLARMLERKPPMVVASALANKMARGIWAMLSRGEDYRGRELGHAA

SEQ ID NO: 338210 - protein, 343 aa, unidentified
MKYIGLDLHKRNIFATVLDGDGKILSRANVSSKREDISHYLRRLGSGDELSIAIEASYNWLYYYRILEDITDNITVAHPLKTKIIGEARIKTDKIDSEALAYMLKADMLPRIYIPTRISMENKMLLRSRISLVRLRTSIKNKVHAIIDRNRDSYTGLETKSDIFCKTGMFIIRDTEIPQPDYMIIKNYLDLIDELNKKIKNVEKEIDKRVTSDSDIELLKTIPGIGRFISFLLKSEIDSIDRFSSKEKLCSYAGLTPSVRQSGNKSYTGRITKQGNKFIRWALTEAAQVAIVHSSYFRYHYSKVKAKKGTNSAIVAVARRIAEISYVILKEKRPYIEKPIVYS

SEQ ID NO: 338211 - protein, 367 aa, unidentified
MDVHKETFSLCCYTNEKEEAEYPQKVKGHYSKVLNYIEAMRFHYGDNALFICGYEAGCLGFTLYHQLTAHGVKCIILAPTTMSQPKGKKKIKTDKRDAKLIARCLAHHDYSPVHIPTEQDEQTKEYIRMRDDHKLALKKVKQQILSFCLRHNYRFDGTSRHWTQTHLKWLNSLQPEGLYREILREYLLTYVQLVEKLERLDRRIEELASEETYKEKVSKLSCFIGVKTITALAVLTEVGDFKRFASAQQFSSYLGLTPGEDSTSDNQNRLSITKAGNRHVRLLLVEAAQSFARGQVGYKSRLLKIRQEGNLPEVIAYADKANERLRRRYYRMVLRNNKKPNVAKIAIARELACFIWGMLTGRITALP

SEQ ID NO: 338212 - protein, 377 aa, unidentified
MKRIKFVGLDVHADTIAVAVAEPEGEVRSLGMIANREESVGKLVRKLGPVAQLRFCYEAGPTGYALYWQLSKLGARCEVVAPTLVPVKAGDRVKTDRRDALKLAKNYRAGELTAVWVPDAAHEALRDLVRAREAAKKDQLRARHRLSKFLLRHGRRPPAGVYSWTLQYLKWVQQEVHFPERAQEVTLLDYLHEVQHAAARIARLDQAIDEAAQSAPAAMRAVIEALQALRGIAKVSAVTVVAELGVIARFSGARQLMAYGGIVASEDSSGERIRRGHITKTGNAHLRRVVVEAAWAYRHRPSIGATLRKRQEPVSEKVKEIAWKAQQRLHERYLKLTLRGKNKGVVITAVARELLGFLWAIGIQAEAEQQESLSRVA

SEQ ID NO: 338213 - protein, 348 aa, unidentified
MRRYIGIDVHTESCTFAIMGPTGERLREATVETNGKLLIDFVRSIAGEKHICFEEGTHAEWIYELLEPLADELVVTIPEPTRGNKSDSSDAWRRADELRRGSITRSVFKAPNRFTALRAAVKTYGVTQRDMVRTKTRLNNLYRSRGLHDMGSEIFDPIKRLSWLARLPAAQSCQAELLSAQLDGLTEAYETAHEWLLKEARKAPIVQLLKTAPGIGEIRAAQIVATVISPHRFRTRRQFWSYCGLAIVTRSSADWTKDGHGHWERRVVPQTRGLNRNRQPMLKNVFKGAAQTVIRQMPEHPLKRAYERTTAAETKPNLAQLTLARRIAGAVLAMWKNKEKYDPAKQQS

SEQ ID NO: 338214 - protein, 361 aa, unidentified
MKKVSRELPTMEAGCAKPEMTVGLDMGDRYSHYCLLNGDGEVIEEGRMQSTEAALRRHFEGEPCQRVALECGTHSPWVSRLLTGLGHQVIVANARKIRAITASESKNDRNDAEKLARFAAHDPRLLSPLEHRSEQRQVDLNLIHARSTLVRARTMIVNALRGLVKSAGGRLPICSTESLPARAPAAVPPALAEVATPLVEQIALLNAQIGGMDKQIEKLAVKYPEIGQLRTAPGVGPIVAAAYVLTLDRPDAASNRSTGAFLGLRPGQSQSGDSDPQRRISKTGNSCLRSLLVQSAQYVLGRFGPDSELRRWGLKLAASGGKRGKKRAIVAVARKLAVILHSMWRSGQRFQPFPQSAAVAA

SEQ ID NO: 338215 - protein, 379 aa, unidentified
MQTIIKQCVGIDISKGSFTACVCRKLLSGEALLSSVESFENNKTGYNQFVKWSRKITIPSVAVLYLMEATGIYYEGIAYHLHKLKQSVCVILPNKVKHYAKSLNVKTKTDIVDARIIAQMGAERNLPLWQPPLPVLKQLRDLTRLYTDLKNERTVYLNRLDSEKASAVAMPFVIKSNLLILKELGKQIEQCEKEIEKTIKSEEWLAEKVNKLITINGVGFITLAIVIAETQGFALVSSRKQLASYAGYDVVQVESGTSVKGKTHISKKGNSRIRASLYFPSLTASRHNKELKEDYQRINIGKASKMVGATALQRKLLLLIYTLWKNNDVFRTSGDHETKLLLRRDEVPKKVGNPKELPTQDELPYDLSTEVLLRQVQRS

SEQ ID NO: 338216 - protein, 413 aa, unidentified
MSDRRGWNPTGKILLLPVSHEGYDKKLWKRLDEILGAYGPDDLVFAVETACGVWRTIVEYISRRGYTVVLESPLATYHLRSVLNNDYSKTDPKDSLLVAINARSGNCIPYRQYTPEINRLHRLGIAYSKLAKDKQKAVSRLRAAMEEVFPEYLEGVAVDTATSLHLLGKYVLPEHFQALSATEEGEQIRLISRGNHGVKTLRRMQEHAEKSVGCRVHEQEDVLRLVVSMWIAQVRLADQGLKQISAAMLELVKDRRHFKILTSIKGISDVSAALFMAECRDLGSYAHYKQIEKLAGANLKLADSGKYVGTRRISGIGNKRLLRLIYLMTAQTVRYIPEVRLKFLKRQVHRKCYRKNVMAASSQLLKLVMALIKQDRTYAPRDLHGTELSKLETSYEATRSQERKRQAMTKNAA

SEQ ID NO: 338217 - protein, 370 aa, unidentified
MSQSSTLFIGMDVHKETIAVAYIAQDHGAEVTYLGTIGTRQCDIDQLIRKMQSKAKHLIFIYEAGPCGYWLYRYLTKKGDDGWVVAPSRIPKKAGDRVKTDRRDAVQLARLARSGDLTAVYVPKVEDEAIRDLSRAREDTLSDLKDAKFRLKAFLLRHDIRYTGRANWSPAHLRWLSEVVCPTPAQHSVFQEYVRAVTEHTERLQRREPARQEHGHAWRLHPVVEALQALRGVQFTVAVTMVAEIGDLTRFDTPRELMKFLGLIPSEYSSGERRQQGSITKAGNTHARRALVEGAWAYRYPAKVSRHLQLRLEKQPKMIQDISWKAQVRLCKRYRQLVARGKHANIVTVAIARELAGFMWAIAREVPVTP

SEQ ID NO: 338218 - protein, 316 aa, unidentified
MSKIICGVDVASASLQARIGREGPEGCFPNTENGIAELAAFCRQHQVELVAMEASGGYEKLPFSLLWAQGLEVAILNPRAVRQFAEGMGLLEKTDRIDAGKIAWFAEVKHVAPTQPHSAEQQRLKALVVRLRQLTELQAAQRNQQLLVEDALVRKSFTRLLTVVKSQMRELEKAIADLIAADPLWAKLNQAFRSIKGVAKRTVARLMAEMPEIGTLSNKAISKLAGLAPLARDSGKHQGKRVVRGGRRGIRAILFVVSLVVRRYNPDFAAFHQRLTAAGKAKKAVRIALAHKLLVRLNAKAREVRRELVATAVSTV

SEQ ID NO: 338219 - protein, 391 aa, unidentified
MSQHCHFDASRSLTALEQDSTIIAVIEMSQSKWLVAALVPGVERQPLKKLDAQEEGLLKLLHRWRAEAGQAGRTIKRIVVAYEAGRDGFWLARWLRARDVEAYVIHPTSIAVSREHRRAKTDRLDTELLIRAFLGWLRGEMRHCSMVAIPTIEEEDARRPNRERQNLVTEQTRLVNQMKAIFTRFGIRSFRPTLRKAEDKLKGLRTAEGTPLPENTRAEVCRHLARLRVVREQIRAVEQERLRKLAAAPAADYGPHAMARLIARVLGVGIETADMLVNEVLSRHWRDRRAIARYAGLTGSPDESGKRRRERGLARAGNARVRCSMIQFAWRFLRFQKNRFVAQSFQARTADLRGSTRKTMIVALARKLLIALWRLVTTGEVSDGIVLRPAS

SEQ ID NO: 338220 - protein, 343 aa, unidentified
MYYIGLDVHKRTISYCVKDAAGKIHQEGKIGSSRRELDAWIKTLPQPRMMAMEATIFTGWIYDYLLPHAERVKVAHPLMLRAIAVAKRKNDTMDARKIADCLRCDLLPECHMASTEIRDRRRTLRYRGLLVKQMVQMKNRVSGLLLEKGVSHTKQRLHKVGYFAELMSTNEEIDQSIRPLLKLSREHIVRAQKLDYALVSSLERDPLLTERLRRLRTVPGVGPITALTWSLEIGDASRFRSIKQAISYCGLCGAERSSADKVTRMPISKQRNKHIQHVLIEAAKLAPRQCPELALIYEKEMQRGNRNRATLAVARKMVAWLLAVERRKQDFVPAEQLVGTSAA

SEQ ID NO: 338221 - protein, 395 aa, unidentified
MYSLFVGIDVSKDSFSVAGLNDKTKLLFSLSPLMNAQGFSELLKALRSHQKDFSSVIVALESTGPYHLNLFSFLVSQGITTIVVNPLIIANFAKLSLRKTKTDKKDAVTIARFLFLNRDSINQLPSSQQTTDLRDLARERESILKMIASMKNDVRRILQSTFPELEHLVDILGDTMLCFLKVFPSARLIAQATPEAIAQGFNQGDWRRRISVHYTNIIDLAKTSVGATSPSKELILPGKIETLLYLKKRVDEITKMLVRLCTSMKKEDFALLTSIRGVNVKTAAPFLAELGDYQNFQSYKKILAFAGLDPTTHQSGKYEGMSMISRRGNRHLRKIIYNMTFCVVRYAGPLRDYFFRRKAEGLPFRKALLATSHKLVRTIFAMLNSRTFYKFAEVV

SEQ ID NO: 338222 - protein, 412 aa, unidentified
MEVLYPHCAGLDVHKDTVVACVRHMVNGTVKREVRTFKTTTKELLALSEWLAAEKCTHIAMEATGVYWKPVWHILSDGDFALVLANAAHVKNVPGRKTDVNDATWLADLLAHGLIRGSFVPDPQTQEMRDLLRTRKQLVRERSRHVQRLQKTLEDANIKLDSVISDVMGLSGRKMIEALIAGESDPEQLAQLAHRRIKAPREELCEALRGRVTRHHRFLLSLHLQQIDAIDAAIDAIDEEVDAQVEPFRTTVHLLTTIPGVDQLSACVILAEIGRDMSRFPTAGHLISWAGLCPRNDESAGKRRSTRMRKGAAWLKTTLVQCAAAAARRKASYLQAQFHRLRARRGAKKALGGIAASILTAAYEMLKSGALYEDLGPDHFDKRGNSKHIHRLVHRLQNLGFAVQITPLPTAA

SEQ ID NO: 338223 - protein, 359 aa, unidentified
MIVIGIDPHMKTHTAAALCAATGKTVAVKTVSCDTNGRGSLLRWARGLGDDLLFALEDCRHVSGRLERHLLGRGERVVRVPPKMMAGARRSSRTYGKSDPIDAACVARAALREPGLPQAVLAGPERDVRLLADHRDDLVQERSRIQERLRWNVHDLDVALSLPPRVLDRYVWLDRLQEALASLPESVLRRIAIEQVERCRDLTRSIRALEGEIEAMMLNMAPELMAFPGCGAVGAAHLVGQTAGASRFGDDAAFAMHTGTAPLPVSSGKSERHRLNRTGNRKLNCVIHMIAVTQLRTHPPAIEFMEKKRADGMSNREALRCLKRHIARALYKTMVRAERARAEGVVHVDFAPVAVAAAV

SEQ ID NO: 338224 - protein, 401 aa, unidentified
MKEFNAEAVRIEAASALEAVRPAQAGRKYPAYIGLDVHKETIAVAVARVGRAAPESRGEIANKPKTVANLVERLNQEFDGEVLLFCYEAGPCGYGLYRQLLALGHDCQVVAPSLIPKKPGERIKTDRRDACKLARTLRNGDLTAVWVPDEEQEAMRDLTRARDDMKGQERKARQQLNAYVLRHGHAWPSNKTRWTQTHYNWLESLKFAHDWQQVVLQEYIDAVKAASQRVADITAQMERVLPQWSLAPVVDSLVALRGIDKLAAMVLLAELGDISRFDSPKQLMAFLGLVPSEHTSGGRRRQGAITKTGNSHARRMLVESAWSYRFPARQTAHLKRKAANASDEAKVIAWRAQKRLCGRYRTLLQAGKNTKQTTVAIARELTGFIWDIVCHEMPKVQQTTR

SEQ ID NO: 338225 - protein, 374 aa, unidentified
MYIVGIDIAKRKHEAAVIDGEGTIIIKPFSFTNNCSGYNRLLAMLTKAKLPLDEVSFAMEATGHYWLALFTRLQKEGFRVQVINPVQTNSIRSFYIRQAKTDPRDALLIAEVIRFGHFSESTLHPENIYELRELCRGRHAIVSMQADVKRKVVALLDQVFPEYETAFTNMFSDTSMAILQTCPTPKELSEMPLEELCHLIEVSSHKRFRMAKAQELQALARNSFGFAMAGDVFSTMIRLYAKHLDFLKQQVREMDRKIAEIMETLDTPITTITGIGPTLGAYILSEIGDISRFSSAAKLAAYAGIDPTMRQSGEYNGVRNRMSKRGSPYLRHAIWLAASSAVLHDPALKLYFQKKRDEGKPYCLLYTSDAADEL

SEQ ID NO: 338226 - protein, 492 aa, unidentified
MALVLAVALLIVEVDMPRRKSCAPQADQASAALLQTLNPHAAGIDISAAEHWVAVPEGAVPEPPRRRRGQLPNRVRRFGACTADLRSLAAWLRQVGVDTVAMEATGVYWVPLYDLLEAEGFRVLLVDPQQTRAAPGRPKTDVKDCMWIQRLHSLGLLTAAFRPAEPIRVLRSYQRHRASLVEDASRFLLRMQKALEQMNVKLTEVLSDLTGVTGMAIVKAILAGERDPAKLAQCRQRGCRHNEAAIARALEGTWQPEHLFALRQSLELYEYYQQQLAACDGVIEAHLKTLALPEKPAPLPPRRAKVRRRRQGNEPHFDARQRLYEMAGVDLTAIEGVETSTALVVLSEVGTHMERWRSEKAFGSWLGLAPNPKKSGGKVKSAATRAGANRAAKALRLAARSLHKSNSALGAFFRRIAARRGVPKAITATAYKLARIIYGMLKHGAAYVARGLAEYEAEHRERQVRQLKKKAKELGYELTAKEAQGEAAVSLA

SEQ ID NO: 338227 - protein, 402 aa, unidentified
MNCVGIDVSKGKSMIAVMRPFGEVVVSPFEVRHTANELSELAGLLKSLDGETRVVMESTGNYHAPVAWLLHGAGHYVSVVNAMLVHDYGNNSLRRAKTDKKDAVKLANYGLDHWLTLPRYIPEEDTRLMLKICYRQYQQYSKVQTMLKNNLISLLDTTFPDANRLFTSPPRADGSEKWVDFVATFWHCECVCGRSEKAFTTQYQKWCRKHGYNFSEDKALDIYASACGHFGVMPKTDTAKLLVEQAISQLQTTSSALAALKQEMQSLAASLPEYPVVMGMFGVGPTLGPQLLAEIGDVRRFHSKKALVAFAGIDAPPYQSGQIDVRSRSISKRGSASLRRTLFLVMSVILQCAPIDEPVYQFMDKKRSEGKPYRVYMMASANKFLRIYYASVKAYLESLEHD

SEQ ID NO: 338228 - protein, 399 aa, unidentified
MDDDTFWVGLDLGLTRTSVCIMNGQGFPLNEFECDSEVATLTEALAAVAIDRIGGIAVEAGTGTYIVRKLRGAGFPVVVFEARKAHKFLALRRNKSDASDARGLADLVRIGQNSVSQVHLKTDECQRLRSFLVVRQRFVLMKLAVEGVLRCNFALHGRRLESSHTRKALLRRTETIFASLRSEEGIDLEPDLAPLVMVCDSVRAYLEKSDRDLQAIASSHPVCRLLMEVPGVGPICALSFYSAIGDPNRFRVASHVGAYLGLVPRRYQSGAVSRTLGITKNGNRLTRSHLVMAAAVFARRAPDCPLKDWYLALRGRAGPKRARIALARKLAVILLAMWKQGTHFELDRTGPSGVLSERGPTETVPVAPVGGDWRRQSGTETVTSRSRLRQGSGDNTPGA

SEQ ID NO: 338229 - protein, 356 aa, unidentified
MEPIKTDCIGCDAHRRYSVFVVMDERGHTGKETRVEHSRELYRHFLSTLPPGSPIALESIGNWYWMIEEMERAGHRPILAHAKKAKLMMGLTNKTDKLDARGLALLLRNGTLPSVWIPPGELRDQRELPRMRMVFTRIRTMLKNRIQSTLAKYGIQIDQVSDLFGVTGRGLLQNRLNELPQETQRSIQEHLKLLDGVLEQIEGTEKRIKELIKETPQMQLLMSLPGVGPILAIVIILEIGDIERFPGAPQLASYAGSVPQVKSSGGKTYYGRVRPDVNRYLKWAFIEAANSIVVNQRRMPNRHVVELYHRIMKRKGHPKAIVAVARHLAEATYWMLTKNEAYREPTSSRWISPTQK

SEQ ID NO: 338230 - protein, 346 aa, unidentified
MHYSTTVGVDLAKNVIQISVVSSRGKELSNRSLTRKRFAEFLGKQKPSLVAFESCATSHYWARAAKRHGHEARIIPAKAVAPFRQGHKTDSNDALAVAEAARRPKIKEAPMKTVEQQGLQAIHRSRELLIQECTALSNHVRSLLMEFGIVIKRGFASLLRAVPEILEDGENELPDLYRPTLHRMYTRLLELREDIEAMTAEVECLAKAHPICSKLMALEGIGPIGALLLYATMGSGTAFSSGREFAAYLGLAPKQYSSGGKATIVGLSKKIGNSRLRSVLILGARAYVYKLKEPKSAKDKWLKAIIDRNGESRAAIALANKNVRTAWAMVTQGTEYQRRQQLEMAA

SEQ ID NO: 338231 - protein, 410 aa, unidentified
MEVLHQCCAGLDVHKKTVVASVRLAAENKLVTEVKTFATTTAGLLALSDWLSENGCTHAAMEATGVYWKPVWHVLSDGDIELVLANAAHVKNVPGRKTDVSDAAWLAELLAHGLIRASFVPDGQTQELRSLLRTRKQLVRELSRHTQRIHKTLEEANIKLTSELSDVLCKSGRAMLNAMVAGETDPVRLAALAHGTVKSSQARLQEALRGRVTRHHRFLLQLHLRQIDSLDASIATIDREVEANLAPFRIAVELISSIPGVSTLSAEVIISEIGLDMSRFPTVGHLLSWAGLCPRNDESAGKRRSTRLRKGAPWLKTMLVQCAWAAKRKKASYLQAQFLRLRSRRGPQKAICAVAASILTAVYHMLKDGTVYHDLRPDHFNRHSKITQSQRLVRRLEHLGYAVDIKPLAA

SEQ ID NO: 338232 - protein, 350 aa, unidentified
MRRPEDKYIAGIDLHGNNLVIGIINQHGERIAHRKLECELEGVMDFLKPFKPQLQSMAVESTFNWYWLVDGLRAEGYRIDLANPAQIQQYSGIKHADDKHDAFHLAELQRLKILPKAHVYDPVLRPVRDLLRRRTSLVHQRTALYLSFKSLYAGTHGSALPLKELKALEPKKGKGLYEHPANRLIATVQLEPIQALNRSLGRMEKAVLGCAREIPLYEKLLTLPGVGRILGMTITMEVGEIGRFKTDGDFASDCRAVDSRRLSKGKQKGENHSKCGNKYLSWAFVEAANFAKRSDENCRRWYDRKRAKTSNGIATKALACKLAKAAWHVMARQTDYDAQRMFPELAMKKK

SEQ ID NO: 338233 - protein, 282 aa, unidentified
MDQVIIGVDPHKLSVTIEARDRREVLRVTGRFGTGTAGYRQLLRAACQWPQRVWAVEGANGIGRPVAQRLLADGERVLDVPAKLAARARVFDTGQGRKTDATDAHAIVMVALRDTGLRELGSDPELMVLRMLCDRRDEISRGRAQALNRMHRLFLELVPGGAPVKKSTGQYKALLARVRPRDLAGKTRRRMAAEELADLARYDARLKTMKAELKAAVQARGSHLMNIHGIGPAGAARILADVGDIARFPDRNHFASWTGTAPIDASSGEHTRHRLSRAGTAG

SEQ ID NO: 338234 - protein, 336 aa, unidentified
MEEGDVEQCDFVGIDVGAKELVVAIRRDRNVLPLNRFENNGRGHRDLCRLLTKGKRRARVCLESTGIYSLDVALALHRAAGIEVMVANPGAVKDFGDALLKRTKTDPQDAVVILEFVERMPFVAWQPPTEAALELRAIARRIAVLTQQATAEKNRLHAAEATDELGEVVRHDIDLNLRHLRRRLRELLRNAVDLVRRDLDLSRRFDRLISVKGIARASAVAILGELAVLPPEMSARQWVAHAGLDPRQFQSGTSVAKRTRISKIGNGRLRTVLFMPALVATRHEPHVRAFHQKLVARGKKPIQATVAVMRKLLHSIHGMFERDADFDGNKFYAIAA

SEQ ID NO: 338235 - protein, 430 aa, unidentified
MKSNTQNAKIEAITEKTLVLGIDVGSETHYARAFDYRGIEYSKKPFKFSNTEAGFATFKEWILDLKERHEKDKVVPGMEPTGHYWFNLGKFLQDNEMKPVLVNPHHVKKSKELDDNNPTKNDRKDPKVIAGLVREGRYMIPYLPEGVYADLRTASNIRFQLQAELTRIQNRISRWFNIYFPEYKTVYGKPDAKSGMLILKAAPLPEDILTLGIDGVNQIWRDAKLRAVGKARAKTLIEAAEHSVGSKEGAVSARMEIRMLLEDYESRNIRLQEVMALIEGLVKQIPMAEKLLEIKGVGIRTVSGFLAEVGDISRFNNPKELQKLAGLALVENSSGKHKGETTISRRGRKRLRYLLFEVAMSLVAKNPEFRELHNYYTTRRLNPLKKMQSLMAIAAKLIRVFYVMLTKGVNYDPKKMVNDIKRPAVYLQTA

SEQ ID NO: 338236 - protein, 361 aa, unidentified
MQLPWTIAVSVAEGNGGELRYVGEFPNTSEAIVKLVKQLRKGDARLSFCYEAGPCGYGIHRQLTDLGWDCMVVAPSLIPKKPGDRVKTDRRDSMSLARLLRAGELTAVWVPDDAQEALRDLTRAREDMKHLQRQAKQRLLAFLLRYSRIYAGKSNWTQAHFRWLEEQKFGQPVQQIVFQEYVDTVKMMGKRVDGLDKTIEGTASESVFWPVIEALMALRGVCLLTATTVVAEIGDLRRFASAPQLMAYLGLVPSEHSSGATTSRGGITKTGNGHVRRVLVEAAWTYRHPARKTAHLQRRAERTSEDVQEIAWCAQKRLCGRYKLMESKGKLKVQACTAVARELAGFIWAIGQTMPQPTVKA

SEQ ID NO: 338237 - protein, 348 aa, unidentified
MPMLAERVDGVIGVDTHCDTLTAAAVTNLGGVLAHTTTSADAAGYQRLLGFAHHHLPGRRCWAVEGTGSFGAGLAGFLHQHGERVVEVGRPKRPASRSGAKSDTLDAVRAAREALGQDHLATPRRRGQREALRVLLTTRRCATRARVAAIGQLKALIIGAPEELRAELRGRSTASQIDYCARLRARSTRSLEHQATVRALRATAQRIQALDAEADQLQAELAVLVQALAPWLLEVPGVGPLSAAQVLVSWSHAGRFRSEAAFAALAGTNPIPASSGQVTRYRLNRGGDRPANAPLHRIVLVRLRWAQPTKDYMARRLKQGKSKREVIRCLIGRVSGRGPHRSRAVTAR

SEQ ID NO: 338238 - protein, 349 aa, unidentified
MAMTIVEAPPGITGGVDTHLDTHVAAALDPLGRLVGTESFDADAAGYKALLVWLEDFGEVTKVGVEGTGSYGVGLSRFLRRKGIEVVEVNRPNRQSRRNQGKSDSLDAVEAARAAISGRASGVGKTKDGPVEAIRVLVVAKRSARQARVKAIVQMRHLGFTAPDQLHSRLKGLSVTALVAEGAKLRATKSADTVTAATKASLSSLAHRIKGLDQEIAELNEKIESLLLATAPDLLARFGVGPDTAASLLMAAGDNPERLHSEAAWAHLCGVSPVPADSGKNAGHLRRNNGGDRQANSALWRIAMVRIAHDPETTQYFEQRVKEGRTKRDVIRILQRYIARDVYRYLPRG

SEQ ID NO: 338239 - protein, 391 aa, unidentified
MLMYFIGIDISKYKHDCCIISAADQKVVSKVTIKNNKAGFNELLTIIHSLANPADIRIGFESTSHYALNLELFLENSLLTFMEVNPVLISEYKKSKTLRRTKTDSVDCESIARWLMTVEYKPHSKGFYHAYSLKSLTRLRDKLIRQRSFYLVKITNVLDHTFPEFKPFFNERLSKTALYLLENYGSAEKMARMNSASYEKLRSLSRGKFSPQQFLRLKELAANTVGVNNSIFDVELNSLLSLYKSLVKEINTIEKEINKLIEEVHPHYMSVPGIGPLSAAVIYSEYGDISNFTNPGQMLAFAGIEPGINESGTESHGGKMVKRGSSQLRYTLINCCLPLIRFDMTFATYYAKKRGEGKPHRVAITHVAKKLIRVIYALERQDIDFNAQKLR

SEQ ID NO: 338240 - protein, 363 aa, unidentified
MNKIIKQVLGVDVAQKELVVTIGRMHNDWSPELYAHQVFANTHKGFSSLMAWVKKNTEASVPVIFVMEATGVYHESFAYFLDERSQQVCIVLPNKISNYMRTLAINTITDKTAANAICQFGLERKLDTWHMPDPTFKKMKQITRERDQIVAERTLCKNQLHAEMTEVTPNKSSIKRFEERIKLLDKHEKQINDELKLIVNSDVEIKKNVQLMCSIPGIGNLTACTILAETNGFDLIRSKKQLTSYAGLDVREIQSGTSIKGKPSISKKGNRYLRKAMHLPALSAIRHNKRYKAVFARIVQKQGIKMKAAVAIQRKLLELTYILFKTQKPFDVKMFEESIEPIESSELEIKKEVDEIQTTSFAV

SEQ ID NO: 338241 - protein, 347 aa, unidentified
MAMITIEAARPVTGGVDTHGELHMAAAVDQVGGLLGTESFAASPAGYAALLGWLCGFGDVSSVGVEGTGAYGAGLARFLRHSGVPVAEVDRPSRQARRRQGKSDPLDAVEAARAALSGRAGEAKAKDGAVEALRVLLVARRSAAQARNKAIVQMRHLVYAGPDDLAIALKGLSVKQLVERASGLRPLRSPDQVTASTKLALHTLAGRVRFLDSQLGDLDQFLVPLVSCTAPALLELVGVGPLTAATLLVVAGDNPERLRSEAAWTHLCGVAPLEASSGKVVRHRLDPGGNRQANSALWRIVIVRLTCDPTTQAYMERRSKEGRSRREVVRSLKRYVAREVYRRLPHR

SEQ ID NO: 338242 - protein, 355 aa, unidentified
MESRKYIGMDVHQASISAAVRDEAGKLVMECVIETKARTILEFIQGLRGSLWVTFEEGTSAAWLYDLVKPPVAQVVVCDPRKNALLKAGNKNDRVDARKLSELLRAGLLTPVYHGDSGVRTLRELSRSYLTVTKDLTRVMNRTKALYRSWAIPCAGEKVYSPRHRNSWLEQLSEAAVRRRAEQLYEQLDALMKIRRQARRELLTESKKHAAQQLLRQVPLLGPIRVALLIALLQTPHRFRTKRQLWAYSGLALRTRTSGEYRFTGGQLQPSKRLASPRGLNHNHSHDLKSVFKGAAMQASRSSNVLGDLYQDLLSNGMKPAMARLTLARKIAAIVLKIWKKGGPFDPRQLKRQAA

SEQ ID NO: 338243 - protein, 430 aa, unidentified
MRHWGCGQDGSVVSERFELFVGIDWAAESHEVCVLDAERRVIDRKTVEHSGAGVAQLCDLLLKLSNHQPSRVAVAIETPRGAVVETLVERQFAVFAINPKQMDRFRDRHSIAGAKDDRRDAFVLGDSLRTDRHLFHRVQLDEAQVIRIRELSRTEEDIVQEQIRAGNQLRELLRRYYPQMLNLCPGVDEIWFWDLIECAPKPEAVRKLTRSKIERLLKEHRIRRLSAEEVLGALKAPPLQLTPGAVEAASEHVLLQLPRLRLLQQQKNDVAARIQSILDEMSQPGQSGEHRDVAIILSLPGVGRSVAATMLAEASQALARRDCHALRSYSGSAPLTRQSGKKKVVLMRQSCNQRMRNALYHWARVSVQHDDHSREHYAQLRRVGHKHGRALRGVADRLLPVLMAMLKSGTFYDPQRRTNCLTPTIESQTA

SEQ ID NO: 338244 - protein, 364 aa, unidentified
MNKGHLNTELSSLEGTRSEFNRSKAVIKLGIDVHQDFYVVVEQMEGTNPKPAQRFQKQVFLHWAAKLSKSGSKVHAVYEACGFGFGLQRQLTAQGIHCYVVCPQKLDERNKRVKTDGLDAKALCLKLDRFVQGNREALALVRVPTEAEEQKRAIHRQREQLVKARKGLEAQGRSLLVNHGMEPASNWWKGRTFAQLQVPEWMKELLSNSQPILLALEEKIRALTAQLQAAAISKQPRGLGLLSSVVIDREIGSWTRFKNRRQVGSYTGLCPGEYSSGNTRVQSCVTKHGNPRLRAALVETAWRLVRFQPNYKPVLKWRKILAKGALATGAARKKAIVAVARQLAVDLWRIRTGRVAIETLGLTN

SEQ ID NO: 338245 - protein, 427 aa, unidentified
MPYRIAGIDVHKKMLAVAVADVEVDGDFHFERQKVGTIPIDLRRLADWLDEHEVEEVVMESTAQYWRPVWEALEQHWRPRRRARHGAPRLAGTLHLAQAQSNRGPGGRKKDFPDAERLVKRLVAQELTLSFVPDAEQRLWRTVMRRKYQVTRNRVQLQNRLEALLEEAHIKVSSVVSDLLGISARRMLQALADGETDPAALATLATARLRATPEQLCDAFQACTTVHPVYRRLLKLTLEELRVIEDHLGQLDQQMADLLTAHHDAVQRLAEVPGLGVDSAQQIIAEVGVTAATFPSSKHLASWMGACPGNEESAGVNYSHRCPKGNRQMRRVLNQAANAAVKAKGTIFNVVYRRLVPRLGHAQAIGAITHRLCRLIWKLLHERIRYEERGPAVSTEAKKVRARKMIRELRSLGYRVELLSAPSSSPA

SEQ ID NO: 338246 - protein, 448 aa, unidentified
MSRRSKAVGLPILNARAAAVDIGARFHVVAVPSELCAEPVQTFQAFTGDLHRMANWLSALGITTVAMESTGVYWIPVYEVLEDAGLEVIVTNAREARAVPGRKSDIKDAQWLQRLHACGLLRASFRPGREIAALRAYLRLRERHLDYAAAHIQHMQKALTFMNLHLHHVVSDVTGATGLRIVRAIIAGERDTKVLARMRDLRCKATHEVIEAALQGNYQPEHVFALQQALELYDFYQRQVEQCDRQIEQVLTRLAAQSPAPTAPLPKPRHRTKQPNAVDFDTRPLLHQITGTDLTQIHGIGPYLALRLVSECGTDLSRWPTAKHFTSWLSLSPGCKISGGKVLSSRTRRSSNPVAAHLRLAAVTVGRTDTALGAFYRRLAARLGKAKAVTATARKIAVLFYNTMRYGADYKDPGADYYEAAYRDRVVKQLQRRAANFGFRLEAIDGVS

SEQ ID NO: 338247 - protein, 278 aa, unidentified
MQYIGIDVSKDDFHVAWNDEKVQIFANSKEGISSFEDSLHHLQYDRQATQIGLESTGIYHLLSSVLLTDHGWAVVVINPYITSKAIKSSLRQVKNDRKDALVIRKVLMLGEGYLFTDTPEILRLKALLREYTSLTKMKAKCKNIISIQNKYQQTTDEALDSVFPQLIDSLNENLKQMKKRLQKTNSEEQKLLQTIPGIGPVCSSALVAFIGNVHRFDHPKKLVAYLGLDCRVHQSGTSINGKGFITKRGNPVPVVCFSMRLMWPDSIIPNLKCFLRKN

SEQ ID NO: 338248 - protein, 350 aa, unidentified
MILIGCDYHPSWQQICWLDRETGETGEKKLEHASGEAERYYRQLPGRALIGMESTGNCQWFLDLLGRLGHEVWVGDAAKIRASEVRQQKHDRRDAALILKLLLEGRFPRIWVPSGEEKDLRQLLIHRWKLVRLRVQVKNELQHLAMNQGTTRKRKLWSQAGERVLRELPLAPWASRRREDLFKVRALLEEQIGALDQAVVQAAEQNERAQLLMTQPGVGPVTSLAFVLTMGDVRRFRRGKQVASYLGLIPREYSSGGKQRFGSISKQGNRFMRMLLVEAAQIAVRYDPQMRSEYLHRCHRKPKGVAKVAAARKLAIRLYWMLRSNTGYPEVVRAGSSSRVPVAAPVRPKG

SEQ ID NO: 338249 - protein, 336 aa, unidentified
MYKYQKVVGIDVSKLNLSISVYDGKKYSFYEVSNNTNLFKKDFFDKERLDLSTTLFIMENTGVYHLKLATYLVKELGCIVSVVNPLAIKNFIGIDLNRLKTDKADSKKIAEFGYIYGDKYLFSPTDELSEKIELTLNMIDDFYNQINTLSNQLESLMQRYYKFPEIIKSYKSMIKTYQRKIREAEKELERLIKKNFKVEYELLRSIPGAGLKFCSLVIGKLKCFKNFDKAKQVSSYIGICPSPYESGSSIKGRGKISKRGNTYMRKILFMCSLSACKHNRSCRTLYYRLIASGKPKKLALIAVANKLIRQAFGILKSGKPYDPDYHAGLTHSAKNA

SEQ ID NO: 338250 - protein, 447 aa, unidentified
MKRKQEPRQALSVVYPDSAGIDVGSREHFVCVPADRDAQPIRPFAAFTEDLFALGKWLKSCGIRQVAMEATGVYWIPLFEVLERMGFEVVLVNGRQTKRPAARKSDVLDCQWIQQMMMFGLLSGSFRPADALCAIRAVVRLRARLIRDGQRAVQQMDKALVQMNVQLGRLLADLAGKSGQAIIRAIVRGERDGATLAALCDRRVRSSPEVIARSLVGNWRDEHLLELKHAVATFDLIQAHIAECDSTIAQAVAALQRLPDPPPEARSRSRKTKRHTAAQHSSLRTALFQAMGVDLTAIPTIEVDTALVIFTEVGPDLSRFPTSEHFCAWLNLAPGTRISGGKRLGRAPMPAINRVGEALKRAAVNARSSPTFIGAAHRARLSRMTKACAVKATAHQLARLIYAMVTQGKAYVEYGIDRYESEHREKQLRQLRRKAAQFGLTLVEKAA

SEQ ID NO: 338251 - protein, 406 aa, unidentified
MADDYDFYIGLDWGTDQHQACVLDAAGRRVGEHTITHSGAGLAAWLAALARYGPAARLAVAIEVPRGAVVDALLAHGCHVYALNPKQLDRFRDRQTVARAKDDRRDAGVLADALRTDRGVFRARQPDDPRLGPLRELTRLARELGTESTRLTNRLREQLVRSFPQVLTLCPAADEPWLWTLLDHAPTATQAARLRPQTLRALLAKHRVRRFTAADLSACLQAPPLPAAAGTIAAAGEHIAFLLPRLRLASQQRRQCDRRLEQLLDVRATGEPPLEHRDVTILRSLPGVGRLVAATMLAEAWPALAARDYQMLRTHSGVAPVTRQSGKTRLVTMRRSCNGHLREAVFHWASNSLRLDPRCRAHYDRLRRRHGHARALRGVADRLLSLLIALLRAGTLYDPARRQVAA

SEQ ID NO: 338252 - protein, 351 aa, unidentified
MNIMGCDLPSRYQVVAWVHEETGEVVTRRLEHENGEARKFYASLPRGTMVGIEATFPAHWFERLLGECGHELRVGHAAKIRASVVRRQKTDTRDAEPLLELWLANRFPRIWVASLAERDLRQLLAPRMKLVRMRTAVKNQLPALAISQGVCRKQKLWSVRGRAELDNLALLPWASRRRQDLIATLEQLNGSIGELDGAVEAAAQQREEAVRLMTHPGVGPVVGLAFVLTVGQVSRFPNSRHLVSYLGLNPSEHSRGGRQRLGAITKQGNTMLRWLLVEAAQTTARYDPELRRVYQRWKFRRASGVAKVAIARRLAVRLYWMLRAQVDCAQLVRMSGSPSSGVAPKPSESIV

SEQ ID NO: 338253 - protein, 373 aa, unidentified
MKIIGCDFHPSFQQIAMFDSETGEITELRLSHANAEATKFYESLTGPAVVGVEASGNMRWFQRLLARLGHTLLIGDATKMRAGNPRKQKTDKRDARYILDILLEKRFPSIWVPSMEEVDLRQLLKHRHTLVQMRTRVKNQLQHIAINEGFQKKRKLWTVEGLGFLRNLALGPWTGRRRDDLLQLLEQLHGQIQEMNQAAEKEAAKQPLVQLLMTHPGVGPILGLATVLTLGTVQRFERSKNATSYVGLIPSEDSSGERRRLGGISKQGNSFMRFLLVQAGMVAARHEPELGRFYQRLVHKKHHGVAKVAVARKLLVRLYWMLRTNTPYPEVVVRTQGSSSHSVAKKAKTERLSGRPASRKKGKQNKQPGKNQE

SEQ ID NO: 338254 - protein, 352 aa, unidentified
MAKNDFDELMSVGIDIGKDVFHLVGFDKEGQLVLRKKIKRMALVATFEELPRCIVGMEACMSAHFVNRTLRELGFEPRIIPAVYVQPFNKGQKNDYNDAEAIAEAALRPNLKTVSEKTQEQLNLQALHRVRSRLVSRRTATMNQIRAFLIEQGITVRRSVAALRTSLQAILDHRDDEMSLRMRKLILGLQQDWIWTDRRIEMTTSEIKSVSESEASCQRLVTIPGIGPIISTAVVAAVGTGEAYDRGRDFAAWLGLVPRQHSTGGRTILGRITKRGSRYLRMLFVQAAQVIMMRPNNWHKFSLGPWLEAAATRMQHNKLGVALANKLARIAWSVLNSGKDFDWKKKEFATAI

SEQ ID NO: 338255 - protein, 353 aa, unidentified
MRSYYVGVDVHQASSVIVVLNGAGKVVAQVVLRTRSEDLRSYFKGLEGKVRVTFEEGTQANWLYHLLRPLVSEVIVCNPRRNKFLAEGNKGDRIDALKLAQLLRSGLLQPVYHGELRMRALKELVRNYHCLVVDTTRVMNRLKAIYRGRGIGCAGTAVYQVERREQWLKKLSERGVRQRAEFLYKQLGALKPLRQEAKLAMLREARQQGAYKWLLSVPELGAVRVAQILAVIETPHRFRSKRQFWTYLGLAVVTRTSAEHEVVKGKLQKRARPAATRGLNRNFNRLMKKVFKSAACSACVAGPFQAAYQQRLAQGMDESLARLAVARKLAATTLTVWKRGAGFAPERMSAPRL

SEQ ID NO: 338256 - protein, 331 aa, unidentified
MEEGRRFAGVDVAKARLDVFIQPSGESFSVANDERGISELLRRLEPADFVIIEATGGLEIAVASALATAGIAVAVVNPRQVRDFARATGQLAKTDALDAQVLARFGEAVKPQVRALRDAQAQALEALVNRRRQLVEMLTAEKNRRANSPKVIHKGIDEHIRWLEKRLSGLDDELAGLVRETPIWRERDELLRSVPGVGKVLSTTLLAHLPELGALNRKQIAALAGLAPFNRDSGSLRGSRCIWGGRAQVRRVLYMAVVAAVRSNPVIKNFYVQLRARGKYPKSALTACMRKLLVILNAMLRSKISWQTPALASSTATLSPLLGAAPEHGCC

SEQ ID NO: 338257 - protein, 407 aa, unidentified
MEVFLGVDWAEDHHDLCLLNEAGAVLAARRIVEGLDGLAQLHTLLAGHVEDPDQVVVGIETDHGLLATSLMAAGYRVYAINPMSTSRYRDRHHSSRAKSDKSDAKLLADLVRTDRHNHRRAMPDSDLLEAIKVLARGHQNLIWTRQRLTNQLRSALREYFPGALDAFDDLHHPDALAVLSKAPTPTQARRLSTSQIKTALARGGRQRNLEPRAHQIRAVLQRPQLRAAELVEDAYGATTAAQARLIADLNQQITTLEAKLAQRFDQHPDAELLLCLPGLGVTLAARVLAEFGDAPNRYADAKARRSYAGTAPITRASGTSEVVIARLVRNKRLFDACYQWAFCALNASHGARAYYDAHDPGPKTGKTARRKLANKLVGILHGTLAHQTPYDEAIAWQHWQPQNSQAA

SEQ ID NO: 338258 - protein, 427 aa, unidentified
MDNALTTTLFIGIDVSSKSNYVFALDFFGKKLLSFQVNNNLPGSEEIVSTILSCLKENNLTHLTIAMESTSFYSWHLANTLSTHEALVWFKPKVHCMNPRVICAYKKSFIDMDKTDPKDAFVIADFARVGKITTAPWNGAQYIALQRLTRCRLHLMENISREKSYILSNIFLKFSELAVLDKSENPFSNTFGATSVAVLTEYMSTEELANASIENLVAFLVEKNKNRFSNPEATAKLLQKAARDSYRLDKALYDPLNATIAASLNCIKALDKEVKGLDKAIEKAIKRIDNHEFQCLLSIPGIGPVLTAGIISEIGDITKFNNQGCVAKYAGLTWRKKQSGNFTADNTFLTKTGNKYLRYYLLEAAASVVRHSNEYLDYYHKKYAEALVHKHKRALALTGRKLVRLIFALLHNNQLYTSNEVVEKATI

SEQ ID NO: 338259 - protein, 382 aa, unidentified
MEKAITGVRRFVGLDVHAETIAAAIAEKDQAARDVGTIPNREESIRKLAKKLTEGGAWAACYEAGPTGYALYWQLTKLGIPCVVIAPTLVPTKAGDRVKTDRRDAQRLASSFRAGELTPVWVPDAEHEALRDLVRAREAAKQDQLRARHRLGKYLLRHGKRPPQQMRAWTENYLQWIKGKVSFDQRSQQVTLEDYLNEVDHAGTRLVRLEKAIDEAVEQAPENMRELIRALQALRGVAKVGAVTIVAEVGTLTRFEHPRQLMGYSGAVSSENSSGGKIRRGAITKTGNAHLRRVIVEAAWSQRHKPVLSLAMRKRQEGVSAEVQELASKARHRLHHRYMHLLGKGKTKQEVVTAVAREMLGFIWAIGVCVERAQAQKGKDVA

SEQ ID NO: 338260 - protein, 337 aa, unidentified
MKFSGIDLHSNNSFVVITDETDRIMYRRRLPNKLGEILTALAPHREELSGVVVESTYNWYWLVDGLMAAGYRVHLANTAAIKKYDGLKHSGDEADALHLAHLLRLGILPEGHICPPVERAVRDLSRKRIQLTRCRTQQILAIENILARQTGATITSNQIKQLTEDGVDLLGLPADVALALKANLAVTKALGTQIDKLELRLRGEAKPRAEYRLLKTVPGIGEVLATTIMLETGSVSRFAAVGNFSSYCRCVDSVHTSNNKKKGEGNRKNGNPYLAWAFIEAANFAMRFCPEAKRFYERKKAKTNRIVALKALAHKLARACYHMLREQKPFDVKRCFG

SEQ ID NO: 338261 - protein, 391 aa, unidentified
MSMYFVGIDISKYKHDCCIISAADQQIVSKFTVKNDKDGFEHLLTTLNSLSNPEDIKIGFESTAHYALNLELFLENAHHSFMEVNPVLIKEYKKSTTLRRTKTDSVDCESIARWLMTVEYKPHSKGFYHSYSLKSLTRLRDRLIRQRSFYLVKITNVLDHTFPEFKPFFNEWLSKTAIYLLENYGSAEKMAHMNSASYDKLRCASRGKFSIQQFLHLKELAANTVGVNNSIFDIELNSLLTLYNSLCKEIKTLEAEITKLIEEVHPHYMSIPGIGPISAAVIYAEYGDISNFSNPGQMLAFAGIEPGINDSGTESHGGRMVKHGSSQLRYVLLNACLPLIRFDITFATYYAKKRAEGKKHRVAITHVAKKLIRVIYALERQDVDFNVQKLR

SEQ ID NO: 338262 - protein, 398 aa, unidentified
MIAVGVDVSKSKSTVAIISDTGEIIQSPKEYCHTYSQLQPLIALLKKQCDEVKIVMEATGHYHYPILKIFLENHFFVSVVNPYIIKKYNDNTLRKVKTDKQDALRLAFYALEKSHCLTAYTAREAKYADLKFLYQQYTQRLHTIQKEKVNLCHILEESMPGLYDVLATSVRNPEKNLLYAVVKTFKSFEYIKQMSPERFFNRYSKLATAIGSRKRKNYALLIYEMAQNSICTRGNDPYTSIALEECLNSLILAEKAANRLCEQMNFIANTLPEYITVRAMHGVGDKLAPQLIALIGDVRKFKSGKALNAYAGNDAPPYQSGQFESKNRHISKRGSTELRKICFEIICCIKVHKTTEDPIYCFMEKKEEGKAKKVAIMAGVNKFLRTYYAKVMEVYKDI

SEQ ID NO: 338263 - protein, 414 aa, unidentified
MNNTQDNFSVHVGLDWADKKHDICVQVKGEDQRTFSVIVHSPESIDEWIKGLHQKVKGNIAIAVELNKGPIVYALQKYSFVTVYPIHGLTLARYRQAMFPSGSKDDPSDAELALDMMLNYPKKITPLKPSSEKTRTLALLVEQRRVLVDDKRRHANRLISALKQYYTQPLNWFSHRDTALFCQFLIRFPNLGELKRVRTSTVAKLLNSKGGPAVKKTPARIATIKDAIPLTNDESLIVPYQTFVIALAKQMLVLIDNIRGYDTQISNLFSSMEDAPIFTGLPGTGPCLAPRLLAALGEDKSRFNSAQEIQNYAGLSPVTERSGQKNWVHWRWQCSKFIRQSFIEWAAKSIGQSYWAGLYYAQQKAKGNSHQSAVRALAYKWVRILFKCWKMGKVYVESKYLKALKERGSPLLTA

SEQ ID NO: 338264 - protein, 346 aa, unidentified
MNKMDYGGIEVSAEKLLVALERDGVRQPQREFTNTPSDHAVLCRYLLRAGRTVRVCLESTGVYGLDLALALSRHPGLQVMVANPRAVRHFATALMRRSKTDPLDAEVLREFAQRMPFQPWRPPSPAALALHALARRLAALTEMQKEEKNRLHAARVSETTPAAVLRDLQRSLRAQQRALQRLTREALKVIEQDPDLKLRFQLLLTTRGIAETSAVQILAELAVLSPNLQVRQWVAHAGLDPRQYSSGSSVHKKTRISKTGNRHLRRALYMPALVAIRHEPHLRAFYQHLLERGKLKMQALVAVMRKLLHALYGMFKSRQPFDGAKLYRLPEETCVLQPGFSTAEAA

SEQ ID NO: 338265 - protein, 339 aa, unidentified
MSAIVTIGIDLAKNVFAVHGVDATGKSALVRPSVPRGKLLELIASLPPCLIGVEACSGAHHWAREFEKFGHTVRLMAPKFVIPYRLSGRRGKNDAADAAAICEAVTRPNMRFVPIKSIDQQGQLMVHRARQGFVEQRTATFNRIRGLLSELGIVLALKAAVVRREAMARLEDLPGWANTVIGDLLSEVTHLDERIAQYDRHIALMARQSIEAQRLMQLCGVGETTATALLSTIGNGRDFKCGRQLCAWLGLVPGQYSSGGKQRLGRITKAGDPYLRSLLVLGARAVLVAAKNKTDPISRWAMSLAQRRGYWKAIVAIAAKNARMCWAVLSKGEDFRLPA

SEQ ID NO: 338266 - protein, 322 aa, unidentified
MSIYTDYFGIDISKETFDVVNKKGKHYQFLNDNRGFAKFKKIITDGSICVMEVTGIYHLRLAKFLYSKNIATAVVNPLRIKRFSQMLLHRNKTDKADARMICLYAQDQQVDLWKPAPKVIEQSKDIYQTMEQYIEFKAGLKNKLDALKVKKAASFLIDSVTNQIKVISESINVLQNELDSLVKIYNPIMLQNITSVVGIGQRTASLLIIATEGFQHFDSAKQVSSYFGLAPTETTSGTTINGSRQITKMGNPLVRKKLYMCSLQASRYNTSCINLYQRLLAKGKPKKLALIAVANKLLKIVFAIAKSGLPYDRLYKSYITIV

SEQ ID NO: 338267 - protein, 424 aa, unidentified
MKTYILRDPKTVEPQKPAAYPRPADPAATALVETICGPATPAPAGLPGRILYIGLDVHNDSIAVSLAPSGSTEVRRYGIIGGTHDDVLRLIKKLSAAHPGATLKFCYEAGPRGYPLCRFIRSHGAQCIIVAPSKVPRQPGDRVKTDRRDADQLARLLRAGELTGIYVPDPQDEAVRDLIRARYQVQKQQHRARQQLKMFLLRHNVRYAGTKPWTAAHLRFLATVKLPFAEQQFVFQEMVNVISEAGLRLARYEKQIASVVEGWRWQPVVQALMSLRGVALLTAATLVAELGDLERFATAPQLMSYLGLCPSEHTTGQDRRQGGITKLGNGIARKAIIEAAWNNRTPARISRTVLARQEGLPKPVIEAAWAAQTRLHQRYKHLTGVGRKKSQVAAAALGRELSGFVWAIGRMVKPRAVKPETGKK

SEQ ID NO: 338268 - protein, 477 aa, unidentified
MDVCYTRCAGLDVHKKSVVACRIETQAEGRNVAETRTFGTTTRQLLDLLTWLLEWNGTHVAMESTGEYWKPIYAILEGHVEVLLVNACHLKHVPGRKTDVKDAEWLADVLRYGLLRGSFVPPQAQRDLRDLTRQRIKLVRERASVINRLHKVLEGANIKLAAVVTDVLGVSARAMLEALLVGTASPAAMADLAQSRLRQKLDQLEEALEGRMRDHHRFLLRHHLEHSDFLDQMLADDDAEIDRRLTAQSTPQLPASAPDVLTARPDEATTTSTATTTSAHATAPDEAPDPAVPVVTASDGTTLPPLTPCAAIDLRDTIPGVNRRLAEVIIAEVGTDMRHFASAKHLAAWAGVAPGKNERAGKQRSGRPRPGNPTLRMSRIQAAHGAARTKEGYLRAQYDRLARRRGRKRALGAVAHSIIVAVSAMLSRHEAYHDLGSNYVDERQREHVANRLVHRLEHLGYTVEVAFTPAPAPAAAG

SEQ ID NO: 338269 - protein, 418 aa, unidentified
MTFTKSEKIKTINEKTLIFALDIGKNIHYGYFRTPKNQDIKPLRIYNTGQSFKLFWKKLSSFKEQHGLDEVVVGFESTGPYAEPIANFLRKKPVNLVQVNPMHTKRIKDLTGNSPNKTDRKDPRVIADVISLGHALTLVVPEGAAAQLRRLTHARERAIKRKTAMGNQLQHLVFVIFPELGDIIKPATKTGMYLIKNHSDPVSIVALGIEKLRDIVRKVSRGRYSIDRVEKLYEAAKNSVGIKEGKESILLETSHLVSNIENENRYIESLEEQMAMYLEQIPYSHSMLSLKGIGKVTVAGLVGEVGDFRKFKTISEITKLAGLDLFEVSSGNHNGVRRISKRGRALMRKLLFFAALNAVKSHGIMHAKYHTMLDSGTSRMKALVAVARKLLRIIFALARDNTEYDEHYVRKHEYKLAA

SEQ ID NO: 338270 - protein, 359 aa, unidentified
MKKLFIGIDFSKEKLDATIILACGMNEIGSREYGCFPNNTTGYRKLCNWVKTNAWNTIAEEWLFCGEDTGSCSIGLSKWLYGKGYDIWIENAYAIKHSSGIQRVKNDKADSAIIAEYAWRQQDKVVPFEPLNESLAQLREIFLYRHKLVGQRVAMELRKEDKSQSNKSKAISFINRKSKHLIAEINKTIAECDKAIDSIIEADEELKENYAIITSIKGVARQNATCMLVYTNNFKKFGYDPRKIACYYGVAPFGKQSGTSVNTPAHTSHFANKLIKSLLGQAAHIAKIYNPEIRDYYQRLISKGKKPQVALNNVKNKLIRIIVALVRKKVPYDQNTYKYYEEREVIERKKNEMLIYGNV

SEQ ID NO: 338271 - protein, 412 aa, unidentified
MEVMYPRCAGLDVHKETVVACVRIVEGGEVSRSVRTFATTTASLIELGEWLEVNGCTHVAMEATGVYWKPVWQVLVDSSFELVLANAAQVKNVPGRKTDVNDATWLSELLAHGLVRASFVPEPAIQELRGLLRTRKQLVREKASHVQRLQKTLEEANIKLETVLSDVMGRSGRAMIQALIDGETDPAKLAALAHWKVRASAATLREALHGRIKRHHRFLLRLHLQQIDALDAAIAEIDREADAGLACFRDAVKQLSTIPGVSELSAQVILSEIGTDMGRFATAAHLRSWAGLCPRNDESAGKRRSTRLRRGAPWLKAMLVQCAWAAARTKATYLHAQFVRLRGRRGPKKAICAVAASILTAVYHMLKDGTFYEDLGAAHFVRRRPDTQARRLVKRLAELGFSVELKPVAAVA

SEQ ID NO: 338272 - protein, 389 aa, unidentified
MLLDHPTDGLTAIRTQFAAIFMSLELSRSNWLVTSLSPGKGEKMSKYSLTAGDVAGLMRLLADLRRKAEVRTGQSYPIITIQEAGLDGFWLHRVLQQQGVESHVVDPASIAVPRRRRRAKTDKIDGETLLRTLLAYKRGEPRVCAMVVAPSPEEEDRRRLCRERRTLIEERVRHGNRIKGLLFAQGISDYAPLRRDRRARLEALRTGDGRELPSHLKAQIGREFDRIELLLEQIKSVEAAQQALLAAARKPASEKAAPDPVTMLLALKGMGANFTTVLWSEAFYRSFSNRRQVAAYAGLAATPWQSGGIRHEQGVSKAGNPRLRTTMIQIAWLWIRHQPQSALTRWFKERSQQGRKRAIVALARKLLVALWKYVTQGVLIEGAVMKQAA

SEQ ID NO: 338273 - protein, 304 aa, unidentified
MNGIGIDVSKRQLDVGTTDGEILQVRNTAAGFAELEAWLKEHPADQIVLEATGGYEQRVLDFLHNAGRPVVRANALRARRLAQGMGHLAKTDRLDAYALAKMAVLMKLPAYQPLEPWQQRMREFVRARRQAMQALTVARQQQEMVSDRELRRLLQANITRLQTLVARLGKQIGEQVEQQPQLAVMKSMKGVGPALQAVLASHLPELGRISGKAIASLVGVAPMSHDSGTMRGKRSIHGGRAEIRQVLYMAAMSAMRHEPRLRDFYRSLRARGKEGKVAIVAVMRKMLVILNARVRDAESGPIPA

SEQ ID NO: 338274 - protein, 359 aa, unidentified
MKKEQRKQISFKGQRIFIGIDVHLKSWSVTIASEHAVLKRFTQSPSPEALYSFLTREYPDAEYKSVYEAGFCGFWIHERLMELGIDNIVVNPADVPTTTGEKLRKTDAIDSGKLARSLRAGELKGIYIPDKVSLEIRSLTRLRDSVTKDQTRQKNRIKSHLRYLGIEIPQEYCERGRCWNKSFVAWLRSVESACEYGKQTLDQLICQYEDLRKRRLEMIRLLRRLSRTERFSEPLGWLMSVPGIGQLTGMTFMSEIDDISRFKNADQLASYIGMIPMCHSSGEHDGTGDITLRCHSKLRSVLIEAAWVAIRQDAAMTQAYTEYCRRMKPSKAIIKIARRLVNRIYFVMKHKRKYVNNVA

SEQ ID NO: 338275 - protein, 405 aa, unidentified
MSDIIALDVSKGHSYCVHYSDGNCVKEFDFEHNKLGFAKLSETVKRANNPTFYFEATGIYSRPIERFCRDNKIPYALLNPLELHLKTENLRRVKTDNKDAHKIALSAYDNSYRLMAFQNPKYLDLREWCRFYERVEDSRKFNKVELHNELQQTFPEMEQLFTNKTSILSLNLVSLFPHPDLVSGISRTKLKNILMSKTDKKISSDKALEYAEKLIVFAKNSSPAVRVDNVQVQEVKYYARKLKDLTIEKRKLRKQMIQLGKTLPEFEIIASMPGIGELTAAMLLGEIGDFARFDTSNQLNAYVGIDLIRYQSGQYLRKDHINKRGNPKAREILFLTVRNMIKQQAAAPNHIVDYYYKLKRQPVPKRDKVATVACMNKTLKCLFSMIRNKTKYAYAYTDSRSIETL

SEQ ID NO: 338276 - protein, 352 aa, unidentified
MSIIETGFRAANIIIGVDTHKSTHVAVAINEQGVRLAAISVPTNSKGYIELNNWSRSLGSVQAIGIEGTGSYGAGLSRYLLSLGLNVIEVTRPNRQLRYQHGKNDSLDAEGAARSVLSGEAIAEPKTQTGSVEMIRHLKIARDTAVKSRSVAMVTLKTLIINAPAGLRGGIDQVKGKIALIRHVAAFRPGPIKSTTASAKAAMRSLARRWLMLNDEVAEHDKELKALVEAKTPSLMASHGIATLTIAEMLILVGDNPGRIRSEAALAKLCGVCPIPASSGKTHRFRLNRGGNRQANAALYRVAIVRMRSHEPTLAYVRKRTKDGKSKSEIIRCLKRYIVREIFTHLCKPETR

SEQ ID NO: 338277 - protein, 414 aa, unidentified
MQVLYPRVAGLDVHRVTIVACVRRVIPGGQAEELVRTFGTMTEDLLKLSDWLAEHQVTHVAMESTGVLWKPVWNVLEGGEWQLLLVNARELKQVPGRKSDVRDSQWIAQLLGCGLLRSSFVPERGQRDLRDLTRHRAQLASECTRCANRIHKVLQDANIKLSSVATDVLGVSGREMLAALVDGETDPEKLADLARGKLRGKIPDLQRALQGHITPHHQFMLEQLLDHLAHLEEQLACFHARIEEALRPFVDEATFRRLDAIPGVNKETIQNVVAEIGVDMQQFPTAGHLASWAGVCPGNEESASKRKRSRTTKGDVWLRRALCQAAWAASRTKDSYFQAQYRRLAGRRGKKRAAMAVGHSLLEVFYHLLKDPNLEYHDLGGNYFDTLDPQRLCRHLVKRLESLGYQVTITPAAA

SEQ ID NO: 338278 - protein, 355 aa, unidentified
MDSIKYIGLDVHQSTISVAVLNADGKLVMQSVIATHAATILDFLHGLRGSLHVTFEEGTHSAWLYDLLVRRVSKLLVCNPRKNALLKAGNKSDQIDARKLAELLHAGLLSAVYHGQNSTAAVKHLGRSYAALTEDTTRIMGRLKALYRGQAIACAGKKPYGSRHREEWLAQLSDSGLQRRARRLYQELDLVQQLRREARHDLILECGKYSEAKLLRTVPWLGPIRAALLIGRVQTPHRFRTKRQFWAYCGLALETRSSADYGLVNGQLQRRKKPVFIRGLNLNHNHDLKNLFKSAATTASGSDGPFRPFYENLLGKGMKPEMARLTLARKIAAITLHVWKKGEPFDAEYLKPQAA

SEQ ID NO: 338279 - protein, 316 aa, unidentified
MNTLNYNEINIGIDTSQTVLDIYVRPEGAFQSFDNTPQGIKAAIAFIKPFKPTRVLIEATGRLEMAFFCAADKAGLPVCVCNPIQVRQFAKATGRLAKTDKLDAKDIAYFGEALKPVLTQLKPEKLRHISDLLTVRSQCLDMSTMQKNRLQRMPKSVHKPIANVLKSIKKEIASIDQQIDKLIAKIPQWQARVDQLMSAKGVGKVLAYTLISELPELGQLNRKQIAALVGIAPMNRDSGDHEGKRFIRGGRHKVRTVLFVSMMSAIQCHPRLKPMYQRLVAAGKPKKVAIVACMRKQLIILNTMVRNGTMWDENMA

SEQ ID NO: 338280 - protein, 322 aa, unidentified
MSVSVLGIDIAKQKFDAALLVDGKTKHKTCKNSAEGFEMLRLWLEKQGIQKVHACLEATGNYGEDLATYLHDAGHIVSIVNPARIKGFAQSELLRTKTDKLDAALIARFCLAMKPGAWNPPSPEIRSLRALVRRADSLIDMRSQEKNRLSTAHKSVSLLIKEHIAYLDQEIERIRQQIAGLIEQDPNLKRRKELLDSIPALGKATIPHILAELDDLEKFNHVRELVAFIGLAPKETLSGSSIKGKPRLCKIGHARLRKALYMPALVSIQCNPMMIAFYNRLKDRGKNGKVIVCAIMRKLVHVIFGVLKSGKKYDPNYKPAFA

SEQ ID NO: 338281 - protein, 457 aa, unidentified
MMETKRRREQRSMLPVHPDAAAIDIGATVHVAAVGPARDPQPVRSFGTFTGDLHRLADWFAQCGIKTVVMESTGVYWIPIYEILEQRGFEVWVVNARDAKHVPGRKTDVSDAAWLQRLHEFGLLRGSFRPQGAIAALRAYLRQRERLLDYAAAHIQHMQKALTQMNLQIHHVISDITGATGMRIIRAIVAGERDPDTLASYRDIRCHSSVETVRQALIGNYREEHLFALAQALELYEVYQAKVATCDEKIEVVLERLKQPCRAPAKPLRAARHKTRQPNAPAFDARGALYAVLGVDLTQIHGLGPYLALKLISECGTDLSAWPSAKHFTSWLSLAPGNKISGGKILSSRTRPSGNRAAALLRLAATTVGRTETALGAFYRRLSARIGKAKAVTATARKIAVLFYNAVRHGMDYADPGASYYEERYRQRVLTNLQRRAKALGYVLRPTEIKAVSMAVS

SEQ ID NO: 338282 - protein, 327 aa, unidentified
MEPTVVGVDIAKRVFQLHWIAADTGEVFDRQLHRSDFLEHFANREPCLIGMEACGGSQHWARRLTELGHQVKLMPGKLVKAFVTGNKNDVADARAIWAAARHPGVKAVPVKTEAQQAVLALHRIRQQLVIFRRSQSNCLRGLLGEYGEVMGVGRAAMNRAMPDLLLRLELRLPQVLIDSLREQWQRLVDIDKQITLIEQRLRAWLHENPACRTIAEIPGVGFLTATAAVAAMGDPKAFRSGREFAAWLGLVPAQFGTGGKVRLLGISKRGDRYLRTLMIHGARSVMKHAKDPGSWAVQLSMRRPLNVVVVALANKIARTIWALLGKR

SEQ ID NO: 338283 - protein, 354 aa, unidentified
MMVLGADMHKRSHTIAAVAAATGELIDDTTIRVSDEDFLALLNWARSLGDERVWALEDCRHVSGAFERFLIGSGERVVRVATKLMSDARRAGRERGKSDRIDALAVARAALREGVDALPSAQLAGVELDLRLLIDHRERLVRSRVALNNDVLWHLHDLWPELKLPMSALFSKKWSTRIARRLARAEQTARVRIARDELRRLRELTAATDGLEAEIAELVAQIAPQLLQEPGFGPLTAAKLLGEVAGIERFATEAKLARAAGVAPIPVSSGKTNRHRLDRGGNRQLNTTIHRIALTRARCHPETKDYIARKRAEGKTGLDAMRCLKRHLTRRIWHLLQPPTPGQKIPIPTSNLLT

SEQ ID NO: 338284 - protein, 428 aa, unidentified
MASSSDITAVKTWVAIDVAKFTNVALMEFPDGKRKQFRFRHCAEDYDQLVSSLRSGSAPTRIAFEPTGDYHRSLGYRLVSEGFDVVLVSSVAGARMREAIFNSWDKNDPKDAQVILQLMKQGMTLRYCDPLILKTHDLQELSKTYHSIAIARKRLQHVLLTHYLPLYFPEMETFWTSTRNEWFIRFLIEFPTPASITSMTFAEFREAVWVSMGRRVHKEDKIAEIYRLATHSIGLPVALNSPAIETYRLQLTRYLELCQHRRALESKADELLSQGADYQHLRSVPGVGPIVALVILAEAGDLRRFTHHRQFLKYCGLDLAKNQSGVSRSREQLSKRGNARLRGALWQAALSAVRMRENAFRDKFQRYTATAPLDPDLRRKARVAVTAKMARIIYALIKHGQPYRHYLDAFTPSGSIPNKWAVEAFRTS

SEQ ID NO: 338285 - protein, 389 aa, unidentified
MQTARMTTAHTIATVECGAIFVSLELSRSTWLVTTLAAPVGSKLSRYQVRGGDMPGLLERFSDLQRHVHRRTGRIVPVIVIQEAGLDGFWIHRALVAEGIESHVVDPASIAVSRRHRRAKTDRIDGEALVRTLMAWKRGEPRVCSMVCVPTPEEEDRRRLCRELKTLIGERIRHVNRLKGLFFAQGIGGYEPRNKDRRERLEALRTGDGRPLPKHLKTLALRELEVIELLNRQIEAVKAERDALLEEAPAAGSALEPVRMLLELKGIGPGFAGALWSEGLFRNFANRRQVAAYAGLAPTPWKSGTINHEQGVSKAGNPRLRAIAVEMAWLWLRHQPGSALACWYHERVRRFGPRTRKVTIVALARKLLVALWKYVTGGVVIEGARMKAV

SEQ ID NO: 338286 - protein, 360 aa, unidentified
MIVQGTSVGLDVHALSVVAHAVDEETGKVARARLCPDHGEVLGWLHQLRAPVRVTYEAGPTGFGLARAITEAGMECLVAAPSKLQRPAGDRVKTDARDAAHLARLLRLGEITAVRVPEREIEAVRDLVRAREDARADLMRVRHRLSKLLLRQGIVYSGGTPWTCVHEEWLRRHRFDDIHLKAAFDHSFDAVLAATAARDRLDEQIMVVAASPRFADPVNRLGCLRGISALTGLALTVEIGDWSRCSGSSIGAYVGLVPCEYCSGNSRVQGSITKAGNTHVRRLLIESAWHHRKSYSTSGPTLRARWAKVDPALRARGHAGNRRLNKRWRSFTERGKNPLVANVAIARELAGWCWSLATMH

SEQ ID NO: 338287 - protein, 370 aa, unidentified
MLDTTTFVGLDVHARSIKAVSLDVMTGEVRAATFGYDAGAVAEWVRSVDPGARCVYESGVTGFDLQKRLSGLGVDCVVGAVSKMIKPSADRGRKNDRNDAEFLARMLSVGNVVEVWVPDDECEAARDLTRALEDARDDLSRSKQRLSKFPLRHGLVFDERTPTGRRKGNWTRAHWSWIESIRFAEGADNDALAYYVDAVRRAAEEKARLEGLVEAEARKPRWRKRVDSLRCLKGVDTASAADLVFEAGEFSRFRNARSFAAWVGLTPSEHSSGESDRRGAITKAGNKHLRKTLVEAAWHYLTCSGRPKDLARGQAPDRGARRHAAKGVRRLVERREALLARGVHGNKANVATARELACWVWAVGLMAEEA

SEQ ID NO: 338288 - protein, 405 aa, unidentified
MNAVGIDVSKGKSTVTIRKPGDVVLMSPCDIPHTQSAINDLIKQIKSLEGETKVCMEHTGRYYEPVATWLSDAGIFVSTVNPILIRDFGDDSLRTPKTDKADSKKIARYTLDRWAKLKQYGIMDKTRNQLKTMNRQFGFYMAQKTAMKNNLIALIDQTYPGANDFFDSPARNDGSQKWVDFIHTYWHVDCVRSKSLNAFTEHYQNWCKRKNYNFSAEKAAKIYQISSDLIAVFPKNDITKMLIWQAVALLNTASKTVESLRSKMNELASTLPEYPVVMDMNGVGATLGPQLIAEIGDVSRFTHREALTAFAGVDPGKNDSGKHIQNSVRTSKKGSPYLRKALFQIMDSLIKRSPVDDPVYAFMDKKRSEGKPYYVYMTAGANKFLRIYYGRVREYLSNLSNNETI

SEQ ID NO: 338289 - protein, 416 aa, unidentified
MKSTMITAVGIDISKNKSTVAVRRPGGEIVIRPFEVRHTSSDLKRLTAKLKQLGGDIRVVMEHTGNYWRPVALTLKKAGFFVSVVNAMLIHDFSDNSIRKLKTDRADALKIANYALTFWDELPPFNDEEEIRLLLKTQSRMCERITTTVTALRNGLIDLTDQTFAGINQAFDRAAKSAEGHEKWVDFFQHYWHRDCVCKFSLEAFTESYRRWCRQKNYKFRTDTAHKVYALAKECIATLPKCESTKVLITQACKSLNAVCEAKLASQHEMQRLASLLPEYDIVMGMEGAGPITGPALMAEIGDVRRFKNKKALVAFAGVDAPPFQSGTFESKSRHVSKRGSPHLRRTLFIISSVILQLSHEDNPVFCFMDKKRSEGKHFYVYMVAGAAKFLRIYYATVTGHFKASKYINSLPAIAG

SEQ ID NO: 338290 - protein, 458 aa, unidentified
MQQPVEVQVDEHEQIVERVVGIDVAKASGMVCLRVPHETIPGRRVTKVWSVKATTAALVELGDYLRCQGVQRVVLESTSDYWRPFYYLLEAAGLTVWLVNATQVKNAPGRPKTDKLDAVWLAKLAERSMVSPSLVPTEPMRHVRNLARARFDLVEDRARVKQRVEKLLEDALIKISSVLTDIHGVSGRAMIEALIAGQRSPKALAELARGRARVRRAALEEALEGRFTDHHARLARMLLDQLDELTAHITHVTDLLDAAISALPAPSPSPCPAPPAGAPPAGADGDGDQAGAGYHSAVARMCAIPGAGPDSVRAVLGEIGLDMTVFGTPQRLCSWAKVAPRTVQSGRKTGRARTGKGNPYLKAALAQMAMGAAKTDTFLGERYRRLIKRMPKAKALVALQRSILVIIFQLLADPTAEFTDLGPDHYTRRLDRTRRTTHLMRQLNALGYQVQLTETEAA

SEQ ID NO: 338291 - protein, 315 aa, unidentified
MKAENDPELYVGIDINKAQLDVAIGQEGEEWQAANTAGGIRSTVKRLAMLKPLLVVVESTGGLEKPLIEALQDAELAVAQVHPGRVRKFAAGIGWLAKTDRLDARLLAWFAFSARPHPKPRPTPAKEAMSELIRRRHQVVEMLTAERNRRSTCPPSMLEKLEEHIAWLTNERQRLTAEIETMLAEQAEFREKDAILQSTKGVGPIVSAVLQAELPELGCYSHKQIAALVGVAPFNKDSGHSHGKRKIKGGRSDVRSTLYLATMSAIRYNPVIRPHYEQLLKRGKVKKVAVIACMRKLLVILNAMVRDMRPWQQPS

SEQ ID NO: 338292 - protein, 412 aa, unidentified
MKQIRQKVGGLDIHRDSVVACTRVTMPDGSIEVAKERFKTTQAGLAELTTFLMDAGVNTVAMEATGIYWRTVYYALEGLFEELWLCNAQHVKNVPGRKTDLSDAEWLADVAAHGMVRPSFVPPPDIRELRELTRYRKTQVDARAKEIQRLEKILQDAGVKLTSVASTVWSKSSRAMIEAMIAGERDSVVLADMAKGVMRKKTDRLEEALESNFGSHHAILCRQVIDHLDFLDASIATLSTEICARLVPFEPQVALLTSIPGISAATAQVIVAETGADMSRFPTAGHLCAWAGVAPTSYESAGKKRPAGTRKGAPWLKRTLIEAGRAASRTKGSYYSALYARIARRRGPNKAAVAVAHSMLETAWHLLSTGALYEDPGADYFERRHDPVIEAKRLQRRIEALGFSVTIEEKAA

SEQ ID NO: 338293 - protein, 458 aa, unidentified
MRKKGKRTKGIEEAHPFAGMSKVNANAAGVDIGAIEIVACVAGDESTQIVKAFGNYTVDLQSIGKWLHEHQIKTVAMESTGVYWIPLFEELERQGFECLLISSRSLRRVPGRKSDIEDAQWIQTLHNYGLLESSFRPQADLVALRTMLRHRSQLLEHRAPHIQHMQKALLQMNVQLSQALSDVTGETGRAIIRAIVSGERNPQLLAAFRDPNCKKSEGEIGKALTGTWRAEHLFVLKQSLELYDFYTQQIEVCDAEIDRMYALTRPDWEAGELPPIPQKKRNSHSKNAPENAREIRQHLKRINGVDLSLVDGFGVSLAQTVTMEVGTDVGDKFPTEKNFCSWLGLAPKHEISGGTVLKNKTLKTKNRAGQAFRMAAHSVKKADCVFGALYRRLRSRQGPAQATVSTAHAIARVVYRMLKYQVEYETISVNEYEKKYEEQQVKYMKKKAAKLGFQLVPA

SEQ ID NO: 338294 - protein, 456 aa, unidentified
MAKTRKAKMIKSPDGNKLAIVNPDAAGIDIADTEMQVCVPEDRDGENNRRFGSFTCDLNMIVDWLKACHITTVAMEATGMYYLQLFLKLQDAGIEVLLANPRDVKNLSGHKTDSADAEWLMLLHRYGLLKPCYQPGNAARQIRNLNRQRNNLIRSADKQIQYMQKAMEQMNIKLSTVITDITGLSGRTIITAILQGKRDPVELASLAQSNCKASREDIAKSLEGTWDVDLLFMLQQSLDAYDFFISQTEECDKQLEVLLAAYQARMDTNADMLVRHDRRKNARSKNAPNIDVEKYAYAIWGVNVFDIPGLKDLAVMQLIGELGHDFIDKFESAEKFCRWCNLTPENKISGGKILSSRVQKRKNPVGQIFRKAAAPMAREKSEMGNYYRRIRAKSGALQANVATAHKIAKIFYAMVRTKEKYNPAKVGIDEREIMERKIVRLERALEKLNQKYKLAS

SEQ ID NO: 338295 - protein, 430 aa, unidentified
MKSNTQNAKIEAITEKTLVLGIDVGSETHYARAFDYRGIEYSKKPFKFSNTEVGFATFKEWILDLKERHEKDKVVPGMEPTGHYWFNLGKFLQDNEMKPVLVNPHHVKKSKELDDNNPTKNDRKDPKVIAGLVREGRYMIPYLPDGVYADLRTASNIRFQLQAELTRIQNRISRWFNIYFPEYKTVYGKPDAKSGMLILKAAPLPEDILTLGIDGVNQIWRDAKLRAVGKARAKTLIEAAEHSIGSKEGKMSARMEIRMLLEDYESKNMRLQEVMVLIEELVKEIPMAEKLLEIKGVGIRTVSGFLAEVGDISRFNNPKELQKLAGLALVENSSGKHKGKTTISRRGRKRLRYLLFEVAMSLVAKNPEFRELHNYYTARRLNPLKKMQSLMAIAAKLIRVFYAMLTKGVDYDPKKMISDIKRPTVYLQAA

SEQ ID NO: 338296 - protein, 349 aa, unidentified
MDLFIALDVSLASTALCALNAHGKVVKEAKVDSEPEALIAVLRALPGKVVVVGLEAGPLSQWLHLHMSVAGFTVVLLETRQVKGALKAMPIKTDRRDAEGIARLLQMGWFRPVHCKSVSAQEMRAVLSTRKLLQQTLINLELSLRGVLRNFGLKMGALTKVRFEARVRELVDGNLMLERAAAPVLRAREELRKELAGLEKLLRDLAKTDPDCRLMMTMPGVGAVVALTMRTAVDDPERFHSSKDIGPWAGLTPRRAQSGERDVIGRITRAGDAALRTALYQAANAVLCRSAPSWLKAWALRVAARRGKKRATVALARRIGVVLHRMWRDGTEFRFTRVEAMAAMTRHTC

SEQ ID NO: 338297 - protein, 329 aa, unidentified
MKNQWYAGIDVSKNTLDVSVYVEKSKLKDFPYRQFYNTAEGFKEMVSWIKEQGIVLKRTSFVMEYTGYYSWNIRCFLESRKLKYRMEDPLEVRYRSGIGKDKNDQLDSAKLADYLARYSDTLSPSKLPEESLIRLEALQKERKTYVEMRVSLLNRIQVSRYKEEKKRQLKIVEELTKQIETVEEQMRQIIAENEDLEKNYNLLCSIPGISFVNAIDTIVNTENFTSFGSARQYASYVGVAPHSKTSGKCVKWKPKPSRHCDSLAKADLSQAAKAAVEYDKEMNRFYNRKTKNKKDTDTKRKAMNAVKFKLILRMFAVIRRGTPFERLAT

SEQ ID NO: 338298 - protein, 339 aa, unidentified
MKYSGIDLHSNNSVVTVTDDENRVVAEKRLPNDLARIIAFLLPWREEMAGVVVESTYNWYWLVDGLQEAGFVVKLANTGAIKKYDGLKHSGDEADARHLAHLLRLGILPTGTILPPEHRAVRDLARKRMQLVRSRTSHIIAIENIAARQQGIKISSNQIKKMTADEVNQMLFPSDVALAIKSNLAVVTTLSEQIDLLEKRLQERLGERPEYALLTSVPGIGRILAAIILLETGPIERFHAVGNYASYARCVDSQHTSNGKKKGEGNTKNGNKYLAWAFVEAANFAIRFNAKIKSFYQRKKAKTKGVVAIKAVAHKLCRASYYIMRDRVPFNITKAFGQK

SEQ ID NO: 338299 - protein, 381 aa, unidentified
MKQTLHAKDENTKPTLYLAFELSNQDWKLGFTVGLGQAPRQRKITAGDTSALKQEIVLAKQRFGLPTDAPVVSCYEAGRDGFWLHRFLASEHVTNLVVDSASIEVSRRGKHAKTDRLDVEKLLTMLLRYHGGESRVWSVVQVPSLAAEDQRHLHRQLLALKGGRTRYVNRIKGLLVGQGIHLDVDGDFLTHLSALRLWDGAPLPDGLTARLRREFTGWQFVHQQIVELETERRTAIRESQEPAMTQVRQLLRLKGIGENAAWLFVMEFFAWRDFHNRRELGALAGLTPTPFQSGDEDHEQGISKAGNDLVRAMAIEIAWGWLRHQPESALSQWYQEHFDAGGKRRHKIGIVALARKLLIALWHYLDSGELPEGATLKPTTA

SEQ ID NO: 338300 - protein, 381 aa, unidentified
MRCWELAGAGLGPTLDNMNRIDNTELSSPEETRPEFNLGKEAIKLGIDVHQHFYVVVMQRGGSNPKPAQRFTKEAFLSWVAKLARAHAGPVHAVYEACGFGFGLQRQLSALGIACHVVCPQKLDERNQRVKTDGRDAKALCLKLDRFVEGNRAALALVRVPTEAEEQLRAIHRQREQLVKARKQLEAQGRSLMVNHGIEPVKGWWKRRTFAALCVPEWMKELLSNSQPILLALEEKIRALSVQLERAAIAEQPRGLGKLTSVVIEREIGTWQRFKNRRQVASYTGLCPGEYSSGKTRYQSCVTKHGNPRLRAALVELAWRLVRFQPNYQPVVKWRQILAKGALATGAARKKAIVAVARQLAVDLWRIRTGRLSAKTLGLQN

SEQ ID NO: 338301 - protein, 343 aa, unidentified
MNVSTIGLDIAKSVFQVHGIDAAGEVVIRRCLRRRQLMGFFQKLGPCLVGIEACATAHYWGREIAALGHEVRLMPAHYVKAYVKRGKNDAADAEAICEAVQRPTMRFVSLKSPEQQSVLMLHRTRELLVRQRTMLVNALRAHMAEFGIVTRVGLPQIKELLAVIADKDDHRLPPDARACLESLGRQFLSVHEEICAADRRLHAWHRSDPVSQRLATIPGVGPVTASALAASIADPSVFKSGREMAAWIGLVPRQNSTGGKQRLGKISKQGDQYLRWLLVAGAMTVIRHARRRGTANQPWLDDVMARRPTKVAAVALANKMARMAWALLRHGGAYRQPVITASL

SEQ ID NO: 338302 - protein, 479 aa, unidentified
MSCRRLVGIDLGIASAHTVRVLDETGTTIMKRKAWPTVDSLTAVEIAALTGCPAGTRLEVVVEPTGPAWLPIAVFFANRGHIVHRVSSAKAADLRRFLSRHTKTNGIDADTLARLGLVDPAGLRPLALSDAERAALDRRVRACDRLTRAGAEHKVRIKDLVRQLLPMTPLTGDLGAADLAVLERFADPNTLVKLGVKRLTAVIVKASNNHRGADRAAEWIAAADASIELYAGHPAIAFADLAAEVATEVRLLRAVQAELAGHATERESCYRWVDPAGLARSLPGLADVGGPAVVAAMGDPARFTRGKQFRAFTGLTPKASETGNTDRKGQAMSKAGSSLLRTTMIRAADHARKLDPQLARIYYVQMVERGKDHLGALCVVAANLAERAWTVMNRRMPYVICDTDGRPVTPTQATEIIAEHWTVPADVRARRRSKKMGKAPQQVLTAHVKSDARGADKRGDLPHQPSFPDQAQHVKRRTA

SEQ ID NO: 338303 - protein, 386 aa, unidentified
MPHPNDLSRSLVALDQDSTLIAIIEMSQSSWLVAGIIPGVERHPLKKLDPNENTLLQVLYRWRAEASKTGHAIMRIAVAFEAGRDGFWLARWLRARGIETHVIHPSSVAVSREHRRAKTDRLDTGLLKRVFIGWLRGEPEHCRMAAIPTIEAEDAKRPNRERESLVGERTRIVNRMKSCLARFGIRNFKPTLRNAPERLVTLRTPEGVCLPPNTSAEMRRDMARLSFVMDQIKAIEKARLQRLEQTAEEGPHAMVRLLARVLGVGIETADMLVHEVLSRNLRDRRAVARYAGLTGSPDESGSRRRERGLARTGNARVRRGMIQLAWRFLMFQKNSALAQWYRARTEDARGKRKTMIVALARKLLIALWRLVTTGEVPAGVALRTTP

SEQ ID NO: 338304 - protein, 328 aa, unidentified
MSMQQVPAHRRVVIGVDTHKYVHVAVALDDFGTKLESRSFPADSGGYVQLLDWAAGLGGKLTFAIEGTGSYGAGLTSAVRRRDIGVIEVMRTDRRDRRLRGKSDTLDAENAARAVLAGHASAIPKSADGMVEMIRQVKVAKDVAVKARTSAMISLKQVIVNAPPELREELQPLSKMALVHRCAGLRPGQVTTILASSKYTLRAMARRWQQLNTEIIGHEKLLAELTAQAAPDLSAVFAVGPDTAAEMLIVAGDNPDRIRSEPAFAKLCGVAPIPASSGMTTRHRLNRGGHRQANAALYRVVIVRMQHHEPTQAYVCRRTTSRVGSGTT

SEQ ID NO: 338305 - protein, 368 aa, unidentified
MPPTSFSQSSYRFTHVGMDVHRDSISVGILSPDFDTPEVERISVDDAAVRALLARLGDPARLRACYEAGPTGYGLARLLRSIGVHCDVVAPSLIPRAPGDRVKTDKRDCRRLARLHRMGELSGVRVPTVSEEGVRDLCRARGALVADRRRARQRLTSMLLRHGQVYRAGSLWSHAHRDWLGTRRFADPAVQATFERYLAVCTIRDADVAAIEADLEPWCDTEVVWDTIRRLIAYRGIDRLGALTLAVEVCDWRRFASAHAHMAFCGLVPTETSSGASVRRGGITKTGNVHVRTQLIESAWAYRYPPKLTRAIAARQVDADPDTVARAWQAQLRLTRPFRALARTKPSTVVVAAVARELAGFVWAEMTA

SEQ ID NO: 338306 - protein, 348 aa, unidentified
MEQFVGLDVSQKLTHVCVVDQKGNVVWRGTCPSTPEDIAATVRAKAPHAERIGLETGPLSTWHWHALKAMGLPVICIDARHAKAALSMQINKTDRNDAQGLAQIMRTGWYREVGVKSLDNHKIRAVLGARAQLVGVQTDLKNQIRGLLKVFGTVLQRGHSQSFEQQVVAALQGDDLLDASVRSLLAALRTVSEQVAQLDRLVIKQTKQNAMCRHLMSIPGVGVLTALAFMTAIEDPGRFRNSRSVGAFLGLTPKRHQSGETDWDGRISKCGDALVRAYLYEAANALLTNCRKWSALKVWGMQLAKRRGLCKAKVAVARKLAVIMHQMWTTGEAFRWSSEAAKGKLTAA

SEQ ID NO: 338307 - protein, 345 aa, unidentified
MKITTTGIDLAKALFQVHGVDKHGKVGLRKQLKRKDVLSFFANLEPCLIGMEACGSAHYWARKLSALGHTVRLMAPQFVKPYVKTNKSDRNDAEAICEAVARPNMRFMAVKTAEMQAALALHRARQGFVKARTAQANQIRGLLAEFGIVIAKGIGHIAKRLPEILEDGENALPGMMRELLQRLGANLQDMDKQVRELERQIVLWHRENEASRKLEAIAGIGALGASAMVATLGDAKSFKNARQVPAWLGMVPRHEGTGGNVQLGRISKRGDVYLRTLLIHGARAVITAVERKPDHADEWLKKLLARRTKNVAAVALAAKNARIAWALLAHERSYQHDYVATRKAA

SEQ ID NO: 338308 - protein, 346 aa, unidentified
MEVTYYTGIDVSLRSVSICVVNDKGKVCLEAKVAAEIDAIVDRLRRFSSDVKSVGFEAGTLTQYLTYGLQAAGFEVICLEARQVSVTLAAMRNKTDRNDARGLAQILRTGWYSRVHVKSLHSHQVRALLASRKAILKKCVDLENELRGLLKVFGIRLPSRVGHGSFDAELRDTVSGDEMLACALVPLLDARTVLYKTYLKLDNAVKGLVRVDPICRRLMSIPGVGPVTALTFKAAVDDPSRFKSSRTVAAHFGLTPRRFQSGELDNPGHISRAGDADVRSALYVAAHSLLTRNAQWSTLKAWGVGIAKVRGHRRAVVAVARKLAVILHRMWIDGSEFRWGPAPASA

SEQ ID NO: 338309 - protein, 342 aa, unidentified
MTEYKRIGIDTSKNVFTLHGIDLADRPILRLDLRRRGLLSLFRKLPPTAIVMEACGAAYHWARELSALGHEVRLIPPQYVKPYVKRGKNDRNDAAAICEAGGRPDMRFVPVKSLARQADGMLLKVRQTLIDQRTALCNGLRGHAGEFGVIAARGLNRIGGLLAAIEQETAIPAAAKEMFALLGEEIARLDARVEQLEARLAAAHKANPMSRRLASIPGIGPVIALTLAIEIDPAAFASGRHLAAWAGLTPKQHSTGGKPRLGGISRAGNERLRALLVAGATSVINAATRFGDQRITHWLRALLRRKPRKLAAVALANKMARIAWAIMTRGETYRRPATPAVA

SEQ ID NO: 338310 - protein, 377 aa, unidentified
MSKLRFVGLDVHAETIVVAVAETAGEVRSLGVIPNRLESIRKLVHKLGPVQHLRACYEAGPTGYVLYWQLTQLGVECAVIAPSLVPTKASDRVKTDRRDAEKLARCHRAGELTAVWVPDAAHEALRDLVRAREAAKKDQLRARHRLGKFLLRHGQQRPEGIKVWTKKHREWIKSHVRFEQPALEATLADYLEEVDHVGNRITKLETAIDEAIQQAPPAIRAVVEALQALRGVAQTVAVSIVAEVGSLSRFPSPRALMGYSGLVPSEHSSGNRVQRGGITKTGNGHLRRVIGEAAWAYQHRPNVIGFLAQRQKRLAIGEESKKIAWKAQQRLHKRYKALSARGKNKNQIITAVGRELLGFIWAIGVSVEKQHQVTAAA

SEQ ID NO: 338311 - protein, 317 aa, unidentified
MKRTKHTTSVAGVDVSKRKLDVAVHGQSELTLVANDVVGIDQLIAWLRDRCVGRVGMEATGGYERELRLALERAGFEVVVHQPIEIKLFAKLKRWKAKNDRLDARLIAAATAQVDAVRAAQDPRLVELAERLTAYEQITQQAAQLKNFLEPLRLPDLIRMTKAQIRSLELLKAKLKAGIVARIKAEADLLARFKLILSVPGFGEITAASLVIRMPELGAMERGQAASLAGVAPFDRDSAQFNGARFILGGRRRPRRMLYMAALAAKRHDPGFRTFANRLIARGKKKKIALVAVMRKLIEAANLVLARGQPWVKSVAT

SEQ ID NO: 338312 - protein, 336 aa, unidentified
MKYSGIDLHSNNSVVTVTDEADRVMAEKRLPNDLPTILAFLSPWREELVGIVVESTYNWYWLVDGLQEAGYRVHLAHCAAIKKYEGLKHSGDEADARHLAHLLRLGILPTGTILPREQRALRDLGRKRMQLVRSRTQHILAVENITARERGARISCEQVKRLSIEMIDQMPVPEDVALAVKANVAVIHTLSAQIDLLEKRLKKAVPRTEYDLVTTIPGIGRILATTILLETGPIDRFASPGNFASYARCVDSQHTSNGKKKGEGNTKNGNKYLSWAFVEAAHFAMRYCVEAKRFYERKKSKTNNVVAIKALAHKLARACFHMLKERKPFDVTRCFA

SEQ ID NO: 338313 - protein, 350 aa, unidentified
MLIIGCDYHPGFQQIAFVDTETGELGERRLVHCEEAEQFYGKLRDQSVSVRVGMEASGHARWFERLLRQLEFELWVGDAAEILAKRVRKQKTDRQDAQLLLRLMMEDRFPRIWVADAENRDLRQLLWHRHRLVQMRTRVMNQLHVVALNEGLRRKKALWRPAGRKELESLALAPWASRRRRDLLDLLDQLTPKIQQLTQALQDEVEKRPVTRRLMTHPGVGPLTALAFELVIGTPERFRCGKQIASYVGLVPSERSSGDRRRLGHISKQGNALLRYLLVEAAQVTVRSQAQWRCKFFHLAMRRGRKIAKVAMARKLAVHLYWMWRQGWDYEQCQEFGSHAGKSGHRDGVQ

SEQ ID NO: 338314 - protein, 339 aa, unidentified
MTLYTGFDLHSNNNYLGIIDNDGKRIFKKKLHNQPEQILNTLNPYQHDIAGIVVESTYNWYWLVDLLMENGYKVHLANPSAITPYKGLKHCDDNHDAFWLAEMLRLGILPEGYIYPKEQRPFRDLLRKRGHLVKTRSSLIISLQNIISRNCGHRINVNDVKRLKQDMVHPLLQDNEDIALSGKASKETIDFLTKKIREIESAIEKKAMLTSNYRHLLSMPGVGKILGLTIQLESGPIERFPKAGNYVSYCRKVNSKWTSNGKQKGKGNKKNGNKYLCWAFSEAAELARRYDESARSYFNRKMHRTNRMVAHGALSHKLAKAAYYIMKDGVPFDSAKLFS

SEQ ID NO: 338315 - protein, 404 aa, unidentified
MIFVGIDWAEAHHDVCVLDHEGGVLIKGRVPDGVEGVSRLHAMVSEHAQEPGEVIVGIEIDRGLLVAALVGAGYHVYAVNPFAVSRYRDRHASSRAKSDPGDAKVLADLVRTDRRNHREISADTDLAEAIKILARTHQSLVWSRQRQLNQLRSTLREFYPGALQAFGRDLASPEACTILAIASTPERGRRLTPAQISRSLRVSGRKRRLTQRATEIREALRASQLELPSVLAEAYGEAVRSLVALIDGLRQQIDRLEQELAARFEGHPDAEILRSLPGLGLVLGARVLAEFGDDPTRYADARARRCYAGSAPITRASGMRRVVLARVARNRRLADACYLWAFSALSASPGARAYYDARRARGATHHQALRALANRLVGVLHGCLKNRQLYGEDVAWPTALEAVA

SEQ ID NO: 338316 - protein, 316 aa, unidentified
MATAVWVGIDVNQAQLDMALGAAGELVTVANDQPGIAALLARLGQLAVARVLVEAAGGVETALVAELGAAGLPVVVINPRQVRDFARAVGQLAKTDALDARLLAHFAERVQPPMRPLPTAEERELKARVARRRDLVEMLTAERNRLGRAPKVLHKEIAAHIHWLEGQLKERDRDLDRRLRSTPLWQEKEDLLRGVPGVGPVLCATLLADLPELGQLDRRAIAKLVGVAPLNRDSGTLRGQRTTWGGRAPVRTTLYMATLAAVRCNPALKAFYQRLRRAGKPPKVALTAAMRKLLLMLNAILKHHTPWRPSWPVPVQ

SEQ ID NO: 338317 - protein, 344 aa, unidentified
MKYFAGLDVSLEETAICVVDESSRIVKETRAPSEPQALSDALRKLDLPLERIGLEACSLTAWLHDGLCAEGLPAICIETRQANAAMKTMPNKTDRNDARALAQIMRTGWYRQVHVKSRQCRLWRALLVARRTVLNEMRSIENVVRAILREAGVKLGTPSRTAFADRVRELAGAEAMVMVEPLLSILGSMLKEFARLTKQVLDIVRKEEVCRRLMSAPGVGPITALTFRATIDRPERFGSSRAVGAHLGLTPARYQSGETDIQGKVSRCGDELARTALYEAAHSLLVRSKKWSSLRAWGMNIAKRRGMARARVAVARKLAVILHRMWADATEFRFGKEAAGPASA

SEQ ID NO: 338318 - protein, 317 aa, unidentified
MIEPHTVIGIDVSRDWLDFHSLFDGKRGRFRNTDLGHAQLATLAKGYGATVCFEATGGMEWPLWAHLEAQGVAAFQVPPAQVKWFTKAFGMRAKTDQMDAEMIARFFVFRPTSGRRLPAQKLRDLRALNSKRIQLVDLRRRHLVMMKGQKRQGIDEMFSAQDKDLLALLAAQVRQVEQRISQVIASDQLLARRADLLQSVPGLGDVTTAMLISELPELGEISVEQAAALAGLAPMANESGAFKGKRSIRGGRQTLRHILYQAALVASRFNPRMKLVAQKMKAAGKPHKVVIIAVARKLLGIVASMCKYDRKWDFQPA

SEQ ID NO: 338319 - protein, 370 aa, unidentified
MKKRITFVGLDTHKNSIEVALADDGRKSEVRLYGSIGGDLGSLDQMIRKLQKRGSELRFVYEAGPCGYEIYRHLRAQGFHCDVVAPSMVPRRSGDRIKTDRRDACNLARLYRAGELTPVYVPQEGDEAMRDLVRGRQDAINAQRKARQQLGGFLLRHGVRYPGKCLWSLAHGRWLAGIKMPHPAQQIMMQEYIHTVEECTQRVIRLTEQIQQLLPDWRMHPLVAALQALRGVAPVVAATSVAEIGPMGRFAKPRQLMAYLGLVPSERSSGGSVRRGAITKTGNGHARRALIEAAQAYSHPARISRVILKRQHGLPESVRQIAWKAQLRLCARFRQLTARGKSRNRVVVAIARELSGFMWAIAKQVPVPQS

SEQ ID NO: 338320 - protein, 340 aa, unidentified
MGDIITIGLDLAKNVFQVHAVDEMGSVVMRNRLRRSQVLAFFAEIPPCLIGLEACATAHYWARELIALGHEARLMPPNYVKAYVKRNKHDVADAEAICEAVRRPSMRFVPIKTAEQQSALMMHRARDLLVRQRTMLVNALRGHLAEFGLIEAQGLHKVAKLIAIVTDENDGRVPYIARQVLQVMINHIEDIQVRIVGLEKQVLAWHKSNPVSQRLATIPGIGPIIATAIAATVADPNTFRSGREFAAWLGLVPRQNSTGGKARLGGISKRGDSYLRRLLVNSAHTVLLCSKQAKTDPWLTSLLSRKPRLVAAVALANKTARVAWALMSRQDTYRHAAATA

SEQ ID NO: 338321 - protein, 364 aa, unidentified
MAKSSVSTLRQFVSGFESQSFWLGIDVHKQSYSFALRRADQRCFTWKGPVDPKAVVAQIARLGITVAAVAYESGPTGFGLARTIEEANIPVIVAAPSRIPRSVTAGAKCDRLDCIRLADYAARGMLRPIAIPTPEEESRRSLLRRRHNLVDAIRRVKQRIKSQLLFLGLPEPDAVKHWSNEAAATLLRLPLDQAARLTMESLLRELTFQQTELRTVEGQLQKLLLETEEERRRVVNLRTVPGVGPTVATTFALELYRPHRFQRAEEVASYLGLAPMVRHSGGKTPAGRLMPVGQKRLRSLLIEAAWMWKAKDASAANLYNRLLGRTGLAQKAIAALARRLAVILWRIAVEQRPYRVAVATLQPV

SEQ ID NO: 338322 - protein, 356 aa, unidentified
MHHVSLTPPYHLFVGVDIAAATAAVAWQAPQQKPSKPITIEQTPEGFSLLHQRLTKTGILPTETLIGMEATGIYWLALATFLTRYGYAVSVVNPAQAHHFAKALLKRAKTDEIDAQTLTQLAACLEPNLWTPPPAIYEELEQRLTQRDSLLVMRGQLRNQLHALQHNPVVVASVRQRMKGWEQTITAQIGEIEAELAILLSSGEEVASLGNQITPERAWAENITRLQTLPGIGLITSCWIVVATMNFTLCATASQAAAYAGLAPMPRESGTSVHQRPCIGHSGNGRLRTALYLATLSAARFNPSIKPFYERLRATGKPTKVVRCAAARKLLHLAFAVVKHKEDFDPLHMHKHLQPA

SEQ ID NO: 338323 - protein, 339 aa, unidentified
MKHTTVGVDIAKNVMQLHYIDAETGEIVNKPVKRAAFLEHFANLTPRLIGMEACGGSQHWARKLIAMGHQVKLTPGKFVKAFAMGNKNDATDARAIWLAVQHAGKAVAVKTETQQAVLGLHRMREQLVKFRTMQVNSLRGLLTEYGEVMAKGRAALDKAIPSVLERLVDRLPSILIDTLREQWSGLSELDRQIAEIERRLQAWQREDKACKAIVAIPGVGLLTATAAVATMGDAKTFRSGREFAAWIGLVPRQTGTGGKVQLLGISKRGDTYLRKLLIHGARSVLCLAKEPGLWAEGIKKRRPLNVAVVAQANRMARTIWAILAHDRQYDKDYVSVKPV

SEQ ID NO: 338324 - protein, 416 aa, unidentified
MKQTQNTRGYERYFAIDTHREYHLVGGQNEDQKWVVNPRRVSIEKFAEWAQKNIRAGDIVVLETTTNVWDTYDIVSPLAGRVLVANAAAVGEIAVARVKTDTKDIERLLKLLFGGIVPEVWVPPMHVRELRAFISYRNRLVKMATMIRNRLNSLLHKHSLMLPEEGILNQAWWDAQASISALEKMQIRQELGLLDEIKKLQAAVNEELEKQSTCELWGKQALQLMQLPGVGVIVAMTVLSAIGDISRFEDAKHLVGYAGIGAGVHDSGKTHKEKHITKKGRKELRWIMVEAAWRAVRMSPYWKEQYEKHLRRMRKPTQAIVAIARKLLVAIWHVLTKEETDIHASEDDLAYKMLLLSWSLNDHVRKGLTYKQFAKYALMKLGIENDITRFVRREVPRRLAPREEVLTRMAELGIAQ

SEQ ID NO: 338325 - protein, 388 aa, unidentified
MEPVLDSCAGMDVHEKKVDVCIAHGPLEKSPKFEIRTFSTMTSDLEDLKSWLKKYKVTTIGMESTGVYWKPIFNIMEGEFTIVLANAQRLKAIPRKKTDIMDCKRIAKLLRYGLLPNSFIPPREIRELRDLNRTRRKQVGMMTSEKNRLTKVLESSNIKLSSVVSKISGVSSMAMIRSLLEKDKLSKEEISQLAKGSLKKKVDLLEKALDGKITDHHRFLLKMHMENLDHLARQIEKIDEQIERKMIPFQKETNLIQSIPGISKVSASAILAEIGTDMSQFPDEAHLSSWAGVCPGNNESAGKKKSGKTQKGNSFLKGTLAEAAWAASKVKRSNYSAFYHNIVRRRGKKRGLVALAHRMLMDIYYVLKTGMPYICHRLRFGLYSLHVF

SEQ ID NO: 338326 - protein, 481 aa, unidentified
MVIRKKEQNNNSSSPSKNITIAQAVDLAIQKGVNQSILESINLNAAGIDIGSRSHFVAVPSDCDAHPVQEFLSFTPDLERLADWLKQCGITTVAMESTGVYWIPLFELLESRGFDVILVNAHHIKNVPGRKTDVVDCQWIQQLHTFGLLSGSFRPDDTICVLRAFMRQRANLVRYCGSHIQHMQKALNQMNIQLHNVISDLTGVTGMTIVRAILAGERNPQVLAEHRDRRCKESIETIIKSLQGNWRQEHLFSLRQAVELFDIYQQKIDDCDQEIAKVLDSLDSHTDQQTPQPMRKSPIARNTPDINLHERLFHIVGVDLTRIDGLNPHTILKIFSETGCDMGRWPSAKHFASWLGLSPGNRVSGGKRIGKSNTTPSANRAATAFRIAARSLNRSQSALGGFYRRQKSRLGAPKAITAAAHKLAVIFYTMLKNKSAYDPPEANYYEEQYRKRVMANLRKRAGSMGFDLVECSTENLEIIAV

SEQ ID NO: 338327 - protein, 312 aa, unidentified
MNKVICGVDVSKDWLDAFIRPSGVFERFSNDAAGIGALAALCREHGVELVVMEASGGYERSAFLLLWELGIACALANPRHVRRFAEAMGFLEKTDRIDAAMIAHYAEAKRLSALPPPKAAQLRLSALMTRLSQVTRDLIVQKQRRSAARDGSIVASLNEVIALLVRQSRTLEGEIASMIDDDPLWASLNRAFRSIKGVADRTVARLMAELPEIGRISNKAIAKLAGLAPIANDSGKRSGPRPVRGGRSGPRGILFLVATIAARHDPHMAAFQQRLQSAGKPKMVIRIALARKLLVILNAKARDARREFEYAT

SEQ ID NO: 338328 - protein, 414 aa, unidentified
MIIAEEPTGARVCAGVDWAKDDHAVCIVGAEGEALQRFMVTHDRAGLTNMVHRLLRAGVDEVGIERPDGPIVDALLAAGLTVLVIPPAQVKNLRSRYGSAGNKDDRFDAYVLADVVRTDRRRLRPFERDTVATSALRTTVRARRDLVIHRVAAANQLRAHLQIVFPAAAGLFDSIDSEVSLQFLERFTTQGQADWLSVKRLSSWLASIGYSGGTDPGVIYARITAAPRGTIGVEAATHAVMTHAYIAVLRTLNTQIRTLAVNIGAQLDVHPDAKIFTSLPRSGCVRAARLLAEIGDARGRFPTASSLACLAGVAPSTRQSGKVKAVTFRWGADKELRDALCDFAGDSRHSNPWAADLYAKARARKCDHPHAVRILARAWATIIWRCWQDHTAYNPAEHGGLQRILTQDQQTVAA

SEQ ID NO: 338329 - protein, 367 aa, unidentified
MNSKIGVIDRQSLGTIDPACEHGSSHRSLNSPNSCMGYKARISQGRDLESQYKEVRMSFVGIDVSKLQLDLAVRPVNKRWSVANTEGDITKVIETLNELSPQVIVVEATGGMEMPLVAALSQASLPVVVVNPRQVRDFAKAVGRIAKTDRIDAEILAHFGEAVKPDVRLLKDEDTQMLTALVTRRRQVIDMLTAEKNRLGISPNVIHKDIQKHIEWLQRRLEDIDRHLDSAIRKSPVWREKDDLLRSVPGVGQVLSASLITGLPELGTLSRRKIAALVGVAPLNCDSGLSRGKRTVWGGRSYIRAVLYMATLSATRANPTISLFYRRLIEAGKKPKVALTACMRKLLSILNAIVKNRSPWQAAYCKT

SEQ ID NO: 338330 - protein, 387 aa, unidentified
MYFIGIDISKFKHDCAIIDEAGDTVTASWSFANNCEGFSLLKQLLDALDGQKKIGFESTGHYGHNLKLFLEANNFSFMEFNPLLVSKFVRSKSLRNTKTDSLDAVSIAQYLMTVEYKPYPPSFYHMDQLKSLTRFRDSLVRQHSRQLVELTNILDKVFPEFKPFFDGRFSATALYILTHYQSPEKIANMNAKSYEALRKKSRGKFSMVKFAQLKTLAKNTVGRSDAFLLKQMEITIDIENQLDAKIDEIESQILECIRALNPPILTIPGIGELTAAIILSEYGNINKFENTAQLLSFAGLEPGYYQSGLAEHQGHMVKHGSSHLRYALMNACLPLITYEPVFAEYYAKKRAEGKPHRVALTHVAKKLLRVIFTLQTKNISYDPTLIR

SEQ ID NO: 338331 - protein, 302 aa, unidentified
MEHTTIAVDLAKSVFQVAVSHQPGRVDEERRLSRDRFLEFFAQRPPATILLEACGSAHYWARQLQPFGHAVRLLAPHDVRPYVRRNKTDRTDAKGLLEANRNEEIHPVPVKSIAHQAIASLHCLRSTWLATRTARLNTIRGLLREFGLFIPVGAHHVVPAVRTLIAESTTVPMLLHTTLAAACDEIDVLEANMRAVERQLAALAADIPEVMRVQTVPGVGLITATALVALVTDIRRFPSGRHFASFLGLTPKEDSTSPRRRLGAISKQRNVYLRMLMTTAPDPSYGTRRLRSRRRRCSGGRC

SEQ ID NO: 338332 - protein, 340 aa, unidentified
MPLYGGIDLHANNSVVVLLNEQDQVVYQKRLPNDLPTILEVLAPHHAEIKGLVVESTYNWYWLVDGLMEAGYRVHLANPAAMQQYSGLKYSDDHSDARWLAHMLRLGVLPEGYIYPKAARAVRDLLRKRAHWVRQHTANVLSVQTIMVRNTGARLSVKRIRELPKQELKRLLPEADQVLAITSSLAILDCLSQQIKALEKIVDQRLHHTPSYEQLLTVKGIGTILAQTIALETGDINRFPTVGNYASYCRCVDSTKISNGKRKGQGNVKNGNPYLGWAYMEAAQYAIRFNPSAQRFYQRKLAKSNNNTTLARKAVAHKLSRACYYVMRDRVPFETTKAFG

SEQ ID NO: 338333 - protein, 414 aa, unidentified
MEPNTIEFEQLIEKGCGIDVHKETAVATVQGKGIKTETRTFSTFTSSLKDMKEWLISIGITHIAMESTGVYWKPIFNILEDAFEILLVNARHLKNVPGRKTDKADSRWICKLLISGLLKGSFVPPENIRELRDLSRYRSKLTGQIASEKNRIQRILEDANIKLSSVVTDTSGVVATKLIEGLIAGRKDLDVLINECYHGKLSASKEELKEALTGRLTAHHAFMLKQMKAHIIYLESQIALIDEEMDNKLAEYNNQLALLQTIPGVGRDGARGILSEIGANMEVFPNEQHLSSWAGICPGNNESAGKKKSSRTRHGNKYLKALLVELACGATRTKGTYFRAKYESMVGRRGKKKALLAIGHKILCASYYIIKDKVPYQELGANYLLERKKKNKIDYLKRQLKELGYNVEKIEKAA

SEQ ID NO: 338334 - protein, 390 aa, unidentified
MYLIGIDISKFKHDCFIATETGQVVKSSFSFDNNQEGFNQLLTVLLSLDHSQQIRIGLEATGHYGTNLKLFLHEHNFSFMEFNPILSDRFRQVSSLRKTKNDKIDAKLISQMLLSFDYKPNSLLSYHISKLKSLTRFRKKLVKDCTIYKERLINILDLVFPEYSNYFTQVWGKVSLYILKNYPTIQDIANINVESVLPIIKVLSRGHYSMPKLIKLIEAAKVSIGCKNDSHTLELKLTINLIEQMNYAIENVENEITIIMNKYNFKTATIPGIGIISAASIVSEFNDFSNFNSSNQLLSFAGLEPSIYESGTQTTYGHLVKRGSSYLRETLMNVAPFVMNYNNVFYQYYLKKRNEGKHHRVALTHLVKKLLRVIYYLETNAVPFDSSKLK

SEQ ID NO: 338335 - protein, 388 aa, unidentified
MSKPFDLSKSLAALDQDSTLIVVIEMSQSSWLVAARAPGLARDPLKKLPPDPEQLFKLIDRWREESRRAGRVVRRVCVAFEAGRDGFWLARLLRQHDIEAYVIHPTSIPVKRDHRRAKTDRLDTELLMRAFLGWLRGEADHCSMAAIQTLAEEDAKRPTRERESRVNARSRLVNRMKGALARLGIRGFNPKLRKAAEKLEELRTGAGEPLPPNTLAELRRDMAQLRFVADQIKQIEKAREARLEKAPREGAHPMVLMLASIKGVGLETAEMLVAEVLSRKLRDRRAVARYGGLTGSPDESGSRSREKGLARSGNARVRRGMIQLAWRFLMFQKESALAKWFEARTANGPRGVRKTMIVALARKLLIDLWRFVEDGTVLVGVELFDSRA

SEQ ID NO: 338336 - protein, 412 aa, unidentified
METIVERPAALDVHKAQVTACVRVPNQSGEREERIAEFSTTVRGLLALRDWLSTHRAGQVVMEATGVYWKAPWAILEDEFECLLVNARHVKQVPGRKTDVSDAAWLCRLAEAGLLKASFVPPKPIRQLRNLTRYRKTQIQERSREVNRLHKALEDAGIKLDCVAADVMGKSGRDMLDALVAGESDPGVLAELARRQMRKKIPALREALAGHFDEHHRLWIGAILAHIDFLDAQIAQLTEAIEEQLRPFAPAVELLCTVVGIQRRGAQTILAEIGADMTRFASARHLASWAGQCPGNDQSAGKRRSGRTRDGSKWLDFALEEAAMAAIRVKANYPAAQYHRLKPRRGHKRALGAVKHSLLGAIWHMLATGETYRDLGADYFTQRDPERQTKRLVKQLERLGHTVTLAEGAAAP

SEQ ID NO: 338337 - protein, 310 aa, unidentified
MGQTFIGIDVAKDRLDVHVRPSDEAFTVTRDSEGLAKLVERLRPLDAYLVVMEATGGFEQTLAAALVSEAIPLAVVNPRQIRDFARATGQLAKTDALDAKAIARFAEAIKPEPRPVPDDQARGLGELVARRRQIIEMMTAERNRRRQLSSRRLIKSVDRLLAVLQKELSELEGDIGESIRGTPAWRERDELLRSVPGIGDVVARTLIADLPELGRLDRKQIAALVGIAPLNRDSGRMRGRRTSWGGRAKVRSVLYMAALVGSRRNPVLKAFYQRLVFFGKPKKLALTAVMRKLLTILNAMVRDNKRWQNA

SEQ ID NO: 338338 - protein, 465 aa, unidentified
MGEYSQAFVAFDVAKKKHAVAIAEGGRTGEVRFVGEVENSPAAIERTIKKLGKKYDRLHVCFEAGPTGYGLCRQVRDLGHDCMVVAPALIPKRPGERVKTNRRDAVTLARLHRAGELIGVWVPDVVHEAVRDLVRAREAAADDLRRKRQQLLSFLLRHGRIYEGGGHWTLAHRRWLARQSFERTAQQIVFQEKIDAIEDAAQRLHRLDEQLRAVVPTWSMARVVEAYQAMRGASFLVAVISAAEIGDVRRFDTLPQLMAFLGLVPGERSTGDRVRRSSLTLAGNRRARHALVEAAWTYSYPARVSETPRVRLEGLPKAVRDLAWKGAAPALRPLSSPQRRRQEAAGGRGCDRTRDGRLLVGHRPGVAPRQGTQLRCRRRGLRRGHRQITRRSHDQSPRDDGRSAPQPHWTGWTAARRQAYDTNRLRTFLAERGIEAVIPSIVGRSSAASPPATTSSQATSLPQIK

SEQ ID NO: 338339 - protein, 347 aa, unidentified
MKFYTTFHKYYCGIDLHARILYVCILDERGNKLVHQKIKADRHELFKLISPYLEDIVVGVECMHCWYWVSDLCAEHDIDFVLGHALYMKAIHGGKAKNDKIDSYKIASLLRGGNFPLAYNYPAQMRSTRDLLRRRTRLVQHGAQLKAHIVNTNSQYNYPPLELHMKNKCVRQEFQTRFDDQAVQRNVNFDIAILDAYSEELKKLEYYLESNAKKHQPNYYAQLRTIPGVGLILAMTILYEIGDINRFESVQTFASYCRLVKCKAESAGKTYGTSGNKIGNGHLKWAFSEAAVLYLRGNDKARNYLNKLQKRMSKAKALSVLAHKLGRCVYFMLKNKTVFDDERFLKS

SEQ ID NO: 338340 - protein, 309 aa, unidentified
MTANQKFSRFIGIDVSKAKLDIYDDATGEFLTVENTAKAIEKYVSALSPNPELLIVVDLTGGYEALCVNTFYNRGFTVHRAEGRRVKAFMRSYGEHAKTDRIDAYALALFGRKLHETLRMYTPLPLNLKPVTERISDLKTMLLQEKNRSTAPSLPPDMKKEIVRHIAYLEKEIERLYQKCLDIIKNDPPLAEAFYKIIAIKGIAEKSAVLLLTTLPELGCANRRQIAAIAGVAPYAKDSGTLSGYRRIRHGRTTAKSALFIVTLVAIRHNAQIKEFYERLLKKGKSKMTAIIACARKLLIIVNATLKTC

SEQ ID NO: 338341 - protein, 348 aa, unidentified
MSVTMIGLDTAKSVFQVHGVDETGKTVLKRKLRRSELIPFFEKLEPCTVVTEACGAGHHWARVLTGFGHEVKLIAPEAVRPFVKKGKKNDPADAAALCTVGARPDTKFVPIKTLEQQGILALHSARSLLVKHKTATANAMRGTATEFGLTVPKGIEKLDELIELVDADQSIPEKARQGIEELRSHWVAIARRIENLDQQIVEHARKDETARRLATVPGIGPITASLIAATIGDNIGVFKSARQFAAWLGLVPRQFSIGGKTKLGCITKAGDKDIRRSLVMGATSMAWRAPQWNSAAGVWTKGLLERRPFRLVTVALANKMARIAWALMTRKEVYHAKGRVTAAAEAVA

SEQ ID NO: 338342 - protein, 368 aa, unidentified
MPRIAEQVLPVTGGVDTHAGVHVAAAVDQVGRVLGTQAFPATAAGYRAALAWMRAHGELAKVGVEGTGSYGAGLARYLAACGVEVAEVMRPNRQARRRRGKSDAADAVAAALAALSGEASGVPKSRDGTVESIRALRVARAGAVKARTQAGNQLRDLILTAPEQVRRQLAGLPSGRQVDVAARFRPGDPACPAEGAKAAMASVARRHQELAAEIARLDAALEELLTRAAPAGFLAKQGVATVVAATLLATTGDNPGRVRKEASFAALCGASPVDASSGKQLRHRPNRGGDRQANSALWTIAMTRLAHDPRTKAYAARRTTEGKTKKEIIRCLKRYIAREIYKTLCRPRQPATASAPQVKQDLPAPVST

SEQ ID NO: 338343 - protein, 400 aa, unidentified
MLSIGIDVSKGKSTVCGMKPGGEIVYTPFEVQHTREGMSELVSLLRGSGEEVRAVLESTGSYHCPVVAALLENGIFVSVVNSLRMKRFCSQSIRKVKTDRIDAMQIALYGLAYWQELQPTRPPEDTYRELQLLARQYYQMTSLLIKAKVDFNALCDQVLPGMQELMSDHAGRHKLSDFVLRYCHTTHILEMGETRFRKDYCKWAEKKGYRNCERMAALIFATAQNGIPVLPNAPSTQIVITEAIRVLHTVEASRDAILTQMQALAKTLPEYSLVREMPCIGDTLAPRLIAEIGDVRRFHSKRALIAYAGIDAPPYQSGKFCANNRHISKRGNRYLRKTGYEVMQSYVMHKPANDPIFTFIEKKRGEGKSGKLAMVAGLNKFLRVYYGKVTELYRSLPAIE

SEQ ID NO: 338344 - protein, 338 aa, unidentified
MDKHFIEVKNKMKKLYGGLDIHKEKNVGCILNESGDVIREQCFPVSKKAVEKFVDGISNAEISFAIEACGMWRSAYHMLTDLGFTVKLANPKKTHDIACSKKTDKVDAHILADLLRTNYLPEVWIPDEQTLKFRDITRHKTTLTRLRVQIQAKIKSTLLRNGIPYKKNMWNENTLSKFAEIDPNLKGLVTIYWSLKAEEKDAKKRIENIARVKKETTLLMSIHGVGALSALIIFAEIGDIYRFKSPKSLVSYAGLCPGVYQSGGTERTVKNNAVDKWLKWIIYECSGRATMLDPKFQKYFYKINQRKGFKIARRACARKMLTIIWYMLTNEEPYKQAS

SEQ ID NO: 338345 - protein, 476 aa, unidentified
MGKGSGMTRGDRRRNARRERLRAMLPRDGAVIGIDLGDEKQAIAVVDHDVRVLARKTVRVKAFRLGEALEWAVAQARGKGFTAVAVACEPTGARWLQVQRLCAERGLPLVCIQPLVSHIAREQQDYTTHKSDESDCVMIARLATELHCYIPEELDEAWAQLRHLGRRRAQLITSATASVQRVRDFLSVAWPVAPEACKHPFESVTWLAAMQVVTSRCGGQPGKLAATGLAEFTALVRQAVAGWGGQRPAGPVCRAVFAALASTEGVVVSHRRGLLRRCADELGDLRRIRAQLRAVEAGMVAVLGELGLSRLADIPGLTAADAAAILAETGDPCRYDSSSSLARHAGLSPSGNASGAFEGQAHISRRGRPGLRLTVWRAIWPLLSCNSVMAAKYAAMIAAADAAAAQAAQAQSGTGSRQGSAAAAARARRAKARVACAAALLRWIYSIAGCDTGWDPDVASGAASRPHAPRCQPEAA

SEQ ID NO: 338346 - protein, 339 aa, unidentified
MALYTGFDLHSTNSYVGIIDEDGGRVWKKKLSNDPNLISAILKPFKKDIEGIVVESTYNWYWLVDLLMEEGYRVHLANPSKIQQYSGLKHGDDEYDSFWLAEMLRLKILPEGFIYPREQRPLRDVLRKRGHLVRLRTSLIVSLQNILARNTGTKMKTNHIKVLKEDRVTPLLASDDDLSLAGSVSKDAIDSLTKQIKAIEVALEKKINLQRPYDLLLSLPGVGRVLGLTIMLETGPINRFADVGNYVSYCRKVPAGRFSNDKKKGTNNRKNGNKYLSWAFAEAGELARRFDPEARAYYDRKRKKTNAPIAHSALSNKLARAAYYVMRDGVPFMPEKAFG

SEQ ID NO: 338347 - protein, 350 aa, unidentified
MKKVSKTQRQMDVETIGIDLGDKISHYAVVDRDGEVVEEGSFRNQAGSIEKHFSGERRRIALETGAQSAWIARELEKLGHEVIVANARQVKWITSSDQKNDRIDAKKLALLARADVRLLSPVEHRSAEQQAELCVIRARDALVRARTLLVNAARGIAKGFGQRLPATVTATFGKRAVAVVPQMLSAALEGVLAQIDELGRQIQEYEKRIAEVGALHPELERLVSVPGVGTLTALTFVLTLGRAERFAHSRDVAAYLGLRPKQRQSGGQDPQLGISKSGDKYLRKLLVQCAHHTLGHWGLDSALRQWGLSKSGGAKGATKRAIVAVARKLAVLLHRLWVTGEVYKPFPKMA

SEQ ID NO: 338348 - protein, 343 aa, unidentified
MGEVSTIGLDIAKSVFQMHGVDSAGAVVIRKRISRAKVLEFFATLPPCLVGIEACPSAHHWGRELQALGHTVRLMPPSYVKAYLKRSKNDANDAAAICEAVTRPSMRFVPIKTKEQQTGLMLHRTRQLLVRQRTMLSNAIRGHMAELGIISAKGRNGTAELLKVIANAADDRIPPAARFCLEVLARQYLTVTAEVAAIDKRIHAWHRSCKESRRLEEIPGIGPIVATALVAEIGDWKQFRSGRNLAAWIGLVPKQHSTGGKERLGSITKQGNRYLRWLLVAGAMAVIRYARQYGTTRPWLTRVMARRPAKVAAVALANRIARMAWAIMVRSERYKEPKLLLAA

SEQ ID NO: 338349 - protein, 410 aa, unidentified
MLFIGNDWAEAHHDIELVDEDGQRLARRRLSEGVEGLAALHALIADHLAEDDEADQVVVGIETDRGPWVQALIAAGYTVYAVNPLQVARYRERHGTSGAKSDPGDAHVLAELVRLDRAHHRPVAGDSALAEHLKVLTRTHQSMIWSRQRQTNALRSMLREFYPGALVAFGDELAGRDALAILAIASSPETGRRLSLSKIAAALRRAGRQRNLESTAERISAALRAPQLEARPGVVGAYTAAVRSLVTVITALVTQTEVLQSEVEAGFGRHPDAEIYLSQPGLGPILGARVLAEFGDDPHRYADPKARKNYSGMAPITRASGTRRIVLARYARNRRLADALYHQAFTALGVSPGARDYYDRQRTRGATHHQALRALANRLVGILHGCLRHHSTYEESTAWPPADTARDAAA

SEQ ID NO: 338350 - protein, 339 aa, unidentified
MVKIPVCVGLDYHKDAIQVCALNDRGVVLFNESIPNSVEGLIQLASKRGWLVQRIGIEACSGSADFSDELVLSTGWSLNLAHAGYVRRMKQNPDKTDFSDARLLADLTRVGYLPKVWLAPQEIRDLRRVVRFRQDLVRRRTATKLKIMALLREHRVVIAGTRWTQKWLQTLKALSGLPTGTRFVLTSHRKELTHVIDQITKVEARLGKMTAGDELVARLMKQRGVGAVTAWTMRAEIGRFDRFNTGKQLARFCGLSPRNASSGNRQADAGMIKAGNPGLRTTLIEVAHRLTRYDVRWAAFKAKQRQAGKPGSVIAAAVANRWVRWLFHQMQPAVWEGAA

SEQ ID NO: 338351 - protein, 402 aa, unidentified
MTIFAGIDVSKFKHTCCIIDENGEVIRKSFDFRNSKEGFDALIETFKLIDQPESIQIVMEATGHYHECLFRYLVANNYQVQIKNPVVIARFKQSEYLDKAKTDNLDALLIAQYASKHPFSPSMLKSYNIERIRRIARAKYFLYQDKERTINHLHRYLDESFPELIPFLRKSRDIKRYQGRSFFDSKTTLWFLENFPSAKKFSLARSETAEKLRRMSKGAFSLVKFNELRNIAKNSIGVSYTETETIIIQLVKELRIIQARNEELDQQLEPLIDETAPNLLTIPGIGYRLAGLLVGEIGDASQFPTADKIVKFSGLEVRIYQSGTIEKHGAIRKRGSPLLRYALFQAAEKARIHCSEIAEFYSKKKDEGKHPICALTHTARKILRIAWALLKTGQNYNQLVSD

SEQ ID NO: 338352 - protein, 361 aa, unidentified
MRQFIGCDQHKHYSVFVAMNETGEVGEAVRVVHDRATMREFLRRLPEKMEIAVESSGHYYWLVDEIEAAGHRARLAHALEVKKRTGRKGKKTDAEDARGLAMLLRNGTLPEVWIPPAKLRDQREMLRLRMFLSRQRTRVKNRMHGALARYQVQLDGDPYSSRWRQQLTARAAELPEHTCQSVQWQLHMLDFVETQIQQTEDRLLAVGSAMPEVDLLKTLPMVGKILSMVLALEIGTVERFPSPAHLASYSGLVPRVHSSGDHTRMGQVCGDVNRYLKWAFVEAANLIVAQPQKWRGSHVLRLYQRVRRKKNHQKAVVAAARHLAEAAYWILKKGEVYRPPQPRKQAAQRSFVDARVRAERS

SEQ ID NO: 338353 - protein, 295 aa, unidentified
MVNDATGWDALIAKFKETNVDLVVIEASGGYERGLVSALQSADITVARVNPRQARDFAKSMGVLAKTDRVDARILRDFGDVLAHHKDRAKYITPMLDEQRQELAALMTRRRQLVDMRVAESNHLEQAGKRAVRSIKSVLRTLDKQLAAIDQDVDDHLDRHFKEQRTLLDSVKGVGPVTILTLTAALPELGRLGRRQIAKLVGVAPLADDSGPRKGKRRIWGGRSDVRTVVYMATMAAIKHNPVINVFHSRLIAAGKPKKVAIVACMRKLLTILNAMLRDQSMWDVARHLQTTKTA

SEQ ID NO: 338354 - protein, 382 aa, unidentified
MQASTVGTPTAGHSGTIFVAIELSQKSWLVTLHSPDRDRISRHKLEGGDHVELLALIEKVRARSAEKLGSAPRVVSCYEAGYDGFWLHRLLQAAGISNFVFDAASIAVEQRSRRAKTDRIDGELMLRTLMAYLRGEPRVVRIVRVPSVEAEDARRASRERDRLIKEQTAHTNRIKALLRLLGVAVGNLRRRNWLTFLEQQRDWQGLPLPPHLLAEVKREHARLTMVREQIAALEQAQVAQVCPIPAPMVERRSSLQRLKALGPAFSATLVDELFYKDFHNRREVASYCGLTPSPWKSGGIDREQGISKAGNRRARNKAIELAWLWLRHQPDSALSRWFRTRTANAGKRAKRIAIVALARKLIVALWRYLTTGLIPEQATMKA

SEQ ID NO: 338355 - protein, 332 aa, unidentified
MYYIGIDLHKQDLVMAVEDERGPVGRARRLACRDTEAIRAAVQRWRPFRAVVEASASYRWLWELLVPMGEVVLAHPLRLRAITAARAKTDNLDAALLARLLRANLIPAAYVPPARYQQLRDLTRGRARLSYGATLAKNQVHALLARANVHPPLKTLFGKRGRKWLAGLDLGLSGNLARDELVRRLEHYGREIATLDAYLEGVAAEFPEAEALEVLHGIGRYSALLVVAEIGEPERFRNGRQVGAYAGLTARVHQSGGHEHRGRISKQGSRWLRWILVQAAMKVVRRDQRLANFYQRIRKRAGRNVARVAVARKLAGICWVRLRRWQREQAAA

SEQ ID NO: 338356 - protein, 525 aa, unidentified
MIATTRRRSAASSPAFDHLGKPHGILSPRVRAVGPEHFGIVAVDCAKASSKWMLVDFYGKVLIAPTVLDHRRDAFDHAIAQIRQAMASHQLKDLVVVVERTGRYHQPVQRAFTAAGLDVRVIHPMISRHFRHAAHPDEKTDDTDLEGIVQATCNGYGLVDPPWEPIYCQIQLWARYRRDLVQKSTQLCCQILEHLESCLPGYARCFDDVFKSGIALVIPGAYGTPQAILEAGFPGLVELAGRQGVRVQKSTLIRILAWAQDAPSPDREAILHQRLLGDLNRDRITKEEYIQASERELVALLAQTPYVRLLALPGINVVLASELAGELGPIVHYATARVITGRAGLFPRRHQSGPVDYRRGLVCQGNRRLRQVLLLAAETLCRCNNHFQVLSQRWFSHGKDPRDVYVRVAGRLSRITFQMVAGSAAFRHPACQGPPAVLEKLMEFHNEHEINLTTTRTNLQHAAAQLPGAEQARERGVWKAKQAEIRGKRGRGPKRLAAILPAVLKQLVGGELAGLIESKASGETP

SEQ ID NO: 338357 - protein, 343 aa, unidentified
MKLIRGGVDLAKNVFQVHGVDWNEKAVWRRRLSRENWFKVLLETVEPGCEIGMESCGGAHYWARKLQAHGFRVRLIAPQFVKPYVKSNKNDANDAEAICEAMSRPHMRFVSVKTVEQQDIQAVHRVRAELTKQRTAKANQIRGLVAEYGLVAPKELVHLRRALPCWLEDAENGLSGRFRRLLNGLWGDLRALDARTAELDREITAIAQNDPLAKRLQQLRGVGPITATALVAAVGNADQFANGRQMSAAFGLTPRQHSSGGKERLLGISKRGDTYLRVLLIHGARSVLRNSKDKDDRLSQWVTRLAARSHPNVAVVAMANKTTRMAWAMLKKGADYQPAMSAS

SEQ ID NO: 338358 - protein, 410 aa, unidentified
MVYVGIDWADDHHDVHITNDTTKLLAKFQISHDCDGFADLHNKIKSLAKDPVSVSIAIETNKGLLVNDLLTAGYTVYAINPKTVNRYKDRHVLSKAKSDSIDAEALANILRTDSHRFRPLKPMPEDYCLLDRLCIDLRKIVDEKSKVLNQITSCLKEFYPKALDIFSLDTNISIAFLKKYPDPQSLSRCKKKSFSAFLKKQKYSHPKKESELWRKIKTPALESDIITTKAGHLRLLALLDQLIPLREHLTCYEKEVRSILNNLPTAEPISTLPGVGERLAPELIAALGPNNDIKHLRFQSPDEIMKLSGCVPITRQSGKWKKVSVRYACVKTLRRTFYDWAFASLKHSDWARAYYDYHKNNNQRHSTILRNLGKKWSKILFAVWSKKLTYNEELHITKLKGHKVPWAIAL

SEQ ID NO: 338359 - protein, 369 aa, unidentified
MTMGEHVVCGVDAHEKWLDCRIGVDREAPGRRRYENNREGRGEMFEQLELLAEEHGGAKVMVGYEASLLGFGLYDDCREHGFECAVLAPTKIARSVEDRKRKTDDRDATRIFEALRAHVLAGNALPAIWIPDVETRDDREMLRARLDLSEKLSRVKTQVRMLLKRNGVEKPKEVGARWTIPFRAWVAALELKPGAQSCLSSLLRQVKFLEEEIKPLDRQVLELSQTARYREPSEALCRIGGVGLFTAMVYLTEMGDLSRFRNRKKIGAFLGLVPSSDESGESGDRKGHITHQGPRRVRKVLCQGVWARIHTDREEAEVYRRMVERNPKRKKIAVVGCMRRLAILMWYVGLEAQKRARCFVTEVPAELRA

SEQ ID NO: 338360 - protein, 404 aa, unidentified
MKFLGIDWAEAHHDLCLADEEGRVMAKGRVPDGLEGVARLHAVVADHAHDDEEVIVGIELDRGLLVGALVAAGYDVYAINPLSVDRYRDRHSTSGAKSDPGDAKLLADIVRTDRHNHRRVAGDSDMAEAIKVLAREHKDLIWSRQRQANRLRNQLREFYPAALEAFGADLAEGDALAVLERAPSPTLGRRLSETQIAASLRRGGRQRNVTKRATEIAAALRSEQLQAPTVLADAYAAAARASVAVLTETVAQITALEKQLHDSFRSHPDAEIYLSLPGLGDVLGARALGEFGDDRTRYADARARKAYAGTAPITRASGTKRVVPARFARNTHLSDACHLWAFSALSRSAGARHYYDSLRARGKTHHQALRQLANRLVGILDACLQRRQLYREDLAWPTIKEVAA

SEQ ID NO: 338361 - protein, 417 aa, unidentified
MKTWALYAGIDWSKNLNDLAVVDRTGQAVAAHRFEATPAGVREALAVISALRASHGFSRKSVPVAIEASRGLLVTALRQHGQTVVPVHPATVARYRGRINPGNRKKSDAGDAALLANILRTDGHLHRPLPRHSELVEALGTLTRAQLRAVRTRQHHYLQLRSQLRAVHPTAVTAWAHLGGRLFRPEAREVIALAPASGSAARLTRRQIRAALERAGRTRLLDAETERLHALFQVAALRNPPMVEDALGREVRATVRLLSEACASADELAEAAGELFTQHPQHPIYLSFPGVGLLTGSRLLAELGDDPNRFATAKGMAAYAGARPFTWASGDSRKVLHRRTAANKRLAACGHHWAFSTLTNSPECRAYYDRRRAAGDRHTAALRRLFARLLSSLHHCLRHDEEFDASAWPRAPETPAG

SEQ ID NO: 338362 - protein, 339 aa, unidentified
MKKRYMGVDLHRNCFTVYTRAEDGSGGSQEWSIHALKAFAKTVKATDEVAVEATGNVRLFAEALKARGCRLVVVNPHQFEVISRSVKKTDEHDAKVLAEFLSKGLLPEVRMKDEVHARVASLAQTRDKLVKLRTTLKNKVNNLLAARGILIRKESLSSEKGLADVLAAPVSELERVELDILCGEIRHLNESIKKLEELLRDQGPKLPGWKNVTSIKGIGDTGASILLSTIGNVADFADEGKLAAYFGIVPRVSNSNETERSGRITKRGCKLGRTVLVQCALIASRYSPYLHAYYRRIAAARGTGKAIIALARKFLGIIYNTLKHNWIFTDFPQFVHVNG

SEQ ID NO: 338363 - protein, 355 aa, unidentified
MTIVANTFAYVIGADTHARTHTLAVVDARTGARVDTATFPTTAAGLRRAVGWIARHTSGLADVLIAIEGVGSYGARLARSCQDAGYRVVESFPTPARERRGRGKSDEIDAELIARSVIGIDSDKLRNPREDSGVRAAIRVLIAARDLMNAERTRSINALTSLLRIVDLGIDARASLTKPQIATVASWRSRQEDLATTTARREAVRLAKRIVECNDELADNRHELTALVTASEGATLLEEPGIGAINAAVVVAAWSHQGRIRSEAAFAVLTGTSPVPASSGNTTRHRLNRGGDRRLNQALSSIALTRMSHHPATREYVQRRRTDGRTNKEIRRSLKRYIARQIYRHMNAATALDKT

SEQ ID NO: 338364 - protein, 395 aa, unidentified
MRGVQVSTFTRSWSWRASGSSAVRKVQREQRRFDTTTKGLLELLAWLGELGCTHVGMEATGVYWKPVWHVLEGYVELVLANAAHIRNVPGRKSDMNDATWIADLLAHGLITASMIPPTPIQELRDLTRTRRQLVREIGQHTQRVQRVLEDANVKLSSVISDTLGMSGRRIVEAIIAGEDDPEKLAALGSERLRCSHEELCEALRGRVSAHHRFLLRQHVDTIDHLQRTVELFNAQIAKLLEPFRVQQELLMTIPGVRETAAASLIAEIGVDMSRFPSAAHLVSWAGLCPRMDESAGKRRSTRLRKGAPWLKPVLVQCAWGAARTKDVHASAVPSPQGEARTNEGRRGGCRHDPHGGLLHPPGRRQLSRARSRPLRRTRSHPRGPAPRTADPGARL

SEQ ID NO: 338365 - protein, 318 aa, unidentified
MSEAMFIGIDVSRDTLEVASSAQAASWRRANDTAGIEALCAELAALAPALVVLEATGGYEFEAACALQASGLAVAVVNPRQARDFARAMGALAKTDSLDARMLAAFAGVLHQHPERERFVKPLADAELQCLQALVLRRRQIVGMLTSERQRLRMSHASARPSIEETIAFLKKQLDGIEGQCAGHVQAHHGALAQALSSVKGIGAATVATLLAELPELGSLCRRRIAALVGVAPINRDSGQMRGQRSIWGGRADVRRTLYMATLVAVRHNAVFKTFYQRLLAAGKLKKVALVAAMRKMLTVLNAIAKSDKHWEDSLHTT

SEQ ID NO: 338366 - protein, 343 aa, unidentified
MKIIRVGVDLAKNVFQVHGVDRNEKPVWQRKLNREEWLKVLLEKIEPGCEIGMEACGGAHHWARKLQSQGYRVKLIAPQFVKPYVKSNKNDANDAEAICEAMSRSNMRFISVKTVEQQDIQAVHRIRAGLMEQRIAKANQIRGLVCEYGLVAPKQISHLRAAIPCWLEDAENGLTSRFRKLLNGVWVDLLSLDQRVKELDQEITAIAAADPVAKRLQQLRGVGPMIATALLATVGDASQFANGRQMAASLGLTPKQNSSGGKEKLLGISKRGDAYVRCLLIHGARSMINASKGKDDRLSLWVMRIANTRHPNVAAVAMANKTARIAWAMIRREGDYQPQLAAG

SEQ ID NO: 338367 - protein, 371 aa, unidentified
MFGDQTTFHQEGGTPMNYVGIDYHKKYSHVTAIDEEGRVIRSHRLENRPETFQEFFRRLDGPSETVLEASRTWGVMYDLLEELEGVESVALAHSQKVRAIAEAKIKTDKIDSHILAQLLRADLIPAAYIPGKQTRSYKEMIRQRVFLVRMRTRLKNRIHVLLDRLHIPLPSVSDIFGKRGTDYLRKLNLPGVDGEILRENLQLLEAFNKVIKEAEREIESLLGENPLVKLLRTVPGLGPILAAVVALEIDRIERFLSPSKLASYTGLVPSTYASGGRIFHGKLVPMSNKWLRWALVEAAWGSIRTSPYCRVYFENHKRQKGPHTAAIVLARRLSEIIWHVLKENRSYEERPIRAQRRTLITATSPAALTAT

SEQ ID NO: 338368 - protein, 352 aa, unidentified
MEKGNKLNFSGQHIYVGMDVHKKSWSVSIQSEQFEHKTFTQPPEVEKLTGYLERTFPGATYHTVYEAGFSGFWLHDQLREKGIECMVVNPADVPTKDKERAGKTDRVDCRKLARGLRNGDMKGIYVPPRVKVEDRTLVRTRQSMVRKQTRCKNQITSILFFYGITIPEEGHWTRRFIHWLESIRMERASGDFSLKAHLEELNHLRQIIANLNRAILSLSRTEEYRSDVLLLKSVPGISTLTAMILLTELSDISRFSSLDKLASYAGLVPDIKSSGETEYATGITFRRNPALRALLIESSWVSVRKDPAMMMAFNKLSLRMKKTQAIVHIARKLLNRIRFVLKNRQKYVLAVV

SEQ ID NO: 338369 - protein, 429 aa, unidentified
MRSIGLDVHRDFCEVAIVEDGEVRSAGRIATSPESIALFAGSLCPTDQVVLETTSGAIEIARLLGPHVARVVLANAADVRAIAHARVKSDRFDAATLARLLAAGMLDGGVWVPDERIGALRRRIARRAALVRQRTRAKNEIHAVIMRCLLGRPPASDLFGKKGRAWLATQQLPPAEAETVAGCLRQVDFLGTEIAAIDAKLAEFALTSPQAKRLMTIPGVDVAAACTLIAAIGDIRRFDSPRKLAAYLGLDPRVRQSGEKPARHGRISKRGNPHARHVLVEAAWQAMRTPGPLRAFGERIRARKGTQVAAVAVARKIATIAWQMLTRGEDYAFQSPSLVRKKVRNAELKSGAPRLSTRHTGTRQRVTPDERERDRELQQQAENGYRRLIADWQATGPKAGAGATPGRASSRPSTRQATRQTTESQTSAL

SEQ ID NO: 338370 - protein, 370 aa, unidentified
MLDTTTFIGLDVHARSIKAVSLDVMTGEVRAATFGYDAGAVAEWVRSVDPRARCVYESGVTGFDLQKRLSGLGVDCVVGAVSKMIKPSADRRRKNDRNDAEFLARMLSVGNVVEVWVPDDECEAARDLTRALEDARDDLSRSKQRLSKFLLRHGLAFDERTPTGRRKGNWTRAHWSWIESIRFAERADNDVLAYYVDAVRRAAEEKARLEGLVEAEARKPRWRKRVDSLRCLKGVDTASAADLVFEAGEFSRFRNARSFAAWVGLTPSEHSSGESDRRGAITKAGNKHLRKTLVEAAWHYLTCSGRPKDLAKGQAPDRGARRHAAKGVRRLVERREALLARGVHGNKANVATARELACWVWAVGLMAEEA

SEQ ID NO: 338371 - protein, 402 aa, unidentified
MSYTIFVGIDVSKDSFAACTINKDRKILFESNFTMDRDGFEGLTEMLSSFPRESILIGGESSGCYHINLFSFLSEKGFSCVILNPLLISNFMKMSLRNTKTDRKDARSISLFLSMFHESIPEKNILSSELKDLAREREHIAQEIARIKNDIEKLISILFPELQRKVNIYNRSILKFISSFPSARSVKMAPRKKIRETLEYYGRGRKVDISEEEIIKLARASIASFHPAKELILTQKASLLMFLMDRAEEIEEMLKKIYKDSEFNRDIDILTSIKGIGDITAMHFLSEIGDIKRFQSCRKLIAYAGLDPTVYQSGKYQGKSKLSKRGNRHIRRVIWLMTSMAIRFNEVFREYFVKRRNEGLPYKKAVIATAHKLIRVIFSMLSHKRYFSYESPSRIAYKELNS

SEQ ID NO: 338372 - protein, 369 aa, unidentified
MERMVYVGLDVHAETIAVATADDGRNGDVRFYGIIENNADAVLRVTKRLSATGARPVFCYEAGPCGYGLYRLLTKLGFDCAVVAPAMIPRRAGDRVKTDRRDAEMLARLWRAGELTPIWTPDEEQEAMRDLIRTRKQALEALKIAKQQLLSFLLRHGLRYERPTYWTKMHWRWINELRKFRYPHQQIAFEELKRAIRQIEERIRTLDLAIEDAVKPWRFAPVVDALRALRGVNTMIAATLAAEIGDISRFSNPRQLMAWLGLVPSEHSSGSTVRRGRITRTGNALARTMMVEASWSYRHPPRERHLHLNRSQHLPQEIRDIGWKAQTRLCKRYRDLSKTGKPQPRVLTAVARELAGFIWDIARKTPLSA

SEQ ID NO: 338373 - protein, 328 aa, unidentified
MPDSVSFASGAAPAAHILGCDVAKREVVIRDSSSGVTHRIANTSAAVSAALDRIRETSGSPDLIVCETTGGHERALCVAAIALGLPIHRADAARVKAFIESHGGKAKTDAIDAAWLTRYGSERLKTLALWRPPEPAREAIATCMRHRQTILARRTAAKNRLGAPGQDAVADLLEAEIDFLSRQVATLDARIGELAGQCEDFERDEKALRAIKGVGPVFARSLLAFIPELGSLSAKAAASLAGLAPHPHESGQTRRKKPASGGRADIKPIAFMAALSAARSHPELSAFYARLIAAGKPKRLALAAVARKLVVIANAVIKQARRAKPRLT

SEQ ID NO: 338374 - protein, 370 aa, unidentified
MAQSIRFRYVGLDVHADSITIAVADEGRDAAQALGAVPNDFTSLTKILRRLGPSASVLCCYEAGPTGFGLARQLTAAGWACSVIAPALVPKKQGCRVKTNRRDAAKLAHFLRSGDLTVVAIPDEATEAVRDLCRAREAAKRAERVARQQLSKFLLRHGRRFTGATTWGKAHREWIARQHFERPAQQAVLEDHIAAVDLASDRVQRLTLKLLEVVGAWGRAPLVQALQALRGIDLVSSATIVSEVGDFGRFAKAPDFMGFLGLIPAEDSTGDEHRRGPITRTGNAHVRRILVEAAWHYRRPPLLSKALRQRSSTVAPAVRSIAWKAQGRLHRRMVRLLGRGKEPQKVAVAVARELAGFVWAIAREEVLVAS

SEQ ID NO: 338375 - protein, 371 aa, unidentified
MAEHSTLFVGLDVHKDSISVAYAEANRSAAPEFVGSIGTRQSDIDKLVRRLHGKASRLVLAYEAGPCGYVLHRYLTGKGLDCQVIAPSLIPKRPGDKVKNDRRDALEIARLLRSGDLTRVYVPSVEDEAVRDVCRARDATRVTLKAAKLRLKSFLLRLGLHYTGRANWTDAHRRYLARVVCPTPAQQIVFQEFVRAVDEQVERLRRIEQELLDLAPTWRLYPLVESLQALRGVQWIVALTVVAELGDLTRFDNPRQLAAFVGLTPSEHSSGEKRRQGSITKTGNGRARRVLIEGAWAYRYPAKISAHIQKRIEHLPKIAQDIGWKAQVRLCKRYRRLISRGKHPNVAVTAVARELLAFMWAIAKKVPITRT

SEQ ID NO: 338376 - protein, 339 aa, unidentified
MAILYVGIDLAKNVFAVHGVDEHGKPALVRPSVARAKLHELIATLPACTIGMEACSGAHHWARMFKQHGHAVRLIAPKFVAPYRMSGKRGKNDAADAMAICEAVQRPNMRFVPVKSQDEQARLCVHRVRQGLVEQRTATINRIRGLLCEFGIVLSQKAATVRREAAAHLEDLPGWANTAIGDSLSELHRLDERIAEYDRHVVLMAREDERSRALMRLSGIGSTTASALVSTIGNARDFKNGRQLAAWLGLVPGQYSSGGKTRLGSITKAGDGYLRTLLVLGAKAVLAAAKSKDDRLSRWALALEERRGYWKAVVAIAAKNARMAWAVLAKGENFKPLEG

SEQ ID NO: 338377 - protein, 394 aa, unidentified
MKLIGIDIGKNKHFFCIMDQQTGEIISQPVSFSNDKEGFDFLIQKIKSYPKDSILIGMEDTGHYHFALLKYLLDLQYTVALINPKTTDFNRKMQGGITKNDKLDTINICDVLDTPERKKQYRITKVNSFDLYEQKQLTRHHHSLKEEENVYKNRLQKCIDIVFPEFNKLFNSKYGTVYMNILKTFGSAENVANTDIRTIRKCFEIEGRGNRISLTPERLKECARSSIGISSSAEVIQIKHLTAQIELIEEQLTEIDKKIEEFSIQNNSPILSIPGISHFSGTSILAELGDISNYSKPSQIIKFAGVAPLHYESSQFNAQHTAITKKGSKYLRKTLYQIILPVIRHNQVFYKYYQLKISQGKGHRCAQGHCVRKLLRIIYHLLKTNQQFDPQLLR

SEQ ID NO: 338378 - protein, 401 aa, unidentified
MRCIFGIDVSSKSCNVAVAVNKHLVEELKLSLDAIGFNQLKVALDVYTDPEVVFEATGVYSRRLERFLTDNGYHFIRLNPLQARIELTSFRYNKTDVNDAQNLALSSFDHKRQLTTPTARVYQDLRDLNRFYQNVNEDVVRLKNRLHKVLQLTFPELEQILSTTDGEFYWQIVDHYAHPTLVSSEDQTQIIAFLASISKKKVTSTYLQRIAQRLTALSHQAFPAVAIDSPKVMEIRYYAQQLIHGHQQKAELIEQMVTIAKELPEFRNLVSIPGFGENTVVTLIAEFGDIRRFKSSNAMNAFVGIDFRHYESGKFVAKDTISKRGNAIARKILYKAVLNCVIASHYHPNHIGDFYRERKKQSSSPQTKKIAIGAIHRLIRTMYHLVKNDQLYDYTKVHVDR

SEQ ID NO: 338379 - protein, 442 aa, unidentified
MRLLNANANEHPLRIKLSAHIRTGIIMELQRNKVCGIDVHKRFLIATILSRDGKKDTQRFSVTLEDLLKFRDWVIENGCEQIAIESTGIYWHPVHSVLEGKIDLIVANSYKIKHTPGRKTDVSDSEWIAELCLNGMIEPSRIFPKEDRELRRLTRAREGYVKQMTQEKNKIHQSLDSACIKLASVISDIFGKSGMYLLNCVLEGRDIDEIIEGIPSGRLKKKADQIKESIKSRLEISQVILIRGSLSLMRSIQERIDELDGEISARIQYRKNDLAIAMSIPGTGFVSATAILAEIGNYIDFKKPEQLAAWCGLVPSLYQSAEKTILGGITKQGSKHIRRMLIQVAYAISRTKDSKLKKFFLRIQAKKGSKVAAVALARKVLCILHHLLMNQEMYLDDRDKKNMRQKPLTPPSAIEMSIQEMIDCIVRAGYVVTKNDSRGGFG

SEQ ID NO: 338380 - protein, 341 aa, unidentified
MEHYAGIDVSLELSSVCVVDANGKIVREGKVASEPEPLIAWFGSLGFGLTRIGLEAGPLSQWLYAALKEVGLAVELLETRHVRKALEAMRVKTDRNDARGIAQLMRYGWSRPVHCKSLAAQEVRALLTARKLVQSKLLDVEMSVRGILRGFGLKVGRTTPKRFAGRVKELVAGHATLEVIAQALLSARDVLSCELNGLEKRVRRIARSDTRARLLMSTPGVGAIVALTYVAAVDDPTRFKSSKEVGAHFGLTPKKHQSGERDVTLGISKMGDASVRAMLYEAAHTVLTKPIKGAGLKSWAMKLAGRAGMKKAKVALARKLAVIMHRMWIDATPFNFAAAAV

SEQ ID NO: 338381 - protein, 407 aa, unidentified
MAVTIGIDPHKGSHTAVALDEHEAVLGQLRVRSGPDQLARLRQWAKAWPARTWAVENASGLGYLLSQQLVGTGEKVVDVPPKLAARARLLDNGDINKNDPNDARSVAVAALRAKRLSEVTKEDHAAVMRLWARRRKDLTSSRTRVANRLHPVILELVPGGYTGEIYANKVERLLEAFGPVGAVAGARKELAEELLDDLRRLDTQLKELKERLAGVVAASRTTTTKIFGVGPVVAAITVGLTRDVGRFPDKDHFAAYNGSVPIEVSSGPKKIYRLSMRGSRQLNHALHMAAVTQVRHRHSEGRAYYDRKIAEGKTGKEALRALKRRISDVLFAAMVADARRERQESQASGGPGGQTGNGSVACAAGSHPAKPALRPSHSRANLKARPLRQAARALRLRENQKKISKAS

SEQ ID NO: 338382 - protein, 425 aa, unidentified
MKNNILETLFVGIDVSSKTNALCALDFSGNKLLNLKALNNQPGAKSLLDSVLGCLDSNSLKYVVIALESTSFYSTHIANFLASNELLLAYKPLVYCLNPKTIHNYRKSFVDMDKTDPLDAYIIADFARCGRIKSQPWRGSQFLALQRLTRHRLHLVESITREKTYMVSNVYLKFSQLAVLDKEDRPFSNSYGVTSAAVLTDFLSLDDITYSSIDELVSFVSEKGKNRFSDPVKTAKLLQKAARDSYRLDKVLYEPLNVSIASSFNVIKALDDEVKAVDKAIEKTIKGINTTEYQSLVSIPGIGPVLAGGILSEIGTITSFKSHDSLAKYAGLTWRVKESGDFKSDETRMTKTGNKYLRYYLIEAANCVKKHAPEYKEYYRKKYSEVTKYNHKRALALTSRKLVRLIFGLLTKNQIYSNDKVGEIQ

SEQ ID NO: 338383 - protein, 355 aa, unidentified
MSGEKYIGLDVHQATISVAVVDSQGKLIMESILETKASTILEFLAGLRGTLSVTFEEGTWAAWLYDLLKPHVAHLVVCNPRKMAVLKQGNKSDKIDARKLAERLRLHDLKPVYHGETGVRMLRELARSYLTVVKDLSRVMNRLKALYRSWAIPCAGRDVYYTRHRSQWLEKIPEAGTRRRAEQLYQQLDMLQHLRQQARRELLAESRKHAVTARLRQIPSLGPIRSALAVALIQTPHRFRSKRQLWTYSGLGLETRDSGEYHFVKGQVRRRKKQVWIRGLNKDYNHDLKGLFKAAAIRASVLPGPFQDFYQRSLSKGIKPTMVRLTLARKIAAITLTLWKKGENFDIEKLKSQAA

SEQ ID NO: 338384 - protein, 429 aa, unidentified
MAGVVIGIDPHKRSHTAFALDAREKRLGQVRVSASGGQVPALLDWAARWPKRSWAIEGASGLGRLLAQQLLAAGERVVDVPPKLAARVRLLDSGQTGKNDPNDARSVAVAALRAHDLAEVAVEDHTMVMRVWARRYRDLGRLRTQLLCRLHAVLCELVPGGFCKKELSVAQATEALDRIVTDSPVAQANLELARDLVADLTCLDEQRREVKRRTARAVTASGTSITGIYGVGPIVAGTVLGYVRDIRRFPTRDHFASYNGTAPIEVSSGDRVVYRLSRRGNRQMNYVIHMAAVSQIRHRGSEGRAYYDRKLADGMTGKCALRSLKRKISDTLYARMLDDARHRTALTNQDPGGQSGNDAVSSLAGTHPDRPALRTSHSRVKANDKTTTGDQRVLTPRPAPDRRRTSRSAAGVHVEPRPGPRRGRGQDRP

SEQ ID NO: 338385 - protein, 347 aa, unidentified
MLHAGLDLSRKRLDVCLLSDDGEHLDQLAVPPDVDSLRTLARRIEEVRGEPICAVIESMTGARIVHDTLEQEGWEVEIADAQKVKGLAPLACKTDTIDSKVLAVLSHRDLVPAIWLPDPRVREERELARFRLHLVKHKSALKCRIHSTLINFGRACPVTDLFGAEGRRLLERLEVPEPWRSNVTASVCLIDDLEHQIAVINRRLKEGHADHPYIPLLMSVPGIRWVLAFTIAAEIGEIERFASPEKLAGYTGLCPRVNQSGERDRRGPLTKHGPTYLRWALLEATMHALRHPAYAERYQRTKRRLGKQRGAKVAQVDIARRLAHAIWHMLSRKERFAPRGAAFRLAA

SEQ ID NO: 338386 - protein, 400 aa, unidentified
MKGPIVSIDVSNGNSHFQCFTQRGTKMGKVHRISHTVEGFNCLKSKIEELEKKTNEEVVAVYEATGVYTKPLERFLEKNEIKQYSISPLQSAKQRKTEIHNKKTDKKDPESIAEVYYIKELREDEKEADLYHELRTANRVYEDCLVHLRKYKVTFQSHLSIVFPGYMKLFQDGYSQISLQLLEMYPHPDRLKNKQPEKVAKKLNKQTDHSFEVCLKTAEKAIEFANKTYPGCDKEDAWVAVLVDDIHHLQDTMEEAEAKLDKIIELAKATPYYSIILSIDGIGPNLASRIIAEFGDISKFKTRGAMVAYVGNDPNRAESGDIEGYHLSISKKGNKRLRCILYLAVTCSIRSRKENPINAFYQKKRQQSTPLKSKAAKVACITKLIRTIHGMCKTGTVFTS

SEQ ID NO: 338387 - protein, 389 aa, unidentified
MKIFVGIDIAKLNHFAAAISSDGEILLEPFKFTNDADGFQLLVSKLESFDKNSIIIGLESTAHYGDNLVRYLVAEFYQVCVLNPIKTCQMRNNNVRKTKTDKVDTFVIVKTLMMQDDLRFITFFDLDMMDLKALGRFRQKTIKQRTRLKIQLTTYVDQVFPEIQYFFKSGLHQHAVYALLKEAPSPKEIASMHMTHLANLLKVNSHGHFTKELAKELRVLAQKSVGANDSAISIQITQTIQQIELLDSQLEKIEAEMTDIMKFNDSVIMTIPGIGYINGGMILGEIGDIHRFSNPNKLLAFAGLDPSVYQSGNFQAKTTRMSKRGSRVLRYALVNAAWNVVRNNATFKAYYDAKRAEGRSHYNALGHCAGKLVRVIWKMLTDEVEFNLE

SEQ ID NO: 338388 - protein, 367 aa, unidentified
MKNNITHWVGMDVHADTIQVAVFRGNEQEPREEFETGSDSGSMNRLLKKLSALAGKVRCVYEAGPCGYELQRFLSSNGISCDVAAPSLIPRRAGDRVKTDRRDAKKLGHLHRSGELTTITIPDKDQEAIRDLVRAREDALEDVRRNRHRLEKFLLRHGHRYRGGRPWTLAHSKWLGEISFENVFLKTVFDEYRIGVDQAVEQLQRLSLTVTEVSTTTEYKAPAESLMTLRGIQALTAMTILSEFGDLRRFGTAPEFMAAIGLVPSEYSSGGKTCRGSVTKTGNVHVRRVLVEAAWHYRHRPVAGKAIKVRRVGQPLGVLKVAQKADVRLNRKFHRMTDRGKRSTLAAVAVARELAGFIWAIGQQVHP

SEQ ID NO: 338389 - protein, 478 aa, unidentified
MNNELFIGCDVSKGYADFQPVRRDGTPLEAAFRLEDTRQGHDQLKAIMTSWIRSGIAHLHVGVESTGGYENNWVRLLLGWADELPVRIARLNPSGVTCLRKAGLIRTVTDAVSAEAIARYLLVFPEKVTWLTPSQAPGNEFAAARKFQRGTATLDKQRQQLASQLEKLMYEYFPPLLVYARHGIPRWLITLLSKYPSPASFRRAGSKRLAAIKGITPEKAATILGKLSAIDAEPGGLDRENIRQTAQQILHLYNLIEQRHKLLQAQYSEDQQVHLLRSVPGIGLQTAVLLRIEIEDVGRFETAKKLATYFGVCPKYVESGDKKGQIRMSKQGRPEVRKALYMSGLSAIRHDDLFKGLYHRFRGKGHNHYQAIGVVMHKLLRVVYGILAHQTPYDPEIDKANQRRARQKQQAEQGTQDQLISLQKKQLNRYQKETASAPRSRRSVQKLRKEQPASQSSLVEECTGSPDAPRTKMYENVT

SEQ ID NO: 338390 - protein, 370 aa, unidentified
MKKSVLYVGLDVHKMSVDVAIAEPGTAGEIRYYGRIGGDLEALDKVTRKLQGKGAELRFAYEAGPCGYQVYRHLTAQGHRCLVAAPALIPRRPGDRLKNDRRDALTLARLFRAGELTPVKVPDAEDEAMRDLTRAREDAKSVERRAKQRTAAFLLRHGRIYPGKTTWGRGHWRWLVQQAMEHPAQQIVLQEYLDAVREAGARVERLTGQIRELLPQWRRAPWVTAYQALRGVSLLVAATVVAEVGDLSRFTNPKELMAYLGLVPSEHSSGATVRRGQITKTGNGHARRVLVEAAWAYRLRARVTRPLLQRQEGLPESIRQLAWKAQLRLCARYRRLLGRGKHKNTIVTAIARELVAFIWAIGRAVEPVTT

SEQ ID NO: 338391 - protein, 402 aa, unidentified
MAAGQLWAGVDVGKEHHWVAVVDSAGTMVLSRKLANDEQQISKLVAEVDRLGAQVSWTVDLTTVYATLLLAVLAEAGKSVRYLSGRSVWQASGIYRGGEAKTDAKDARVIADQSRMRGDDLPVLHPDDDLVTELRMLTAHRADLVADRTRTINRLRQQLVAVCPALERAAQPAQDRGWVALLARYQRPKAIRHSGITRLTRVLADAGVRNAPMIAQAAVTAAKTQTVRLPGEEVAAALVAQLAQGVIALDERIKQIDADIEDRFRRHPLAEVITSLPGIGFRLGAEFLAAVGDPALINSADQLAAWAGLAPVPKDSGKRTGRMHTPQRYSRRLRRVMYMSALTAIRCDPHARSYYQRKRNEGKRAVPATICLARRRTNVLYALIRDNRTWQPDSPPITTTAA

SEQ ID NO: 338392 - protein, 322 aa, unidentified
MRYIGIDVSKATFVVAYSSDKGGEIRTFNNTTTGIKQFIGALPKDSSIHCVMEATGNYSALLLYMLNVAGITVSMENPLKVKNFAKAMLSTIKTDKSDARLITLYGEKMNPRPFKVQGEAILRLRQKRTVIRQLTKQITAMSNLRGSLACLPVPDKGATHTVDETIEFLEKRRDRLQSELTDLVEVEFSRQLALLTTIKGIGITLATALIITTGGFTYFQNAKQVSRYLGICPTYEQSGTSVNIRGHINRNGDAYTRGLLYVAAWTASRFNTKCGETYTRLRQNGKPGKLAMIAVANKLVRQAFAVVSHDKEYVDGFVSNRH

SEQ ID NO: 338393 - protein, 344 aa, unidentified
MTITVIGLDLAKNVFQVHGIDGNGRAVLRRKIRRSEVLPLFSRLLPARVGMEACHTSHYWAREIARFGHDVRMMPAQFVKPYVKSQKNDATDAEAICEAVQRPTMRFVAIKSENQQAALMLHRTRDLLVRQRSSLISSIRAHFAEFGIVVGQGIRNVERLLALLGAEGDNRLPALAAEMLGVLAEQLRETAARVSEVEIKLLAWHRANPASRRLESIPGIGPITASAIVATVGDPRQFQSGRQFAAWLGLVPQQRSSGGKERLGGISKRGDGYIRRLLVHGARAIVGWRKRSAAHTTPWIERLLKRRPMNVATVAYANKLARIAWAIMISEDRYNPVRAFAAVG

SEQ ID NO: 338394 - protein, 424 aa, unidentified
MNLTQNDRLKQVTSDTLIVGVDVGSQTHFCRAFDWRGFELSRRVFKFSNTGMGFLTFLRWTEELMNKTEMKKVIVGCEPTGCYWLTFQKFLQDHGIQLVTVNPFTVNRSMELDDNSPEKSDLKDPKTIALLVKDGRYSTSYLPSGVYAEIREASVCRDQIMKQHVRLSNQIQGWLQKFFPEYFECYADWDSTSGLMLLKEAPLPQDILRIGAGGINQIWRDAKVRAAGIKRAQTLVEAAQNSVGLEAGEAARLEIWVLVNDYILKAEQLKRLDEYLEEKVKEVPNVEKLLAIKGVGMSTVIGFIAEVGDIGRFTDPKQIQKLAGLEIVKKSSGKKKGQPRISKRGRRKLRRTMYESARALMTWNPAFQDVFLYYRNRQRNPLGGMQAKIAVACKAIRVFYVVLQTGCDFDEEKFRRDIIRPEAA

SEQ ID NO: 338395 - protein, 388 aa, unidentified
MLLDHPSDGPAAIRTQFGAIFVSLELSRSTWLVASLSPGQGEKMSRHSVEADDVAELMKLFAELNGKAQVRTGLSYPIITIQEAGLDGFWLHRVLKQEGIESHVVDPASIATSRRKRRAKTDRLDGETLLRALLAYKRGEPRVCAMVAVPSPEEEDRRRLCRERQTLIAERIEHVNRIMGLLFAQGISDYAPLRRDRRARLMVLRTGDGRELPPHLKAQIGRELDRLELLLDQIAAVEREQDALLVASKPAGEKSAPNPVTMLLALKSLGPNFTAVIWTEAFYRQFANRRQVAAYAGLAATPWCSGSIAREQGVSKAGNPRLRTTMIQLAWLWVRHQPESALTIWFKANSQRGRKRTIVALARKLLVALWKYVTQGVVIEGAVMKSAA

SEQ ID NO: 338396 - protein, 381 aa, unidentified
MGDDIRFVGLDVHAETITVAVAEGDGGEVREVGTIPNREESIRNLLKKLGPAKRVRCCYEAGPTGYVVYWQLVGMGVTCFVVAPTLVPVRPGDRVKTDRRDAKKLARLYRSGELTPVWVPDQAHEALRDLVRAREAAKRDETRARHRLSKFLLRHGRRPEKQLTAWTMKYLEWVRSVRFEHAAMGATLLDYLTEVDHLAERIVRLERAIDAAIEQMPATLKAVVAGLQALRGVKKISAVSLVAELGPLSRFDRPRQLMGYSGAVSRESSSGEHVWRGSITKTGNAHLRRIVGEAAWAYRHRPSLGPALRKRQVDQSEEVKAIAWKAQHRLHDRYYRLVGRGKHKNKVATAIARELLGFIWAIGVQVEKEQRAKASGKPLAA

SEQ ID NO: 338397 - protein, 461 aa, unidentified
MGMTLGIDLACRAAHVASLAGPDGKLVWRGRKFFSRTADLERLWADLDCDPAELMVVMEPTRNAWIPVAAWFRRRGVKVVMVPTTQSADLREYYSKHTKNDRLDSVLLARLPLLHPEGLREHVGDGPADPLRRVVKQRSSIAKRRTAVFNRLDAQLELLGPGWYDALGTDYGKATLAFLARYADPTAVIRLGQARLARFLRRYSHGHWREGNAAELIAAAQESLRLWDGDGIDFAELAADIAVEAEQAIALTAQMADLDERIANMYAEADPAGIVRSAPGVGPVLAGVIAGRLGDPHRFTSLAAVRSYSGLVPKVSQSGTSERVGGLTKAGDPLLREAVWMAAEQARKLDPQLAAKYARLMAADGRHHDSAVCHVATILLTRIATCWRTGQPYQIRDVDGTPLTQAEGKRIVTEKYQVPRKSSKKRYYRATNHKADRGSQESLSAPTPRPAHTQPKPSRVA

SEQ ID NO: 338398 - protein, 350 aa, unidentified
MKHTIVGVDLAKEVIQVCIYSNKKVQSNIEMTHKEFHEWLVTTQPTTIIFEACGTSNYWKQTAAQAGHKAKLISAKLVSTVRQNQKTDKNDALAIVQASLLPDIQFIEGKNIEQQQLQTILRLRELGIKQKTASSNQIKALLLEFNIRVSTRHGGLKGVVESTLEDADNGFSFSFREALHAAWKHYEDLLESICTYDQCLESLVQDHPECQRLLKLEGVGMINAVNLYIALGCADLGVFKKGQDASACIGLTPLQYTSGGKIVMGSIGRYVKNSILRSQLITGALAAVSQIVKRTAVTKKDAWVQGLVNRRGKKCAAVALANKTVRTAYAMLTQGTEYKAEILAKDSVLA

SEQ ID NO: 338399 - protein, 362 aa, unidentified
MPKMIWLGMDVHAASITVARYEDQAATAMVQTIANDPAQVRRLVRRLPAGCDVRACYEAGSCGYGLHRQLTALGVHCDVIAPALIPRRPGERIKTDRRDAEKLGRFHRSGELTTITVPTPSQEAVRDLVRAREDVRRDRTAARQRLAKFLLRHGHRYPGSHWTKRHWEWVCGRPFEGAARTVFVHYCDHVLALNERLAHLEREIHTFADSPVYQPVVARLSCLRGLATLSALMLIAELYDLRRFRTPRELMAYLGLVPSEHSSGARERRGRITKTGNALARRLLIEAAWAYRHPARQTRRVHQALITQPPAVHAISDRALHRLTARYRRLLSRGKTPHHAVTAIARELCGFVWAIALVPDLA

SEQ ID NO: 338400 - protein, 351 aa, unidentified
MDRYIGVDAHLKSCTFAVVGPSGRRLQQQVVETNGQAVHQFLLSIAGKRHVCLEECELSGWLHEIVSPLAVEVVVVRPERRSGTKSDAVDAWALAELLRKGELSHGVYKAPDRFGGLREAVQAQRLIMRDLVRAKNRLRAVYRRRGIQPEREIYDPSRRESWFTRLPKYPQQQARLLSEHLDALTASTKRADAWLAQEARDYPIVGLIATAPGIGDVRASQIVATVLTPYRFRTKRQFWSYCGLAVVTRSSSDWEQNHNGGWIRRQRPQPRGLNHNRNALLKEVFKGAALTVITNMPNHPLTKNYHRLLEAGTKPPLARLTLARQLAAAVLAMWKNLQAYDPARHAVPKTA

SEQ ID NO: 338401 - protein, 412 aa, unidentified
MTAKDQFAAHVGLDWADKKHDVCVQFKNGDRIFHVIEHTPEALDIWLNELHQRAKGRIAIAVELKKGPVVYALQKYPFVTVFPVHALSLARYRQAFWPSGAKDDPQDAELALDLMLRYPHKIKAIEADNPDIRLLQQLVEQRRLLVEDKRRFVNRLINTLKQYYPQPLEWFSHRDSSLFCELIIRWPSLQQLKRARSDTVRHVMNAKGGPAVAYTEQRVASIASAIPLTTDKTVIEANALMATALASQIKLTGDLIRTYDERIESLFDTLPDAELFKSLPGMGPCMGPRMLAALGDNRDRFNSAEEIQSYAGIAPATERSGQKSWVHWRWQCAKFVRQTFVEWTAKTVNSSYWARLYYQGQREKGKSHQSAIRALAFKWIRIIYHCWKTRTRYDEAKYLLAQEARKSPLLKP

SEQ ID NO: 338402 - protein, 338 aa, unidentified
MNNEKYIGLDVHQATVVVAVLDSTGKLVMESIVQTEAATLLQFFAGLRGTLAVTFEEGTWAAWLYDLLQPHVDRLVVCNPRKNALLKDGNKSDRIDARKLAELLRGNQLKPVYHGETGVRMLRELSRSYLTIVKDLSRVMNRLKAVYSSWAIPCAGRDVYYTRNRAQWLAKLREPGVRRRAERLYEQLDMLRHLRQQARRELLAESRKHAITAKLRPIPYLGPIRSALAVALIQTPHRFRTERQLWAYSGLASETHISAEYRLVEGQVRRSKKVYTNHDPGGPKEPEALMWMRPISFVRNLLRHRAPVTALQAPCNRSLWSSPRASWPSHQERSAVHS

SEQ ID NO: 338403 - protein, 342 aa, unidentified
MAVPMLSDSTRSVTGGVDTHKHVHVAAVVNWIGAELGTASFATTTVGYEELLDWMRNHGEVARVGVEGPGSWGVEVVEINRPNRQDRRRTGKSDAIDATAAARAALAGLDAGIPKAGDGPIESIRMVRLARRSAVTTRTRTMNQIRAVIDTASDDVRDRYRHLTPMALIKAITGTRPGPNIGDPAVAAVSTLRILGRRWRFMNDQTAELDTQLETLVRSTAPNLLAIHCVGVETAATLLVTAGDNPGRLTSEAAFAAVCGVNPRPAGSGKTNGRHRLNRAGDRNANNALWRIVMARMSHDERTRTYVQRRTTEGLSKREIIRCLKRYVAREIYPILIGDLTS

SEQ ID NO: 338404 - protein, 387 aa, unidentified
MRTSVLKTSSLMNKHQNHPTTTQKVNLIKLSADVHKRDYKVCRQIGDQNIQPAQTLEPQEAFEWAVKQLQLAQRVVFCYEAGFSGFSLARRLQAEGVEAVVMCPQQLDERCKRVNTDKRDARRIAGRLDRFVAGNDEALVKVRIPTEKEEDQRAVSRQRDQLLKARKQFEAQGRSLLSFKGLSCPAHWWSGSDEQWQAMIKQQAWPPCLVERLEVYRRMALAADKEVQVLTLQLEAAAQENLPPSMPELPHGFGGLSLESLRREVCSWERFKNRGQVGSFFGMCAAENTSGPNQVQGSITKTGNPRCRHWLIELAWRALNFQPDYRVVKKFKARIDQSQPRSVMRKKLIVAMARLIGVDLWRLYTAQTTLAKLGLVARKAKDYVLKG

SEQ ID NO: 338405 - protein, 346 aa, unidentified
MLYAGLDLSRQRLDVHVLDEEGRTVEVTAVRPDADALRTLAARFLAHGQEVSAVIESMTGARFVHDELERAGWDVEIADAARAKALAPLAAKTDRIDAWVLAELGRRDLVPAIWLPDPAVRGQREVARFRLHLLRHQTALKNRIHATLITFGHPVPVSDLFGVRGRELLASLAIPEPWATTLVTALRMIDELETEIGAIERSFRRHGIDHPTAALLRTIPGVSWILGYTLAAEIGDIARFSSAKKFVGYTGLCPFVRQSGNRDERGPLAKNGPKYLRWALVEAAVHAANTPAYRAHYQRTKRRLGRQRGPKVARVEVARAIATAIWYMLTRNEPFAPAGPSHALVA

SEQ ID NO: 338406 - protein, 412 aa, unidentified
MEMLYRSCCGIDVHKQFLVACLLVVDEAGCQHKELRRFSTMTGELLTCVDWLKAAQCRAIAMESTGVYWKSPWNLMEGHFEIVMIVNAEHMKRVPGRKTDKKDAEWIAELLQLGLLKPSFIPSRPQRELRDLTRLRTTMTGERTRLVNRLDKTLEDTNLKLSSVLTDIMGQTGQHILGAIVRGEEDPAVLADLALRRAARKRDALALALRGRVNDHHRLLLRELLEMIEYHDQVIFRLDQEIEERLRPLEKQIQRLDVIPGCSRRVIEILFAEVGWDLRAFPDAAHLASWVGICPGNNESGGKRFSGRIRKGNRWVKAILVQAAQAAARTKNTYLSAKSHQIATRRGNKRAAVAVGHSILIIYYHMLTAGEPYQEKGANYFSELDRKHAERRATKQLERLGYQVTLTPAQMA

SEQ ID NO: 338407 - protein, 422 aa, unidentified
MKHNNVNRYAEFCQFRREIRGSADYVIVGIDVAKSFHVAAIVDEEGLVLHTLRVDNNAAGYQRLQQLLSQYGPGHLIVALESTGHYGHALRDWLLGQGFELHVFNPLKTNRFRDFYVQWRKNDERDAIALAHLLRLGERQPYHPLPLNLPSLKQMVRHRGLLVQARARTKNQIRAILDQVFPEYQQQALFSDPFGTTSLALLSHYPTPAHLAALDEAQLTPFLSQHSRGRFGADQAHRIQQAARHSIGSPEAGRAYTPILPAFIAGFQSLSAQVDQCTTHIESYLAETDQTLTTIPGIGSVLAATILSEVGDIHRFPSADHLVSYCGLALSEDQSGQSRSRRFLSRRGSARLRTSFYQAALVAVKYDPHLRAYHQRRVCQGLPTKQSVLSVARKLVRISYALLKSGQPYQASRPAQPDPEHR

SEQ ID NO: 338408 - protein, 352 aa, unidentified
MTTITTVGVDLAKKVLQIHGVDAAGKVVVARQLRRKEVLAFFAKLAPCLVGMEACGSAHYWGREIGKLGHTVKLMPPKYVKAYVKRGKTDAGDAAAICEAVTRPSMSFVSVKGLEQQGLSMLHSARSQLIGQRTQLVNAVRGHLSELGIIAERGLLGLADLAAIVRDESDQRLPATARAALMVLVRQIETVSTQIVALDTALRKENKSSDLGPRLETIPSVGAVIASALRARITDARLFDNGRHLSAWIGIVPENDSTGGKVKQKGLSKKGDRYLRSLLVNGAMAVVRQAQIRPDKHPWVTKLLGRMSAKQAAIAIANKTARIAWAIMVHGGVYEAGHRAAHYRAEACAAAG

SEQ ID NO: 338409 - protein, 367 aa, unidentified
MKKHTTKSNSLSSADVSACSTVAIDLAKNVFQVAGEDALGQIIYEARIKSREAFLVLLHKLPAGVTVLMETGPGAQAWARLLQAQGKLARILPAQRVAEHRSGAKNDRNDVLAILRAGRDQNIAAVPIKSTAQLAMQALHRARQGYVRRHTAMGNQMRGLLLEHGIAMAQGATTLGRNVPRILEDATQPLPELLRELIAEMLGEWSHLGERIEVLTGRLETAAREDETAKRLMTVRGIGPIIATALLAKQTEPERFANARMFAAYFGTVPEQHSSGQTVRLGKMCKRGDAYLRSLAIQGAHAVLRQVRPDSEHPDDHRLRRWLSRHGQKGAAVRLANRNLRIVWVLLQNDQTYRRQPAGCQEATMNH

SEQ ID NO: 338410 - protein, 330 aa, unidentified
MKVAGIDVAHKTLGVVLRSEEKAAKAQEFANTASGHLALVKVLQAARVERVCLEATGSYHLDLALALDTGGLALMVVNPKAAKRFTEALLTRSKTDAVDAAVLAQFALRMPFEPWQRPDNQALALRACARRLEALNRAKTEAKNQLHALTQTQTTPEVVLADVRLSIRQCEDQIKDLRTWAEGLIQSDAGLTEVFDLLISVKGIAAASAIQLMGEILVLPADMRAKQWVALAGLDPRQSISGTSVHKKPRLSKAGNRYLRLALFMPALSAARHDRHVNGYYRHLIEDRGLKKIQAVCAVMRKLLHAIHGMLKSRQPFEGSRFYALAATPA

SEQ ID NO: 338411 - protein, 373 aa, unidentified
MEERTKVHVGLDVHKDSITVATAEAVGREKARLIGKVAHDVPKLLKVLARIGAVEELHIVYEAGPTGYGLQRALAARGYVCEVIAPSKTPRQAGNRVKTDARDGMELAEYSRAGKLAPVWIPDPADEAIRDLARAREDAVNSRRTARQQLKGFLLRHDRRYGGKTSWCGAHGHWLARQSFEACAAQTAFTEYWQAVKSCDERVERLTKALQGSIAGWRFEPVVNALQALRGVAAVTAIGLVAEIGDLNRFEHPRKLMGYLGLVPSEHSSGEHTSRGSITKTGNGHARRLLVEAAWNYRFKARVGKEIHARQEGLSEAVRTLAWKGQLRLTGRFAALQKRGVQANKVCVAVARELAGFVWAIGMQAQRERGTAA

SEQ ID NO: 338412 - protein, 317 aa, unidentified
MNAEGCFVGIDVSKAELEMGLVPEGKTWKTPHDHGGIGVLVERLIAMSPELVILEATGGLEAPVAAAIAGAGLPVVVMNPRQVRDFAKAKGKLAKTDKIDALVLADFGRSMRPQVRPLKDEQTQELKALHIRRLQMVEMLTAEKNRLGRAPSGRVRKDIQRHIAWLEKRVKEADKDLEDLIRNTPIWREKDAIIRSVPGAGPCLSSTLLCELPELGTLNHKRIAALVGVAPFNCDSGKYRGHRRIWGGRARVRSALYMPTLAAIRFNPLIRPFYQRLIEAGKKPKVAITACMHKLLTILNAMMRDRSTWMAYNPKNP

SEQ ID NO: 338413 - protein, 462 aa, unidentified
MRENGSSSKRPDELKDVEGLPVLRPNVAGIDIASAEHWVCAPTPDASTREEARFGATTPELERMAAWLKERNVESVAMESTGVYWIAPHEVLESHGFEVVLVSTRQLASVPGRPKTDRIDCRWIQRLHSCGLLQGSFRPNEQICMLRTLVRDRANLVAEVGDWLRRMQKSLDQMNVRVHRAVSDIDGVTGMAIVRAVVNGERDPRQLAKLRDPRCRKSEQEIAEQLTGHWREDHLFSLQQALKMYDAIQQRIAEYDREILRKLNEMERDDRHGNQPPHLKNKQKANAIRKRGQEPLRQALYRLSGVDLTVIDAIGVETVNVVLSEYGPDLSRFPTEKHFVSHVTLAPRTPISGGRPVKKRRKPGTASHRVASALRMAALSLRHSQTALGAYYRHIARRLDANVAVFATARKLATLIYRMLRWGQPYVDEGAAAYEKRYWQARVRRLATTAKDLGFQLAPAQA

SEQ ID NO: 338414 - protein, 350 aa, unidentified
MRILALDLGKNKSVFVDYHVGGDRHFGKVDTNAHELQKLLLRCTPDRMVIEAGAAAGWVCDLAEKLKIPIQVANANDERWRWKNVKDKSDRKDALKLAQMSEMDCLPTVHVPNASVRQWRALIGYRNALVSRRTAIKNSIRSIYERQGIHLSAARKAWTPAAVEELTKETLLATPDQLWLFEVACELEQLQTLQDQIERIEVRLEEIAQKKESVKLLKTAPCVGPRLGEVVAAVLDDPHRFKNARQVACYAGLTPRRWQSGNRDCQGHISKAGPRLLRQLLVEISWLGVRHKTWMLDVYEHVCRGSDKRKRIAIVAVARRLLIKLWAMLRDGTPWIEPNPSRTAATAAGG

SEQ ID NO: 338415 - protein, 411 aa, unidentified
MLVGIDWADAEHTYCLMDDTGATLATGTIDHTAEGLERFMTLVRARAQDPQDILVALETSQGPLVGALLDQQFTVYAINPKAVDRHRDRFRVAGAKSDLRDAWVLANLLRTDRMLYRPLLPDSEVAQELRALTRDRAELVQTRTMLSNQLTSCLKAYFPEFLTLFADPDRPVALALLQAFPTREALQAVSPTRLEAFLRRRHCPHSHDRAVEIHTQMQARGFHIAPPLVRAKARLAGTLVSQLQTLAEHLEAYDREIQRVLRLHPDGELYHSLPGAGDFLAARMVGELGDNRDRYRDASSAQCEAGTAPVTRKSATVRTVHVRRACSHPLRSTMWQFAFASKRHCEWAQAYYLRARKRGKKHAEAVRMLGNVWLRIIIAMRRNRRPYDEALFLSRSSHPSLALCPSVVHHK

SEQ ID NO: 338416 - protein, 316 aa, unidentified
MTRKRAKLFIGIDVSKQLLEVAAHQHDYQFRCANKASAFAELLAELIALRPALIVLEATGGLERAVVAALQGAGLPAVVVNPRQVRDFARALGQLAKTDRLDARVLAAFAAAIKPPPRPIKNNAERELEALAGRRDQLVEMLTDEKNRLVSAATDSLRDEIKEHIDWLTDRIAEMDQQLKKLLQSSAQWQAKDQILQSTPGIGAVVSASLLAQLPELGTLNRQQISKLVGVAPLNRDSGQQRGSRHIFGGRAHVRKLLYMAALSARRCNPVIKQFYERLRAKQKPFKVAITACMRKLLTIINFMVRNGSPWKSAET

SEQ ID NO: 338417 - protein, 358 aa, unidentified
MTGSSDYESVQVFIGVDVGKDTHHAVAVNRSGKRLFDKALPNDENKLRSLISDLKQHGQILLVVDQPATIGALPVAVARSEGVLVGYLPGLSMRCIADLHAGEAKTDARDAAIIAEVGCELSMICGFDDDLAAQATQASNRICGLLTQIHPALERVLGPWLDHSAVLDLLQRYPSPEKLASQGEKRLASQLCKLAPRLGKRLAAGITQALAEQTVVVPGTNAAVVVLPRLALQLITLRKQRDEVAMEVEQRVLTHPLYPVLTSMPGVGVRTAARLLTEVACRAFASTAHLAAYAGLAPVTRRSGSSIRGERPSRRGNKTLKRALFLSTRPDIQGLLHTQNEPGKATQPGAYRPGKAAL

SEQ ID NO: 338418 - protein, 320 aa, unidentified
MTILTSPTVIGVDVANAEIVAYREDLKNIQVINNDRTSIGRWLKTLPAQSSISLEATNLYHLDTAELAHGMGHRVYVVDPYRVSHYRESIGQRAKTDPCDARLLARYLTSEQHRLRVWSPPPRHYTVLKSLLNKRAQLMKARVSIMLSWSNEPLLEDLLAHGLEHFKQLDQAIQELLRKVSQEAGISENIRRCKAIEGIGELTATGLATTYMRGEFASADAFIAFLGMDLKAKDSGKKHSPRHLSKKGDGELRRLAHNAAMAACRSPVWKPFYESYLARGLARTQALVILARKLCRVAFALMKNQSEYQPNLRLQGSPAT

SEQ ID NO: 338419 - protein, 356 aa, unidentified
MTVTIVEEARSVTEVARPITGGVDTHADTHVAAALDPVGGLLGVREFPATAAGYAGLLDWLGGFGTVCLVGIEGTGSYGAGLARYVTAAGVRVVEVDRSDRQDRRRQGKSDPLDAVSAARAAQSGRARGAPKGRDGAVEAIRTLMVARRSAAGERTRTINQARALVLTGPDDLRTRFARHTPAALITGLAALRPRTGDVTGHATRIALRELGRRAQFLDGQLERLDELIVPLVTARAPGLLAVYGVGPRTAALLLIAAGDHPGRLRSEAAWAHLCGAAPIPASSGKVTRHRLNPGGDRQANHALWRIVFTRLGSDPATRAYAERRTAEGKSKAEIIRCLKRYVAREVYPHLRPAGG

SEQ ID NO: 338420 - protein, 340 aa, unidentified
MVKFRVGIDVSAKSFVASYGPDSQSKHKKYANTPAGIKAFLKSLTSKSLTSKSLTSKSLPSENHCILEATGTYSQRLSHALVNEGYTVSVINPRQSKSFAQLYNLQTKTDLQDARMLARMGAELELPLYQAQSEEAVQIKQRRTLLNQLKKQLRALQNLQHSQTYSPFQDELTAQMIKDQVDTLQKRIKELEKALASFTKEKFSKQYQLLNSIKGIGPAASAALIQATSAFENFTDYKAFAKFIGVAPTQHQSGTSVYAPGKISRRGDPSIRALLYCCANVAKRWNPACKELFERLRKKGKPYKVAVVAVISKLLKIAFAIIQSGVPYKADHKSKRPVIA

SEQ ID NO: 338421 - protein, 354 aa, unidentified
MSHQLNTAIAVVGVDIGKNSFHVVGHDERGAIVLRQKWSRGQVEARFANIPPCLVGMEACVGAHHLSRRLKALGHDARLMPAKYVRPYSKGQKNDFRDAEAIAEAVQRPTMKFVATKTAEQLDLQALHRVRERLVSQRTGIINQIRAFLLERGVAVRQGQRFLRTELPRILAAPSDVLSPRMVRLIEDLAGDWRRLDERIEGLSSEIEAIAYQDAGCERLMSVPGIGPIISSATVAAIGTGDAFSKGRDFGAWLGLVPRQMSTGGRTILGRISKRGNRYLRVLFVQAAWVVLNKPKSWERHGLKSWIEAAKKRLHPNVLAIALANKLARIAWGVLAHGRDFEARTNTNATAQAA

SEQ ID NO: 338422 - protein, 405 aa, unidentified
MQVYIGIDWSENKHDVCFMHETGEVLLILQIQHTMAGFRELDQASQSLGLSRQEVIIGLETAHNLLVDYLWDQGYAQIYVLPPSVVKSAQKRFRQSGAKDDPWDARLIADLLRTDHHRYTIWQPDQPLTRQIRAEVRFAHQLGRERVRDENRLRALMLRYYPAVLEAFPHLDSPVFLAFLQTYPTPSQADTLSFEQLQAFLRAHHHTHTSRWPTLYAGLHADHPHTNPALEAAYSPLALAQAQIVETLLRSRQACLARLGNLFQQHPDHEIYDSLPKAGALLAPALLAKLGDDRHHYPSPAVLQAVAGTCPVTNRSGKHSHVYFRSACDHEFRQITQQWARLTLNASPWAATYYHLVRPHCQTDSDAIRRLANRWLEVLWRLWIDRTPYDPARHLKQHALRNQAR

SEQ ID NO: 338423 - protein, 340 aa, unidentified
MADIRVLGLDIAKSVFQLHGVDAGGATVLQKRLTRGRMLAFFAKLPPCLIGIEACATSHYWARELVALGHEVKLMPPQYVKPYVKRGKNDAADAEAICEAVTRPTMRFVGIKSPDEQSVMMLHRVRLILNRQRTQLSNALRAHLAEFGIVAPIGRAGIDRLLSIIADPADDRLPDEARICLEMLVAQLAIVKEQILENDRRIMASARSTELGRRLMEIPGVGPLLASAVAASVPDPAIFRSGRDLAAWIGLVPRQNSSGGKERLGSITKAGHGYLRQMLIVGAMAVVRYAQRNGTKRPWLVQLLARRKAKVAAVALANKNARIIWAMMVSKERYREPQAA

SEQ ID NO: 338424 - protein, 331 aa, unidentified
MVHCSYAGIDVALESLVVVTLDEHLVPSAAQSFANSKAGHKKLVRHLLKSGLPTQVCLEPTSNYHYALAQALHDTDGVTVSVVNPRCVRNFAKSRMQRAKTDACDALMLAWFGEAVKPVAWIPPRQVELELRSISRRLEDLTKRGTALKCRKHSSGYGCTSRVVKLDLEAELKSIKRRLHKLRQAALELIGSDDLLARQLVLLQSVKGIAEVSGIKLLAELCVLPEGLTKRQWVAAAGLDPVPKESGKSLKGKRRISKQGNKHLRTALNCPALVASQWCPEVKAYYEMLQGRGLAKLSALCAIMRKLLQALWGMFNSNMMFNPKLFFQIIP

SEQ ID NO: 338425 - protein, 452 aa, unidentified
MAKKSKRRCDTLPVLHPDAAGIDVGASELYVAVSADRDPQPVRSFPTFTRDLHALADWLVQCGIHSVAMESTSVYWIPVYQILEARGLEIYLVNAQHVKNVPGRKTDVSDCQWLQYLHSVGLLRASFRPPGFICAMRSLWRHRASLIQMAAEHVLHMQKALDQMNLQIHRVLNDITGVSGLRILDAIVAGERQPFTLARLCHGGVKSSEDTIAKSLEGDYRPEHLFALRQSLAAFRYYQQLVLEADREIQLQLAELKTAATAQPTTPARTKANAHYARHYEPRTFDLRGELYRVFGVDLTNVPGISALTAQTILCEIGTDVSRFRNASAFASWLGLCPEKKISGGKVLFTKSRRVRSRVATALRMGAQSLHHAKDYLGEFFRRITRKLGRPQAITATAHKLARILFHLLSTKEAYNESVFHKTEEETIRRAQYRLRRQAAQLGFQVIPVENG

SEQ ID NO: 338426 - protein, 360 aa, unidentified
MPSFADSDVVVGMDVSKNTIVAGVLTGGGVPVVESLSADEASVRRFFQRFDDPRTVSACYEAGPTGYDLHRLLTSMGVHCVVVAPSLIPKGPGDRVKTDKRDARRLAVLHEAGLLTPIRVPNPREEAVRDLCRTRADLVGDVTQAKNRLFAFMLRHGRVWRDGRQWTMKHRRWVAAQTFDDPALATTFGYYRANLETRETMLHEIEADLAVWFDREPFGAQVARLAAYRGFTHQGALMLAAEVCDWRRFASARHFMGFVGLTPSEYSSGDTTRRGRITKAGNAHLRSQLNEAAWAYSHQPHVGPGIAARQQGLPPEVIARSWNAQQRLCRRYRHLAERNPTRTSSSPRWHASSPGSCGPR

SEQ ID NO: 338427 - protein, 455 aa, unidentified
MKKTALSLDCIGWDSHRKFSLASARDTSGRIAWRERIEHADREAFRRQIARWPKGTAVILEATFGWGWISDELKAAQLDPHLSSGPKVSGVREARQMSKSNRKDADLLSELWAEKTRWWEVWCAPPEVRDMRELLRRRMSLVAIQTQFKNQIHATLHRHGLVNPFSDLFGVAGRKWLVSMLEDGTAPLRAMGQETLRGQLRILDQVRREVAGLTRQFRKRVIQHPAARRLMTLPGVSTILAYTIVAEIGQIQRFASGRTLSRYSLMAPMSDDSGDEREGKPIGRHVGKAGRLTLKWAWIEAARAAVRKSDRMRKLFDRHTDGGTRDRNRGYIAVGHQLCLIAYALWKKDVDYTETPPTRPGSRPQQQMVIEQPADSIPATQEGQGEGQDVAYAATRAAHEKARTRSTATVVGAPPRKTPHHNGIVFCGGMKKEKHDPAGKRRIHHDVARPGTDQP

SEQ ID NO: 338428 - protein, 424 aa, unidentified
MNLTQNDRLKQVTSDTLIVGVDVGSQTHFCRAFDWRGFELSRRVFKFSNTGMGFLTFLRWTEELMNKTEMKKVIVGCEPTGCYWLTFQKFLQDHDVQLVTVNPFTVNRSMELDDNSPEKSDLKDPKTIALLVKDGRFSTSYLPSGVYAEIREASVCRDQIMKQHVRLSNQIQGWLQKFFPEYFECYADWDSTSGLMLLREAPLPQDILKIGAGGINQIWRDAKVRAAGIKRAQTLVEAAQNSVGLEAGEAARFEIWVLVNDYIFKAEQLKRLDEYLEEKVKEVPNVEKLLAIKGVGMSTVIGFIAEVGDIGRFTDPKQIQKLAGMEIVKKSSGKKKGQPRISKRGRRKLRRTMYESARALMTWNPAFQDVFLYYRNRTKKPLGGMQAKIAVACKAIRIFYVVLKTGCDFDEEKFRKDIIRPEAA

SEQ ID NO: 338429 - protein, 361 aa, unidentified
MSNERTTVGLDVHARSVVAEAVDWAGGRVFSQRLVPANDVVLGWVAQLPGPVAVAYEAGPTGFGLARAFGSAGVRCEVVAPSKLERPPGDRVKTDRRDARRLARLLHIGEICGIGIPSVIQEDARDLVRAREDARADLMRARHRLSKLLLRHGIVYYGGRAWTGRHERWLRAQRFELPGTRVAFEEAFDAVLSVSARRDRLDEAITVTAAAPQWAPVVSRLCAVRGIATLTGLGLAVEIGDWDRFTGASIGAYLGLVPSESSSGNSRSQGPITKTGNTHARRLLVEAAWHHQKPLRAPSKALAARRAGLSPPARARGEAADRRLHHRWSTLAARKKRPTVIAVAVARELAGWCWSLATLKD

SEQ ID NO: 338430 - protein, 352 aa, unidentified
MVVAVQYRRPSLNKNVMVQIYGIDLGMSSFDVSFLSESGSVRHLSGVKNTVHGISKFLLSLPSSAVLCAEHTGVYGDLLLRLCTLNRICLCFVPGYQIKHSLGLQRGKSDPLDACRIREYAERFYDLLRPCFYPGEEMSELQELYRTRSLLVESRKRLDTLSIGDNCKSSVSLAADHARRAVLAELNTQISGLDHEIEALIQNSSEFSRNYQILTSIVGVGPVTSCELIIKTENFRKLDTAKKCAAYAGIAPYPKESGKMKCGHKISPMGDKQLKTLLFLCARSAKEHNKEIRLYFLKKHKVEKKHFFVAMNNIANKLLRLIYSLIQKQQTYDRDYIQRDPRCVVISDTNKC

SEQ ID NO: 338431 - protein, 432 aa, unidentified
MGARRAYRAKSVKQVNWELMCVGHEGQAVHIGLDVGKQEVLAVVRWADGRFERPWLVKNPDEIGEFVGLLSRVNSERRSVTAMEPTGTYGDALRQALSDAGLRVDRVGAKAAHDYAEIFDGVPSQHDGKDAAVVAELAALGKSVEWSYKAARERDQELAYHVDWMDAQRRQYAMWLGRLEGLLARHWPEATRWLDLSSATLLRALKRYGGPAALAGDENAAAELQRWGGAQLAAEKIRGLVQSARASMGVRQTATDVRRMQQYTEQALAARAEIAKSQRCLRDLMQEMPAIQAQAQAVGVATACVLWVHLGDPAEYHCGAAYRKAMGLNLVEHSSGMYQGKLRISKRGSAQVRRWLYLAVLRLASKGPVQRWYQQKKSKDGNGAKRALIGVMRKLALALYEVGAKGQTFDARRLFPGVPIARTKVLAETVAP

SEQ ID NO: 338432 - protein, 344 aa, unidentified
MTYYAALDVSLRSVAICIIDEEGTVCLERAVPSEVADIVTCLRGFDHGIDVVGFEAGTLSQVLAHGLGSDGFEVVCLEARQVNAALSAMRNKTDRNDARGIAQILRTGWYSRVHVKSRDSHYTRALLSSRKAVLRKCIDLENEIRGLFKIFGIKLPASLGHGPFDARVRPLIEEDVRLAEALLPLLDARLVLYRTYLVLDRRIKLAARNDAVCRQLMTVPGVGPVTAMTFKAAVDDPYRFRRSRTVGAHFGLTPRRYQSGEHDNPGRISKAGDGDVRTVLYAAANALMSRTQRWSSLKAWGMRLQRTRGRRRALVAVARKLAVIMHRMWIDGSKFQWGKEAAAQ

SEQ ID NO: 338433 - protein, 293 aa, unidentified
MKLYSGIDLHSTNSYLAIIDESGKRIFKEKLPNEIATITEKLSLYSGTLEGVVVESTYNWYWLVDGLMAEGFTVHLANPSAIQKYSGLKHVDDKHDAFWLAEMLRLNILPEGYIYPKEERPIRDLLRKRSHLVNLRSSLLISLQNIITRNCGAKMKTNDIRRLRENRVQPLLAGNEDLALAGQVSKDSIDFLTRQIRTIETFIEKKLELRDAYQNLVTIPGIGKILGLTIMLETGPVERFEKVGNYASYCRAVSSQWTSNGKTKGKGNKKNGNKYLCWAFSEAAEFARRFDKA

SEQ ID NO: 338434 - protein, 409 aa, unidentified
MDVIYPHCCGIDVHKREVVACVVATDADGTPSKLIRAFGTMTLDVLALADWLASHGVTHIAMESTGVYWKPIYNLLEDQFTLLLVNARHVKAVPGRKTDVRDCEWLAELLRHGLLTGSFVPDRPQRELRELTRYRTSLVRERTAAANRLQKTLEGANIKLASVATDILGTSGREMLAALVAGRTDATELAQLAHGRLREKLPQLERALVGCVGPHQRFLVAEQLAHVDFLDAAIARVSTEIGERVRPDEEVLARLDTIPGVGRAVAETLVAEVGADLTRFPSAKHLASWAGLCPGNHESAGKRRGGAIRKGSPWLRACLVQAAHAAARTKGTYLAAQYRRLAARRGRAKAAVAVAHSLLIIAYHLLMEGTVYRDLGANYFDERDRQAVERRLVHRLEGLGYTVSLQPAA

SEQ ID NO: 338435 - protein, 338 aa, unidentified
MATIRVTVSRGGYRALLQFASRWPDPTWAIEGATGLGAPLTARLRADGMDVVDVPAKLAARVRMLSTGHGRKNDDADAFSVGVAARSARTLTSVTVEGTVTALRAIVKHRDDLVKTRTQTVNRLHVVLTNLVPAGAQRELTANKAAELLRGTRPRDAAGKTLRGLAADLVTEIRHLDRRITKAATDIETAVTASGTTLAELSGIGALTAGTILGRVGSISRFRSAAAFATYTGTAPIDVSSGDVVRHRLSRAGDRQLNRCLHVMALTQIRLDTPGRTYYLRKRTDGKGHKEAMRCLKRRLSDVVYRQLRSDANRREAGPGGHSGAALKSSAASSNPAR

SEQ ID NO: 338436 - protein, 314 aa, unidentified
MYYYIGIDVSKKVLNIFDGKNDLIFDNKENLSSFKKYLKKRYPDFSSLVILFEATGIYSYHLKAFCATHMIKAYIINPQASHNFAKSLGTRSKTDTRDARTIWAYHRLINDKDIRIPKVDPIAATLSSYLTSYRLTLKQKLALTNHLEGIKDKALYHLLKKEQERLCKLEHELLIRMDTYIKQYPKLNEDYQRLLSISGIGQKTAISLLTLFHAYPDTNRNQITALIGLDPIQRQSGTSVHGRSRISKHGNQMMRKSLYMPTLSSIKYNQKIKVFYDRLVLKHKPKKVAVIAAMRKLLLIAHAVYKNKTVYVPG

SEQ ID NO: 338437 - protein, 323 aa, unidentified
MTVYLGIDIASKKFDAAELCDGVYRCKAFENTPAGFTALSKWLQAGNIPDIHVCLEATGNYGTALATFLYKKNLKVSIVNPARIKGFAASELTRTKTDKADSRLIARFCKAMQPDQWKPVAAPVRKLQALVRRIDALNGMLRMECNRRENADIDTQDSVERMINHLKMELEAVRRQIKDHISNDPELKRQDDLLQSIPGIGSISSSLVLSFMASKEFRTAREVTAFLGLNPRHHQSGSSVRGKTRMSKMGDARLRCALSMPALVALKHNPDIRIFGQRLLTGGKPKMLVVGAVMRKLIHIIFGVLKSGTAFSSRVEVKATVNQ

SEQ ID NO: 338438 - protein, 649 aa, unidentified
MRRELAEWAEQAHQLSQRRVAGLIPVDRATLRYEHHRDPQDALRVRLRELAGSRVRYGYRRLTVLLKREGWEVNAKRIYRLYTEEGLIVRTQKRRERAQRQRIAQGLAVRPNQRWSMDFGAQRLPDGRWIRVLTVVDQFTRECLTLHADTALSGEKVAMALSKIVGIRGAPQSITVDNGTEFSSKAMDLWAYTNGVHLDFIRPGRPVENGYIESFNGRLRDECLNVEVFFNLADARRKLALWRHDYNHHRPHSALADRTPSEFAAICSGGKDDDEAALGNAARFPLLEWSAASFTRRIILVSMRRLVMEISTLGIDLSKTTFHVIGFDARGEIVLRRKFSRKQLLQFTSNRQQMLIGLEACGGAHFLGRALQAQGHDARLMPAQFVKPFRKSNKNDYLDAEAIAEAVQRPTMRFVPIKTDDQLDLQALHRVRDRWVARRTAVMNQIRGFLMERGITIRKGPSHLTTQLQGILEDADSLLSGRLRLLVFELKHEWDELDKRIENSNAELQRIAKQDDACHRLMEIPGFGPLVSTALVAAIGNGITFRKSRDLSAWLGLVPRQHSTGGKTRLLGISKRGNEYLRRMFLHGARSVVAQIGRNPSALGLWLSDLSARSHRNVTVVALANKMARTAWAILSRGTHYCAPSLAAA

SEQ ID NO: 338439 - protein, 316 aa, unidentified
MDDQLKKVFIGIDVSKKTLDVACDRGSFSAQFSNDEAGYPKLIDAISQLAPSLVVLEATGGFETAAVGAMVSAQLPVVVVNPRQARDFAKAIGLLAKTDQVDALMLARFAQAVSPQLRPFKSEETRELEAVLTRRRQLVDMVTAEQNRKLMAPVRIAKEIDLHVQWLRQRIKGADTDLGNAIKSSPLWQAKADLLASVPGIGPVTMVTLLAELPELGTLDRRAICALVGVCPFNRDSGKFRGKRRIWGGRASVRATLYMATLVATRHNPVIKQFYQKLLGGGKLKKVALVACMRKLLVTLNAILQTNTTWSPTHFT

SEQ ID NO: 338440 - protein, 421 aa, unidentified
MEVVSTRCAGLDVHRSVIVACTLLGEGRGRVRKVSGQFPTTRSGLERLLGWLRERGVSHVGMESTGVYWMPIYAVLEQAGGFKLIVVNAQHAKAIKGRKTDVKDAEWLAELVRHGLVQGSFVPPRPIRQLRDLTRYRRTLVENQASERRRLIKLLEMADIKLAGVISDIFGVSGRAILRALIAGDQTAVAMSQLARGSLRRKRRQLIEALAGELAAHQRQMLALQLARVEADEADIAALDRQIDEHLAPYAAPMARLMTIPGIDWVVAATIVAEIGVDMSVFPSAGHLAAWAGACPANHESAGKRRPAGARTGNPYLKTALCNAAVAAARKRGSFFKAKYHKLKSRRGGGRAALAIAHKLLVCVYHMLSTNSPYRELGEDYLDRRDTQRAARRYVSRLRDLGFSVLIQPLSVPQPAPADGL

SEQ ID NO: 338441 - protein, 339 aa, unidentified
MENLLCGIDFHKNKTEICMKDFRGKILKQDRIETKRIGEYFSNLPHMKLAIEASSGVTYTARQLREAGHEVEVVDPQSFRMTGLKGKKNDKRDSEALADYLRMGLKMGVYVKPEVAVQSLSLIKHREILMQSRIKLTNHVRGILRDFGYSIPQGRSAFMMGVKSIIDESDNELLVKQLKIMLEIIVGLLEKEICFEKEVEKLCKEIPQTKKLMTIPGVGVLTSMAFLFTLVDWSRFKDGHRVSSYLGLVPREYSSGDKKRFGRITKSGSSLVRKLLVHGARTRLFLEKGNDKDPVMIWARGIEQRRGKSRALIALASKTARIMYAMLRDDTVYSYRKTA

SEQ ID NO: 338442 - protein, 459 aa, unidentified
MNRKQRREMMRKMQSEDLSLEVVHPHAAGIDIGNQSHYVAVPVSLDPQPVRCFGCTTAELKKMGEWLTQCGIRTVAPQSTGVYWIAVYDILEEAGLELYLVNARETKNLPGRKTDVQESQWLMKLHTYGLLRNSFRPSQEIRTLRTYWRQRQDLVRSSGRHIQRMQKALTQMNIQLANAISDLSGVTGQAILKAILNGERDPRELAAYRDCRIEASEEEIAQALEGNWQADQLFVLRQEQAGYEFCQKQITECDQQLAHYLAQLQDRTQGATLPEETRKGRRKKKKGNPQFNLREELFRMTGTDLTQIDGIDVMAAMTVVSEVGWDMSKWKTENHFVSWLKLSPDNRISGGKIIGKGRMPTNNRATTVLRMAASTLLTSESYLGAQFRRFRTRLGPPVATKAMAAKLARLLYRMLRYGMKYVDQGAQFYEAQHRKQQVIHLKRKAAQLGLQIIELAPAA

SEQ ID NO: 338443 - protein, 416 aa, unidentified
MIHPKMKHVYVGVDSHKETHTAVVLNCFFEKLGELTFNNAPSEFEGAIKELGKFKLQGTDLAFGLEDVTAYGRSLTVFLTGKKLVVKHTNAALVAAERKSLNVVEKTDSVDAECAGRVLLNRFDKLPDADPQDKYWVMQNLVVRRRSIVKMNMNLKNHLHSFITGHYPSYHKFFENIDCKTALVFYEKYPSPSNLQGTTVEELAQLLEENSNKRLRIEKARQILDCVKRDGETKVAYQESRDLAVRSTIRQINFNLKEIESIDNILESFLENFDYKLESMRGIDTVTAAELIAEIGDISKFSTPAKLARYSGVAPVTYSSGKTDVQYSNQRGNRTLNSIFFRLAVMETMNTGKHKRLVNPIFYEYYQKKISEGKTKKQALKCVQRRLVNIIWGMMTHKVEYINPPTEILKPLENVV

SEQ ID NO: 338444 - protein, 352 aa, unidentified
MRRPKHQVTSGEDLFVGIDLHKNRWHITIRTVDLELFSASIPGTWESLQRILARYAGHQLQAVYEAGYFGFRLHDRLVAHGIPCLVTPPSLVPQEYGNRVKTDRRDSSKLAHLLAKGMLKRVWVPSEEELYHRQVIRRRRQLVRDRVRTQSRIKAELRFYGIQLEEPRGRWTQIYFETLRRLRFGNRWRQESFNRLLEQYEFLSVQIDKQTQLLRELSETERYRERVEILQSIPGIGVISAMELLLELQDVSRFRRAEQLAAYVGLTPSQYSSADKVRMGRITGIGKNTLRSILVEASWTLIRKDQAMREKYDRIKIHSGGKRAIVAIARTLLLRMRRMLLDGQVYALQRAA

SEQ ID NO: 338445 - protein, 454 aa, unidentified
MTLIYRRCAGMDVHQKSISVCARIRSARNTFTTEAAVFGTFTRDLENMARWLRERKIRHVAMESTGVYWKPVWNVLEAGKRGFSLVLVNPQHIKALPGRKTDQQDAERIATFLQEGLLRGSFVPPQPVRELRELTRRRTHLQGDRNRVINRIGRLLETVNIKLGSVLSNIVGQSGRAILNAIVAGETAAGDLATYTSSRVKHSREEFEMALEGRYSEHLRWLLGQLLEELDHLDRRVALVDLRIGHLTQSHTDLIARLCTLPGVDITTAHIILAEIGTDMSQFPDARHLASWAGLCPGNSESAGKRFSGRTRKGDRYLRRVLVQNAWAVAHTKNCALTAFFHRIAARGGMKKAAVAVAHRILTLAYYIIRDGSIYTEAGGDIYDRRNPERTAKRLARRLQRIGYEVTITPVVRTIRAPQGLPLPGQTCAKCNAWGIACIHVRPRKTNARKKSSR

SEQ ID NO: 338446 - protein, 321 aa, unidentified
MESEVMVGVDVSQARLDVGWWPGGESFTLDNTSAGVEQLLARMRELDPRAVIVESSGGPEDLLVSELHAAGVPVAVVNPRQVREFARSLGKLAKNDRQDALVLAQFGHSARQHGRLILTELRPEADLELKALVRRRRQVIEMLVAESNRRLRASKVVKKSIVATIRGLKRALAELEQQLHETVKNTPAQEKKVAILQQVPGIGERLAHTIVAEVPELGKLGRRQIAALIGVAPYAHESGKFKGRRMIWGGRRAVRNTFYMAMLSATRYNPLLAPFYRRLVERGKSKKLAYIACARKLLVILNAMFRDHTRWDPQLAFQHSR

SEQ ID NO: 338447 - protein, 390 aa, unidentified
MCVVDADGRIVEGRRFRHDERGIGALCDRLIELEVLLVAIERPDGLVTERLLDVGLAVIAIHPNQVTAMRPRFSAAGGKGDNFDAFVLAELARTDSHRFRVLTPDSDATKALRALTRAREDLVEHRVALANALRAQLEAFWPGATRIFADIDSPVALAFLRRSPSPADARGLGEQRLGRFLARHHYCGRRSASELLGRLRGAADGRAAPLESEARRQIVLTLVAALEPIVQQIAELTAEIRGALADHADGQTFRSLFCDPKTAICPATILAEMGDCRERYPTIAALAADGGQAPVAVESGKSKRARFRWACDHRLRDAIATMADASRHHNPWANDISARARARARGCSHPHAIRILGRAWSGVLWRLWQDSDVYDPARHGALQRLITQEG

SEQ ID NO: 338448 - protein, 390 aa, unidentified
MFYFIGIDIAKFKHTACVLDQNGASCVEPFDFSNDSIGYNILWEVIKPYVGKEHRVGMEDTGHYADNLRMFLLDKGCTVCMINPLTSTHLRKAEGLAKNDRLDSTVIAGILMNPRLFRSVTKENFNYLTLRQYTRLHHKRTEEMSRYKVQLQKDIDHVFPEYNSIFPTAYSKTYIAVLKEFQSAATIAHTDIRRLRSVMNPKSRGKIISLSAEDLKAAAQKSVGRPDVAIEMEIVHLISFIELIESSLAEVDKKIEEFSKTLNSPILAISGISDFSAMSIISELGDISRFRNEKCVIKFAGVNPTVYESGTYSMTHTRLEKKGSKYLRRTLYQIIDSVIRCNTVFKAFYDKKISQGKSYRCAQGHCVRKLLRVLYKILSTNCRFDPALLR

SEQ ID NO: 338449 - protein, 351 aa, unidentified
MPRRSTVRAITTIGIDMGKNTLHMVGLDSRGAIVLRERVSRGRITSRLANLPPCLIGIEAGMATHYVARELAALGHDVKQVPPAYAKPFRQGHKNDFRDAHAVAEAVQRPTTRFVPPKSNEQLDLQALHRVRSRLVSERTAVINQIRGFLLERGIIVRQGLRFLRQFLPDILAKRTDVLSARMVRIVSDLAGDWRQLDDRIETVTDEIETLAKADDSCRRVMTVPGIGPIISSAMVAAIGNGSAFSRGRDYSAWLGLVPKQMSTGDRTILGRISKRGNSYLRMLFIQAARVILLRPANWPKHGFGAWLVRAIQRLHPNVLAAALANKLARIAWTVLAQERSYEARVTKAEA

SEQ ID NO: 338450 - protein, 331 aa, unidentified
MNQVGVDISNEVFDVTMQHGSGVVRKQFSNTKTGHRQFIRWALYQANSARVCLEATGIYHLQLALALDRHPDIEVMIVNPCAARRFAQAHMVRAKTDAVDADGLLQFIQRMAFQPWSAPREELLQLQSLAHRVAQLDKEVIRERSRLHAARRAGPHTRPVQQDIQAHIAQLQRRLERMRSRAYRVVNNDPQLADDARIVKTAPGFAELSATKLLAELSSLPDDMAPAQWVAHAGLDPRPCESGSSQRSPRRISKQGNVRIRRALFMPALVAIQRDVNVSAFYEKLLANGKAKLQAITAVMRKLLHALWGMLHHRQEWDGEKFYCLNQPITA

SEQ ID NO: 338451 - protein, 339 aa, unidentified
MKLYAGIDLHSNNNYLAVSDEEDRRLFQKRLLNRPEVILAALEPYRAELVGIVVESTFNWYWLADLLLDHGYRVHLANPAAIQKDKGLKHSDDKHDAFWLARLLRLGILAEGYIYPKEMRPIRDLLRKRGHLVRLRTALINSLQGIINRNCGCHLTGNKIKQVREDHVAPLLAANEDLALSGMVSKDCIDYLTRKIREIERSVEARLEVQAPFAGLQAIPGVGKILALTIMLETGAISRFAKVGNYSSYCRKVPTAWLSNGKKKGHGNSKNGNKYLAWAFSEAAELTRRFDQAARAFYNRKAAKKNFMVAHSALAHKLCRAAYFIIRDGVVYDPGKLFS

SEQ ID NO: 338452 - protein, 323 aa, unidentified
MTVYLGIDIASKKFDVAELCDGNYRCKAFENTSAGFLALYKWLGQSTMPDIHACLEATGDYGTSLATFLYENKIKVSVVNPARIKGFGASELSRTKTDKADSKLIARFCKAAVPDGWKPTPAPVRKLQALVRRISALNGMLRMECNRRENADANIQASLDRIISLLKTEIEVVRQEIKDHVRSDDELKKQDALIQSVPGIGEVSSNLILSFMSGKGFRKAKEVTAYLGLNPRHHQSGSSVRGKTRMSKMGDTRLRSALYMPALVALRYNPDIKAFGQRLLLAGKPRMLVVGAVMRKLIHIVFGVLKSGTAFSSRIAAHSVVTS

SEQ ID NO: 338453 - protein, 344 aa, unidentified
MMTVGMDIHSDKTVCDFFDPTADPKRQHRTVTVSTTQEGLESVLRPLKGQCRVAFEVGTQAQWVARIIRPLAAEVQVANPSRIPWLFRDGRKNDKLDARKLSTLLSLNQLPTVHLPSADVSAWRALINHRRTLVRRRTMIKNQIRAILRTFAYRCPYRSCWTRVGRVWLHSLMFDAIRHEMVQSLLDELAFVSNQVRRAEARLDAIAVTQPNVALLRTIPGIGPRTAEAVVAFADQIKRFGNRRQFASYFGMTPTEDSSGRIHRHGHISKRGPSVVRWVLIEAVHQAIRRSAALRSYFDRLHRGRRDRYKKVIVATGRKVLTIMFAMMRDQTSFSEDRVSSQAA

SEQ ID NO: 338454 - protein, 340 aa, unidentified
MERATTIGLDLAKSVFQVHGIDAAGGVVLRRKLRRPELLEFFAALPSALVGMEACGGAHYWARELTRLGHTVRLMPPAYVKPYVKRGKTDAADAEAICEAVTRPTMRFVPAKTAAQQASLVELRVRDMLVRQRTQTINALRSHLAEYGIVAAQGRKVSELIAVVRDDDDARLPGLAREALGELVGQLEALEQRIARLDSRMVRHAREDETARRLASIPGIGAIGATALAALVCHPHGFASARHFAASLGLTPKPHSSGGKERLGRISKQGNPMLRRLLVLGATSRLRHARRSPDAADWATRLLARRPFKVAVVALANKMARIAWALLVRGGTYTTAATAA

SEQ ID NO: 338455 - protein, 348 aa, unidentified
MRFYSQAHRFYCGVDLHTRTLSLCVLDAAGAIALEATLPPDPDRLLAVLAPYRDGLVVGCECLFAWYWLADLCAEQGIPFVLGHALYLKAIHGGKTKTDTIDAQKLARLLRGGTFAEAYVYPKAMRATRDLLRRRTYLVRKRAELLAHLQMTFLQYNLAPPAQKLCYAANRAGLDLSVFADPSTRSMLAADLAIVTALDQQIKRLEAELVRTAKVHDPQAFHRLRTVPGIGPVLALILLYEVQSIDRFADEGRFLAYARLVGGVRESAGKTKGTGGRKIGNAHLKWAFGEAACLLLRELPKAKTWLARRERKVGKKRALGALAARLGRTVYHLWRKKEAFDVNRFLAS

SEQ ID NO: 338456 - protein, 360 aa, unidentified
MKTRLSNKQKWFNKINLTSDDELYVGIDVHKKSYHLAFWLNDAPAIDFVMPSDNKKVAQILQKFRNAIMLIVYEAGPTGYSLARQLKDSNLPVKITAPSMTPRQAAPQSKTDSLDCKKLAKYAAKGILKYVTIPTKQQEADRQLTRLRQQIVEKLKRIKIQIKSFLLQHGIEQPKGLVSWSLPAIQRLKRLQLSKHLRFCLDMMLEQLLFVTTQLKDAEKTIKEAFNKGPLATKTKILITHPGVGPVIANQFCTEIFNPKRFKDKTELAKYVGLAPSVRQSGQTLRDGPILKTGRPQLRSNLIQGAWAWVAKDPHARKTFYKLVHNTGHKNKAITAMARKLAIHLWKMASENKPYCPQQD

SEQ ID NO: 338457 - protein, 348 aa, unidentified
MQSTAQLPVIGMDIAKNVFQLHIVDVETGEIQRRKLKRAKVAEFFANRQPSLVAIEACGGAHHWARTLQAKGHEVKLLPAKHVRAFVLRDKTDALDAQAIWVAAQQPHIREVPVKSEQQQACLSLHRMRAQLMKMRIMQTNALRGLLYEFGIVLPEGHNKLLQSIQGELAKAQQENRLCDVVVLSVQEQLTRINAMQDDIDRLDKRLAAMVRQNQHMLAVQAIPGIGPLTATALVATVADLSTFKSGRQFAAWLGLTPPQVGTGGKTQQLGISKRGDTYLRTLLVHGARAVVGRSAHNSWLERLLQRRHFNVVVAALANKMARTAWAVLAKGKAFDQVKWNPTEAAAT

SEQ ID NO: 338458 - protein, 391 aa, unidentified
MDKGWVGIDAGKGFHWAVVLDADGEILLSRRVENEEADLWALVEETLGFGLELTWAIDQPGGAVALFLALLWDRNQRVLYVPGIAVDRARDAHRGESKTDARDARLIADQARMRRDLSALVPGDELLAELALLVARRRDLVTDRTRTITRLRDVLLALFPGLERALDLGDKGPLLLVARYQTSRAVRGAGRKRVEAYLKKQGVRGAAKLAEKAIVAAKKQSVNLPAESVAAEIVAGLAREALVLKERIVELDRALERRFLTHPLAEILVSLPGMGTLLGAELLVAVGDPRDAFTDAGRLAAYAGLVPAARDSGKRTGNNRRMRGGNKMLKRVFYQSAFASLRTPASRAFYNRKRKEGKRHTQALIALARRRVDVLWAMIRDEERFNPPVTA

SEQ ID NO: 338459 - protein, 389 aa, unidentified
MLLDHPSDGPAAIRTQFGAIFVSLELSRSNWLITSLSPGKGEKMSKHSVAAGDVAGLMKQFADLRRKAEARTGESYPIITIQEAGLDGFWLHRVLQQNGIESHVVDPASIATPRRRRRVKTDRLDGEALLRALLAYKRGEPRVCAMVVAPSPEEEDRRRICRERQSLIAERITHVNRIKGLLFAQGISGYEPLRRDRRARLEALRTGDGRELPAHLKAQIGRELDRIELLLEQVKAVEAERDALLVAARKPASEEAAPDAVTLLLALKGMGANFAAVLWSEAFYRQFSNRRQVAAYAGLAATPWQSGGIRHEQGVSRAGNPRLRTTMIQIAWLWIRHQPQSALTRWFKERSPQGRKRAIVALARKLLVALWKYVTQGVVIEGAVMKPAA

SEQ ID NO: 338460 - protein, 402 aa, unidentified
MWYVGLDWSDTHHDVAVLDEAGYRVGKERFAHSAQGLQRLKHFLLKMASNPEQLACIVETSHGLLISFLLEAGIPVYPVNPKVANHLRKVAGAKTDPIDASLLAKWGRFELTELRRLEPDSPKVAELKTLTRDQDALVQMQTRLVNQLTACLKDYYPVILQLFSKLHQPSTLQFLQAYPTPEAARQASVEQITATLRQSRFPHPAQAAIRMVEELHRPHLVASAVTVRTKSRLMLALVKQLQVVIEELAGYEKEIASLFLTHKDQAIWSSLPRAGSRLAPRLLAEWGDDRSRYASAQSVQELAGTAPVPYQSGNYAKAHKRFACVKPWRNDLYQFAWQSTLSEPWAAAYYHRKLAEGKTHSMALRALANIWVRIMYRMWVSETGYQAATFEAAQRAHARSLA

SEQ ID NO: 338461 - protein, 349 aa, unidentified
MIVIGVDTHKRSHTLVAVDAVTGGVLGERTVLANDEGALAAVRLVSALGDERVWAIEDCRHVSGRFERSLVAAGERVIRIPPALTANSRRSAREPGKSDRIDALAIAHAALREGVERFPPAFLDEQAMEIRLLCDYREQLVVERTRLMQTLRWHLVALDPELEASLRPAGLIGPRIRARVARRLAKLGNGAQARVAKAILTRISQIRRQELALEAELKTLVAAHSPQLLAQHGCGTITAAILVGHTAGAANFPTDASFARHTGTAPIPASSGNTTRHRLHRGGDRQLNRALHIIALSRARTDPHTRAYLDRRAAEGKTKREALRCLKRHLARHFWKLLYKPANSEPTLT

SEQ ID NO: 338462 - protein, 436 aa, unidentified
MRGCRCSMIMGFTKPIEHFNLQRKKVITMNTLYVGIDVSSKSNVVYLMLPNGDKHSNFSVANSHEGSTLLVKKIYSALTSHSLDTVLIGLEATSVYGDNLVYFLREDATLAPFNRKIHVLNPKQVKKFHDAYNDLPKNDYVDSFVIADCLRFGRINKEVYMGEYRYKALQNLTRARFFAVQNLVKEKQRFMNVLFKKYSTMTQEKVFSDDFSTTALAVYDEFESAEALANMDLHELTDFIIEKGKNRFPDPDAVAKAIQKAARSSYRLPKTVNDSVNQVLSISITSMKALESQIKEFDKAIKALMELLPNVSISIPGIGPVYSAGIMAEIGDINRFDNQASLAKYAGLAWKQHQSGGFEAEVTRLIPSGNRFLKYYLCEAAFSLVRCDKKYSDFYHLKYKEVNRCQHKRALALTARKFVRLVFRLLKDNRLYCPAK

SEQ ID NO: 338463 - protein, 348 aa, unidentified
MECTTVAVDLAKDVIEVAVAGPGGRITERHRLGRRDFSQFLATRPRCSMVMEACGGAHHWARTAKTCGHDVRLIPAQYVRPYCRRNKTDRADCSAILEASKNHEILSVAVKSVDQQVIQGLHRLRSQWQATRTARINAARGLLRELGIVIPKGAVTALKRIPDALADEAVPPILRDGVHEVLAEIHQLEERIAGIERQLECLSRNDPAITRLRQVSGIGLLTATALSASAVDATHFRSGRHLASWLGLTPREHSSGNTRHLGGVSKRGDVYVRMLLTHGARSVLARARQLQASNPESLNRLHRWALDLSERRGFNKATSALANKLARIAWATWRYQRDFDPNHAAIAA

SEQ ID NO: 338464 - protein, 354 aa, unidentified
MSQKLNQETGQQPEEQSEKRIWQWFGVDVSKDSFTVAFYDGLSDATSEVLKFASTPKGVKSFLSWRKKHASKIIPSGIVMESTGYYSARLAALMRKLDRSLRVSICNARSASYYIKSHSANKTDPSDARLIARYGYDFQPAELKVKSSEERLLHELVSERGKLVKIMTMLTNKAKSLEFSEIMEINKSVIGHLKEKIKELDQRIVEASQQSEEMNAEIKLMDTVPGVARLSAAVIYGTLGSLKQYTRLQLSALSGLYPKISQSGSSPIRSKLSKNGPSYLRQILYLDATQAMKKIPTLRNLRERLLARENSRKMTARCACMRKLLLIIKGVVDSGIPYDPNFQQKKQEISKKTA

SEQ ID NO: 338465 - protein, 433 aa, unidentified
MEIMHKRGAGLDVHKETVVACVRLMVGRKPTRECRTFATTTGGLLALLAWLTESRVRHVAMEATEVYWRPVWNILSDGPFELILANAAPIKQVPGRKTDINDAMWIADLLACGLIKASFVPADDIQERRGLMRTRKQLVREQTRHVQRLEKTLEEANIKLGAMISVLMGVSGRRMIEAMIATGPARGLKAHAERNPHRLAALAERTIKASPKELDDALHGRLREHHRFLLQLHLQQWDALDAAIREIDRQVTGRIERMDQEADDGPPPFRELIFRLSAIPGVSFLSATAILAEIGRDRGRFPTAGHLVAWAGLCPAHNGRAGKRKSARRRRGAPWLKTMLVQCAWAAKRAKASYYRAQFFRRQSRRGPQKAICAVAASILTAIYHMLKSGLPHRDLGANYFDRRSPQAKASRLVSQLAKLGFAAQLQPLADAT

SEQ ID NO: 338466 - protein, 362 aa, unidentified
MLKSTTIIAFDQHAATTVAAVLLPGQRTPALHTLTSDVPTILRFVERLRRQGPIVCCYEAGPCGFELQRALVGRDVPCDVIAPALIPRRPGDRIKTDRRDAAQLAILYRAGALTPIHIPTEQEEAARDLLRCREDIRADLLRARHRLSKFLLRHGRRFTGTKKAWSQRHGAWLRTQTWPLPALEQTHAAYLRTVDEAGARLATVEQDLRALLDLEPLRARVQRLRCFRGIDDLTALTMAAELGDPGRFPTAPSTMAYVGLVPSEHSSGTKRARGAITKTGNAHLRRVLVEAAWHYRHKPFIGAALRRRQRGAPEAAIARAWTAQQRLYRRYQRLAARGKPSQQVTTAVARELTGFVWAVLTQ

SEQ ID NO: 338467 - protein, 340 aa, unidentified
MKHSIYGVDLAKSVFQIYWVDQETGEIFNKPIKRAKFLEFFSNLTPSLVGMEACGGSQHWARRLSSMGHDVKLMAGKAVKAFVMGNKNDAADARAIWMAVQQPNVKACAIKTESQQAVLALHRMRQQLVKFRTMQINGLRGLLTEYGEVMAIGRAALAKSLPEVLANLAERLPAVLIDTLREQWNMVGKLDQQIAEIERRLDAWMKQDPSCLRIATIPGVGLLTATAAIATMGNAKAFKSGREFAAWLGLVPAQTGTGGKVRLLGISKRGDTYLRTLLIHGARGNLTRVKEPTAWLQGISQRRPKNVVTVALANKMARTIWALLAHERDYDAAFVSAKVN

SEQ ID NO: 338468 - protein, 338 aa, unidentified
MKLYAGIDLHSNNSMVVVIDEQDRVMYEKRLGNELERILLALASFKQWFVGVVVESTYNWYWLVDGLMEAGYNVHLAHTAALVQYQGLKHSADQHDARWLGHLLRLGILHEGYIYPRESRAVRDLMRRRMQLVQTRSAQITCIQTQFARTTASSPSGDAIKRMQPEDVEALLTDVNVASGVRANLEVVRTLNGEIRRLECEILDQVKLATQFMPLLSIPGVGRILALAIMLESGAIERFAKVGNFSSYARCVDSKRLSNDKKKGEGNRKSGNKYLAWAFVEAAHFAVRYNPRIKRFYERKAAKTNKLVASKAVAHKLARAAYHVMRARMPFDEARAFS

SEQ ID NO: 338469 - protein, 377 aa, unidentified
MKRIKFVGLDVHAETIAVAVAEQDGEVRSLGVIPNREESIRKLVKKLGPVEQLRFCYEAGPTGYVVYWQLTALGAKCEVVAPTLVPVKSGERVKTDRRDALKLARNYRAGELTAVWVPDAAHEALRDLVRAREAAKKDQLRAKHRLSKFLLRHGWRPASGVKAWTLNYLAWVKKEVHFEQPAQEATLLDYLHEVEHAEARIARLDLAIEEAVKSTPPKMRAVIEALQALRGIAQVAAVTIVAELGEISRFPGARQLMGYGGIVASEHSSGESTRRGGITKTGNAHLRRVVVEAAWACRHRPNVGGALRKRQELVSEEVREIAWKAQHRLHTRYRKLTARGKDKGKVVTAIGRELLGFIWAIGVKVEAAQKETERRAA

SEQ ID NO: 338470 - protein, 404 aa, unidentified
MIFVGVDWAEAHHDICVLNEAGEVLARKKIPDSLAGVRALHELLAPHADEPGQVIVGIEKDSGLLVTAMLGAKYRVYGLNPMSVARYRERHVTSGSKSDPGDAKVLADLVRTDRHNHRETSGDSDDAEAVQVLARAHQRAIWNRQREANALRSALKDYYPGALDAFGTDLDDRDAVEVLAIAPTPALGAALSLSKITSALRRGGRERNLERTAKKIQAALREEQMRERPKVELAYGTIASAHVAMIRAYNAEIEQLEAALTKDFEQHPDAKIIRSLPGLGMVLGARVLGEFGDDPNRYADAKSRRNYAGTSPVTRASGRSKVVLARHSRNRHLADAADQWAFCSLTRSPGARAYYDELRGRGKNHRKAIRQLANRWVGILHACLEQRVIYDEQLAWKHRVDLAA

SEQ ID NO: 338471 - protein, 587 aa, unidentified
MLPSSASASQPFRRVGVGIDTSRYGHYACFLGDDLQPAAAELSFAESAAGYAQLRQRLEQIAERHGPVQFVIRLDAAGQYADNLLHFLYGLAAPDAETTRLAVSISCGDPQRNKNYRAALYGSKKSDPIEARACARYALSERPMSVKPMSAELRTLRQVAGRLQAVVRQRTRLINQLHHLLALSFPELALLVKDIAVGWVLELLHRYPTAPLLAAASVAEVENIPYLPHRHIDALCQHARTSIASLTNTTVAELVRDQVRQLRDCKARQKRLENLLVSAYHTLPQKNYLDTIPGLGDVTAAVLTAFILDIDRFETPGKLVAYFGVLPIEAASGVDRDGQPRGPKRYVMSRRGNDLVRRYLWMAGLCAVQHNPAVRALYARVVAKHPDKKAIAIGHAMRKLLHLAFAGWKTRKPFDPQHYPWGEKSEAHSQESADEKGSDMAMSQEEQTASLKSPAQPVRKEVAAACPATIAETPLAGEGVFIDFTHLKKQLTMAQVLDQLGSLARLKGSGPQRKGPCPLHRGDGRGKTFSVNLDKNVFQCFAVGCGQKGDVIDLWASVNAMSLRQAAIDLVRTFHLEPAPQQRRGHG

SEQ ID NO: 338472 - protein, 456 aa, unidentified
MARRSKAKGTRRRTKLHIIYTRAAGIDVGSTFHVVAVPPELSAEPVQTFQSFTGDLYRLATWLVEIGVTTVAMESTGIYWIPVFDILEAHGLEVLLVNAQHVKTVPGRKTDVNDAQWLQQLHTYGLLRGSFHPAQDWSALRVYLRHRERLVEYAAAHIQHMQKALMQMNLQLHHVLSDITGTTGMKIMRAIVAGQHDPAVLATSRDARCKASEETIRAALTGHYRREHVFALRQALELYDSYQARIEACDQEIQSTLASLQNEEIAIDTLPAARHKKRQSHEPLFDVREALFRVLGVDLSQIDGFSAYTALKLVGECGMDMSRWPTEKHFTSWLTLAPGNKISGGKVLNTKTRRSANRAAAIFRLSAMNVGQTQTALGAFYRRLASRAGKAKAVTATARKLAVLFYNTLRYGMAYEDPGAAYYEDRYRQRVLKGLHRRAKEFGYKLTEVEALEGVS

SEQ ID NO: 338473 - protein, 357 aa, unidentified
MDRHKYVGMDVDQATCVIAIEDKAGNFVMETYLPTKASVLGPFFKGLDGRTHVAFEEGTQAAWLYELIEPLVEEVVVCDRRGDKIRGNKGDRVDARKLARELRQGDLRPVYQGERGHRELKELVRGYDYLVQDVVRTKSRLKAAFRSRGISCGGQAVYRKTDHKDWLRKIDVDALRARVSSLYEQLDCLTRLRKEAKDAMITGAKKHASYKLLVKQPGLGPVRSAQILGIVGTPHRFRTKRQFWPYCGLAVVVHDSGEYEIIDGQRRRRKRPVRTRGLNKNFNRTLKVVFKGAAKTVISRDPFKQYYQRLIDKNIRPEMAKLTVARKISAITLAILKSREEFDPNRVNQAVSDSGDQ

SEQ ID NO: 338474 - protein, 315 aa, unidentified
MNNDKQVVGIDVSKAILDVAVLPSGELLQFANDGNGIDALASKLKSAPVDLVVMEATGGYETAVATALVGAGLRVAVVNPRQIRDFAKATGRLAKNDRIDAQVIAAFGQAIEPEIVRLPDEDTRKLAELLVRRRQLVAMRVQEVNRLALMQGPTRKRIKAHIDWLEKEIDKLDVDITAALRASPAWRAKDELLRSFKGVGRITSSTLLVSLPELGQLDRRAIAALVGLAPFNRDSGVMRGRRSIYGGRSQVRTLLYMAATTAIRSNPVIRPFYERLKSRGKPHKVAMVACMRKMLTILNAMVRQSTPWTPEIKPV

SEQ ID NO: 338475 - protein, 416 aa, unidentified
MKLFIGLDVSSQKLDTCFLTDSKEILFEGSLSNDLIGASEVKQKILEYQETFGFYQIVIGMESTSVYSFHPSMFFYLDEDLKQLPVEVTVENPYRIKQYSRMFDQDKTDKIDAQIIADYLRVDLHTLSPIKEEIYVGLQRLTRSRYQLVTQMVEAKQHFLENLTYKCNTLSKELANEDNKTSVFGTTIMNLLTEDITLDEFSEMPLEEAAELLQKLGKGRFKNPEQLVKSIKKAVRSSYRLGKVTKNSIDLVLGIIANEIKFLKKQIKEIEKAIIALLETIPEAQCLLSVPGLGPVYTAGLIAEIGQIERFDDQSKLAKYAGLTWTKNQSGNSQSENTPLNRSGNRYFRYYLIEDTNRVRITLPEFKEYYQKKKNEVPKHKHKRALVLTGRKFVRLIDVLLRNGQLYQPKKGVIEK

SEQ ID NO: 338476 - protein, 343 aa, unidentified
MEYFAGIDVSLEASSVCLVDSAGKIIRETKVASEPDALIEHFASLGFGLKRIGLEAGPLSQWLYEGLTKAGFDVVLLETRHVKAALSAMIIKTDRKDARGIAQLLRMGWYRSVHSKSPGSQDVRALLTGRKLLQAKLRDVELSIRGILRGYGLKVGEVSRGRFEGRIWELVDGHPVLETVIGAMLQARHALWNEFTKMHREMLKIVRQDRVCQRLMTTPGVGALVAITYRSAVDDPGRFAKSQTVGAYFGLTPKKYQSGETDLDGGISRVGDTMVRTALYEAAHIMLTRATRFSALKRWAVDVAKRRGMKRAKVALARKLATVLHRLWVDETEFRWGKEASAA

SEQ ID NO: 338477 - protein, 405 aa, unidentified
MAEPPNIQRWIGLDLHKTYFLAVGVDALKQTVFGPHKIPNEQLETWSVKHLQPSDAIVMEMTTNTYLFYDTLVPQVGSVIAVHPPNVRLVTGVKVKTDKKAALALAQLHAAGLLTGVWIPPVEDRELRAVIAQRTKMVRMATQAKNRLSSLLIRLQREKPAQAFKPEQRSWWEALPLAPIEKSVLLSNLDTLEFAEKQIKAIEEVLRQEAARDERVPLLTQLPGIAMLNALTILAAIGPIERFEDAKHLVGYAGLGASVHDSGQMHATGHITKAGRRDLRYAMTEAANIAVLHHPYWKKEFARLEFRLGRSKAIVAIARHLLIAVWHILKSEVVDRHADVTSVAASMLNLAYQIKKRNLPKGVSGRAFAREQLDRLGIGQDLAAVPAGKKKLNLPPSRLLLPEKE

SEQ ID NO: 338478 - protein, 338 aa, unidentified
MAILFVGIDLAKSVFALHGVDEHGKAVLVAPKVARDTLVGMMAALPPCTIGMEACSGAHHWARLFGGLGHTVRLMAPKFVAPYRMSGKRGKNDAADAAAICEAVQRPNMRFVPVKSLEQQGKLSMHRMRQGFIEQRTATINRIRGLLAEFGIVLPLKAATVRREAGACLEDLPGWANLAIGDALSELHRLDERIEQYDRHIAQMAREDERARQLMKLCGIGETTASAIVAMVGNGHEFSCGRQFAAWLGLTPGQYSSGGKSRLGRITKAGDSYLRSLLVLGARAVLNAAGNKGDRLSTWAKALAERRGYWRAVIAIAAKNARMAWAVLRRGEAFEMPV

SEQ ID NO: 338479 - protein, 356 aa, unidentified
MPLQRSAKFSNSQNVYIGLDVHLKQWNVCVCQGGVCRKSFQQSPDVGALLAHLRRLYPGMKYYSVYEAGVCGCSIHYALKASGIENIIFNAADVSQTHKERVRKTDAVDAAKIARSLANGELRCVHIPPQWRLDDRNLLRLRTTMVSDMKKRKARIRHFLHVNGIHIPAQFSSGHWTLSFVQWLEDTASADGTATGETLRLMVGCYRQAKAELASVEKRLLAMMGEYRYRDSFTLLRSVPGVGAVTAMTVLLECGDLSDFSSADAFCAYVGLVPDIDRSDEHDGRCGMTRRRHKTLRYMLTECAWRAIRTDDYFSGLYASYTRRMPPTKAIVKIANKLARIIKFVLRNKHKYVRPK

SEQ ID NO: 338480 - protein, 396 aa, unidentified
MDAALLWSEEGEMPAKRKVVDPLEPERHRCARVEMSSNHSRDRGSAMNITTYALDLAKQVFQVHWVEPDTGEIRRKALLRAEVNAFFAQRPPGVVAMEACGSAHHWGRVLRGLGHEVRLVAAQFVRPFVKTNKTDAADAEAIWEASQRPGMRYVALKSEEQQAVLSLHRMRQQCIKVRTMQAHQVRGLLYEFGAVVPKGWRALLAQAVPLLADETRCAVPELVRRQLLTQLEGLRALTRRVTELERQIGSWQRGERECQRIAAVPGVGKLTATAVIATVGDARAYRSGREFAAWLGIVPRQSGTGGRIKLLGISKRGDPYLRTLLIHGARTVLNHQSRADRQLDPWLKGLISRRPKNVVIVALANKMARTIWALLAHGREFDRCWSRAWMPAPALS

SEQ ID NO: 338481 - protein, 344 aa, unidentified
MDKLSRVGIDLAKNVFQLHGVNRQENVIWTRRLKRDNWPKVLQEKVEPGCVIGMEACTGAHHWARTLGQKGFTVKLIAPQFVKPYVKSNKNDANDAEAICEAMSRPNMRFVSVKTIEQQDIQAAHRIRSELVGQRTAKANQIRGLVAEYGLVAPQQLDRLRKAIPMWLEDAENGLSHAFRHLLHGVWRDLKALDDRVAELDSEINKIADSHPMAKRLQQLRGVGPMIATALVAAVGDGKQFANGRQMSASLGLTPKQHSSGDKDRLLGITKRGDSHLRCLLIHGARSALYAAKGKEDRLSQWATQLSARRHPNVAAVALANKTVRMAWAMLTKDADYHPDLIAV

SEQ ID NO: 338482 - protein, 346 aa, unidentified
MTVYIGVDFHPYQQTVCYCDTTNGIIQWKTLQHEKRAELREFYGQFEGEVIIGLDAGGPSQWFEELIEELSYKLLYGDSSEIRKRARSRHKNDKRDAELLLDLLLRQEFPSLWRRSAENEQVLCQIRFRDRLVRQRTRVCNQLQALGHRAGLPRQKMQTRIARDRLWETEMYEPQSIQRKHWFEILDDLNARICEVEQWLSRKVVECPQARLLITQPGVGVLTALSIAHTLGDVSRFSGSRKVVAYVGLDPLEDSSGDRKRFGRISKAGSRTLRFLLGQAGQASLKRDSEMKEFYRQLSQRRGKSAAKVAVARKILVRSFIMMRDRIDYEEFRRRRRRSQFVCGAQ

SEQ ID NO: 338483 - protein, 325 aa, unidentified
MKIMTGIDLHGNNAVLGLMDMEGRKILHKRVPCELPKVLDVLEPYREQIDTIAVESTFNWYWLVDGLQENHYKVVLANPAKIDQYDGLKHLDDKSEAYFLAKLLCLKILPTGYIYNKKTRPVRDILRRRMSLVRHRTSLLLSFKGLYTRNTGKTLSLSKVKSIEVEEAKKLFTHSADQLIAEEQVGLIKQFDQTIGRIEEAVLKVVNGLPNYQRLQTIPGIGKILGLTITLETGEIQRFASAGDYASYCRCVKSQRLSNEKQKGRNNAKCGNKYLGWAFIEGANFARRFNPECQQFMDRKKSKTNGVVAIKAGASQIFADFAGLF

SEQ ID NO: 338484 - protein, 449 aa, unidentified
MSKKGKAIGLPIVNARAAGIDIGSRIQVAAVPPELSDDPVQTFQSFTADIERMADWLVSLGITTVAMESTGVYWIPVFEILEDRGLTVILANARDCKSVPGRKSDVNDAQWLQRLHACGLLRASFRPTRDIAALRAYMRIRDRHLEYAAAHMQHMQKALTHMNLQLHHVISDISGVTGLKIVRAIVAGERDPDVLAAMRDVRCRESVQTIRAAMIGNYQPEHVFALAQALALFDFYQERVADCDAQIERTLQLLNADKVKPEEPLAKPRCRTKQTNSLNFDVRPLLYQLTGMDLTQIHGIGPSVGLALIAECGTDLSRWPTEKHFTSWLTLSPGCKISGGKVLSSHTRKSNNRIAARLRLVATAVGRTETALGAFYRRLAARIGKAKALTATARKIAIQFYRAMRFGMRYEDPGADQYEQRYRERVVKQLQRRAAHFGFALQPMEAGVS

SEQ ID NO: 338485 - protein, 424 aa, unidentified
MSVNNIHPSRPAPLSNPGPGDLAREGVTAGVDWASTEHAVAVVDQQGVELRRATVPHTKAGLSQLVGMLDRAGVREIGIERGDGPMVDALLEAGFVVFVIAPNQVRNLRRRYGAAGNKDDHFDAYVLADTVRTDRHRLTPLAPDTPPTVTLRMSVRARQDLVAARVAMGNQLRAHLAIVLPGAIGLFRDIDSAITLAFLTRFPTQAKVNWLTPRRLENWLRSQRYPNPRRAELLHAHLAGAARGTTDPQADTRAHITAALVAGLQSLRTQIAALEDDIGQQLLVHPDAQIFTSLPKAGTMRAARLLAEIGDCRSRFPTPQALTSLAGATPSTRQSGKVTVVGFRWAVDKQLRGAVMDFAGDSHHANPWAADLYWKARHRGKDHSHATRILARAWLLVIWRCWQDHEAYDPARHRACQALQNTVA

SEQ ID NO: 338486 - protein, 335 aa, unidentified
MSLYCGIDLHSTNHLVVIIDEEDRRVLEKRLANEVSITIDTLSPYRDQLAGIAIESTFNWYWLVDGLEDAGFSPCLVNPAAIKQYEGLKYTDDPYDAFYLAKLMRLGILPTGHIYPREQRGVRDLLRRRLSMVRMSTGLLLAVQSQIWRSTGVNISSNQIRQANFELPLPQGPVREGAASQWRLFQRTQDEVQRLEKLALELYRGEENYQLLQTVKGIGVILGLTIGLETGSISRFNTAGNYASYCRCVNSERISNGKKKGENNRKAGNRYLSWAFHEAAHFALRFEPKVQRFYERKRQKRNRIVAIRAVAHKLARAVFHMLKHRQPFDLDRAFG

SEQ ID NO: 338487 - protein, 315 aa, unidentified
MHVPQAFMVGIDVSKAHLDVAVEGKPAVARFDNDAPGQTALATAIAGAQLVVVEATGGYEMAIVRTLMAAGIAVAVVNPRQVRDFARASGRLAKTDQVDARVICHFARAMRPAQIPHIDDSRIALAALVARRRQLIDMAVAEKNRLEHAPQAVAALIGETIAALKAQLARVDAAIALAIDAQPDIAARRDLLLTVPGIGEVSAAVLIAELPELGAIDDKKLAALVGVAPIAHDSGTWRGQRHIAGGRATVRCALYMATLSAIRCSPAIKAFHKRLRDAGKPPKVAIVAAMRKFIIMINTILKRQTPWSEPQQHGC

SEQ ID NO: 338488 - protein, 354 aa, unidentified
MSQKLDSEIAVIGIDIGKNSFHLVGQDRRGSIVLRQKWSRGQVEARLANLQPCLIGMEACVGAHHLSRKLQALGHDARLMPAKYVRPYSKGEKNDYRDAEAIAEAVQRPTMKFVATKSADQLDLQALHRVRERLVGQRTSIINQIRAFLLERGIAVRQGLHFLRAELPTILAKRTDVLSPRMLRVIEDLAGDWRRLDERIDALSDEIMTLGRQDKGCERLMTVPGIGPIISSAIVAAIGTGDAFAKGRDFGAWLGLVPKQMSTGDRTILGSISRRGNRYLRKLFVQAAWVVLAKITPEGWERYGLKSWIEAAKQRLHRNVLAIALANKLARIAWAVLHKGRAFQCVKTNAPRVA

SEQ ID NO: 338489 - protein, 407 aa, unidentified
MDPIEERRVFAGIDWGGHEHQLCVVDTDGRKQLELRVNHDVAGLKELVGQLARHGERVPVALERAEGLLVEHLQAHDHPVFPVSPRISARARERYRVAPMKDDRFDAFVLADTLRHEHQHWRALAVPSLLLAELRALTRDRDRLLETQQTTEAQLRSIMEAYHPAPARLFSSMDRQIALAFIADYPTPAVASRVRTTRMSGFLRRNGYTGRVPAQVLAERMRANLLSGSVGTVAGRAHSAKTFAHLLGVMNEALAEFDDAIDSVVAEHPDAEIFASFPGVGPVLTAVLLAEIGEDRTRYPSVQTLLAESGLAPVTRSSGRSRNVRFRYAANTRLREAAMWWAFNSLKTSPWAAAAFRQARDERGQRYHRALRGLAARWMRVAWRCWQDGTTYDAELHMGAAIAERSA

SEQ ID NO: 338490 - protein, 321 aa, unidentified
MTTVACAAGIDAGKTYLDVGIEPSGRRFRVDNAPDGIRRLVARLRREGPERVVIEAIGPYARPVTAALGAAGFAVGVVNPRRIKGYREAEGKRAKTDRLDAGLIARFALTMREPPRPLPSAEDQALKDLAARRRQLVEMIAMEKTRLKQAFEPMIAASHRTAIAGLAAERKRIEAELERRLAGNAALSRRYELLVSLPGFRPKVATTLIIDLPELGGADRRAIASLAGLAPHPSQSGTAPGRNQIGGGRPCVRAALYMASLAACRSDPRFRAAYQASRAEGKPAKVALIAMARKLLVIANTLVRQDRPYDPGFAADPGDRG

SEQ ID NO: 338491 - protein, 355 aa, unidentified
MSKRKSKGLSKLAVVGVDIGKDVFHLVGFDDGGNLVLRQKIKRLALTATFEEMPRCVVGMEACLSAHFVSRTLRSLGFEPRIIPAIYVRPFIKGQKNDYNDAEAIAEAALRPNLKTVTEKNQDQLDLQALHRVRSRLVSRRTATINQIRAFLIEQGITVRKGPHALKRSFLPILEERQDEISPRMRTILTGLYGDWLWLDERIETIAKEIEDISRTEENCANVMTIPGIGPLISTAMVAAVGRGEVFDRGRDFAAWIGLIPRQYSTGGRTVLGRISKRGSRYLRMLFVQAANVVLMRPHRWPDFSFGDWLARASSRMHRNKLAIALANKLARIAWSVLRHGTPFDAQRDEAMAGI

SEQ ID NO: 338492 - protein, 370 aa, unidentified
MKKNIRISKSSTRSTTTKFRKSDGVTIGMDLGDKTSRYCVLNAAGEVLVEGACATTKKGMAQLFGSMAHCRIAVEVGTHSPWVSRELKKFGHEVIVANARQVKLISQSSRKNDKLDAQMLARLARMDPGLLRPIRHRSEEAQKDLLTIRIRAALVESRTGLVNAARGLTKATGERLASCDADQMDMGKLEELPADLRESLKPLVEEVESLTEKIKECDRKIEQIARDRYPETKLLRQVSGVGPLIALTYILTIEDKERFEKSRDVGCYVGLRPKQSESGERQPELRITKEGDVYLRRLLVQGAHCIMGSRAPDTDLKRWGAKLAGRGGKNARKRAIVAVARKLAVLLHHLWVTGDVYEPLKNSQAMAKAA

SEQ ID NO: 338493 - protein, 338 aa, unidentified
MNLSRIGLDLAKQVFQVHGVDRHEHVVCRRQLKRAQVRDFFRQLPPCLVAMEACGSAHYWARELRELGHTVRLIAPQFVKPYVKGDKHDAHDAEAICEAASRPSMRYVPVKSAEQQAVQSMHRVRSRLVRARTALCNEVRGLLGEFGLIATRRGRAATMALLETVMATEPASLPAPMGELLRELKDELQTLEARIARLERQIQAHVRGDARIQRLLAVEGIGPISASAVAASAGDAWQFRTGRQFAAWLGLVPRQHSTGGQQRLGNISKRGDTYLRTLLIHGARAVVRCCANKTDARSRWLQGLLQRRPANVVAVALANKNARILWALLSRETCYRPG

SEQ ID NO: 338494 - protein, 410 aa, unidentified
MEVIVERQSALDVHKAQVTACVRLPGADGERVEHVEQFATTVGGLLVLGDWLKAHAVTHVVMEATGDYWKPVWHLLESDFELMLVNARDVKQVPGRKTDVSDSAWLCRLAEAGLLRASFVPPKPIRDLRLLTRYRRTQIAERKREAQRLHKALEDTGIKLDCVATDILGKSGRAMLDALVAGTTDPEVLADLALGKLRKKIPALREALEGRFEALHALLIGAILAHLDFLDEQIEQLSQAIEEQIRPFAPAVDLLCTIPGVGQRTAEVIIAEIGTDMTVFPTAGHLASWAGQCPGNDQSAGKRRSGRTRKGSKNLNAALKDAAMAAMRTNDSYLQALYRRKKPQLGHGRALGAVKHSMICACWHMLSTGELYRDLGGDYYSRRNPQRQTKRLVAQLERLGHTVTLQEAAA

SEQ ID NO: 338495 - protein, 349 aa, unidentified
MEITKIIYGIDIASESFTVSQGVLYQDFQSNVSFTRTFKNSISGFKSFIKYTESLQKKFKAGPQTQLWFVMETTGVYYEKIAYFLNDNKYNVSVVLANKMKNFGKTLTTKSKTDKIDSRTITIYGLEKQLQKWESPSEEMKQLKDLTREINDLNKLVTMCKNKLHAKQHSYMPDPSIVKRLKEQIKFLKRNITQVKKQIEQIIKENKRIKEKVKNISILKGVKTYTIISVVSETDEFKLVNNKRQLVSYSGLDIIQDQSGKTEKKTKISKKGNSDIRKALYMAALSALKHDKNCKQHYQRLIKRYNYKNKKRAVMAIMRKILILIYTLWKNDKAYDPEYYKNERIALQN

SEQ ID NO: 338496 - protein, 343 aa, unidentified
MQAVKTIGLDIAKSGFQVHGVDADGQVVFRRQLKRRYVLAFFQKVPSCLVGMEACATSHHWSRELQALGHTVRLMPPAYVKPYVKRQKNDATDAEAICEAVTRANMRFVATKTPEQQSGLVLHRTRHLFIRQQTAVINAIRAHLAEFGIVAAVGRNGIEQLLNVVADAGDKRLPEVARTCLMALGTQLRALKAQLLELDRMITAWHRSNETSKRLDAIPGVGHVLATALVASIADPKVFRSGRDFAAWIGLVPKQHSSGGKDRLGSISKQGDRYLRSLFTAGALAVIRYAKIYGTKHRPWLTALLARRPTKVAAIALANKLARMAWAMMTRGERYKEPVALAA

SEQ ID NO: 338497 - protein, 461 aa, unidentified
MARRKKSRNQVVRAPKLPKSLERVNLNAAGIDCGATEHYVAVPEDRDSQPVRKFGTFTVDLMALISWLVQCHINTVALESTGVYWIPLYEMLVKHGIECFVVDPRRLKNVPGRKSDVLDCQWIQQLHTFGLLKGSFRPSDEICVLRSYMRQREMLVRYAGAHTQHMQKALEQMNVKLTEVLSDITGVTGLAIIDAILAGERQPKKLAELRNQCCKNPEETIALALQGNWRDEHLFALRQALELFRFYHAKLHELDQKMEAYLKTLPSKSAGQVVDPSRMKHRYRNEPKFNVPDYVLQICGVDLTTLDGFRSGYNALDLISEIGTDMSAWPSEKHFASWLGLCPGIKKTGGRWLSGARPKNACRAAQILRMAASVLSRSYCALGAYLRRLKGRIGAPKAITATAHKLARIVYRMLKYGKSYTDVGMDYYERKYRERVLKNLQRRAAELGYQLVEQPAAPAAS

SEQ ID NO: 338498 - protein, 332 aa, unidentified
MENFYFIGVDVSKKKLDFCVMFEGKVVHEEETANHQSAIMSLLHHLEEDYGIDNTRMLVCAEHTGQYTFPLACACKTVECKIWLENAAEIKYSSGVQRGKNDKVDAKRIAIYASRFQDKVRYYERPTEDIERLKQLESERTLYVTDLAKYKGQMKDQKDYMPKALYERKMKRLQALMDDLEEAIQAITDEMDEVTASCPVLFRQQELLMSIDGVGRVVATNMIIATEAFTRFDDPRKFNCYAGVAPFSYSSGSSQHSKARVSHRADKVMKRLLHLAAVAVTHRVGGELKKYYERKVAEGKNKMSVINALRAKIVARMFAVIKRNEKYKPILS

SEQ ID NO: 338499 - protein, 361 aa, unidentified
MRYVGIDYHKHYRVLCATDERGQELKQRRIKGNTAAGFAQFFSELGEQNKVVMEACWNWGWLYDLLGQIDQVGEVVLAHPYKTRLIAEAQIKTDRIDAQTLAKLLRGDLIAQSHAPSAATRARKHLLRQRLFWVRLRTMLRNRMHAILDRQHGLERPQLKNFFSRRGQTWLEGVELPCAEDQPLLKQDLEVAALLDQKIKELDRAIGQSQSVAEKLLESIPGIGPLFSSVIATEIDGIERFHSAAKLAAYAGVVPTTHASGGRVFHGRLLWQCNKWLRWALIEASWTAIQFSGYFGAIYRNARARGKNKHVAITMVAHRMAKIIWLLLKEKRPYTETLPDRSEDQVTVAPRRKALSLASSC

SEQ ID NO: 338500 - protein, 342 aa, unidentified
MDHFAGLDVSVKDTSVCIVDDTGKIVREVKVASEPKALLAVLKNPAYRFKRIGLEAGPLSQWLFSALAEAELAVVCVETRHMQAVLKAQINKTDRNDARGIAQMMRVGLYRPVHVKTLRSQKLRMLLTHRKLLQSKAIAIENDLRGTLRNFGLKVGMIGKVKFEARINELVESLPDLAGLVEPLLVVRRALREQIVVLHRRLLAIVRDDEVCRRLMTTPGVGPVVALTYRATVDVPARFHKSKAVGAVFGLTCSKYQSGEIDRSGRISRCGDQMMRVMLYEAAQSMLRSKKWCWLKAWAMQIARRRGMKKAIVALARRLAVIMHRIWVDGTEFRWTREAVAA

SEQ ID NO: 338501 - protein, 368 aa, unidentified
MTTVANRKRDGKRNGKRDNRQWTPSADERVHVGLDVHKKAIHVAVWSVRQEQIVRQWVTPANDARLVEQLEPLRAAIVRIVYEAGPTGYRVARSLAEATLPVEVIAASKTPQVADRLAKSDGLDCRQLAEYSAKGLLHRVAIPTEQQEADRQVTRLRDSWTSKRRRVQQQIKSFLLQHGLGEPDGLANWSAKGLEGLGQIELGPELRFALDLMVEELGQLNGQLLRINQQIRQLSKTDRHGPAVAVLTSHPGVGLTVAMAFRTELHQAGQFTDAAQVGPYVGLAPRVSQSGQTRRDGPISRSGRGPLRALLTQAAWVWIRFDEAAKKVFNRLVSNTGSAQKAIVGMARRLAIRLWRMMVTGEVYRVAA

SEQ ID NO: 338502 - protein, 316 aa, unidentified
MSLQPCFVGIDVSQASLDIAVRPTAETWQVSNDEAGITTLVTQLQALAPTLLVLEATGGYHGPVTAALATASLPVVVVNPRQVRAFAQALGILAKTDRIDARVIAHFADAVRPTPRPFPDAETQELRALVLRRRQVIAMLTAERNRLGTAPARIQPAIQQHMAWLEGQLAALNDDLTATIERSAVWQAKADVLRSIPGVGPVLSRTMLAQVPELGTVGHKQVAALLGVAPFNRDSGTLRGRRTVYGGRGEVRAVLYMGTLVATKHNPVIKAFYTRLLAAGKCKKAALTACMHKLLTMMNAMVRDLTPWQPREVAIA

SEQ ID NO: 338503 - protein, 294 aa, unidentified
MMSPEGLCFSVRNDAPGWAELVVRLRPLKISAIGLEPSGGYERGVIRTLLAAGLSVRRINPNKLRQFARARGVLAKNDRLDARLIAEFVAIMPTRVVRRDKAAERLAEIVTMRRQLCDEHVTVENQATHLEDAMLRRLSKRRLARLEADIHLLDKRLANMVAADSALAPRYQMLISMPGVGPVLAFTLIALLPELGQMSRKQIAALVGLAPYDFDSGKLKGHRSIYGGRMQVRNILYMAALSASRYNPALKAFHDRLTRGNKKPKVIIVAVMRKMITTLNAMLRDNAPWQPKSA

SEQ ID NO: 338504 - protein, 350 aa, unidentified
MSEFTLGLDLGDRAHYVCVLDTSGQIVREASLPNSRPALAQLLVDFPRATVALEAGTHSPWISRYLTGLGATVFVANPRKLHAISRNERKCDQRDAQMLARLARADVALLHPIEHVTAQAQHDLLGLKLRDALVRTRVNLINTVRFTLKSLGHSVGNPSSESFHKTVLADIPADCLPVVQPLLTVLTLVTEQIKGMERDLMQRSKKDYPVTERLQQISGVGPITALCFVLKIGDPERFSRGRDVGAYLGLCPRRDQSGGTDKQLRISKCGDAMMRRLLVTAAHYILGPFGPACALRQYGQRLAGTGSAREKKRAVIAVARKLAVLLLSLWKHGTDYEPRVTTSVLVMTPA

SEQ ID NO: 338505 - protein, 367 aa, unidentified
MTSLAHRGFIHLGMDVSRDSISVAILQPDQDTAVVDKLAADEPSVRRLIKRLGRPSGLWACYEAGPTGYDLYRLLTKTGVRCDVVAPSLTPKGRGDKVKTDKRDSRRLAGLHRAGELVAIAVPNPAQEAVRDLCRTRGDMVQDLTRARNRLTKFLLRHSLVYRDGSNWTIRHHRWLADVRFDELALAKTFEHYWATVQLRDTALDAVEADISAYLTTEPFADAVLRMGAYRGVTRMGALCLAAEVFDWRRFARARPFMSFTGLTCSENSTGLSQHRGAITRAGNSHIRGQLCEAAWSYQHQPHIGPGLRARQQGVPPATAARSWQAQVRLSRRFRTLAARKNVKSVVAAAVARELAGFLWAEMTADA

SEQ ID NO: 338506 - protein, 414 aa, unidentified
MKRIVERCAGLDVHKASISACVRTAGEGGEPHQEIRKFSATTRGLLQLRDWLASFAVTLVGMEATGVYWKPVYYMLEDDFELWLLNARHLKNVPGRKTDVKDAEWICQLVEHGLVRPSFVPPKEIRELRNLTRYRKAQIEERTREVQRLEKVLQDAGIKLSSVATRALGVSGRAMLDALISGTTDPEILAQLARGRLRSKIPALREALEGRFSAHHGLMVGRMLAHIDYLEESIAELSMEIERVIAPFSEEVKLLDTIPGVDRRTAEVLIAEIGADMNQFPTHRHLASWAGMCPGNDESAGKRRSGKTRKGSKWLRSALIEAAYAAARSRGTYLAAHYARLKGRRGPKKAAVAVGHSILVICYHILRRGGEPYQELGEDYFNRRRSEEAYTKRLVRQLERLGHRVVLEALPQPA

SEQ ID NO: 338507 - protein, 323 aa, unidentified
MDSVGKPIIRRRLKREEVETFFRKLPPALVALEACPGSHFWARLLREVGHDVRLLPAQYVRPYVKTNKSDAADAEAICEAVTRPTMRFVPIKEEIQQEVLVLHRVREMLIRQRTQLINSIRGHLAEFGIIAPNRAHNIGLLTKLIEDEEFDELPAVARHALRYLVEQLREVKTKLFRIDRDLMKIVKGSDACRRLMTIPGVGVVTATALVSSMREPADFKSGRHFAAWLGLVPRQHSTGGKESLGGISKRGDGYLRRLLIHGSRSIMRWRGRSWTWLAKLRDRRPANVAVVAVANKTARIVWALLKFGGTYGQPGDGATMRAT

SEQ ID NO: 338508 - protein, 325 aa, unidentified
MQNVIGIDVSKETLVVCHAPGDKDQHLEVSNNKAGFQRLLKSCGGTDRLYVMEATGAYYMQLAYFLHSQGAAVAVINPVVIKRFVQMHLGKGKSDKKDAQWIMRYGQQNQVKQWQPETPLLVECRQLEQAIEQLIKQKTMISNSLEALERQPVKCLLVVRGLKQTSKLLQRQIGHMERELQDKMGSLFSIEMDLLVSIPGIGRKTAGMLLLFAGGFQQMASYRQLIAKAGLCPREYTSGTSIRGKVRITKMGGSLIRSKLYMCSLTAMRGNAACKELYERLVARGKNGKVALIAVCNKLLKQAFAIVKSGIPYQAEFSKTSPQFA

SEQ ID NO: 338509 - protein, 335 aa, unidentified
MLYVGVDAHKAHSQMTVMDETGKVLERRRVGSSREGMLEALGPHRGEPMKAVLEAGYGWGALYDWIGEAAEEVVLAHPLKVRAIADAKIKTDRLDSEMLAHLLRADLIPEAYAPSKEVRAKKRVLRQRMFLVRVRTMLKNRVRALLYQHGVEPPPVSDLFGKKGLAWLKEQPELPEPDGWLLSEEVELAETLKEKIRATEGLIKELAKEDKAVGWLRTLPGIGEFFSVLIRHEVGQMERFPTAKKFASYTGLVPSTYASGKRITHGRLTKEGNKWLRWAFAEAVSPAVRSSPYLRAYYQRIKARRGTKDARTATARKLAELAWTVWTERRGYEER

SEQ ID NO: 338510 - protein, 438 aa, unidentified
MSTLADVGLDVSQDDASVCFLLADGAEPVPRWTVPNTQPGADTLSITLAQLAQMHQIDQLRIGMEATGLLWWHLACHLKDTPVLAPFAPRIYALNPHLIKTFRANYGALPKTDRADAFLIAERIRFGRQLPSPFQLDARYAPLQRLTRFRCHLAQNLAREKSYFLSFLFLTFSTYGQIAPFGDPFGATSSAVLDEFTTEELAQQALEELAAYLQSKGRGHFASPATLAATLQRAARDSYRLDKVVQEPLRLVLGTTLATIRSLQTQLKTLDKTIAQELAAIPQTLASVPGLGPVWTAGLIAELGDITRFDDEAAIAQYAGLTWETRESGRFQAEDTDLTKHGNCYLRYYLVEAANSLRQHCPEYGRYYAAKYAETPKHPHQRALVLTARKLVRLIDVLLREGKRYMTPEERQLREDARPPHHARPARQRRSSLAPAVD

SEQ ID NO: 338511 - protein, 389 aa, unidentified
MYVVGIDISKYKHDCCVIDSDGVIVQGPFSFSNDRGGFNDLLEILHSIPASEEIRIGFEATAHYALNLKLFLEEAHYSFMEFNPVLLSKFNKSQTLRRTKTDAIDCLSIARWLMTVNYKPHPVGFYHSFSLKSLTRLRDSLVRERSYYLVKITNILDLTFPEFKPFFNDRFSATALYLLENYGTAEKISHMNSQSYENLRKISYGKFSPQQFIKLKNLARNTIGEGNDIFTMQLESLLKLYKQSVTEIDTLESRITELILQINPKYLSIPGIGPLSAAVIYSEYGDFSKFDSPAQMLSYAGLEPGYYQSGTSKHKGHMVKRGSSYLRYTLMNLCAPLTRFNYVFAEYYDKKRAEGKPHRVACSHVIKKLIRIMFYLEKNDVDFDPSLLR

SEQ ID NO: 338512 - protein, 423 aa, unidentified
MEVLHERVAGLDVHKDNVVACVRTVSGDKTTREHRTFDATTDGLLALLEWLTSCRCELVAMEATGVYWMPVWRILSDGAFKLIVVNAAHIKAVPGRKTDMKDSTWLADLAAFGLLKASFVPDEDQHELRALMRTRKQLVREQTRHVQRIQKTLTEANIKLDSVISDIMGCNGRRMIEAMIAGTRDPRKLAALADKRLKATPKELYDALHGRLTDHHRFLLQLHLGQWDTLDTTIREVDREVATRVFRMDTEVTAAQAKFSDVIDQLSTIPGVSRLSALTILSEIGTDMSRFATAGHLVAWAGMCPGQNESAGKRKRTRLRKGAPWLKTMLVQCAWAAKRKKDSYYRAQFFRLQSRRGPQKAICAVAASILTAIYHMLKDGTFHQDLGSGYFDQRPPEIKVKRLVNQIAKLGFEVTLQPIAKAA

SEQ ID NO: 338513 - protein, 314 aa, unidentified
MPEQMFVGIDVSKARLDVAVLPSGEVFAVENTAPGLTELLIRLSDVQPQLVVLEATGGLEQAAMLALHDAGVPVTVLNPRQVRHFSRALGQHAKTDRMDAVLLARFAQTLQPEAQVPREASQRALEALLARRRQVVDLLTMERNRLHSSRDPYVQADLQEVILYLEGRRKQLDQALQNAVQHDPKFQATYTVLTSAPGVGPVMALTLLAQLPELGSLSRQKIANLVGVAPLNRDSGTARGHRKIWGGRAEVRQVLYMSAVSAVRWNPTLKTVFDQLIHKGKPTKVALVACMRKLLVYLNAMVRDQAPWHVQPAA

SEQ ID NO: 338514 - protein, 309 aa, unidentified
MLAGIDIGKSNLDVSIGGDRVMGFSNTPEGHGDLIASLREAGVTRVVCEPTGGYERRLVEALRLARVAVQITHPNKVRAFAQACGILAKTDRIDAQILYRYGDVFPDTTPIAQSDKVLKLREIVRRRQQLMDTRIKEMNRLEKHPTEVARASCERHLSWLETEIAELDRALRSLLSESGLHHQAELYCSVKGVGLITSATLIAELPELGRYDSKSLTALVGLAPWSRDSGKQRGYRAIRGGRANVRKAIYMAAVSAIRSTGPLRHFYQRLKSRGKPGKVALVAVMRKLLLILNAIAHRGTPWVDNLTNA

SEQ ID NO: 338515 - protein, 411 aa, unidentified
MEVVYERCAGLDVGKDEVVACVRVPDGAAGRRQELRTYRTFSAGFEAVADWLTEQGVTHVVMEATGQYWKPIWYVLEERGFALMLVNARHVKLLPGRKIDVGDAAWLCELLEHGLLRGSFVPPAAIRELRDLTRYRKRLIQAHSAECQRIHKTLEDASIRLGSIAADVLGVSGRAMLRALLAGERDPKVLAEMARGRLRSKLPELREALRGRFGAHHALLLRLTLEHVEQLERSITALDAEVDRVIAPFAQARDRLDTITGVGKRAAETIIAEIGVDMAVFPTAAHLASWAGRCPGNNVTGGKRRSGSPTKGNRWLGEVLTECAWAAARSRDSYLAAQFWRLARRIGKKKAAMAVGHSILVIAWHLLTNDCDYADLGSDYFVRRDTDRARQRAVAQLQALGYQVTLERLAA

SEQ ID NO: 338516 - protein, 341 aa, unidentified
MRKTLYCGVDLHSNNAMYVVTDQRDKQLLRCRLPNQLPVVLERLEPFRERLQVVAVESTYNWYWLVDGLQEHKYPVVLANPSEIEQYDGIKEADDRTDAAFLARLARRNVLPTGYIYPKEDRPVRDLLRRRTLLVQQRTRIILSLQNLAMRQTGQKIGWRDLRRLEEAERTALLGDHECLTFVAAQQVELIDALSAKIAAFEKKVLEHVQVKPAYECLLTLPGVGVILALTLMLETGDIGRFATVGDYTSYCRCVRAAHRSNGKKKADNNSRNGNGYLAWAFVEAVHHAIRVCPSARSFYDTKRAKRNGTLATKALAAKWSKAAYYMMKRRENFDLTRVFG

SEQ ID NO: 338517 - protein, 385 aa, unidentified
MLQTPSPFATVDYNRTLILAIELSSKNWVLAAQVPGLPKSKACRAINPTVEELMAAIEGYRARATAAGHSVERVIVTYEAGWSGFWLARWLAKRGVETHVIQPSSVPVDRRARRAKSDGIDAEMLLRTLLAWLRGEPRVCSMVPIPSEADEDARRSIRERTELISERVSLVNRIGAILATLGTCDYDPLLRSRRRRLGELRTALGDPLPANARNKIVRMLDRLELLLAQISALECQRDAVLEDEAPDKAGQMIQHLASLRGIGVQSATVLVREAFVRGFANSKALGSYAGLSATPFNSGSVKREQGIGKAGNRRLRTVMIELAWLWQRYQPGSALVHWYRSRTGVTGARVRKVMIVALARKLLIALWRFVTQGVVPEGTTMKPAS

SEQ ID NO: 338518 - protein, 367 aa, unidentified
MKDSITVVGLDVHKNSIEIVTADTDRAMEVRRFGRIGGTMDALDRAVRKLVSGGASLRFVYEAGPCGYEIYRHLTGKGFSCKVVAPSKIPKKSGDRIKNDRRDAETLARLERAGELTGIYVPREEDEAMRDLTRAREDAVKSLKTARHQLSAFLLRYGKRYPGKGSWTPAHMRWLSDIALPHPSQQIVLQEYITTVRVGTERTTRLTDQIAKLLPEWRLSPVVKALQALRGVAPIVAATTIAEIGNMSRFESPRQLMAYLGLVPSEDSSGESTHRGSITKTGNGHVRRALVEAAHAYGFPARVSRHLLKRQEGLPEPVLAIAWKAQVRLCGKFRRLMARGKLKNKIITAIARELSGFMWAIAREVEV

SEQ ID NO: 338519 - protein, 397 aa, unidentified
MYIVGIDIAKRKHEAAVIDGEGTVIIKPFSFTNNCSGYNRLLAMLTKAKLPLDEVSFAMEATGHYWLALFTRLQKEGFRVQAINPVQTNSIRSFYIRQAKTDPRDALLIAEVIRFGHFSESTLHPENIYELRELCRGRHAIVSMQADVKRKVIALLDQVFPEYETAFTNLFGDTSMAILQTCPTPKELSEMPLEELCHLIEVSSHKRFRMAKARELQELARNSFGFAMAGDVFSTMIRLYAKHLDFLKQQVREMDRKIAEIMETLDTPITTITGIGPTLGAYILSEIGDISRFSSAAKLAAYAGIDPTMRQSGEYNGVRNRMSKRGSPYLRHAIWLAASSAVLHDPALKLYFQKKRDEGKPYMASVGHACRKMVSIIYAVMRDNKAYVPCIPSEISA

SEQ ID NO: 338520 - protein, 353 aa, unidentified
MVVLEADVHKRTHTFVAVDERGREVGEKVVPATTEGHLAALAWAKTTFGEDLLWGIEDCRNLSARLERDLLAAGQKVVRVAPKLMAHERAGARTRGKSDPIDALAVARAVLRHPDLPIAAHDEVSRELKLLVDRREDLVGQRTATINRLLGRIHELDPTQAPKKGSLDRAKTQTTLAAWLATQDGLLAELATDELGDIIRLTLAIKALDTRISDAVHAVSPQLLALPGCGELTAAKLVGETAGITRFKSEAAFACHSGTAPIPVWSGNTAGRVRLSRAGNRQLNAALHRIALTQIRLVDSPGHAYYRMRLADGDSTKEALRCLKRRLARVVYNRLHADEQTRHHTGQTHRGLT

SEQ ID NO: 338521 - protein, 313 aa, unidentified
MNMTEHTIVGIDIAKETFDVFISPAGRFLHLDNSPQGHQQLIDALASHTVIRIVMEATGRYHNLLAATLELAGLPVAVVNPAQVKHFARALGTLFKTDPNDARIICEFGRRISPDIRPAPDEQTQRLAMMVSRRRQLVDNRTMEQNRYGSCTDELIRTGIKRHIDWLNAEIKDTDDDIDRQIKVMPLWQEKVKLLEEVKGIGRTTLAVLLSMLPELGKLSRRKISALVGVCPYAHDSGKMKGKRCIWGGRSAVRAALYMAAMSAVRYNPTIQAFFERLRARGKAFKVAMTACVRKLVTILNAMVRDNKKWVAD

SEQ ID NO: 338522 - protein, 359 aa, unidentified
MQTQSNKIDFNGQNIYVGFDVHLKSWTVTIMTEKLTHRTFTQPPKPEALYQYLRKTFPGGAYHSAYEAGFCGYWIHNKLVKFGVNSIVVNPADIPTTGKEKVMKTDLRDSVKIARSLRNGDLKPIHVPSLTTLEDRGLVRTRATLVKDLSRYKHRIKSFLHFRGIELPEAFSQSKTYWSNRFTKWLEDLEITEPSGKASLNALLEQSKHLRAAVLLVTRQIRDLSKTDRYKMQQVLLCSIPGIGILTAMTILTEIETINRFANLDQLCGFIGLVPSTNSTGDHEIVGEITPRGHSILRTAIIESAWMAARLDPALNKCYHDYCRRMEPNKAIIRIARKLTSRIMFVLKNNQPYVCSVIK

SEQ ID NO: 338523 - protein, 340 aa, unidentified
MKSTTIAIDLAKSVFEVGISHQPGHVDSSHRLSREQIGTFMANQPATIVVMEACSSAHYWGRTFQGFGHEVKLLPPLYVRPYVQRSKTDRADVKGMLEAWRNSAIRAVPVKTESQQQLTSLHRVRSGWMAARTKQINMARGLLREFGFVFPLGASALPGRVRELIENADTTLPMPLRDLLHQLVLEIGELEKRVKTAEKQLGALAIQTPVVDLLRSIPGIGPLTSTALVGFVGEITRFPSGRHFASYLGLTPREYSSGSRRRLGRISKQGDVYLRTLLIHGARAVLICAKTSPKPDRFHAWGLELQNRCGHNKAAIAVANKLARIVWAVWKSGKPFESRS

SEQ ID NO: 338524 - protein, 393 aa, unidentified
MHKPKKQHKPINDLSRSLTPLDVNQTLICVIELSKGSWLVAGIIPGVERQPLKKLEPNENELLKLFERWRAEAEKAGHKIKRITVAFEAGRDGFWLARWLRARGIEAHVIHAASVAVSREHRRAKTDRLDTELLKRAFLGWLRGERDHCKMVAIPTLAEEDAKRPNREHEALVGERTCIINRMKATLTRLGIRNFNPKLKKAAERLEHVRTPEGEPIPPNTLAELHRDMQRRQLVMEQIRQIEEARLERLQQAPKHRANVMVLLLARVIGIGIETADLLVQEVLSRNLRDQRAVARYSGLTGSPDESGEKRREKGLARSGNARVRRGMIQLAWRFLEFQKDSALAKWFRARTENARGSRKKMIVALARKLLIALWNFVRNGVLPEGVVLRPAQ

SEQ ID NO: 338525 - protein, 441 aa, unidentified
MRHRAPVSDRPGAGLVAAEPLSLPPLGVELSLTLPPAQFFAGLDWAAQVHAVCVMDVTGQVVDRFTIKHSAEGITMLIRRLAKHADAADVQIGIERPNGRLVDLLLEAGHPVVPVSPNAIKAWRDGEVLSGAKSDAGDAAVIAEYVRLRQHRLRVAVPYSDDTKALRTVVRTRTDLVDMRVAATNQLAALLDASWPGAKAVFADVESPISLDFLTRYPTPASARHLGEKRMAAFLVKHGYSGRRSAAVLLERLREAPAGATGAALTEALRDAVLALVAVLRALNGAVKDLDRSCAAHLGEHPDGEIFASLPRSGQINAAQMLAEWGDCRQAYASPDSVAALAGCTPVTKESGKHRAVHFRWACNKRFRVALTTFADNSRHASPWAAKIYNDARKAGKDHPHAVRVLARAWIRVIWRCWLDGVPYDPAKHGAAAALTEFVAA

SEQ ID NO: 338526 - protein, 350 aa, unidentified
MSRYIGLDVHKTSSTMVILGPSGKKLGCHVVETNANLLVDLLKAIPRPRHLCFEEGTQSAWLYETLSPHVDEIVVTVKRDRRGSKDDQRDAFELADKLRTNSIEVRVYKEVGRYGRLRELSKVHRMQVRDSVRVQNRILSLYRSRGIATEDSLYNPKKREEWIAKLPTRMQTAADCLLRQYDVVEPLRRESEKTMVADARKSPGYKLLATVPGLGPIRVANLLAIVVSPHRFRTRRQLWEYSGLGVVMRSSSDWVQGDDGKWRKDLVQQTRGLNRHHNHELKSIFKGAATTVIGQARKDCPLYQHYAAMLHNKTKPNLAKLTLARQIAAITLALWKKEARYDPAKLTKQR

SEQ ID NO: 338527 - protein, 360 aa, unidentified
MKRHRTSVGLDVHARSVVGCGLDRETGEIFQRRLTPSREEVCDWIRSLPAPAVVVYEAGPTGFGLARYLIDAGIECAVAAPSKLQRPLGDRVKTDARDARHLARLLHLGEIVAVAIPTVEQEAARDMVRARADCRGDLMTARHRVSKLLLRQGIVYYGGRAWTGKHELWLRTQRFDTPGLQQAYDAAFDAMLTALDRRDRLDREIEALAANSIFTPVVRRLGCLRGVSTLTAFGLAAEIGDWTRLSGRSIGAYLGLVPTEYSSGSTRVQGGVTKTGNSHARRLLAEAAWHHRPRYRPGQDLRRRWDAASPAARARGQAANARLHARWVRFDARKKCPVVANAAIARELAGWCWSLAVLDE

SEQ ID NO: 338528 - protein, 332 aa, unidentified
MNRQFTLGVDIAKDSFVVTLLDSQGNTVLPVKTFDNNAQGCLQLLAAIAQPQQTRVILESTGVYGKLFVKTLSASTLELYELNPLIIKRLSSSLVQTKTDQADAVRIARVGKLLAESQPETLEKYRVQHDPDRENLALWIAEYKRLSEASARLKQQLKALAFHAAPRVGVILERRERELEQIKQQLNTTKQEIQALLRVQADEPAQCLMSITGVGTLTTATALVSIQNIHRFPSADALKAYWGIYPRRRQSGKQEARSRMANHGNKLMRHMLWNAAKSAARHNPVCRDLFDRLIAKGKSAPAAYGAVARKLVQIIYGVLKTLTKFNPSPKTT

SEQ ID NO: 338529 - protein, 409 aa, unidentified
MRIIGLDIHRAFAEAVAWDEGELKRMGRVDMRRHLLEAFAKKLAKEDVVVVEATGNASSVAAVIAPHVKKVVIANPKQVRIIAHAKIKTDTIDASVLAQLYASGFLPEVWIPDEPTQALRRQVTRRNQIVRQRSRLKNIIQSILHSHLIPSCPHADLCGAGGRAWLFHQVLPEDERLAVERHLREFDRLGEDLKVIERDLARSALGNEGVKRLMTIPGVDMVVALAIAAAIGEVRRFDRPEKLVGYLGLNPSVRQSGPGPAYHGRITKQGRGHARGMLVEAAWAAARTPGPLRAFFLRVRARRGQHVAAVATARKLAVIIWHLLSKGESYAWARPALHARKLRDLELKAGYRAERGQKGAAHAYNIKSHRDQERRWVEQAEAAYARFVAGWNPRGPKRARTGAANEVRQ

SEQ ID NO: 338530 - protein, 372 aa, unidentified
MEEYSGYVGLDVHKETISPALANPGRSKPESLGVIANTKKSIQNLVHRLSREGEVLGFCYEAGPCGYEVYRWIKETGHDCVVVAPSLIPKKPGERVKTDRRDGLKLASLFRSGELTPVWVPDEEQEAIRDLTRARGEMKRVELQLKQRVSAFLLRYSKRYTAGKSKWTQGYYRWLAEVKMKFPVQQIVLEEYVGAVKQTEERVRGLDKEMERVLANWSLKPVVESLMALRGVQLLTAMSLVTELGDISRFDSPRELMAYVGLVPSEHSSGGKQKRGGITKTGNGRVRRLLVEAAWSYRFPARQSYHMQKKAEKATKPAQAIAWKAQKRLCNRYRVLQRNGKEPGKVATAIARELSGFVWAIACAVIAEQKTK

SEQ ID NO: 338531 - protein, 348 aa, unidentified
MAVTIVEDRRAITGGVDTHADVHVAAALDPIGGLLGVKEFAATTVGYAGLLGWLAGFGTVALVGVEGTGSYGAGLARHLAAAGVQVVEVDRADRQDRRRQGKSDPLDAVSAARAAQSGRAAGAPKGRDGAVEAIRALMVAKRSARNERTQAINQARSLIVTGPDDLRGRFAKHTVAALVAELAALRPRPGDVPGYATRIALRELGRRAEFLDAQLERLDELIIPLVTARAPSLLALHGVGPDTAALLLIAAGDHPQRLRSEAAWAHLCAVAPIPASSGKVRRHRLNPGGNREANHALWRIVITRMSSHAPTRAYVDRRTKEGLSKKEIIRCLKRYVAREVYPHLRAGG

SEQ ID NO: 338532 - protein, 339 aa, unidentified
MKFAGCDLHKQTITICVIDQSRRVLERRTVRCCEEQSILAFFERLGDFEAVVEATASYEWFVRLIEPVAHRVLLAHPKKLRVIAESTRKSDRLDAQILAEFLALDMIPTSYRATPRQHEHRRLVRQRGGVQRRLTSVKNRLRRILCDYNADRPSLFTIQGLAYLAQVPLSGADRFAVDQTVEELHFGRRQLLAVNAQLKEFAKEAPLREQEARTLLRTIPGVGFVTTEVVLAELADIDRFRSQKRVVAYAGLSPGQRESAGKSRELHLEKNGSTLLRSTLVEAAWRLVRHSLRWRRIYERLKLRVRAKKAIVAVARRLLCLMTAILKTGQPYSLSQQPT

SEQ ID NO: 338533 - protein, 432 aa, unidentified
MGIRRNKHKKEAGKMKSMEITAVGIDVSKSKSTVAIRRPGGVIVARPFDISHSNHDLEKLVSILKTTGGDIRVVMEHTSNYWKPIALTLKEAGFYVSVVNAMLIHDFSDNSIRKLKTDRADSLKIANYALTFWNELPPFNDEDETRLVLREQSRMYERLASTATSLRNGLIALADQTFPSIDQAFGHAIKNADGHEKWVDFFSIYWHRDCVLRLSIEKFTESYRKWCLRRNYKFRTNTAHKLYALAQDAVPTLPKNNGTKALVLQACKSLNAVCEAKQSTQEEMNRLASLLPEYEVVMQMEGTGPITGPALMAEIGDVRRFKNKKALVAFAGIDAPPFQSGNFESKSRHVSKRGSPHLRRVVFLVANIILTLSHKNNSVFCFMDKKRAEGKHYYVYTIAGSAKFLRIYYARVTEYLRTQEIPVAASCLNGNS

SEQ ID NO: 338534 - protein, 367 aa, unidentified
MLYLGIDQHAKQLTISLRDEAGDIRLRRQVSTQPERCAEFFTKLNEKAAEEGGYIAIVEVCGFNDWLLAILPQYGCVQTVLIQPTKKLKVKTDRRDAHSLSELLWTNRDRLREGLPIAGARQVVLPTKHYAECQRITLLRKDAGRMRTKATNRIKHILRRHNLQWQMPTKTFPSVKAIAWLKTLVLPPVQRQEMDWHLEELERWTKRMTDLEVIIIGRCQGDAMVDRIRTIPGCAHYSALSLVCRVGDPHRFPKGKSLAHYWGLTPGVNDSGEGTGRRGRITKAGSTMARWVLAQITLHCLRHDPVMKAWYKPIKNRRGSKIARVAVMRKLAVIIRNMMVHEQTYQECRDAMLNRRKRQLATNKSAA

SEQ ID NO: 338535 - protein, 438 aa, unidentified
MADPNERCEPDFAAFIGIDWADQRHAWALQTTIKGAIEHGDLDHTPEAVDAWATELGRRFGGRPVAIALEQSRGALLFMLTKYAHFVLYPIHPTTLANYRLGFRPSGAKSDPSDAGLLLDLLVRHREKLRRLNPDTVETRTLQFLVEGRRKLVNDKTRYSNRLTACLKMYFPQVLDWFAEVSSKIAGDFLERWPTLPKLQKARLETLRTFFIEHHSGRPESIQRRLEEIRRGVPATHDQAVIDSCVAAVTALVLLLRELRRAIQSYDEQIETTARQHADFVIFDSLPGAGAALVPRLIAALGTQRDRYSSASDLQCYSGIAPVLASSGKQSWVHWRWACPKFVRQTFHEWAAHSIGSSAWASAYYTQQRAKGKSRNTAVRALAFKWIRILFRCWKDHTPYQEELYGQALARRATRTNGAVNVQWKTGEGLSKISGFIS

SEQ ID NO: 338536 - protein, 360 aa, unidentified
MKKRLSKKANWFKENSFTDEDELYVGVDVHKEQYHVAIWHNGHIGCVYSMLSDNTKLLRDLQKIRSSLKNVVYEAGPTGYSLVRLLRSASLPAEVVAASKTPRMTDSGAKTDRLDCQQLAEYAAKGLLTFVWVPTKQQEADRQVVRLRDQLMSKRKRVMQQIKSFLLQHGIAWPGGGWSKTVLKRLRQLNIGAELRFSLDQYLDEYEFFSQKMTVTKAKLCQVFSSERHSAAMAVFKSHPGVGDITAWEFRAEMFNITRFSQPKQVSKYIGFCPRISQSGNTCRHGPITKTGRRELRAILIQAAWAWHRKDPYARKIYNRLLRNTGNGKKAIVGLAKRIAIHLWRMLRDGCLYDIKVAKV

SEQ ID NO: 338537 - protein, 346 aa, unidentified
MDKFDPCGIEVSAQELVVALSRDERAERLRSFPNTAEGHVAVCRFLASGSQRVRVALESTGLYGLDLAYALHREAHIEVMVANPRAVRHFASALMQRSKNDRLDAVVLREFAARMPFQAWVAPSPHCLALCAVTRRLETLTEQSTAEKNRLHAASLSVAIPSVVRRDLQRSVRSIQRAIVRLTKEARRILEGDPLLASSYHLLLTAKGIGPTSALRLLAETALLSEDLDVRQWVAYAGLDPREYQSGSSVHKKVRISKTGNRHLRRALYMPALVAVRHEPHLRAFYQHLLAQGKCKMQALVAAMRKLLHAVYGMLKRRQPHDGAKLYRLVVDSHAPSSEHCSAEAA

SEQ ID NO: 338538 - protein, 391 aa, unidentified
MIYIGIDVAKDKHDCFITNSDGEVLFKAFTITNNLDGFNDLYQKIESVMDDVTKVKVGLEATGHYSYNLLGYLIDKGLPTYVINPLHTNLYRKSLSLRQTKTDKVDARTIASMLMSDVNLKSYSDTSYHNEELKSLTRYRFDKVKERAKLKTSVSRLVCILFPELEKLVPTLHMASVYALLSEFPSAKHVATAHLTRLTNLLSKSSKGRYGKDTAITFRDSARASIGSNMPAKSLELKHTIKLIQELDSEIDEIENEIKIIMDEINSPILSIPGINYRMGAMIIAEIGDFNRFDSPDKILAYAGFSPSTYQSGQLDGAYAHMEKRGSRYLRYALYNATKYVCHWDPTFAAYLAKKRAEGKHYNVAISHAVKKLVRVIYHLEKTKQQYIKAA

SEQ ID NO: 338539 - protein, 352 aa, unidentified
MRRLKEKMIDKEDLFVGIDLHKQRWHVTIRTWDAEVFSASIPGTWEALQRILVRYAGHQLQAVYEAGYFGFRLHDRLVAHGIPCIVTPPSLVPQEYGNRVKTDRRDSSKLAHLLAKGMLKRVWVPSEEELYHRQVIRRRRQLVRDRVRTQSRIKAELRFYGIHLEEPRGRWTQIYFETLRSVRFENRWMQESFNRLLEQYEFLSAQIDKQTQLLRELSGTARYQERVEILQSIPGIGMISAMELLLELQDVSRFRRAEQLAAYVGLTPSQYSSADKVRMGRITGIGKNTLRAILVEASWKLITKDQVMREKYDRIKIRSGGKRAIVAVARTLLLRMRRMLLAGQAYALDLAA

SEQ ID NO: 338540 - protein, 334 aa, unidentified
MTYELLAIDLGKLSFHLHSIAADGAILSRKVSRSKLAEAVKSISPKAIAMEVCASAHHWGRQFREAGREVLLINPRFVKPFVRGSKNDAVDAAAIYEAATRPTMRFVPVKSTAQQDLQSLHRIRERLIVQRTSLINHARGLLAEYGIVLPQGPWRFASQAPSAVKDAALSDLGRELFLELLDQLTDVNDRVAKLDRKISEICRERQDCRRLSELPGVGPIIATALVASVEDGRYFKSGRELAAWIGLVPRQYSTGGKPRLGGIGRRANHYLRRQMIHGARAVISRLASHDDRRSQWLKELVARRGFNKAIVALANKTARVAWALLTRQERYAAQ

SEQ ID NO: 338541 - protein, 400 aa, unidentified
MIDVSDIGAFLGLDVGKGEHHATAVTPAGKKAFDKRLPNSEPKLREVFGKLKAKHGTVLVVVDQPASIGALPLAVARDMGCPVAYLPGLTMRRIADLYPGEAKTDARDAFVIADAARVMPHTLRSVDLEDETIAELEMIVGFDDDLAGEATRISNRLRGLLTQIHPSLERVLGPRVQHPAVLRLLDQFGSPAQIRKAGRRRLVTLTRPKAPRMAERLVDDIFTALDEQTVVVPGTDAAALIVPSLASSLQAVLDQRKLLAARIEELLDNHPLSKVLTSMPGIGVRTGARILIDVGDGRSFPSSAHLAAYAGLAPATRSSGSSIRGEQPSRRGNKQLKRAFFLSAFAALADPVSRAYYDKKISQGKHHTQALLCLARRRADVLFAMLRDGTFYEPQPTPSA

SEQ ID NO: 338542 - protein, 352 aa, unidentified
MEKLNRVGVDIAKTVFHVHGVDATERPVWRTKFRRNEWIEAVCERLKPGGEVGMEACASAHHWARILQSRGFVVRLIGAQFVKPYVKSNKNDAVDAEAICEAMSRPGMRFVAVKSVAQQDIQAAHRIREELVSQRTAKANQIRGLVGEYGIVAPKGIQQLRSALPIWLEDAENGQSFEFRLLLSDLHGDLQHLDERVAKLDVHITVQAKADPVANKLLELRGVGPLTASALAGALGDGRAYTKGRDFAASLGLTPHQHSTGGKARLLGISKRGDGYLRKLLVHGARAVIRHASNKEDGLSQWVNRLVGRKHVNVACVALANKTARVAWAVVHGNQAYDPKRTHERIPCGGTA

SEQ ID NO: 338543 - protein, 387 aa, unidentified
MIYYVGIDISKYKHDFCIISNTGEVIVENSSFENNKKGFQLFLDQLKPYNKQSVQIAFEATGHYSLNLELFLTNQDYSFMKVNPLVVHQFLKARSLRRTKTDKADSFTMASYLMSIQYKPNSYLLYNIYTLKSLCRSRELLIKERSKFEVLLTNELDKSFPELKPFFNNMISNTLLFILDKYKNIKHISLMKDYDSIRCISRGKFTYAKFAQLKELAKNSVGHHDENTDLLISTYVSIINNFNEKIDPINKQISTIIKDLNPRMLTIPGLGEISAAIILSEYGDISNFSSSNKMLAFAGLEPSIIQSGTLEHNGKMVKHGSGHLRYAIMNTAMSVLRYSPTFYDYYLKKRSEGKCHRVALSHVCKKLIRVIYTLEKNNLDFNPSLLK

SEQ ID NO: 338544 - protein, 342 aa, unidentified
MDIKVIGIDLAKNVFQVCVCLMDNSVMSNKKVNRNKLLDKIRQFPEGSLIAMEACGTAHYWGRQFQALGYQVQLIPAQHVKPFVANQKNDANDALAICEAVFRPNIHMVPVKTVEQQDIKALRCVRSRLVQNRTAMVNQIRSLASESGVIFSVGRLQLQASLSRILANNEHELSHTLHYLLKLLYEDLCVLNERINQIERDIKALCQIQPRYNALLSIPGFGPLVTASFMSELGSAHQFKNGRQLSAWCGLVPSQSSSGGKVRLGSITKNGSSELRVLLIHGARAVGRFASKRDDRLGRWFNALALRQGRHKAVVALANKIARIGWRILTSNDNFDVNKAFA

SEQ ID NO: 338545 - protein, 345 aa, unidentified
MNILKQTVGIDISYKKFDARFGTIDTQQQNTLSTSKSFKNSPAGFKLFLLWVKKLIVSHDVPLIFVMEATGVYYEHLAHFLLHHGYQVAVVLPNKIKNYAKSLESKSKTDPLDAAVITRFGLERQLKLWTPPSDALKALRDVCREYHSTKTNITQIKNQLHALKSSFKPHRESFKRKTQLLKFLERQVALMKKELRALVKSDPVLAQHLKQISRAKGLGDITILTVLAETRCFDLVTNQKQLTSYAGLDVVFNDSGMKKGRSSISKKGNKFIRKALFMPALSACRANPKMKELYRRLVAKGKNKKLAIIAVARKLLLLIYTLWKTNSPYIPDYKPVHPTSSGLSD

SEQ ID NO: 338546 - protein, 322 aa, unidentified
MQSNSSVSRCWVGIDVSKDWIDVAILVDEHRAEQLRCERSAKELAQLAQRLLPYAPQGVVLEATGGLEGVVIAALVDAGLPVMRINPKRVRDFARAHGLLAKTDVLDAHVLALFGARMRPPLRAFPDPHRQQLAAWIARQQQLTLERAAERCRLQQTTEPQLRKSVQRVVAFLGKELERLEKELSALLEESEVCQQQEALLRTAPGVGPKVSRGLLAQLPELGHANRHEIAALAGLAPFTQDSGQWRGKRRIQGGRGAVRTLLYLASWTVIRTPGHLQEFYRRLVAAGKPKQVALVAIARKLLLALNEMMRTNTPWRAAFSA

SEQ ID NO: 338547 - protein, 368 aa, unidentified
MKNVITYVGIDAHKKDLFVAMLVGTAATPVTWQLANEPTAVRRLVKKLEREAPGPVQACYEAGPCGYALQRQLTTARVSCQVIAPALIPRKPGERIKTNRRDARKLVELHRAGLLTEVRPPTPEDEAVRDLCRARDDAREDLQRCRHRLGKLLLRRGLHFSGRNWTKAHRRWIESLTWTHAPERVVVDDYLLAIDHLEARLIELDARLTEVAQTDPYREPVGWLRCFRGIDTLTAILILAELHDFRRFQAPRALMAYLGLVPGEDSSGEKYRRGRITRTGNTLVRRLLVETAWHYQHRPTVGVVLAKRRKGQPTRVIAIADKAQQRLCRRFRKLAAEHKPPRKIAVAIARELAGFLWAALQPAPTPAT

SEQ ID NO: 338548 - protein, 361 aa, unidentified
MANSISLVGLDVHAAQTHAAVLDLSTGELRRRRLSVPAGEVVAFLASLPGPVRAVYEAGPTGFGLARAGREIGIDVQVVAPGKIPRAAGDRVKTDKRDAERLVRLLAAGELHFAFVPTVADEQFRDLIRAIEDVRGDLMRARHRLSKMLLRREIRWNGPGAAWTITHMNWLRSLRFDDVCSQATLLDYLSSVEMLLARRKTLLVALEQAIPDTQHAPVIAALRCFRGIDTLSAAGLCAEVGDWTRFRPKQLSGFLGVVPSERTSDSKRRQGAITKTGSSHARRLLVEAAHHYRHQPAIGVTLAKRQQGQDPRVIAVSWRAQHRINQRWRNLHGQRHKPAGVVAIACARELAAFCWEAATLT

SEQ ID NO: 338549 - protein, 338 aa, unidentified
MKTDQTAQTYALFVGVDIAATTATASIRRPGAQAQRSFTIDQTPEGYTSLLHKLQATGHAPCRVLVVMEATGAYWISLATRLVHEGFVVRVINPAQAHHFAKALLKRAKTDAMDAQTLAQLAMVLQPEPWTPPPQIYYALQQRLAQRDDLLNLRQQVRNQLHALVQHPEVIPEVRARMDRLLATFEAQLAEVESDIAAALTQDSAWAAAAERLQSIKGVGWVTAAWTLVTTLNFTSCDTVDALTAYAGLAPMPRQSGSSVWHRPAIGHTGNGRLRTAFYMATLSAAQHNPIIKTFYARLRAAGKPEKVARCAAARKLLHISWAVVTKDQRFDPNYARG

SEQ ID NO: 338550 - protein, 359 aa, unidentified
MRIIGCDLHARQQALAMLDTETGEVVNLMLRHEGNEVREFYSQLPRPVLVGIEATGSMHWFLNLMEELGIECRVGHPATIRAAAPRKQKTDRRDAELILQMLVEKRFPAIWLPTKELLDLRALVLHRHQWVRIRTRIQNALQAIALANGLRLGPSLWSYDGQAKIAFLPLLPHASYRRSMLQEMYRKMEEEIENLTQQVAEQAGQRCGARLLMTHPGVGPVTALATEVFLGDARRFVDGKALASYVGLIPREYSSGARQRLGGVTKQGSPLLRFLWCEAGAHAVRRDPEMKRFYRRKLVQKGLGKARVAVARKLGIRLWIMLRDEIDYQEFCRRGQKQQSGAACAGMPEVRNGAKSPAD

SEQ ID NO: 338551 - protein, 416 aa, unidentified
MKKNTNSPMKKEPRAKRAKAQRPVQREAKEVLAELVEKLRGKLELKSTSASQVEAGPRGELSPNLNRLTVGLDLGDQWSHFCILGFEGETLSEGQLQTRQAEVAEFFQALPPARVVMEVGTHSAWMQEIIAGEGHEVLVANPRLMEGSKRRKRKNDRIDAKKLARLGRVDPQSLHPIRHRSREVRQDLVVLRAREALVAARTELINATRGLVKSMGTRLPKCSSPSFEQKVKDAIPERVREALLPLVQLAGALSDCIRSYDQKIEELGSEKYGHTKLLRQVKGVGPITALAYVLTLENPEHFAKSRDVGPYLGLVPKQEDSGESQPQLGISKAGDTMVRKLLVGSAHYILGPFGPDSDLRSYGLRLCERGGKNAKKRAAVAVARKLAVLLHRLWVSGEVYEPLGYVASRAIVQQAA

SEQ ID NO: 338552 - protein, 373 aa, unidentified
MNYNTVYVGMDVHKETFSLCCYTNEKELAEYSQKVDAHYSKVLNYLEAMRFHYGDDVMFICGYEAGCLGFTLYHQLTSHNVKCIILAPTTMSKPTGRKKVKTDKRDAALIARCLAHHDYSPVHIPTEQDEQVKEYIRMRQDHKLALKKIKQQILAFCLRHNYRYDTTKSHWTQAHLTWLRSLEPEGLYQEILTEYLATYDQLTDKLERLDKRIEELASKEDYQENVSHLSCLLGVKTQTALSTLVEVGNFKRFASAQQFASYLGLTPGEDSSGEDQNRLGITKAGNSHIRTLLVEAAQSYTHGKPGYKSKALKARQKGNPADIIAYADKANERLRRRYYQLVLGQNKKANVAKTAVARELACFIWGMMTDNIH

SEQ ID NO: 338553 - protein, 349 aa, unidentified
MEEQYFIGIDLHRDFFVAVAQDMHGTELLKERYENSVENVAKLLSNFSTPPMVVVEATRNWMWFTTALQERGCIVQLAHPFRTKAIASARIKTDSIDAKTLCDLLRAGLIPQAYIAPHEILDNREIGRARICLVHDQTMLKNRIHAIIVKENLKFSGKDMFGVTGQAWLKEQAVSAGKRHVIEVYLKQLTSIQEQIKTLEALIRQRSSSFPEVCLLQTIPGFGTTTAFLLASEIGDVQRFPNAKKFTSYFGIVPRLSQSGNHAYYGRITKLGNPYVRWLLVQAAHRYYRMDNEQKRFVDRLSYRAGKKKAIVALARKLGVITYRVLKENRAYIPTKKPERSVPPLYLSR

SEQ ID NO: 338554 - protein, 355 aa, unidentified
MSQEKYIGMDVHQATISVAVLDSRGKLIMESILETKATTILEFVQGLHGSLSVTFEEGTSAAWLHDLLKPHVTRLVVCDPRKNALLKDGSKSDRIDARKLAELLRGNQLTSVYHGEHGMRTLKELGRSYLTMTQDLVRVMSRIKALYRSWAIPCSGTSVYAPRHRAEWLDKIPEPGVRLRAERLYQQLDLLQPVRQQARRDLLTESRKHHAVKLLRQIPSIGPIRAALLVAQLQTPHRFRTKRQLWAYSGFALETHDSGEYRYVRGKLQRNRERMTVRGLNNNHNPEVKNLFKGAAISASTHPGPLYDFYIALLEKGMRPTMARLTLARKIASITLTIWKKGADFDATQLHRQEA

SEQ ID NO: 338555 - protein, 357 aa, unidentified
MPAHSKAAKPSTQIAVIGIDIGKNIFHLIGLDRCGVIILKAKLSRGQLENRLANLSPCLIGMEACVGSHHLSRRLMALGHDARLMPAQYVKPFLKGHKNDYRDAEACAEAVQRPTMRFVAAKTEEQLDLQALHRVRARLVRERTASVNAIRAFLLERGIAVAQGIHRLRKALPDIFAKAPDALSPRMVRIIENLAADWRRLDERVEEVSTEIEMLARKEAPCQRLMTVPGIGPLISSATVATIGAGDLFSKGRDFSAWLGIVPKQLSTGGRTILGKISKRGNKYLRMLFVQAARVVLLKRVSWERYGLKNWIEAAAKRLHHNKLAIALANKLARIAWAVLHHGRNFEVSHEYTPQPA

SEQ ID NO: 338556 - protein, 367 aa, unidentified
MFHVGLDIHTQRIAICALDERGQVVHRSQVRSIQDMVRVLASLPDRFEVCYEASCGYGHFHDLLRPLATRVVVAHPGQLRLIFRSKHKNDRNDAERLAKLLYLGEVPAVHVPALEVRTWRELINCRSQVIAKRTRAKNTVRALLRGAGITPPQHPGLWTKKGLAWLRQLELPTASQQLRRDLLQEEIEGLLRQVRRLEQQLNRQAQQTPAVARLRSIPGVGIRTAEAVTAFLDDPQRFGNAKAVGSYFGLVPCQDQSGDKNRLGHITREGAPVVRQLVAEAAWQALRRSPAVRAYFERVRREDPQRTKIALVATAHYLVRGMWALLKRATVWQENPALAPALASGTGPVAGPGDDSSTKAGGVANEV

SEQ ID NO: 338557 - protein, 347 aa, unidentified
MNKNWFIGIDVSKKTLDASIFVADVVINKFPHTQVRNDKEGFKELLRWLKEQGVRPQDALIGLEFTGYYSDALEQFLTSKKLCYAMLPTTVVKHYQRGTRDKNDKMDSAKIADYLFRFHDTECIKLRVLPSKAMQDLKALKSERKFYVHHRTDCENRQKVAKSRDEQKNLQKIIDLYDKEIERIDQKMADVVTSDEEIHLTYMRLMSIPGIGSVNAINTIANTQNFTAFETARQYAKYVGVAPSEHSSGTSVRWRGRPSPHADLQAKADLSMAAMRAVEFSFEMNVYYERKLGNRPDDKDVKRKALNAVKFKLIRQMFSVAKQHRSFKPLEQTQTQAEIHSTDKRVN

SEQ ID NO: 338558 - protein, 349 aa, unidentified
MIKKLLKQIVGIDVAQKELVVSLGRMDEEAITTVYAYKKFVNNEKGFMALVLWVKKQTTEAFPLRYVMEATGVYHESLAYFLSNKACLVSIVMPNKITNFFKTLEIKTVTDKSMSEAIAMFGLEKKLDNWVQPKKVFRELRQLTRERDQLIVERTMLKNQLHAEEVEAYPSVKTIKRIKDRIKMANEQGDEIMAEIKQTIKIDVELKHDVALINTIPGIGVLTSAIIMAETNGFELIRNAAQLASYAGFDVKEKESGTSVKGKSKISKRGNRHLRKAMHMPALAAIRHSERYKAIFIRIVARNGIKMKATVAVQRKLLEMAYTIYSTKKPYDTEYLQSQQTELELQEVV

SEQ ID NO: 338559 - protein, 343 aa, unidentified
MKHIGMDVHSTTTQICVISDRGREIRRAGVFTREGDLVAFLDSIPGPKQVALEESQMADFVTRIVEPHVTRVLRCLPQHNRLITESEKKCDSEDAKSLAELLYLGKLKEVHHAPWSYRQLRAGVRAYSMASRDLTRAKNRLKAIYLFNGVHCVGDTVYSERNREPWIKRITKGSCNAKLLQRQYAQMDFCRDNKAAHIKILRELAKEFPQDVNRLKTYPGIGFIGACTLVAYLENGWRLKNKRKLWQYCGVGIRFHESNAKGRRSASRKGNRLLKNVVMTAAATIASRRNADNALTRMWRAGRETGVDPDRLKRNVARKVAVLAQRSLRYQERYNDDRVLTSS

SEQ ID NO: 338560 - protein, 325 aa, unidentified
MILGIDIAQEKFDVALYEDKELIATGQFTNNPAGFKKLSKWCNNKGAGQVWACMEATGRYGDALAMYLHQAGHQVSVVNPARTRKYAESQLKRNKTDQVDAKVIADFCRTQEPRLWTPPAPEKRELQEMVRRLSALIKEQTRERNRLKSGLQSQVVKDSIATNLEFLGTQIVQLEEQIQSHINQYPDLKRDRDLLISIKGIGPKTAAVVLAELPDVEDFDHVGQAVAYAGLSPQQYDSGSSVHKRSKLTKTGNQNLKTALFFPALSAIRFNPIVQALALRLAEKGKDKMLIVGAAMRKLMQLIYGVLKSGQPFDPNYATKMQDAI

SEQ ID NO: 338561 - protein, 359 aa, unidentified
MKGISMPDQQQAVIGGIDCHTDFHVAVALDPLGRVLGTEAFPATSAGYRLTHRWLASFGPVAAVGVESTGSYGAALTRALVEQGCRVIETCQPHAHLRARRGKNDAIDAEAAARKVLSGEATAAAKDTSGIVESIRQLSVARSSAVKARSAALCQLGDLLVTAPATLREQLDTRRSLEGKAAVCARLRPDTDRLADPAQAAKAALRSLGHRIAQLGAEADELGRRLDRLVATAAPTTTSRLGCGTHHTAALLVAAGQNIDRLGSEASFAHLCAAAPIPASSGRTSRHRLNYAGNRSANRALHMIVIVRLRYCERTRSYLNRRVAEGKTKKEAIRCLKRFVARELYRTLRADLATLKTRT

SEQ ID NO: 338562 - protein, 419 aa, unidentified
MFKILRKNCCGLDVHKTWIFACIGITDPHGITHYKQARFSSFSKGLRELVDWLALYSCKEVCMESAGKYWIPVFNILEKSCLVTLAHPKYTKPQKGNKTDRKDARWICDLFMCDMIKPSFIPPPDIRHLRDLARYRVKLTNCLASEKNRAQNCLTVSNLKLDDVFADVFGKSARSITEHILAHPGEHFDVTPFVDGRCKHPIEEIQAAVDGAVSMEQAVKLRECLNHIDELQNHRLRIEEEMIALSAPHAATLKLLRTLPGFDSNPLTAIAVLGEIGGDMSVFPTAKNLCSWAGCCPRNDQSGGKIKSTRISRAGTFLKPLLVQIANALIRSKKHPEFAHRYRRIKARRGHKKAIIAICRMLLTAIWNMLSKLLPYSSNGFLEPLQPNPNKTLTVSQALHLLRSKGFCIQDDAPALTSG

SEQ ID NO: 338563 - protein, 392 aa, unidentified
MVISVGIDVSKDKHDCFIVSSEGEVLADVFTIPNTIEGFHCLLQRIRDCTAPQDKIKVGLEATGHYSYNLLGFLLDNGLATYVLNPLRTNLYRKSLSLRKTKTDRVDARTIASMLLSDAGLKPYTDTAYHNEELKSLTRYRFDKVKERAKLKSSIARLVCILFPELEKIVPSLHIASVYALLEEFPGAKQIAAAHLTRLKALLVTASKGRYNRDMAFEIRDAARNSIGSRMPAKSLELQHTIRLIRELDDEIEEIEEQIHSIMDELHSPITTIPGLGFRMDAMILAEVGDFTRFDSPDKLLAYAGMSPSTYQSGQLKNCYPHMEKRGSRYLRYALYNAAKYVCQWDPTFSAYLAKKRAEGKHYNVAISHAVKKLVRLIFAMEKSGVPYLLAA

SEQ ID NO: 338564 - protein, 440 aa, unidentified
MADKRKAPQRLEVLHPDCAGIDIGKTSHYVAVDGARFDEPVRKFGTFTADLEAMAEWLDSCGVREVAMESTGVYWIPAFEVLDRAGLDVRLVNARATKQVSGRKSDVMDCQWIRQLMSHGLLSGAFRVPDEVCAMRSYLRQRDGLVGQRSRAVLHIHKALTQMNVQLDNVLSDVMGKTGQLIVRAIVAGERDGARLAGFRDGRCKAEEATIAASLQGNWRDEHLFALAQALERHDALQGQVEACEARINAELDALARPGLPDPPADRRSRKGRDRALRRRLKRMLGVDLVAIPTIGVETALTVAAEVGADLSRFPSAAHFCSWLGLAPGTRISGDKRLKGGPPRRSNRLGQALRMAATTARRDKSAIGAMHRRRLARMDAAKAIKATAHQLARLVYAMLTHGEEYVARDVAEWEAKRRERMVLNLQRQAQRLELALVPAT

SEQ ID NO: 338565 - protein, 331 aa, unidentified
MKNYLNSVGTDISKKYFDAVLFFSGEHAKFANEKKGFASFIKWLKKHDYGPGNVLICFENTGYYSLQLSFYLNEKGFDYVQEHALQIKRSIGFRRGKSDKADALDIARYAWVNRESIKLSKPPSKSILKLQQIKTTRELLVRQMVAIKNQIQALAAIGDKNVSRVACRSLTFVLGTIEKQIQKLESEIEFLIGQDEQLSAKFELCRSVKGVGLVLALELIIHTQNFTCFSDWRKLAAYCGTVPYPYQSGTSIKGKARIHKSCDQRMKSLLTMASISALRVDPELKIYYKRRVEEGKPKMSVINMIRNKMLARVFATVNRGTPFITLSKFAA

SEQ ID NO: 338566 - protein, 334 aa, unidentified
MEKVTTVGIDLAKSVFSLHGVDSAGGVVLRRTVRRDQLHEVVAGLSPCLIGMEACSGAHEWGRRFQAHGHTVRLMAPKFVAPYRKSGKNDGNDAEAICEAVTRPNMRFVPVKSIEQQALLALHRVRQGFVVERTAIINRLRGLMSEFGVVLALRSVTVRRQAAVAAEGLPELARRAIGDLLDELRVLDERIGGYDREIEAQAKLCEPAQRLMKIRGIGPTTALAIVATVGNAREFKNGRQFAAWIGLVPGQYSTGGKTRLGHISKRGDAYLRNLLVQGARSVLNSAGMHQDRMSRWILELQPRRGYYRTLVAIANKNARIAWALLAKNESLRAA

SEQ ID NO: 338567 - protein, 343 aa, unidentified
MERIATVGLDLAKSIFQVHAIDDAGVPIVRRALRRSQVLAFFGKLPPCVVGMEACGSAHFWAREIKALGHDVRMMPPIYVKAYVKRSKTDAADAEAICEAVTRPTMRFVPIKTVAQQGAIMVLKTRDLLVRQRSQTANALRAHMSELGIVTATGMASIAKFVDMVRDTSEERIPTVARRALLEMAEQIEALDIRVERLDRQIITAVKGDDDARRLTSIPGVGPIIAATVRATVQDPRGFRTGRDFAAWIGLTPRAHSSGGKERIGSISKRGNRQLRTLLVVGATSILKLGKRGLKLPEWVRALMLRRPFKVVAVALANKMARTIWALLVKGGTYQTPLAMAKV

SEQ ID NO: 338568 - protein, 390 aa, unidentified
MSQSFDTSRSLTAFEQDSTLVAVIEMSQSKWLVAAVLPGVERRPLKKLDADAGALLKLLQRWRDEARKAGRTIKRIVCAYEAGRDGFWLARWLQAQAIEAYVIHAASIAVSREHRRAKSDRIDTELLMRSFLGWLRGEKRHCSMVAIPTTAEEDARRPSRERESLVGEQTRIVNRIKAVLALFGIGGFNPKLRGAAQKLETLRTVEGTPLPENAHAELRHDLERLRLVHDQIRAIESERLRRLAAAPAAATGPDAMVRLIARVFGVGIETADMLVNEALARNLRDRRAVARYAGLTGAPDESGKRRREKGLARAGNGRVRRGMIQLAWRFLIFQKDSRLVRWFRERTADGRSTTRKTMIVALARKLLIALWRLVTTGEMTEGIKLRPAGT

SEQ ID NO: 338569 - protein, 414 aa, unidentified
MRRCIGLDVHREFAQVAIWEDGMVRQAGRIQTTPEALREFADSLCLSDEVALEATGNTYAIARLLEQHVGRVVVSNPQKTRAIAEAKVKTDKVDAAVLAGLLAANYLPSVWLPDEATFALRRQVARRAHIVRQRTRLKNQVQSILHRNLVPRCPAADLFGVKGRAWLAAQDLPQDEHQAVGALLRQLDFHGQELRIVDAELGRVGLEREEVRRLLTIPGVDATVALAIVAAVGDFGRFSSPQRLVSYLGLNPRVRQSGGQPAQHGRITKQGRAHARGMLVEAAWAAAKTPGPLRAFYERVRGRRGMQVAVVATARKLATLCWHLVVTGQDYAFARPSLTDKKLRALELRAGLPARRGQRGKAAAYSLKAVRRRERALAEQAEVAYRQLVAGWQPKPPAKQQPKRGVAATTGARR

SEQ ID NO: 338570 - protein, 343 aa, unidentified
MTKISTIGLDLAKNVFQLHGVDGSGAVVLKKQLRRGALEKFFAQLPPCLVGMEACGSAHHWARVIGRYGHEVRLMPPAYVKPYVKRNKNDGRDAEGICEAVGRPTMRFVPVKSVEQQATLAVHGTRALLVRQRTMAANALRAALSELGIVAAQGYEGLRELMAKLEEPGEEIPEAMRGALLVLAKHWQALDADERLLERQIAKAARSDQDARRLMEVPSVGPIIASTVLAKVPDAKVFRSGRDFAAWIGLTGKDHGTGGKHRPGRISKQGDRMLRAMLICGASAYLRHQKARGVSDPWLRELLARRPYKVVMVALAAKTARIIWAMLAKGEAYRDRASASAAA

SEQ ID NO: 338571 - protein, 413 aa, unidentified
MEWVACVGIDWAEEEHAYTIQTPDGAKTSGRMRSSPEDVHEWVRMLRQRFTSGMIVVAIEQGRTSLLYALMAYEFLALVPINPRASKAYRESLRLSGSSSDPVDADLICDFAVKHLPALRVWQPDDTLTRKLRMLVETRRTLVDQRTGLTHTLAATLKGYFPQPLQWFGGEGASLLWVMMERWPTLEQLLGATVDEILGVLRAKRCRRASARAQELFDQIHAAVPLTRDTAMIEASSVYAQTLIRILTPLEAAIEMYDTIIASVWATHPDRQIFESLPGAGPVLAPRLAVAFGSDRERYDQAADLQCYSGIAPVTEKSGRSVWVHARWGYPVFLHQTFHEFAASSMPHCKWAHAFYQQQCERGAERHQAIRALAFLWIRILFRLWENRQPYVESTYIEALKKKRSPLVPRLAA

SEQ ID NO: 338572 - protein, 295 aa, unidentified
METAFITVKYGVGLDVGKQTFYACVSAIDQTQRVKIKAVHSFANSPKGIAEFIRWAGHHCKGENLSVHYLMEATGIYYEQLALALHSRQEHVSVILPQKANYYIKALGIKTKTDGVDAQGLATMACQQRLDFWKPISEAMYKLRQLTRQHTQLQELKMQLHNQLLALEAGMYHSGEVRKQMMKMIEQIDRQLAECVKLIEKAIAENPDWQRKVKQICQIKGVGILTIANLITETNQFSLFENQRQLVSYSGYDVVENQSGKRVGKTHISKRGNARIRRALHMSALQVVRISTKTI

SEQ ID NO: 338573 - protein, 320 aa, unidentified
MTSRGAEKMKNDTIGVDVSKDHLDAYRLADGAARRFANDKGGHKALIKWLAETPLNRVVFEPTGPYHRAVERALGASGVPFVKVNPRQARRFAEATGKLAKTDRLDAAILARMGALLELEARPARSEVLLELKELYVAREALVKDRTAAKNRGKALTLSLLKRQNAQRLEQIDRQIATVEATILQIVEADASLSDRFAILTSIPGVSNITPFALLIAMPELGALEAGQAANLAGLAPIARQSGRWTGRSFIRGGRADVRQALYMPALVAARFNPDMKAKYTHLIKTGKPAKVALTAIMRKLVVLANALLKANRPWTPRTA

SEQ ID NO: 338574 - protein, 345 aa, unidentified
MELHTIGIDLGKTVFHLVGLNLCGEVVVRKKFSRKQLLHFTANLQVKLIGMEACGGSHFLGRALREQGHEVRLMPAQYVKPYVKTNKSDYIDAEAIAEAVGRPKMRFVPIKSDDQLDLQSLHRVRERWVMRRTAVINQIRGLLLERGITLRQGRGHVDAALPGILEDASAMLSGALRMLLAQLKLELDHLQIRIDEADAMINKAAGENEACRRLVAIPGIGPVTATAIIAAIGNGAAFKKGRGFSAWLGIVPGEYTTGGKQKLLGISKRGNSYLRRLFVQGARAVLQQSAKQSSGLSAWLAQLTTRTHSNVAAVALANKLARMAWAVLAKNEPYRPPMLVGAATA

SEQ ID NO: 338575 - protein, 427 aa, unidentified
MERPVHAAEISEIVKGASEATTRKSQVLSLFSTKEAPVMLMVQEERLRTTHVGIDAHKTQLTVAILPPGQDSPERLTVANNHRGYKKLVRKVKKFTPFHATACYEAGPCGYALQRALEALGLECLVIAPSRIEQAPGKRVKNDRIDAAHLAELGRNGKLSVVLPPTPASEGQRDLWRLRDDARQDLQRARQRLEAFLTRWGRVFTDGRRWTRKHQDWLQKQKFSNPHSQSVFEELARDVHIQRSRLEERTQRMLALTKEKGNEVLLRKVGYAQCFRGLAALASTALSLEVYDASVRFGRADALGAYLGLTPSEYSTGDREKRGAITRAGNHRVRRLLVEAATHYRGSKAPTRRMRECQRGQPAWIVRLALQTEKRLCRKANRMLARGKDPKTVRIAIARELARALWVALCAAEQGPDYVPGTRCAVG

SEQ ID NO: 338576 - protein, 448 aa, unidentified
MRTRKPPKARKMKLPKHLQHINPHAAGIDVGSRSHFVAVPEGSCEQPVREFTSFTDDLHRMADWLLACGVTTVAMESTGIYWIPVFEILERRGLEVRLVNARHVKNVPGRKSDVLDCQWLQRLHSYGLLEGAFRPAEQVCTLRAYVRQRMNLVRYASAHIQHMQKALAQMNLQLANVVSDISGVTGMRIIKAVLSGERDPLVLARLRDPRCKSSEQTIARSLHGNVRPEHLFSLKQAVELYEFYQSQIVECDRQILDQLADFDAADGSGNGPPVSLEEALLRMSGVDLTRIDGIDTNSALKIISEIGTDMSRWKSPKHFASWLGLCPGTKISGGKLLSAKSKPVANRAAATLRMAAFTLLKSKSALGAYLRRQRSRLGAPKAITATAHKLARLVYSMLKHGTAYVDEGQKHYEERYRTRVVQNLKRKAQELGYALVEVAEKQPQPAAT

SEQ ID NO: 338577 - protein, 366 aa, unidentified
MTGTSSASRPRRRRPAGEVILGVDTHRDAHVAAVLSLVGEVIGTEEFPATAAGYRDLLGWARGSGTVRRAGVEGTGSFGAALSRYLLAQGVDVFDVNRFDRADRRRRGKSDPLDAENAARAVLSGRARAQAKTGDGPVEIARMYKLAKDSAVKARTQAINQLKAVLIRADPQLREELAGLGNAELFRTCARLVDDSLNHEAGEGAVLQATHVTLGLLARRIRQLSEEIQDLEGRLTRLVERHNPQLLEVVGIGPDTAVTLLITVGDNPERLGSEASFAALCGVSPVERSSGCRQYRRLNRGGDRQANAALHRIVQTRLRVDPRTQDYYERRSKEGKTRREIVRSLKRYAAREVFHLVRPVQSQPSL

SEQ ID NO: 338578 - protein, 344 aa, unidentified
MHYVGVDLHKEQSWFYVSDSEGKRVFSKSVPNSEETLHTVFKEIPKPFQLAVESTYNWYFFVDIAELYADKAFLANSYELKAFAKRNKKTDKIDAKLICDVLRKGYLPSVRIAPKNIRQARELLRYRVSLVRERTYNINKLKALLDKLGNISSGDFTTYKRLDAIRTTELPEIYGSVINGYISRIKFLTEKIRKMISYLEEVFGNDEEVRNLITVPGLSYFSAALVKSEIIYISDFTCFNRLCSYAGLAPRVSQSAGKDVHGPLSKNRRKMLQWILLEVVPHFIKADTERKEKYECLAKRKNRNTAKVIMARDLLRIIYCVLKEKRPYYANNFRPVAGVALNVV

SEQ ID NO: 338579 - protein, 472 aa, unidentified
MGKGSGNGTTRGDRRRNARRERLRGLLPRDGAVIGIDLAEDKQAIAVIDHDVRVLARKTVRVKAFRLGEALDWAVGQARAKGFAQVTVVCEPTGPRWLQVQRLCAERGLPLVCIQPLMSHIAREQQDYTTHKTDESDCVMIARLAVELHCYIPEELDETWAHLRQLGRRRAQLITAETASMHRIQDFLSVAWPTVTQTCAQPLKSVTWLAALQVVTSRCGGQPARLAEMAEEAFTALVQAAVPGWGRKRAFGPIRRRIFAALTDTEGVVAWSRRGLLRRVADELGDLQRTRAQLRVVEADMAGVLDELGLSRLAGIPALTAVGAAAILAEAGDPHRYDSSSSLVKHAGMSPSDNSSGTFLGDAHISRRGRPGLRLTVWRAVWPMLQFNPVMAAKYQAMTQAADAAEEQADGTRSASAAAAAARARRAKARVACAASLLRWIYSMVVHDTSWDAAVAVGETATQHAPRPAEAA

SEQ ID NO: 338580 - protein, 314 aa, unidentified
MQDVFIGVDVSQDTLDVAGVPGKKHSIIANRASDIKLWLKSLPPACRIAMESTGRHHQLLAELAHEAGLHVYVLNPKRVWYAARGDGRRSKTDRIDAQVIAKFLRDHIDDLHEWQPGCALHRELTQLERRRHCVERHCTAMAQSLRNAAGLEAAFAQFDQAIKTMRAAIDKRIQQLLATDDELSAKYALLKTVPTIGQAGGASLATLFARVPFHSSDAVVAFVGLDVRANDSGKHRGQRRLTKMGPAHLRREVWLMGFVGTHTKLLKPIYQALLARGLTTTESIMILGRRILRIAWAVWRTGKPFDPLLVGKRA

SEQ ID NO: 338581 - protein, 342 aa, unidentified
MELYVGLDVSLDTTAVCVLDGAGKIVWRGRCSSTPDAIARVVREHAPTAVRIGLEAGQLSTWLVHGLRKLGLPAICLDARHAKAALSLQLNKTDDNDALGLAHIVRTGWYREVAVKSMDSQTTRALLMARAHLVSQRQTTANLIRGLLKTFGLLVGQAGGGRFALRVRELIADHPALVAIVEPLLTVWQTLREQVADLDRQVRVRAREDARVRRLMTAPGVGVVVALAYTAVIDDPARFAKSSSVGAYLGLTPRRYQSGEVDYDGHISRCGDGLLRSYLFEAANVVLSRLTKPSWLKEWGEALAQRIGARKAKVAVARKLAVVLHRMWMDEQEFRWSPTAAA

SEQ ID NO: 338582 - protein, 400 aa, unidentified
MQCTDQHAYPRTTVREEDSSLFMALELSKSVWLIAASAPGSEKVSKYRVAVGDVAALLALLARLKARAERYRDAPMQVVSIHEAGLDGFWVHRMLEANGVESHVVDAASIAVDRRSRRVKTDRIDVERLLRTLMGWARGERRICSMVRPPSPADEDERRLTRERRTLVTERTRHVNRIKGLLATQGVSGFEPLHKNRRQRLEELQQWNGRPLPPRLKTELVRELDRLELVMSQLAALEAERDRALQVRGMAFRNTTKAPSSGAACAGEVGSQLLQLRGIGPEFASVLSLEAFYRNFNNRREVAAYSGLAPSPWKSGGIDVEQGISKAGNARLRTTMIQLAWLWVRHQPGSALSRWFHERVGDKRGKIKRIAIVAVARKLLVALWRYVTQGVVPEGAELKA

SEQ ID NO: 338583 - protein, 465 aa, unidentified
MSQYRKHVQGRRGEAFVKLVRGVPREKIACVSIDVHKYYHQAVIHNDYGEILVPSFRVNIFQSGFAQLCAAIDHTVTAHDIQVLLIGMEPTGHYFENLARHLQQRYPHLRLVNSYAVKENRKQSMLGAEKTDDIDLGAIGDLVLRNECFPYQPLSGDHLHLQNWSRFREAKVKTRTALRNQIIGHLDRMFPGLVRPHHQPEHGGPGQLFADFWDCEAAQHLIRLCPNPHLLATMEPQDLVQLFHEHHWRLGPAMAQRIIAFAQQVLWPAEEVIAARQPLLELDLQLLDAVEQVIAQAEQQIAHYLAQTQGQVLTTVKGIGTLRAAAFVAGIGNPEHYEHAGQVFRRSGLVSGRDDSGLHQDHGRGQRVTKVGDPHLRRALVEITRGLCQWQPYFGQYKQHLEARGKHPGVATVATARKINGVLFALMRDQSVFQPLDAQGRLVYPLASIRGKGKATTSGPRKDST

SEQ ID NO: 338584 - protein, 370 aa, unidentified
MVRPAASGDNRVTVNRGDMSMHHQPKICAVFGIDIGKSLFHVVGLDTSGAPIQKAKFRRETLLQFFARAAPTLVSMEACPGSQWLARKLKELGHEVRIIPAQFVKPYVKSHKNDIIDAEAIAEAATRPTMRFVGIKEAHQIDLQMLHRVRSRLVKGRTNLICQMRSYCLEHGVALRQGAGVFKLDIVRTIDDPENDLTERARVVLRELQADLLRLEERILSVSTEIKNIADRDETARRLMTIPGVGPLGATAILASIGDPSRFKKARDVAAWLGLVPRQHSTGGKQTLLGIAKRGSSYVRTLLIHGARSVLMHLDRTKDRLGQWADELRGRMHVNKVTVALAAKMARVVWVVLSKPGATYERRLPAGGGA

SEQ ID NO: 338585 - protein, 399 aa, unidentified
MFYGLDVHKEFIQVCVLDAKGTKREEYRIGGSAEEVETFAKKLQPSDQVVLEATFHTWILHDILSRHVDRVVVANPLQVKAIAQAKIKTDKVDAFTLAKLLRADFLPEVQLPDPKAWALRQLVSHRRLLVKQRTATKNSIHAVLNRRLVHNPNKDPFSKRARQWMKSLELPAAESFLLQNSMTLLEDLDDRIDAVDQELLEQASIESNARLLMTIPGIGVTAAIGLIAAIGDVHRFATPDQLASYFGLVPRVSQSAGRCHHGRITKTGSSTARSLAVESAQILARSSSPLTATYWRVRRKRGHNVAVTALARKIVVLVWYLLTKQEPYRYGEPLLARRKLRKATLPELRQRSKRVPQTLDAVYEEAGLPPLAHPSEAERRTVAINRRARTRISNSLKSN

SEQ ID NO: 338586 - protein, 307 aa, unidentified
MITKNYIAIDIAKDSLAVASDSFNESFTYNKKGLKALIGKITLVESPLVVCEATGGYERKLMSLLFELNIPVALLNPARVRAFARSEGTKAKTDPIDALMLLRFAKSKDLRPTPAPSQQQQTLQALMDRRSQLTESLAREKNRLQKSPECVRKSIEKMIRMLEKELQAIDDRIKELIDRDDQLSEQSARMQSVVGVGQATAWSILAYLAEITTLGRNEIVALAGVAPYNRDSGKFKGRRRIEGGRAKVRKCLYMAAQTAAIHNPHIKDYVDRLRARGKPYKCAMVAAMRKLLIHLQSILKNPLITLA

SEQ ID NO: 338587 - protein, 314 aa, unidentified
MSEREVVVVGIDVAKASVEVLTLGGAGPEGEFGNDPEGHTALLARLPAGVLVVMEATGGYEAALACALQAAGLAVAVVNPKQVRDFAKGMGQRAKTDRIDARVLAEFGQALGRKADLARYLKPLVDEQVQDLAAWVTRRRQLLGMLLSERQRLGLARAKVRPSIELMIESIKRQLDQIEREMEAHVARHHRELDRLLRSAGGIGPVASVTLIAALPELGRLSGAQIGALVGVVPIARDSGRWKGRRWIQAGRFEVRRVLYMATLTAIRCNPTIRAFYARLVAVGKLKKVALVACMHKLLRILNAMVRDRQPFHA

SEQ ID NO: 338588 - protein, 351 aa, unidentified
MEQHNTMTIGIDLGDRFSFFAVLNDAGEVVERERIVTHIDSFERAFAARPAARIVIEASTHSRWVSSLLAELGHEVLVANPRRLALIYGQDRKNDKRDAELLARVGRLDPELLCPVWHRSNQAHADLSLVRMRNQLVELRTKLISSVRGMVKSHGQRLPTCSTETFHDKVAEHIPELLKAVAASALRTLAQLSEEVRGLDRQIESLARTRYPETAALRQVAGVGPVTALTFVLTVERPERFRHSREVGAYLGLVPRQDQSGDTDKQLRITKAGNVYLRKLLVQCAHYVLGAFGPDTDLRRWGLALAERGGRNAKKRAIVAVARRLAVLLHRLWRSGQVYVPLGYRSVAHAA

SEQ ID NO: 338589 - protein, 338 aa, unidentified
MMQFKFFVGIDVSKDTLDFSVVTEGKEILDFKIENSLRAIKAALLNLKKIKGYELPQAVFCLEYTGLYNNHITHCLHSASAHVWVEKAIQIKRSSGLQRGKSDKVDAQRIAFYAFRNRDKARLWVAPRAVIQQLKRLTGVRERLLIMVAQLNKPIQESKRFDSKEVFDVIKKSCQASLRAIKADLKKVEKKITEVIKTDTSLSHLFELITSVDGIGSVIACEMILTTNEFKNINDPKKYACYAGVVPFEHTSGSSVKGRNRVSHFANKNTKRLLHMASLSIIRYQGELKTYWQRKLQEGKHKMIILNAIRNKLIQRVFAVVKRGTKYEKIYSHSLQGS

SEQ ID NO: 338590 - protein, 497 aa, unidentified
MTTKSTIYSRCNPQLLKLFEQAGHPAKVLCVALDYAKAQHMALLCNGLGELLKPSFALDNTLQGAAKLLEEVRACAKARRIPPQQVFFGGEDYPSYAENFVRQLRREKFLVVRVNAWEAKQQRDNFQASSDSLDLLGIARCCLNRRGESVRDLPQAYPNLRIVTRDRDKLVRMRTAVSNRIHSYVDRLFPGFLSAGKSPLEPFSKASLELMQERFSPAQLRRRSRQALSQWLGRRGVTHPQEVAEQLKQLAKNVLEPAPEQTFMLQQSLAQLVGLYRGIEQSIGRLDHELAHWLAQTSGAWLTSIPGFGITLAAGWTAELGPPSQWRSVRQLCSYSGVVPKTKQTGGPQKEPLVGPVQQRCNKRLKNVVLQAVQKVIQHGPEDLRRAAQELQARGAHTEFALAKRLVRLGKYLALTGTVYRPKALMAPDTPKATLAAHYQSLWEKLLPKWRDKADLRQVFAPEHPLGQWRKMVQELYALELRLPQQKAAHKSSASAP

SEQ ID NO: 338591 - protein, 391 aa, unidentified
MLTENDIEENCDAVVVAAKRSVAATTTATGDRSIPLRSGDAEIVGKPDRRWSFENSPNSRQSQHSVPSSYLQGRDTSMMTFESVIGIDVSKNKLDVADWPESFTSQATNDKTGHQQLIKKLPQPKSCLVVIEATGRYEKAVALALVDAGYLVSVVNPRQVRDFAKALGILAKTDRIDARVIARFGEQVRPRALAQMHEKQDELDQLVTRRRQLIASRTAEKNRTGTVTAKVVRKSLQKIVDQLSKEIRRIDSEISRLIKSDEEWKGRSELLQSAPGVGEVTATTLIAEVPELGQLNRQKISALVGVAPFNRDSGQFRGRRTIFGGRRAVRSALYMAALAARRCNPVIREFADRLEARGKLPKVILVACMRKLLVILNSMVKTNTHWNHESV

SEQ ID NO: 338592 - protein, 428 aa, unidentified
MDFTQNQRLMQINENTLIIGVDIAKRKHVARAIDDRGRDLVKRLVFDNSLDGFTNLLTWIENLKIVENRSKVMIGMEPTGHYWLNLAYYLKGLGLKVVVVNPSKVKRSKELDDDSPTKNDTKDAKVIAQLVKDGRFNEPTLPEELYAELREGMKLHDMIQEDLTSIKAQMHNALDRYFPEFLTVFKDWTGLSALHLLSRGYLPEDIVHTSEEVLLEEVNTVTKRSIGIKRIRALKAAAESSIGLRVGIKMARHEIQYLITQYKHLTTQLNSLEEELTDLATSIPGAEEMAQIKGISMMTVVGFFAEVGDLRNYRDPRQIIKLAGLNLKMNQSGLHKGRTAITKRGRKRLRSLLYQVAIPLSKHNPAFSQLHNYYRTRSSNQLTGKQSFIALARKLIKVLFVIGTRECAFDPHRMIQDIPSLQAIQEAA

SEQ ID NO: 338593 - protein, 449 aa, unidentified
MSRPQVIDDEEHERIHDKVAAIDVAKDAGVVCTRTPHPSRPGARRSRIWTVKARMNTIRALGRQLHKDGIEIVTLESTSDYWRIWFFVLEAAGLAVQLDGAAQAKNLPGRPKTDKLDAQWLARLTEMGLLRASFVPPKAIRDLRDYTRARTRLVQERTRCWQRLEKLLEGAQVKLSSVASKLTTVSAQDMIRAMIAGQRDPRVLAALARTGMKAKHDELVQALDGMFDDHHGELAQLLLDQIAGLDGKITQLGTRIEQAVTALPDAWGINADGTTGPQAGTGPDAAVIPAVTRLAEIPGISENLARAVIAETGLDMRRFPTAGHLVSWAGLCPTARQSGPRTRAGKKGQGNTWLRGHLGQAAAGAARTATFLGERYHRIARRRGKAKAQVAVARSILVIIWHLLADPSARYTDLGYGYYQDRTDKDRKLRNHMRQIEALGFTVTLNKTA

SEQ ID NO: 338594 - protein, 341 aa, unidentified
MEFKRIAIDTSKHVFTLHGVDPQDRVVLRRELKRAQLEPFFRKLLPTEVVLEACGGSHHWGRFLSELGHTVKLIPPQYVKPFVKRGKNDRNDAEAINEAASRPTMRFVPVKSAVQQAGIMILKTRDLLVRQRTQLINAVRGHAGEFGVIAATGTARVEALLERVAGDETLPEAARDMIALLGEQIKDLDIRITALEARMKQAHKANPVSQLLETIPGVGPIGALSLALTVDPAQFRSARHFAAWLGLTPRERSTGGKRRMGGISRAGDERLRHLLVTGATAVIRHVKPGSRNASAWLLSLLERRPRKVAAVALGNKMARVAWAMMTSGEAYRGTPAVPVSA

SEQ ID NO: 338595 - protein, 353 aa, unidentified
MKYVGLDWAYRTAQWCALDPGGEIAGEGRFAADRDGLARLVLELGDEVTACLEMMSGALWARDELVACGWQVQVADARKVKTVAPLAAKTDKVDARLLAELSRRQLVPALWLPSLDDRELRERLRRRMHLVRLRTSAKGRIFGLQTQWGVRISLRRLRRADGMTLLERAGMPAVWRHSISECLALIDFLDARIVPLDAELRPFAQADPRAVLLDTIPGVAELLALTIAVEIGEISRFASPEKLVSYGRLAPRVRQSGEGRPHTGPLNKSGSRLLGWAAVEAAQHAWRESNPWHQLYLDVSRRSRNHNSAKAAVARKILIAAWHMLSRNEPFNPAPRITRGTSAPASSRLALAA

SEQ ID NO: 338596 - protein, 343 aa, unidentified
MEYYVGLDVSLKQTSICVVNQVGSVVREGVVDSEPEAIAAFVRSKTPGAVRVGLETGPTATWLWTELKQLGLPVICIDARHAKAVLKMQINKSDRNDAAGIARIMQTGWFKEVRVKDLDSHSVRALLASRALLVKIKRDVENQIRGLLKNVGLVIGRAKFNVFAVRAEELIEDRPELVVAVRPLLKARQAIEQQTDDLDRKVLKLARHDAQVRRFMTVPGIGPITALCFKATIDDPTRFKRSRSVGAYVGLTTRRHASGEIDWTGRISKCGDAMLRSYLFEAAGVLLTRVPKWSALKAWGMRLAKRNGLRKATVAVARKLAVILHRMWIDRTEFNWSKKEVAA

SEQ ID NO: 338597 - protein, 359 aa, unidentified
MEVQEVASRPVVGGVDTHKDLHVAAVVDEHDHVLASQSFATTRQGYRQMLAWMRSFGQLRCIGVEATGTYGAGLLRYMQNAGVEVLEVTTPDKHDRRRRGKNDDLDAQNAAHAAFAGKRTVTPKTRDGMIESLRVLKACRKTAVAARRVALQMIHNTIICAPDDLRDTLRKMTRMQLVRTLAAWRPDLTDYRTVISAYRISLKSLGRRYLELHDEIADLDAMISAIVDELAPNLVARNSIGHAGAAQLLLTAGDNPKRLHSEAGFAALCGVSPVPASSGKTTRHRLNRGGDRAANSALHIIAIGRLRTDPRTKAYMAKRMAEGHSKLEAIRCLKRYIAREVFTLIGQRQKEINQARITA

SEQ ID NO: 338598 - protein, 427 aa, unidentified
MAYRIAGVDVHKKMLAVAVADVDVEGEWRFERRQVGTSPSQLQALAEWFAERDVEEVVMESTAQYWRPVWEALERHWQPMRRARTDAVPTSGALHLAQAQSNHGPRGRKQDFPDAERLVKRLVAHELTLSFVPEMAQRLWRTVTRRKYQSTCNRVQLRNRLECLLEEAHIKVSSLVSDLLGQSARRMLRAVASGEADPATVVALGSPRLQATPDQLRDALGACVELHPVYRRLLAMTLDELDVIDAHIHQLDEELARLLRAHQEAVERLAAVPGLGVDSAQQIIAEVGPTAATFATAKRLASWVGACPGHDESAGINHSRRSPNGNRQMRRLLNQAAHAAVKTKGSIFELVYRRLVVRLGHAQAIGAIGHRLCRLIWKILHDGVTYEERGPAVTKQRALRRAAKMIRELRSLGYRVDRVLSSASTLA

SEQ ID NO: 338599 - protein, 338 aa, unidentified
MELYAGIDLHSNNSVIAVIDEQDRVVFQKRLPNELERILVALASFKQWLIGVVVESTYNWYWLVDGLMQAGYVVHLANPAAIVQYQGLKYSGDEHDARWLAHLLRLKILREGYIYPREARAVRDLMRRRMQLVQTRSAQLACMHTQFTRSTASSPSSDALKRMLPEELETLLEEPNVASGVRANLEVVGTLNREIARLEREVIEQVRLAAQFAPLLSIPGIGRILALAIMLETGAIERFVKVSNFSSYARCVQSKRLSNDKKKGEGNSKCGNKYLAWAFVEAAHFAVRYNPRIKRFYERKAAKTNKIVATKAVAHKLARAAYHVMRERVPFDDTRAFA

SEQ ID NO: 338600 - protein, 488 aa, unidentified
MAAGKKKDTDVTGSAAGGPAAVAAVAAGDGGDGAEVSEDQVRVIERAAAIDVAKGSGMVCTRVPGSRPDRRRQKVWPVTATYREVIALMDHLRCEGIQRLVLESTSDYWRLWYYLAEAAGLEVWLVNARDVKHLPGRGKSDRADCVWLCKLNERGMLRRSFVPPQAVRDLRALTRTRARLAQDQARHQARVEKILEDALLKISVVISDLFGASGRRFLDALVAGERSPAALAALGDPRLKATRRELEEALTGKFRDIHAFEIKTHLRILDVINEETARLDQAIGEQLALVPRTAPACTACGVADGGHAPGCAAAGTPLLSLAERIDEITGVGECNARVFIAELGTDPSQFPTPGHAAAWARLTARTLQSGQSARPGRTGKGNLDLRGALGQCAMAAAHTDTRLGAMYRRIARKRGKQKAIVAVARVICEITWILICDPGARFEELGPDYYTPRSPARRTRDKIREIERLNPGKKVILAPIDAGADTAA

SEQ ID NO: 338601 - protein, 331 aa, unidentified
MYVLGVDVSKAKLDCALIVQAEPVKRRQKVVSNDAAGWAKLLQWACQTAGGCEASQLKVVLEPTSRYHEGVAHYAHDQGARVWVVNPKQLRDFAKGMGLRSKTDALDSEVLARFGLTGQAQEWMPAPRELRELQALLRRLEDLDKTRQAELNRVEAAQAGAAVSALVMDSLQRSVAFLDEQIRQLEAQIDRHIDGHPQLKADYALLRSIPAVGPCNARLMLAKLGAGRFDNAAQASGFLGLRPMHWESGSSVHRMPRLGKHGERLARRALYMAALTAKRTNPDARALYERLLAKGKKPMVALCAVMRKLVHICFGVLKHQQPYAPQIASSA

SEQ ID NO: 338602 - protein, 430 aa, unidentified
MLRNYSTKWEKIERITDETLIIGIDIASRRHYAKALTWRKSEVIKGLFFDNERQEFMRFLEWMNRAKEKMGATNIIVAMEPTGHYYFALEEYLEALGIEVVIVNARDVSYMGKTYNNDNSKNDPRDAYLIGYLCSDGRYSVTTRPKEGKYAEIRELTNHREHLVKRQSGSINELHCILTQIFPEYKEIKKSGLSEGLLAVFLELKNLDNIIEAGWEGVYEALKKHKKHQIGRVKAKQIHKLAKESIGVKRKVKTTQTVLISLIQEYQFYQNQINAIDDQINELIKGMDAAQRLMEIDGIGPVIAATFLAEVGDIANYKSAKQIQKLAGYAIRTNISGDTEGSTRTTKMGRKRLKKILYQAALSTIGTNKEIKQIYGYYTQEREQPLKKMKAVTTISCKLIRIFFSLLKYNHHYDGEKMLRDIKRPKGQVA

SEQ ID NO: 338603 - protein, 496 aa, unidentified
MSAFLRRSGQNPHRWATKGMKSKKELLAKKKHIKRKSAKAKHNRVLGIHNPHAAGADIGATEIYIAVPPDRLEMNVRCFGTFTQDLRAIVQWLREYKVTSVAMESTGVYWIPLYELLEQEGFEIYLVNARHVKNVPGRKSDVQDCQWLQYLHSVGLLRGSYRPAQDICAMRAISRYRDNLLHFGAQHLQHMQAALDQMNLRLHHVIADLSGLTGMAIIEAILAGERDPRQLAKLRDPRIKASQETIAKALEGNWRVEHLFVLGQALQSWKQVQQQLGQCDQKLQELSSQLEGKIDLANSPLPPSAKYCGREPRSKNQPNGPWREELYRHFGVDLTEVPGLSLGVVLTLFVELGADLSAFPTPRHFAAWMGLCPDNAITGGKVIRRGTRRNRQRIRLALRLAATSLHHNKTQLGECFRRLRARLGAPKAITAMAHKLARIIWHLVTHRVGYDESIFAEREEQLLRRKQRQLRNLAHSLGFTLVPNPRPAATSNAEVS

SEQ ID NO: 338604 - protein, 346 aa, unidentified
MEITTIGLDLAKNVFQVHAINSASNVVLKKTLRRLQMRRFFEQLDPCLVGIEACGTSHYWAREIIKLGHEVRLMPPAYVKPYLKHGKTDASDAEAICEAVRRPTMRYVAIKSPEQQAALALHRTRDLFVKQRTQLVNMIRGLLAEFGIEIRRGIGQALTLAKRIAADDMPDIPPLAAKVIAGLAGQVLDLQARLGEIERELLAWHRSNDIAKRLSTIPGIGTVCATALAASVTDPHQFRSGRQFASWLGLTPLQHSSGGKERLGRISKMGDKYLRRLLVVGMTSLIWRAKRKPEAVDPWLADLLSRKPARLVTVALANKAARVVWAIMVRGGVYHMPAGVGVTTSV

SEQ ID NO: 338605 - protein, 317 aa, unidentified
MSIVEAARGVTGGVDTHLDVHVAAALDPLGALLGTERFGTDPAAWLGSFGQVTKVGVEGTGSYGAGLARFLRRADVEVIEVDRPNRAEHRRSGKSDPLDAVEAARATLGGRAKSISKSKDGAVEAIRVLVVAKRSARQARVKALVPMRHRVITAPDQLRCRLKGLSVAALVADAARLRPSRSGDPMMAAHKASLCSLAHWFQGLEDEIAELDERIEKLVALTASELLSRFGVGPDTAAALLVSAGDNPERLHSEAAWAHLCGVAPIPASSGKSSRHRLDRGGDRQANSALWRIVMVPIAHDPQTTAYFERRVKEGRP

SEQ ID NO: 338606 - protein, 349 aa, unidentified
MKHYVGLDVSLKETSVCVVDEGRKVVKEGKVASEAEAIAAFLTQMGLPIELVGMETGSLAPALYHGLVALDVRVVCVDARHMKGVTSVMPVKTDRVDARNIAWAMQAGWYKRVHVKSLATHKLRMVLRSRKILVDLRLDIDNHIRGVLKAFNLKVGKASPGSFEKRVQELVADNADIAAVIETLLQARAELVRRVEVLHRMVLSLTKRDPVCRLLMTVPGVGPVTALAFCTAIEDPRRFSKSALVGAYFGLTPRKYASGEIDRTGHVSKCGDTMVRSLLFEAANALLTRVQSWNWLKCWGLEVVKRRGKRRAQVAVARRLAVIMHRMWLDRTDFRWSRNGETPTAAAAA

SEQ ID NO: 338607 - protein, 429 aa, unidentified
MNCTQNKKIEQVKETTMIVGIDVGSEKHYFRAFNWRGIELTRKPVAFSNSMEGFNSFYNTIVELMQKSELEEALVGIEPTGHYWFALGQFMGEKDIKFVMVNPHHVHKTKELDDNSPSKNDRKDPRVIAGLVRDGRYFYSYMPTGAYAELRNASNRRFVLVEEQTRAKNRLQKWIAVYFPEYKGIYTHIDAKGGMLVLKKAPTPEEIVRLGVEGIIKIWKDAKLRGNGHKKAMLILAAAMRSIGLKAGLTEARMEIQDLIEDYELQTKRLERVNDLIKGLCQQVRYADKLLEIKGIGITTVAGFIAEVGDITRFDSTKELQKLAGLELVADSSGKHNGKTKISKRGRKRLRYLLFEAAISVVGKNEEFKEIHRYYTTREKNPLKKMQSLIVVACKLIRVFHAILTKGIRYDASKMLKDIRHPGEQLKAA

SEQ ID NO: 338608 - protein, 338 aa, unidentified
MDLKLSAIDLAKTVFQIGALDLQGKVLFNRQISRAKLAEWLTNLPPTEIVMESCSTSNYWARLAERCGHTVRQLPANAVKPYRRGNKNDANDVIAILEAAQRPDIIAVPVKTVEQIELQAIHNIRHRLVGARTALLNQTRSLCAEHGLITRKGPGALLRALPMWLEDASNELDWLGRELIQELRQELTALEERIAGYDQRMENIAKTEPLCQRLMQARGVGVITATAIVAAVGRGDQFKNGRAFSAWLGLNPGHSASGGKFISLPITKRGNAYLRTLLVHGARTIMNWAHKHDDPLSLWALAVKSRAGHNRAVVALANKNARILWAMMHSDEPYRYSV

SEQ ID NO: 338609 - protein, 407 aa, unidentified
MLFLGNDWAEAHHDIELQDEHGKVLARRRLPEGVVGLAQLHAVIADQLGDDDEPEAVLVGIETDRGPWVQALIATGYVVYAINPLQVARYRERHATSGAKSDPGDAHVLAEIVRTDRAHHRPVSGDSEQAEVVKTIARTHQSLIWSRQRQSNQLRSMLREFYPAALAAFGEDLAGRDALAVLAIAPTPSAGRALTPARVKAVLHKAGRQRNLDATAVRIVEALRSDQLGLTGALTAAYGASVRSLVAVISAMVEQVSVLETEVNRCFGQHPDAEIITSQPGLGVILGARVLAEFGDATDRYADAKARRNYAGTSPVTKASGTRRVVLARYTRNRRLADALHLQAFAALNASPGARAFYDSHRGRGATHNQALRALSNRLVGILDGCLRHRTPYNEATAWAHRTPLAA

SEQ ID NO: 338610 - protein, 384 aa, unidentified
MTPDFKVGKDNKWFRQCVGIDIAKEKFNACMFMYDIASDMGCGTKSKEFKNTKQGFNQLVKWARKECLKEYPLTFIMEPTGVYYEPLAYHLCKIQQTVYIVMPNKARDFCNYEGIKTKTDEMDARCLALLGCVNRKLTPWQPPKPIFRELRQMTRFVEEIQKVRTMLSNHLEALTHGAEPVDSVVKHYKKLIADIDKQLQVNLKNIKAKIATDKELEKKVERICTIKGIGYLTVVTIIAETNGFNLITSRKQLASFAGLDVIASQSGNEDPKHVISKKGNTHIRRALYWPGISASRFNPQMMDMYGRICKRNPKVKMIGITALMRKMLLLTFTLWKNGETYDENKTGACTQDKRTVDEDGRLLVQGCVNKKVAAVIDSQPHGIV

SEQ ID NO: 338611 - protein, 340 aa, unidentified
MKSYVGFDVSLAETSVCVLDASGKVRFEGRVKSRPEDLVACVREHAGDAERIGLETGQTAALLFRAMEAAGLPVVCIETRHAHKVLSARLNKTDRNDARGLAELVRVGWYREAWVRGAAAHAIRSLLLGRRMLLATKRTLENTLRGAVKRFGLIITKTAGRTFTHRAAAAVDRDPAYAAFATPILAVLHTVLDQIRSYDRQLRSVARGNATVSRLMTVPGIGHLTALAFYSTIEDPARFKRSEDVGAYLGLTPRVYQSGEIDRTGRITRCGDGMTRSYLFEAANVILTRVTKPTPLRAWGLRLTERTGHKKALVAVARKLAVMMHAIWSDGTEFEWKAVA

SEQ ID NO: 338612 - protein, 397 aa, unidentified
MIAVGIDISKAKSTVAVIDSDGTVLASPFTMAHTQPEMEAFVTYLKGLGEPTTILMEYTGHYHYPVLKKLQDEGFPVCIVNPYQMKKYGDVEIHKAKTDKKDALRIAAYALEKSYKLVPYSSMEQKYEDLKFLSRQYSQRITYVAKLKVQLIALLDQTMPGITRILPLNSRNPEKCALLLFIRRFKSFDEIHRIGKARFLASYDVLAKKTSERSASSKGLSIYELAVDSITTRGEDPYIWLSQNQCVDLLSATQNAADEIISQMRNIAETIPEYKVLRAMRGVGDRLGPIILAEIGDIRRFHSGKALNSYAGNDAPPYQSGQFESRNRHISKRGSSALRKACYEVMQALKLTKPQDDPVYLFMLKKEQEGKPFNVAKMAGVNKFLRIYYARAMELYK

SEQ ID NO: 338613 - protein, 371 aa, unidentified
MTETVKYVGLDVHKETIAVAVADGERGSEVRFVGTVANEDDAIRKLVKRLTGPGVTLNVCYEAGPCGYGLHRLLTKLGQNCIVIAPSMMPRRPGDHVKTDRRDAMTLARLLRAGELTAIWIPDEAHEAVRDLIRARRSAQDDAIGAKQTVRSFLLRHDRRFGGKAAWTKMYWRWLSEQRFDFPHQQLAFEEMQKRVLEAQARVGRLEAALTEAVDAWCFAPLVRNLQVLRGIRLVSAATLVAEVGDLTRFDNPKQLMAYVGLVPSEHSSGARTKRGRITRAGNAQARTMLIEAGWSYRLPAREERRYRERVIDLSEDIQAIGWKAQVRLCQRYRRLAATGKPQPKVTTAIARELVGYAWDITRRVSPAIAG

SEQ ID NO: 338614 - protein, 351 aa, unidentified
MIIVGCDFHTRFQQIAMLDPTTGEVIERRLEHENGEAEKFYGTLAGPARVGVEATMNAPWFERMLHRYEHELWVGDAAEIRAARVRKQKTDSRDALHILDLLLTDRFPRIWIPSPAERDVRQLLRHRHKLVRIRTSVMNQLHALAIGQGLCRKQKLWSKVGRMELEALVLDRWAHRRRQDLLELLDQLNPWIAELDRAVMQEVQSRPEALRLMNEPGVGPVTALAFVLTIGPVDRFQRSKQVVSYLGLNPTEESSGGRQRLGSISKQGNSMVRHLLVEAGQAASKFDPELRRDYQRLKFRRGNSGVAKVAIARKLAVRLYWKLREAAQPHTAARMQGSPANPVVDESLSPK

SEQ ID NO: 338615 - protein, 419 aa, unidentified
MSFKIIKNNCCGLDVHKTWIFACIGITDSNNRTEYKQARFSSFTKGLNELCDWLAKYNCKDVCMESTGKYWIPVFNILEQRSLWVTLSHPKYTKPMKGNKTDRKDAKWICDLYMCGMVKPSFIPPADIRELRDLVRYRFKLTCMITGEKNRAQNCLTVSNLKLDDVFSDVFGKSSRSITEQILQHPGETFDVAPFVDGRCKTPIVEIQAAIDGAISKQQAVKLRQCLDHIDELNKHISEVEQEILRLSDKYEAALNLIRTVPGFDKNPLTAIQVLSEIGGDMSVFPTAKHLVSWAGCCPRNDQSNQKIKSTRISRAGSYFKPVLVQVANALIKSKKHSEFTNRYKRIKARRGHKKAIIAICRMILTAIWHILSDLKPYTSEGFLESRPVKKEKVLSTSQALNLLKQRGYIIKDEPLAVS

SEQ ID NO: 338616 - protein, 412 aa, unidentified
MAKIVYPICCGIDVHKSFVVACVATTDQNLVTTYSKPKRFSTFTGDLRRLADWLKQNNCRDVCMESTGKYWIPVYNILEPTCNLVLAHPKYLKAIKGKKTDKRDAKWIANVFKFDMLHGSFIPPADIRQLRDLVRYHTKLTSYTTGEKNRTQNCLTVSNIKLDDVFSDVFGKSASAITTQLLEHPGETFDVSPFVDRRCKTPVEVIQAAVDGVMCAEQAEKLRIIRSHMDSLETCKANLESEILSVAEKYLPQINHVVTVPGIQPFSAIGIIGEIGVDMSVFQTSRHLCSWAGLAPQNDNSAGKKKTTRISRAGVYIKPLLVQCANAAIRCKANPEVVNRYNSIKKRRGHRKAIIAIARMLLTAIYNILKKNEPYNAELYRQSNKPPVQREVSVEQAIFILQRQGYIVTPSA

SEQ ID NO: 338617 - protein, 341 aa, unidentified
MSIVGAFDVHRRQLTVDYLDTVTGEVKRGRVAPADREHLRAWLARFTDQDEVQFAVEGCTGWRYVVEELTAAGIEPHLAEPADTAALRGKKRHAKTDKADARHLRVHLMAGDLPESWIPPGHVLETRAVVRLYKDLLDERGGWQQRIAATLFHQGAPLSASVAVAEGRAPAGQAGLSAAGRQAVETGLRQVERLSGELDPLRRQLGMISRRQPGCRALAATHYGIGPVTAVVVWAELGDARRFSSSDDVIRHTGLDITVYSSDAKRSAGHLSRQGPGLLRWALYESAKCAARPASPDYDYYTAFRARRGAGLATLSVARKLARRCYHTLRELGEEALAPAA

SEQ ID NO: 338618 - protein, 407 aa, unidentified
MYCLSFDIAKGKSVVELFNGRLEPLIVPYEIHHVKEEFVALASKLDISQTEIILESTSMYHYPVVSFFKNLGFVVIILNPIISREHKRNLRKTKTDLIDCVNLAAIYFEKKFNLQKEHLPIYHQMQSISRHIFTLNESMVRYKNRYHQLLELIFPLYEYTLKNEVKFKSDHMTLLKTFPHPELLIHQRVDRLATVLASMHKRMDHRFLKTAQMIKDLAKMTLYSVSKDDVVIDEFVELSNLILDLDDKIMHHQNLLIDLAQTRTDFHKIVSIFGISSYMAALLVAELKDLSSYRTVKQLTAACGLDPTITQSGKSIDYHGHISKRGNKHARKALFNAVSTIIRSSSRLKPQNPILVYYRKKRSENKHHYASVIACTTKLLRIIFTLCKNDLTYLSQYNQNHSVTPIV

SEQ ID NO: 338619 - protein, 351 aa, unidentified
MSRQSTPSPIATIGIDIGKNTFHLVGLDHPGAIVLQLKTSREQLERRLANLPRCLIGMEACSGAHHIGRQLAALGHDVKLVPAQYVKPFLKGHKNDYRDAEAIAEAVQRPTMSFVTIKTPAQMDLLALHRVRSRLVSLRTGVINQIRGFLIERGIAVRQRPAPLRKALYDLLSSNPPSLSPRMVRLIADLFEDWRRLDDRIATVSAEVEALVEEDEPCQRLMTVPGIGPIISSAVVAAIGDGAGFKQGRDFGAWLGLVPRQESTGDRTILGKISKRGNKYLRTLFVQAAHVILARRPSAAMRGLWPWIAQTSKRLHRNMLAIALANKLARIAWAVLARGREYQPSITPHAA

SEQ ID NO: 338620 - protein, 343 aa, unidentified
MEHFAGLDVSVKDTSVCIVDGTGKIVREAKVASEPDALLAILKNPAYHFKRIGLEAGPLSQWLFSALGEANLPVICVETRHMRAVLKAQINKTDRNDARGIAQIMRAGLYRPVHVKTLRSQKLRMLLTHRKLLQSKAIAIENDLRGTLRNFGLKVGIVRTVKFEARIRELVENLPDLAVLVEPLLIVRRVLREQIAVLHRRLLVLVRDDEVCRRLMTVPGVGPVVALTYRATVDMPARFKNSKAVGAVFGLTPSKYQSGEINRTGAISHCGDKMMRVMLYEAAQSMLTRTIKWSWLKAWAMKIARHRGIKKAIVALARRLAVIMHRIWVDGTEFQWTREVAAA

SEQ ID NO: 338621 - protein, 312 aa, unidentified
MIEQCFGGIDVSQDRLDVLLLPQGTGFSVANDEAGWSTLIGRLRGQPVAAIGLEPSGGYERGVLRALLAAGLSVRRINPNRLRQFARARGALAKNDRIDARLIAEYVATMPTHVVRHDPAAARIAEIVTMRRQLCDEHVAIENQAAQLEDAMLRRLAKRRLARIETDIRLLEKRLTETIAAEADLARRYARLTSMPGVGPVLAFTLIALLPELGRMSRKQIAALVGLAPYDFDSGKLRGHRSIYGGRMPVRNVLYMAALSACRYNPALKTFHNRLAAAGKKPKVILVAVMRKMITTLNAMLRDGASWQPQAA

SEQ ID NO: 338622 - protein, 335 aa, unidentified
MSSLVCGLDVHKESVYATVMSYGGEVIERRKLSGKDEVVSFLDRYPVDKVAMESSTSIVPVYRALRGRGYNVLVSHPKKTRLIAESRIKTDRVDSWAVTELARLDALPLSYVPPDDIAALREKVRRRAFLVRMRAKLKVKIKSHLTINGVTPPSRYGLFTKKGLEWLHSLQSDAIESYLPVLSTLTVQIEKLSKELRRMAPQDMDVKLLMTIPGVGYYSALLIKSEIGTIDRFPDGEKLCSYAGLVPSVSISGGHRRHGSITKEGSRWLRWIMVESVRIHVKYDTSITRAYHAIAERKGRSIAKVAAARRLLMCCDSVLRNHRPYYDPGGRYQSS

SEQ ID NO: 338623 - protein, 431 aa, unidentified
MPGENQDKLMSGNQPAVQYAAFLAIDWADQKHVWSLQEANSSARERGEVDHMPEAVETWVAQLSQRFAGRPIAVAVEQSRGALVFLLSKYAQLHIFPVPPAMTANLRKAFYSSGAKNDPTDADLLLDLVQQHREKLRRLSPDTEATRRIQNLVEERRKLVDEKTAQSNRLEAHLKIYFPQIPHWFGDVGSPMVCALLERWPTLEALQKARPDTLRSFFRKHHCRKEELIESRIKAIGEAMPALKDRAVVQTKVAVVKVSVQLIQVLHEGIEGLNRQIQEAAEAHPDFFIFDSLPGAGAVMAPRLLAAFGSQRERYQNAVEMQTFSGIAPVTESSGKSSWVHFRFACSKFLRQSFHEWAALSITQSQWARAYYELQVRRGKKHHAAVRALAFKWIRIIYRCWKERVAYDENVYLAALAKHNSPLVAATKAAL

SEQ ID NO: 338624 - protein, 463 aa, unidentified
MRKAHQMLKAAESQTSLAPIHPNAAAVDIHDGSHFVAVPPGRDSEGLDIREFPAFTADLRRVVEWLRKCKVEQVAMESTGVYWIPLFELLDAEGFEVSLVDPRQARNLPGRKTDVADARWYQELHTYGLLKAAFRPDNEVCVLRSYMRQRAMLVTSAAEHAQHMQKALTQMNVKLTQVVSDILGVTGLRIIRAILKGERDPQKLAQLRDERCHCSRQEIALALEGNYRPEHVFALRQAVELYDFYQVKLQECDQQIEAQLKSFDDQSGGQTLPPRPSNKKPGGNSPEFDLRARLFAMTGVDLTSIDGVDALTAAKVVTETGIDMSHFPGEKHFCAWLGLCPGSHISGGKRHGGRMRPCKNKAATALRIAAQSLYNSNTALGAFLRRMKQRLGPQGGITATAHKLARIIYAMLKRKLPSYKDLGAEYYEDRYRARVTANLKRRAKQLGFALVPLAVPAPATGEI

SEQ ID NO: 338625 - protein, 348 aa, unidentified
MNATTKPVVGVDTAKSVFQVYTVDMETGEVICKQLKRAQFLQWFSNRAPSLVGMEACGGSQHWARQLQGLGHEVKLMAGKTVKAFVSGNKNDAADARAIWMAAQQPCVKAVAVKSEAQQAVLAMHRVRQQLVKMRTAQRNELRGLLAEYGEVFGLGKAAFDVGMKGALARLAERLPAVLIDTLREQWNELTRLDERIATIEARLLAWLRQDRTAQAIAAIPGVGLLTATAAVATMGHPSAFRSGREFAAWIGMVPAQNGTGGKVRLLGISKRGDPYLRTLLIHGARAVQAHTKTPNKWLQEIGKRRPPNVVTVALANKMARTIWAVLAHEHAYDKEHVSTRPKAAMLT

SEQ ID NO: 338626 - protein, 460 aa, unidentified
MSKLDQPKAQLAEARPFASMTRLNPNAAGVDIGAREILVCVPGEANTQLVRSFGVYTPDLQAIAAWLKEHHIETVAMESTGVYWIPLFETLEAAGFRCHLISARSLRRIPGRKSDVLDCQWIQTLHSYGLLESSFRPEADLVALRTLLRHRAQLLEHRAPHILHMQKALLQMNIRLPQAVSDVTGETGLRILRAIVAGERDPHKLAALRDYRCKKDEAEIAQALTGTWREEHLFVLKQSLEMYDFYTRQIEACDAEIERAYGQVRSHDDGSDDDDLPPLPDHKRKSHSKNAPRRQGDIRKHLKRICGVDVAAIHGLGVSLAQQAVMETGTDMSKFPTEKHFCSWLGLAPKREISGGKVLRSATLKTRNRAGQTFRKAAASVMRSDCVFGVFYRRMKARLGPAQAAVATAHFIARVYYRMLKYKVEYQPANVEAYRQKYRQQQVKSLQRKAARLGFQLTPA

SEQ ID NO: 338627 - protein, 331 aa, unidentified
MKNFFIGIDVSKLTLDVALYSINGNEKLNHLVIENNPDGFKKMISWIKEKKIDPKEVFICMEHTGVYANAIVSFLEKEDIAYCRISALAIKKSLGIIRGKDDGVDAFRISQYTYEKREKLKPSKLPPANIIALRNLLVERNGYVKSIAQYKQRKKEIAVHQEKKSIKRKNEIIDILTEKVEEIKLEMMELIEKDPELLKTYTFISSVVGIGFVNAVALIAYTNNFKDFTNPRAYACYISVAPFPYTSGTSIKKRTSVSKIGRLELKALLTMAARSAIINDPELKRYFERKFNGKKGPESNYGQVLNAVKFKLICRVFAVVKRQEKYVVFKY

SEQ ID NO: 338628 - protein, 430 aa, unidentified
MKSNTQNAKIEAITEKTLVLGIDVGSETHYARAFDYRGIEYSKKPFKFSNTEVGFATFKEWILDLKERHEKDKVVPGMEPTGHYWFNLGKFLQDNEMKPVLVNPHHVKKSKELDDNNPTKNDRKDPKVIAGLVREGRYMIPYLPDGVYADLRTASNIRFQLQAELTRIQNRISRWFNIYFPEYKTVYGKPDAKSGMLILKAAPLPEDILTLGIDGVNQIWRDAKLRAVGKARAKTLIEAAEHSVGSKEGAVSARMEIRMLLEDYESRNIRLQEVMALIEGLVKQIPMAEKLLEIKGVGIRTVSGFLAEVGDISRFNNPKELQKLAGLALVENSSGKHKGETTISRRGRKRLRYLLFEVAMSLVAKNPEFRELHNYYTTRRLNPLKKMQSLMAIAAKLIRVFYAMLTKGVDYDPKKMVSDIKRPAVYLQAA

SEQ ID NO: 338629 - protein, 353 aa, unidentified
MNQYIGLDGHKESCTFVVMDQKGRLTRQAVIETNTQALIKFIKTIPGKRHLCVEEGTHSQWFYEIFSPHVHDLAVVEGRKNRGSKDDAKDARGLAERFWKKDLGQRIFKVPESLTTLKDLVKSYDTINKDLVRVKNRLKHRYRCRGFAYSETQCPYCKRSALTPSDCRKPGFHQNLVLLHKQQQELEPLKAQAQKAMVTEAARHSITPILKTAPGFGPVRSAQLLSIVIEPYRFRTSRQLWCYCGLAIIIRSSSDWVKKPNGQWERGPVVRTRGLNRNHNPAAKAIFKAAAMSVITTGKKEIALRAHYARLLKNGTNPNLARLTIARKIAAIVLAMWKNKEVYNQKKYLMINK

SEQ ID NO: 338630 - protein, 341 aa, unidentified
MTVYIGVDLHARQQTLAFVDTHDGEIKCRELHHQKEDVAAFYRQFTGEVIVGVEASGYTNWFEELIEQLGYTLLEGSAAEIRRLARRRQKNDRRDAELILDLLAHDEFPRLYRYPRQSREVLRQLRFRHKLVKLRTSVLNSLHALSISAGLSLQARLATAQGRTRLEQLRLSPVLATQRDEWLALGDELSHRILGVERWLQRQAKDDEQAQRVQTHAGVGLLTSLCLVHTLGDVTRFASTRKVTAYVGLDVTEHSSAERKVYGGISKAGSRLLRYLLVEAGQTAARSDEQLRDFYQQVMKRRGKAKAKVAVARKLLIRTFIMLRDEIDYAEFLRRGKRTGE

SEQ ID NO: 338631 - protein, 413 aa, unidentified
MAQEAFAWFAGVDWGSERHHACIVDAQGIIAGEREFPHSGAGLAELGDWLLLIAGEASAVAVAIEVPHGPVVDSLIDRGFALYAINPKQLDRLRDRFSVAGAKDDRRDAYVLADGVRTDRRLFRRLQVADPRLIELRAWSRLAEELQEERVRLTNRMHHQLWRYYPQMLKLADDLAAGWLLELWTLAPTPSKARRLRKSTIERLLKQHRIRRMDAETALGILKEPAIKVADGVAEAASIHLRSLIARLRVVNRELREAEHKLDEICAVIGETGAASGVCLQRQDIMILRSMPGIGRINLAALLSEGSGPLSSRDYPALRTLCGAAPVTRRSGKSHIVLMRYAAHVRLRNTVYHWARVASQHDPKCRARYGALRQRGHSHGRALRSVADRLLGLACVLLKRQTLFDPHFGQPTA

SEQ ID NO: 338632 - protein, 367 aa, unidentified
MKKVSTAAAKQSSNFSQQELTIGLDLGDRSSWYCVLDEAGGVLLEQKLSTTPKAMKEVFGAMPRSRVALETGTHSPWVSRALSELGHEVIVAHARNVRLIGESRRKDDRLDAQTLARLARIDPQLLCPVKHRSARAQADLTVIRARAGLVRARTALVNTARGLAKSYGERLRGCNVRNMNPEKADGLSPELQTALQPLLAGIELLSEQIREYNERIERLAQESYPQVQLLKQVKGVGTLIALTFVLTLEDAHRFRKSRDVGCYLGLQPGRRNSGQSEPQMHISKEGDPYLRTLLVQGAQHILGPFGADSDLRRWGLKLAERGGRNGKKRAIIATARKLAVLLHRLWVSGEVYEPLHNSSRVAVPAAA

SEQ ID NO: 338633 - protein, 411 aa, unidentified
MNNTLFVGIDISKRSNVATFMNCEGKVVGRLTFSNNGSGADRLVAKILSYYEKEDFEAIRIGMENTSVYSKNLVWFLYEHEALNEHKLSIIPLNALMVANYKKSFLDMDKDDITDSFAIADFIRIRPGLLPFKLDDRQEALKIMTRSRYNYVQALSRMKSQFLTRLFLSFSEMEAGKPFYSIFSKTSLSLLEEEFTLDELAEKPIPELVEFLQEKGGGKFQNPEEIAKVLKKAASSSYRVPAMVRESLNRTMASDMEIMRILENEIHNCDKNIEKLMKSVPAILVSIPGIGPVLAAGIMSEIGDISRFQKQESLGKMAGFKWKRNQSGKKESEDKAAVLSGNKKLRYYLVEAANRVRIHDPVFEAYYRKKYAESKTHAHKRALILTARKLVRVIFYLLKENKLYKPDVGIS

SEQ ID NO: 338634 - protein, 348 aa, unidentified
MNLKRIGLDTSKAVFTLHGVGQDEKAILRRDMRRAEMEVFFAKLPPTHVALEACGGSHHWGRRLAAMGHTVQLIPPQYVKPFVRRGKNDRNDAEAISEAAARPDMPSVPVKSAEQQAEAIVLSARELLVRQRTQLVNAVRGHAAEFGIIAAKTISQLPGLLETVAAAETVPATAKQMLAFLGEQVAQLDERIAELERRMKQQHKANPVSQLLAEVPGIGPVSALTLALTIDPGRFQSGRHFAAWLGLVPKQHSTGGRQRLGGISRAGNERLRQLLVLGAMAVIRFAKPGSKSASAWLLALLERKPRKVAAVALANKMARIVWAMMATGEAYRGSKKVAMPAAGAAAAA

SEQ ID NO: 338635 - protein, 366 aa, unidentified
MSIVKYIGLDVHKNSISIAIADEGRNSEVRFYGKINNDYSQLYKIARAQISKGAEPHFVYEAGPCGYQLYRYLTEQGFSCIVIAPSKIPRKSGDRIKNDRRDATSLARLYRAGELTPVYVPNPEDEALRDLVRARDDAQHALRKSKQQLGAFLLRHNLIYSGKTPWTVAHSNWMADITMEHSAQQIALQEYIDTIECSVKRVERLTDQIRKLADQSRLEPLIKSLQAMRGVSLIVAVTIASELGDLQRFENPSQLMAHLGLIPSEHSSGDKVKRGAITKTGNSHVRRALVEAAQAYRLPARKSRTIRKRQENLTEKICEIAWKAQVRLCGRYKRLCATGKASNVVKTAIARELAAFSWAIAQEVNI

SEQ ID NO: 338636 - protein, 334 aa, unidentified
MDQEKNARSASEDDRQAMVGIDVAKEKLDVALRFSSGKVKSKVVPNKSAGFEALRAWLAKQGVHRAHVCMEATGVYWEAVAEDLADHGFAVSVVNPKQIKSCGETLGVRSKTDEIDAKLIAEFCAKLNPPLWQPPSASVRRLRALVARRDALIELRTQESNRLDVTSVEDVRQSIEQTIAHVERQIAQIEAQIRQDIDDDPTLKAQKELLATIPAVGDTTIARLLSHFGGTLRFATARQAVAYAGLDVRKHESGTSVRGKARMSKKGHSDIRAGLYMPAVVAKNSTAWGQAFAKRLLAACKAPKLVVGALMRKILAIAYGVLKSGVPFDPALHA

SEQ ID NO: 338637 - protein, 431 aa, unidentified
MEEVTDEPLYRDRVCGIDIGKAEMYATIRVPSEANPARRAQETRGFATTRRGVLELADWLRCWQVPAVVMESTSDYWKPVFYRLEAEGLECVLAGARQVRNLPGRPKRDPSDSRWLAVCFERGSVTSCFVATPEFRLIRLHTRYRRDLTGERTREKSRAEKLLESAAIKLSSVVTDLHGVTGRDIMDHLIAGERNVKVLAQLARARARRKIAELEQALDGTEFFTPEHAALLKVMLERIDWINAEIARLSQVIEGLLAPYEEQLQQAESMPGWGRRAAEDVIAETGTDMTRFPTPAHLASWAGRTPLDPQSGARQGKARRKHGNRYIGAVTGETAVAAGKTDTREGARHRRLVRTRGKAKACVATGNTQMRVFHALLSHPGTRYEDLGASWYDSERQAARRVSHHVGALGAMGYEVTLCRRPEPGEPAPAA

SEQ ID NO: 338638 - protein, 410 aa, unidentified
MEVLHPHCAGLDIHKKMVVACVRHMVGGKVEREVRTFTTITRDLLAMSEWLASEGCTHIVMEATGVYWKPVWHILSDGDFTLMLANAAHVKNVPGRKTDVNDATWLADLLAHGLVRGSFVPDVQTQEQRDLLRTRKQLVRERTSHVQRLQKTLEGANIKLDSVISDIFGLSGRAMIEALIEGETDPDRLAELAHRRIRAEPGTLREALRGRVTKHHRFLLRLHVQQIDALDAAIANIDQEVDLAVEPFRSEIRLLMSMPGISELTARVVLAEIGCDMSRFESAGQLVSWAGLCPRNDESAGKRRSNRMRKGAPWLKTTLIQCAWAAARKNDTYLQAQFHRLRARRGAKKAVGAVAASMLTAIWHMLRDGTFYVDLGADYFDKRAKTTKTDHLVRRLQSLGFDVQITPATA

SEQ ID NO: 338639 - protein, 342 aa, unidentified
MNREIYIGVDVSKNWLDIAYYDGVVIDWKSGHIRVDNNKSSYKKILLWLKNHQIAKESTIFCMEYTGLYCHNFRLWLEKEGIVYGMINPRKMHRFEPDLGEEEPALDRIKTDEMDSFRIAMYCEKHSRKIKSSPSKLPSHAFFKLKRLLAERRQYVKHSVLYKQQLNDISAYDTEDSRKRKQLGLKSISVLQHQTDMEIKKIIKDDESIYKNFKLLCSVIGVGLVIASETIVLTENFTAITNPRKYACYIGIAPERKESGISIRGGDHVSKKGFTNAKANLSLVALQAIRNDSNIRAYWLRKKAEGKHSGVVLNAIKFKMLLRMFAVIKRQKPYIEMDTFKK

SEQ ID NO: 338640 - protein, 387 aa, unidentified
MQKPHDNSKASPAAFMQDNTLIAVIELSLSNWLVAGLIPGVSREPLKKLEPIPEDLLKLLHGWRDEAIKAGRPITRIAVAYETGRDSFWLARWLRECGIDAHVIHATSVAVSREHRRAKTDRLDTAMLKRGFLGWLRGERGHCTVAIVPTMEEEDAKRPHREREGLVHEQTRVVNRMKSALIQFGVRNFNPKLRKARVKLETVRTPEGKSLPPNTIAALRRDMERLKIIKEQIKAIEQARLQQFEQKPEALANRMVYLLVRIYGLGWETADLLVHELLSRTLRDRKAVARYAGLTGSPDESGSKRREKGLSRSGNARVRKIMIQLAWRMVKFQPDSALVQWFKQRTENAKGSRKPMIVALARKLIIALWRYANDGVIPEGFRLHSAA

SEQ ID NO: 338641 - protein, 344 aa, unidentified
MEQYVGIDVSLEESSVCVMDRTGKIQREAKVASDPEALLYFLGRLDHPVTLLGMEAGPLSQWLHAGLTAAGVEVVLMETRQVKAALSAMPIKTDRRDARGITQLLRMGWFRPVHCKSASAQEVRALLTARKQLQKKMLDIELGLRGVLRGFGLRIGKISRGRFARRVRELAHGNPMLEQVSAAMLRARDALQTEMTALDKRARDLARDEATCRRLMTVPGVGALTALTFMSAVDDPGRFRSSKRVGAHFGLTPKKHQSGETDITGGITKAGDGMVRSMLYEAAQAMLTRTQSFSRLKAWGLRVAQRRGRNRAIVAVARKLATVLHRMWIDGSTFRFGKEVVRTG

SEQ ID NO: 338642 - protein, 367 aa, unidentified
MKKVSTVAAQRSTKISRQKLTVGLDLGDRSSWYCVLDETGQTVLEQKLSTTPKAMQEVFGAMPRSRIALETGMHSPWISRLLTELGHEVIVAHARNVRLIGESRKKDDRMDAQTLARLARIDPQLLSPVKHRSAKAQADLTVIRARAGLVRARTALVNTARGLVKSYGERLRGCNVRNMNPEKAKGLSPELQRALEPLLAALESLSERIREYNERIETLAQQSYPQTALLKQIKGVGTLIAVTYMLTLEDPHRFGKSRDVGCYLGLQPGRRNSGQSQPQMHISKEGDPYLRTLLVQGAQHILGPFGVDCDLRRWGLKLAERGGKSGKKRAIIATARKLAVLLHHLWVSGEAYEPLHNNRSRPLAIAA

SEQ ID NO: 338643 - protein, 408 aa, unidentified
MNPLFVGIDVSSKNNVAYLMKPDGSKHSSFSVQNNLGGAKLLSERIVSALSSMRLSDVVIGLEATSIYGDNLVYALREDGGLGRFRRKIHVLNPKQVKKFKEAYPDLPKNDWVDAFVIADHLRFGRIAKAVYMDDYRYQALRTLTRARFDVIQNLTREKQRFANYLFLKCSGMAQDKGIQNTSATTIALMERFETVDNLANADLDDLTAFVAETGRGRFADPESTAKAVQAAARGSYRLPKTVNDTVNQAMAVSIASMRALKEQVKVLDKAIEQQFEIIPNTLTSIPGVGKVYSAGIIAEIGDIHRFASQASVAKFAGLVWTQHQSGEFEAEHSRMIKSGNRYLRYYLLEAANSVRRCDSEFRRYYDLKFKEVNKYQHKRALALTARKLVRLVFRLLKDNRLYIPPEG

SEQ ID NO: 338644 - protein, 355 aa, unidentified
MNSEKYIGLDVHQATICVAVMDPKGKVVMESILETKATTILEFLAGLRGTLSVTFEEGTWAAWLYDLLKPHVANLVVCNPRKNALLKHGNKSDKIDARKLANLLRLNDLEPVYHGESGVRMLRELARSYLTIVKDVSRVMSRLKAIYRSWAIPCAGRDVYYTRHRGEWLGKIPEAGSRRRAEQLYQQLDMLQPLRQQARRELLAEGRKHTITAKLRQIPSLGPIRSALAVALIQTPHRFRTKRQLWTYSGLGLETRDSGEYHYVQGQVRRRKKQVFIRGLNKDHNHDLKGLFKAAATRASVRPGPFQDFYQRSLAKGIQPTMARLTLARKIAAITLTLWKKGENFDAEKLKAQAA

SEQ ID NO: 338645 - protein, 369 aa, unidentified
MEKLRFVGLDVHKDSVAIAVAEADGSVPQVVATVPGDAKAVLKQLKKLGSAGQLRCCYEAGPTGLGLCRALTAAGISCIVVAPSLVPQKSGDRVKTDDRDAVKLARFLRSGDLTPIHVHDEASEAMRDLERARDDAKKAERVARHQLSKFLLRHGRVYAGKTAWTKLHMDWIRSQRFEQEAHNRVLPEYVRAVEESEARVERLTKDIVELVETWHLKPLVQAMQALRGVRTLTAVILAAELGDLARFASAPQLMAFVGLVPSEHSSGGTQKRGRITRTGNRHVRRVLTEAAWAYRCRPAMSRAIRKRAEEASPEVQAIAWKAQSRLHGRYMRMTARGKNKQQTVTAVARELVGFVWAVARQAQRELQAA

SEQ ID NO: 338646 - protein, 343 aa, unidentified
MRYYVGVDLHKKLTVLCVMDQARRVLRTKRFLNSDPAALTGFLQGLGEFELVLEATASYEWFVKLVEPLAQRVVLAHPRKLRIIAESTRKSDKVDARLLAEFLVLDVIPPAHRPTPRQRAHRRLVRHRVYIRGRLTSLKNRLRHLAAEYNADRKDLFTRTGLAYLQKLPLEPVDRFLAQRLLRELRLYQVELRAVERELASFIRQAPPQEAQQRKLLDSIPAVGPVTRETFLAETAGPERFGSQKKLTSYVGLAPGQRESAGKRLDLGITHTGSPALRWVLHQAAWQLIRRDAYWAGLYDALARRRGRKKAITAIARRLLCLMLAVIRSGQPYRPRGPGVCAA

SEQ ID NO: 338647 - protein, 424 aa, unidentified
MLGVGIDWAESFHDVALGVPGKGVIEQFRIDHGPAGVQRLVARCVELEPDPAEVRVVLETRHGLLVEALMDAGFTVFPVNPDLVARRRGPAKKKDDSEDARICCLMALDAYLDLRRLIPHGEAGTELRAIARDDERAARDERRIGNRLRADLLAVFPAAIDVADGDLGAPVFLKLLERWPSAEALARAGRDEVEGFARSARHGWPGRFADRVRQAMAAPRLEPRPALARAKEGSIWLAASQLLAIRAQRRVWERRMGELLLGAPRHGRSTTPKDPAPGKAFPGGEIYLSMPGLGDRLAARVAGEIGEHFEQFSTPNALQCYAGRAPVTRRSGRSEFTVARRLAYNRPLGEAVQQWAFCSLTRSEWAREFYDHKIAARDNHHSALRKLGNRWLEVLWHCLHKGVRYDETVHAANRQRSRPPATAA

SEQ ID NO: 338648 - protein, 419 aa, unidentified
MRDGDKKKERIRIYQKRNTCFIGIDMHKDIHCAVIIDCWMHKLGEITFENRPSKFSAFVEDVRKICGAKEFVFGLEDTRGYGRNLSAYLVGRRFDVKHVNPAYTSAVRLANPIIYKDDSYDAYCVARVLRDMIDALPDAKHEDIFWTIRQLVKRRDLLVKNNVMNKNALHNQLMYSYPSYRKFFAMIDGKSALYFWENYPSPMYIRNTTPEQVYENLKAINQGLKVERIRDIFAMIESDGDTRKDFQEERDFIIKSLVKSIRNNLEQIKEIDVELERIIPLAGYKLRTMPGIDLTTEAHLISEIGDINRFPDSDKLARFMGLAPVSFSSAGKGKDERCRNGNRVLNAIFHFLAIQMVAVSKGGKARHPVFREYFEQKVREGKNKPQALVCVARRLVRIIYGMMKTRTEYRPYEKADGKN

SEQ ID NO: 338649 - protein, 350 aa, unidentified
MSIRNQPRDAAVFGIDIGKTVFHVVGLDAAHAPIQKATFRRETLLQFFERASPVLVGMEACPGSQWLARKLLGMGHTVRIVPAQFVKPFVKSNKNDIIDAEAIAEAVTRPTMRFVEIRTPEQIDLQALHRVRDRMIAHRTRLISQMRAFCLEYGIAIHQGAGKFKAEIPRVLADETNELTPSMRRIQTEVHGEMMELEQRITAMNHEIEAIAARSDTARRLMTVPGIGPLASTALLAAAGSGRQFRRARDLAAWLGLVPREHSTGGKTKLLGISKRGNKYLRRMIVHGARSCVTHLDRSRDRLGPWLDGLESRMHKNKVTVALAAKIARVVWVILTKPGATYERRVPAFG

SEQ ID NO: 338650 - protein, 341 aa, unidentified
MGAVADSSLLSAGGQVHVFIGIDVSKAKLDCTLLTAEADKCKTKVVVNTAAGVQALLAWCAKHGAQPAQLHAILEPTGLYHEQAATALPQVRVSLVNPAQARDFAKALALRSKNDALDSYVLARYGQTLSPALWHPAPLHARQLRALLTRREALSKDLLRELNRKEKSQFSPSAPLVDGSIDKAIAFLREQIKQIERAIDQHIDNHPDLKQDCELLNSIPAIGPQAGNAILAVMHNRHIDSAQSLAAYLGVVPVQRQSGSSLNSCARLSKAGPSQVRATLYMAALVGTRHNPHIRALYQRLLKAGKSKKAALGAAMRKLVHLCFGVLKNRIPYQPNYAMNG

SEQ ID NO: 338651 - protein, 435 aa, unidentified
MEEVTDEPLYRSRVCGIDIGKAGLVATIRVPSEKDPARRAAETRSFGATRREVLALADWLRCWQVPAVVMEATGDYWKGPFYRLEAEGFECVLADARQVKNLPGRPKRDPSDSRWLAQCFERGAVTACFVATPEFRLIREHTRYRRDLTAERTREKQRAEKLLESAAVKLSSVVTDLHGVTGRDIMDHLIAGERSPKVLAQLARGRARRKIGELEAALEGAEFFTGYHAALLAAMLARIDQLNASINQVSQVIEELLAPYEEQLQQAESMPGWGRRAAQDSVAETGVDMSRFATGAHLASWAGRTPLDHQSGKRTGKARSKKGNRYLAAVTGETAIAAGKTQTREGARYRRLARRRGKAKAQVALGNTQLKVYHKLLSNPGMRYEDLGPDYYERQASARRQIAHHVGKLGALGFEVTLCRIPGLPDDEPDGTRAA

SEQ ID NO: 338652 - protein, 375 aa, unidentified
MAEFIMVACDLHDKTMLLKIARGRQAAEKITVRNTPAARVRLIVQLQERARATGGARILFAYEASGLGFGLYDELTAADIECVVLAPTKIARSPQHRQRKTDEKDAEQILQLLRGHVLAGNPLPSVWIPDSQTRDDRELVRARLDAAEKGVAIKSQIQGLLKRHRLVRPDHLKCAWTRKASAWLRGVTRDQAVGAGARATLASLLRQWEFLEQEIERLDEALAALATAPRYAAAIGELVKLRGVGLLTALVFLTEMGDLDRFANRRQISAYLGLVPRSYESGAADDRKGHITRQGSSRVRRALCQAVWPRIREEGPEQAAYQRLVAKNPKHKKIAVVAAMRRLGVTMWHRARTARPEATPWGWGRRTEVPAPASG

SEQ ID NO: 338653 - protein, 386 aa, unidentified
MQKLKDLSRCLTPLEPHGTLIAVIEMSRSSWLVAGVVPGVERQPLKKLAVDESVLLKLLHRWGEEAEKAGYMIKRIAVAFEAGRDGFWLARWLRARDIEVHVIHTSSVAVSREHRRAKTDRLDTELLKRAFLGWLRGERDHCKMVAIPTIMDEDGKRPNRERENLVGEQSRIINRIKATLVRLGIRGFNPKLKKAAERLQGLRTPEGEPIPPNTLSELRRNMERRRLVRDQIRQIESARRDRLEHAPGEGAHAMVRLLARVMGIGIETADMLVQEVLSRNLRDRRAIARYAGLTGSPDESGRKRREKGLARCGNPRVRRGMIQLAWRFLLFQKDSALAQWFQARTENARGTRKTMIVALARKLLIALWRLVRDGVVPDGVILRPAQ

SEQ ID NO: 338654 - protein, 343 aa, unidentified
MKLSRIGIDLAKDVFQLHGVDIHGKAVWKRRLKRDQWMSAVLDRGEPGCEIGMEACAGAHHWAREFESRGYTVKLIAPQFVKPYLKSNKNDANDAEAICEAMSRPNMRFVTVKSVEQQDIQATHRIRSELMTQRTAKSNQIRGLVAEYGLVAPLTLRALRAAIPCWLEDAENGLTDHFRSLLHGVWGDLVSLDDRVRELDREIQKLANSNEVTQRLQQLRGVGPMVATALVATVGDARQYHKGRQMAAAIGLTPRQHSSGGKDRLLGISKRGDVYLRSLLIHGARAVVSQAKHKDDRLSRWVIGIAQRRHPNVAAVALANKTARMAWAMLRNETDYDPDFAIS

SEQ ID NO: 338655 - protein, 410 aa, unidentified
MDVFCGIDWAEGHHDVAIIDTSGKQLAKCRINDDLDGYEVLLDLLAEHGDTAEAPIPIAIETSRGLLVATLRTGTRQIFAVNPMAASRYRDRHGVSRKKSDPGDALVLANIIRTDMHMHRPLPTDSDLAQAIAVLARAHQDAVWNRQQIASQLRSVLREYFPAALDAWREKAGTLTRPDARKILGAAPTPTLAALLPAWKLRLMMTNAGRKRGITEDAERLHTLFRQAAARQLPAVEEAMGIQAKALLTQLNAACKAVDELAKAVERTFRTHPDAPIMLSFPGVGAQVGARILAEVGDDRARFATACGLKAYAGAAPITRASGKPKYVGRRFVKNNRLNHAGYLWAFATLTHSKGANAHYRRRREAGDWHAQALRHLFNRMLGQLHHCLQQRVFYDESVAFPLTSGSAVA

SEQ ID NO: 338656 - protein, 360 aa, unidentified
MPIVAETYRHVVGVDTHAATHTYAVVGCPTGALIDQATFPTSSTGLARALAWVGRRTDGDLGSVLVAVEGTGSYGAVLSDRLDELGYRVVEAPTPERHRGRGKTDQLDALNAARASLAMDLAYLRDRRGGGPDAQVRAALQVLTTARDQANAERLRCLNALTALTRTHDLGIDARRALTRVQIATIAGWRARNEPLGAATARVQAVRLARRITELDQDLAANHDQIAALLPPQQAPQLLHLPGVGAVIAATVLTAWSHPGRIRSEAAFARLAGTCPLPASSGNTTRHRLNRGGDRRLNRAINTIVLTRMRIDPRTRAYIDRRRAEGKTNREIRRALKRYVTRQLYRTLNNQPTPQPLDAT

SEQ ID NO: 338657 - protein, 398 aa, unidentified
MESQLRVGVDVGCHAHRVGIADPDGSILEEFDISHSEAGFQEFFRRVEERRSEFGFPVAVAMEGYNGYARPLDRLVQEKGYRLFNVNNLKLARFKEVFPGAAKTDPIDARKILELFHLRDQLPMAKDVLQEVLPAPAVNEKLKRISRRRRQLVTEKLRVLNRMQADLQAVSPELLAATHDADNLWFLRFLSFRDDLRQLARLRLATIRQIPSVGAKYARIIEEWQAKATFSDEVEYVGPMIIEDAKRILELHQQVAALDGALAELSAQSEIARRLGSIAGFGKTSIAELAGEIGTLSRFSGEASLALYVGMSPLTVQSGQSSRARAPRQVNTRCRAAMMTAVARHIGCVPESRVYYERKRAQGKSHNQAVRALGRHMVRVIWAMLRDGRDYEPRGDAA

SEQ ID NO: 338658 - protein, 317 aa, unidentified
MSKHSIVFAGIDIGKRKLDLALKGSKARLEVENEPAGHDKALSWLKRHKVERIGVEATGGYEKNVVRALRRAGLVVVVLQPLQVRAYAQFRLKLAKNDKLDATIIADCVASIEEIHAAPDPRFEAFAASQTLIDQLNDDIVTYKTRLESAPDETARMFWKQEILARQAQARNARKQLRAAMREHSDLAAKLDLIVSVQGVAEKTAMAVLIRMPEIGALSREKIAALAGLAPYDDDSGDRTGQRHIKGGRTRLRTSLYAAAFAATFHWNPQLKSLYQRLRAKGKKHKIALVACARKLLVFINTVVARATPWQASPATT

SEQ ID NO: 338659 - protein, 346 aa, unidentified
MLYAGLDLSRKRLDVHLLDEAGVTVEVGATPPDTDGLRVLAARVDRFGEPVRAAIESMNGARFVHDQLELAGWQVEIADAVKVKGLAPLACKTDRIDAWVLAELARRELVPAIWLPDPAVRAERERARFRLHLVRHRSSLKQRVHALLLAHGKPCPVSDLFGASGRALLERLALPEPWAGTLAASLRLIDELDGEIAACEAELRRLGAEHRYVPLLMTVPGIGFVLAYTIAAEIGAIERFASPSKLAGYSGLCPRVYQSGASDRRGALAKQGPKYLRWALVEAATGACRHPVYRARYERTKRRLGRQRGAKVAQVDLARRLAEAIWHMLTRNQPFAPAGATGPLAA

SEQ ID NO: 338660 - protein, 356 aa, unidentified
MAIAIGIDVHKKTSTFFAYGEDGEPLEEFNKRFKRVASNRDGYTEVLVWLGNTDCDFLMENSTKTHDVYWILQGLGYKNLYVAHSVDLKRITKSSKKTDQFDAEKLATYMRVKQQNIDQFRTCYICTPEDMRIRRLCRIAKQELFDMGRIRRRIRSHLLLTGREWIGGLNTKWECEALMNEDDPGLRHLGRQLNECRLRRDAAEEAVVEAIKGNEKMFPIYEKLKEIPNFGDITAAYLDAVIVDIDRFENPKKLAAYLGIVPRMRDSGETENHCGLTRSGDPAARWLLIQATFRLVNSSAPDSQLKAFFAEKNGGSIEERKEADTSGLLKRPALVATANKLIHIIFALLTHPDRHW

SEQ ID NO: 338661 - protein, 331 aa, unidentified
MKNLSIIGIDVSKLVLDAFLLSGKYHFQVENSPAGFAKLLEISCTKLKVSRDQIYYCFENTCRYSRLLAVFLEQSGIVFSQIPALDIKASKGISRGKTDKADAKDIALYAWRKKDELQFTKLNSAETSELRQLVSLRDKMIKHRTSYKNSIKDLQDCFFEGETKLIRDTQKEMIERLNEQIKKVEDRMDTIICSMPEWKINFKLIQSVRGVGPVIARYLIIFTENFTRFANYRKFTCYAGIAPFEYASGSSVKGRTRVHHCANKQLKSLLNMAAMNAIKISGEYKQYYQRRQKEGKNNMSTLNIIRNKLLARIFAVEKRQTPYVDHYKIAT

SEQ ID NO: 338662 - protein, 406 aa, unidentified
MFYLGIDVALNTHRLVMLDDHGERVSSGISFQNNTADFEKVLAKLKELSINPDNSIAGLEATGNNWENLYCFLTGNKFKTTLLNPHQTNKFREALRKKAKTDDIDAFVIVGLLRSNEFVSSYVPEDKIQTLRELTKLRYEFIKDHKNYQRQVLALLNLIFPEYRKTALRNPFAIASIAIFKAFPTAKHLSIAKPKHIEKIVRSIKGNNFNVKEIENLISIAKTSVYSGRCQESRALTLNILITQVENFDKSIRQLEEQVNQILSPTSNDDVNSFPGSNLLTIPGVGPKTLAAILSCVGESGQAFSDGVKLIGHIGFFPQIYESGETKRTNKLSNKGPAYLRHALYMASVACIKHNLQLRSLYHMKISQGKKPKQALICVAKKLAHLCLSMLHSGQEYNPARVFCYA

SEQ ID NO: 338663 - protein, 322 aa, unidentified
MSDSVTVGIDVSKLTLDVHVSPAQLHQTVSNSESGFTELKKLLSMQQVSLVLLESTGGYEDAVVCFLQSLGYDVSVINPRQARDFARSMGRLAKTDRIDAELLAQLASVIDSRPDRERFVKKITDDSRRKLACMVARRRQVVNMISTEQQRKSAASVYSTESINRVLSFLRSELKSIDADISLHVRSHFADISGLLASFKGIGPATIGVLLGEVPELGRLNRRQISALIGVAPFNRDSGFMRGRRTVWGGRTTVRNALYMPTLSAVRFNPVIREFYTRLISQGKPRKLAQVAAMRKLLCIINAMLSSGTMFNHALHRKQEVQ

SEQ ID NO: 338664 - protein, 346 aa, unidentified
MTIVEAARGVTGGVDTHLDVHVAAVLDPLGALLGTERFDTDPAGYKALLTWLESFGALTKVGVEGTGSYGAGLARFLRRADVEVIEVDRPNRAERRRSGKSDPLDAVEAARAALGGRAKSISKSKDGAVEAIRVLVVAKRSARGARVKALTQMRHLVITAPDQLRCRLKGLSVSALVTEAARLRPSRSGDVVMAAHKASLCSLARRIQGFEDEIAELDRRIEALLKVTAPELLARFGVGPDTAAALLVSAGDNPERLHSEAAWAHLCGAAPIPASSGKSNRHRLDRGGDRQANSALWRIVMVRIAHEPETTAYFERKVKEGRSKRDVIRLLKRYVAREVYRYLPRG

SEQ ID NO: 338665 - protein, 353 aa, unidentified
MIIIGVDYHPEFQQIALLDRGTGEFQEKRLTHSQEAEKFYRALADQKVRVGMEASGHARWFERLLAELQIELWIGDAAEIQSKRGRKQKTDRQDAQLILQLLLEERFPRIWLPSAENRDLRQLLWHRHRMVQARTRIMNQLQAVAINEGLRCKKRLWRAGGRQQLESFRLAPWASRRRRDLLELLDRLNPTIAELSQAIEQEAEKCPAARRLTTHPGVGALTALAFVLILGKAERFQCGKQVASYLGLVPLEKSSGNRRRLGHITKQGSSLLRFLLVEAAQVTVRSLPEWRSQYFHLVMRRGRKTAKVAMARRLAIRLFWMWRQGWDYQPSKSSVRTQDSPEIAMVCTRTPSN

SEQ ID NO: 338666 - protein, 416 aa, unidentified
MSGKREIACGVDVHNQFIVATILSSDGLKLQNRFETNLEELLKFKDWLKENGCHKVALESTGNYWLPIYHVLEGSVNFILANAYQIKHIPGRKTDTLDSEWIAEICLKNLISPSRIFCRYHREFRSLTRTRESLIKVRTKIKNRVTHELEGACIKLSSVLSDVFGKSGRHIVDGLLNGMDLEVILESIPSRKVKANKEEIRGTIQSNLSSLQIFLIQSHLDMIDAITKQIAEIDAKISDQLSTRNEDMRIALSMPGMGFVSASTILAEIGDFRDFSSPDKLAAYCGLVPSVYQSAGKLINGHITKHGSPHIRSMIIEVAHAIIRTRRNTKLKKFFLRIKARRGTKIGVVALARKVLCILYHLLIHQETYHDDLLGKPRNIRHPSAYSTTPMSLEEMIKTIIKAGYEVRKGEYMEGG

SEQ ID NO: 338667 - protein, 348 aa, unidentified
MDHIIRIGMDTSKHVFQLHGVNAAEEPVLRRKLRRNDMVVFFERLAPTIIAIEAAGASHHWARLLRSFGHEVRLIAPQLVKPYVKRGKNDAADAEALCEAMSRPTMRFVPVKTAERQAALMLLGLRDRLVRNRTQLANAIRGYAAEFGLAAAKGIAHLAPLLARIQSDESLPGLARELFAAHAQEYAQLQAQIDEVEGKLMAWHKTNPGSRRLAQIPGIGPIGAAMLIMKTPAPETFRSGRQFAAWIGLTPKDHSTAGKVRLGVITRAGDEGLRSALVVGATAVIRHLRNGKGRSMLSAWVEQLLKRKPPKLAAVALANKLARIAWKLMVTGETYTAKPRPIASAGIA

SEQ ID NO: 338668 - protein, 326 aa, unidentified
MQKDLLYCAIDVSKDRLDIDGAALALPEQLGNDQAGYRQLIKAAKKYSGAVHFVFEATGPYHLGLALALWQTNIALSVLNPARVRYFAKAQGKAKTDPLDKKVIGAFAQAFQPQATPAPDPVVRELTELLQRRDSLIDSRAAEQHRLGQTRHNFLKGQIQCSMAQLTQQIDQIDRLMKKLLSTSEELKAKVEQLCQIKGVGPLTALTLLITLPELGALGRNRIARLAGLAPLNDDSGTQINIRFIQGGRKRVRNALYMAALSASRFNPVLSEFYQRLLKAGKPKKVALTAVMRKLLICLNALLRKLPACPKGPSQDGLLHAKASVT

SEQ ID NO: 338669 - protein, 338 aa, unidentified
MEQKIVTVGLDLAKNVFQVHAIAADGAVLIRRKLRRTEVIRFFTELPPCLVGMEACASAHHWARELMAIGHEVRLMPPAYVKPYVKRGKTDAADAEAICEAVTRPTMRFVAVKSVEQQAVLMLHKSRDLMVRQRTMLINALRGHLAEYGIVTGLGAGGVVASLKALHEEQDRFPAHARSALHGIAAQLRALTSEIDRLEAQILDWHRNDETSRRLATIPGIGPITASAIAAAVPDASLFRSGRQFAAWLGLRPRANSSGGKERLGGITKQGDGYLRRLLVVGSTAVMRMTRKNPARQPWMAGLLERKPAKIATVALANKTARIAWAVMTRKEVYAAAA

SEQ ID NO: 338670 - protein, 407 aa, unidentified
MTTDDISVIAGIDTHADTHHVAIITNYGKHLADKKFLAVGSGYREIAEYITRYGPVIAVGVEGTGSYGAELTRVLIHEGFEVKEVNRPNRQARRIHGKSDPLDAYQAGESVLAQRGTSTPKTRDGNVEALRVLRTARTSAMTARTAVLTQINAILTSAPESIRAKYRGKTSESRAKSMATSRPTGDITDPLVATAVTLKRMAARHAYLTTKIDNCDAELARIIAEHAPALTLIKGVGTAVASQLLVTIGDNPERLTTEAQFAALAGVAPIPASSGKTTRHRLSRGGDRAANSAIHRIVPVRMAKDQRTQDYVVKRTSQGKGKKEIMRCLKRYVAREIYRVLQNPRPGLLTNDLRPRRLALHLTQTAVALELSAWPKAISRIERGATQDRVLSERYRAWLSEQPKVSA

SEQ ID NO: 338671 - protein, 415 aa, unidentified
MPYRIAAIDVHKMVLMVVVASAAEEVKDPTGEALGFECRRFGALEADRCALLEWLQAREVREIVMESTAQYWKPVWMDLEGKFGKLHLAQAQSNRAPRGRKNDFRDAKRLARRLLAGELMLSFVPEPEQRTWRELARTKDHYVAERARLQNRVEALLEEMRIKLSGVISDLFGPSGRRILTALSAGKTDPVELAELGHASLQCGKAKLADALRGKPAPAQLEILKLHLQLLREFDEIIQKLDQLLADELKKYEEAVIRLAEVPGFGVDSAQRLIAEIGVEAEAFSSAEEFGSWFGGCPGSNISAEKNHGSGAPKGNRYVRKLLTQAAHAAAKKKGCFYQSLLRRFVPKLSYRGAIWVVAHRLGRLAWKILHDKVRYLEQGTETNPKARKRRAQKLSQALRQLGYAVTLTPIAPQS

SEQ ID NO: 338672 - protein, 313 aa, unidentified
MSQNNTSILYVGLDVAKLSLQLHLAGRFHSLANDTKGHARLLKLLRGHPGAHVICEATGGYEQPVVRALQAADIPVTIVEAGRVRYFARAQGQRAKTDPIDSAVLTHYGQTFQPAPTPALSAQQQRLADVAQRRRQLIHSRTMESNRAEHYTDPLCVRQTRQLQKTLEKQIDQCDQLLTALIAEDAQLAQKAARLQTIPGVGPVVAATVLAEMPELGKLNPQTAAALAGVAPYNRDSGNHTGGRHISGGRRPVRCALYMAALSAVRYDRILKNFYQRLRATGKKPLVALTACMRKLVVLMNHLLKNDKFQLAN

SEQ ID NO: 338673 - protein, 341 aa, unidentified
MNYYVGIDVSLEASSLCVVDANGKIVREGKVASEPDALIAWLKGLKLELTRIGLEAGPLSQWLYAAMRQAGFAVELLETRHVCAALKTMPVKSDRNDARGIAQLMRLGWFRPVHCKSMAAQETRALLTARKLLQTKLHDLELSLRGILRGFGLKVGPTTPARFEERIRELVAGHPRLEVIVNSLLAARVALRREFDRFEKQVRDAARCDTRVRLLTSIPGVGAIVSLSFTAAIDDPARFKSSKEVGAYLGLTPTKYQSGETDIDGRISKIGDASVRAALYESAHIILTKPLKGCTALKSWAMKIAKRSGMKKAKVALARKLAVIMHRMLADGTSFRNAAAV

SEQ ID NO: 338674 - protein, 326 aa, unidentified
MISYLGIDVSCRTLEVSDALGSLTGQFANTPKGVASLLDWVHRHVPEGVQVVVEPTSTYHHLLVEALNQSGKEVPYTLINPAHTAAFATMQGKRAKTDRSDARLLAAFGESQMPQPTPPPDQDQERVKSVRRHLAWLEREARSARNRLETARRSPWTLPEVLESLERAATALEEEAAQVARALESHVARHPHWQQEIALLTTVPGIGVKSAILLVSELPAQARCRSAKAWVAFCGVNPEPRESGTSRYSRLSRRGAPQVRAGLYMAAVAAMRWNPVVHALCQRLQAKGKSGRVRVMAAMNKLLHLCFGVLRSGKPFDVTLHQPMTP

SEQ ID NO: 338675 - protein, 409 aa, unidentified
MERVIERGAALDVHKKSVTACVRVPGADGGRRQEVQTFGTTAAALLALRDWLSAHGVTHVAMESTGVYWKPVYYVLEEMFTCLLVNAAHVSKVPGRKTDVRDCEWLAQLLEHGLLRGSFVPPVPIRELRDFTRYRQVLVQDRTREANRLHKVLTDAGIQLASVASNVLGKSGRAMLAALVEGTTDPAVLADLAQGKLRRKLPALREALAGRFRTHHALLVSQLLAHLDYLDEALDILTTQIEEALAPFAREAARLDAIPGVGPRTAEILIAELGVDMRQFPTARHVASWAGLCPGTHESAGKHRAVRTRKGNRWLRAALIEAALAAINVRDSALAARYRRLVRHCGHKKAIVAVAPKMLTTAYVLLADGRTYQEPGAGYYDAQRKDRSVRRALQTLERCGYRVSLEPAA

SEQ ID NO: 338676 - protein, 441 aa, unidentified
MAKEWSLELEVAHPNAAGIDVGNEAHYVAVAPDRDSEPVKRFECFTADLYRMADWLEACGIETVAMQATGVYWLALYEILTERRFRVFVVNARHTKNLPGRKTDVQECQWLLKLHTHGLLSNSFRPSEEICVLRTYWRQRADHVAAASGSLQRMQKTLTQMNVQLANVISDISGVTGMAILHAIVDGERDPGKLAQLADPRIQASREQIAKSLLGNWRPELVFVLGQELEIYKGYQERIAECDRRLETYLKTMENQSEPEPPKAGKKARGNAPQFNLRGELYRISGTDLTKIDGIDVMVAQTVIAEVGLDMNRWPTECHFASWLGLCPDNRVTGGKVLHRGTRRVQNRAATALRMAASSLWRSKTYLGAKFRRLRSKLGAPKAITAMAHMLARLVYRMLKFGEAYVDRGIEYYEQKYREQEIKALHRKANALGLRLSPLTA

SEQ ID NO: 338677 - protein, 322 aa, unidentified
MNPKNYGGIDVAKKNFVIGIYGQDKTKTEANTPKGHAKAVEYLQKHNVDLVVLESTGGLEVPLANALHAADIRVVIANPQRTHQYAASFSLGKTDHLDAKMLADYAQALDSRKMADDMCYAPPSEEALALEALVKRRSQLVEMRKMEKNRLEQTHASQKASVVAMIKHLGELIAALDKEIDQSNRGGFNGKGEILSEMKGVGRITCATLLSMLPELGKVPHKRAALLVGVVPPPRQSGEKEKKSGCVGGRMVVRNALYMAALTATRSEPKIKAFYEKLMSRGKAFKVALNACMHKLLRILNARMRDYLASLKETEESESQSA

SEQ ID NO: 338678 - protein, 327 aa, unidentified
MSFYIGIDIAKDKFDLLWLRDPKSLKVKTKIFKNTQADFEHLKNWLEKNITTELADIYVCMEATGIYHESLAYALYAMGVKVSVINPAFVKNFAKGLGVRSKTDKKDSFVLARYCVMTNPGPWKPEPEHIREIKALLARLEALEKDLQRECNRLEKVQISHASKTVITSIELMIKCLEAERDSIEKKIDEHIDQRPDLKQDRIYLNSIPGIGSVLSREMLSLLRSRDFSKASQSAAFVGLAPRLWESGKLKGRTTLCKNGPGRIRAKLYMAAIVAKQYNPDVKALYDRLVAAGKTKMQALGAAMRKLVHICFGVLKHQCKYQSQIVR

SEQ ID NO: 338679 - protein, 388 aa, unidentified
MLQQESEESNGGRTVVGIDPCREFLQLAILAPNQETKFLKLPLAPSITAEILKSTDPRTTQIAIESYGSYGKLFIYDLLRKGYDIREVNPHISKKLCGLYSEEHSDLKDAESLAKALLLIPNLPKVAISDKQQWLAKLTRTRRKLVKDLNGYLNRLHIALTESYGVVYKRLFKILSMKKALKFFEDYPTINDSVSDKQVRERLGEEKWELLSQAGTWEDVTYLETLRTEIRGYIEIIRSIASTKAAIEAKIRDSAELIEEMKLLGTFPGIGGVAGATLLSEIGDIERFGTESHLSAYCGVSPVIWQSGTGKVKTKRRHRYSRRLKGILYFIALSQIRINPESRAYYDRKRTEGKTHWQAMNALSRQLIKIIYYILKDKVPYQRMPLVN

SEQ ID NO: 338680 - protein, 358 aa, unidentified
MATQSLSNLQSFVAPYHAEPFWIGIDVHKRSYHLALLRADAKTFTLVTPAIPEKLVEQLRQLEIKIAGVAYEAGPTGFSLARALQTEEIPVIVAAPSKIPRSISAGAKTDRLDCLKLAQFVSKGLLRPIAVPTPKEEAERALCRRRHQLVDSIRRCKQRIKGFLLYHGFKETESLRRWHTDYPDQIAALPLEAEGRLTIESHLRELTFFENELRSVIEHLEDMNQHPRHQPVIRSLTSVPGVGKIVATTFHTELFRPERFDRAEEVASYLGLAPNVRQSGERAARGHLAPVGQTRLRSLLIQAAWIWRAKDPYAQDIYHRVLSKTGVPQKAIAALARRLAIILWRLSIEQRAYRPLEA

SEQ ID NO: 338681 - protein, 352 aa, unidentified
MAATAQSAIAVIGIDIGKNSFHVVGLDGRGAIVLRQKWSRGQVETRFANMSACLIGMEACVGAHHLSRKLKALGHDARLMPARYVRPYSKGQKNDFRDAEAIAEAVQRPTMKFVVTKTADQLDLQALHRVRERLVSQRTGIINQIRAFLLERGIAVRQGQRFLRMELPRILATPPDVLSPRMVRVIEGLASDWHRLDERIEVLSSEIEELAKRDAGCERLMSIPGIGPIISSAMVAAIGTGDSFSKGRDFAAWLGLVPRQISTGDRTILGKISKRGNRYLRVLFVQAAWVVLVKVKPTRWEGHGLRPWIEAAKKRLHHNVLAIALANKLARIAWSVLAHGRAFETNKLQAAA

SEQ ID NO: 338682 - protein, 401 aa, unidentified
MKRVCGLDVHKETIFCATIKGEKRSPVTEHTTLTPSIRAMGEQLRNEGIEEIAMESTGIYWVPVWNILEEMGFSLILVNPYLIKQMPGRKSDVKDAQWIATLLQKGLLRSSLVPCQNIRELRTYSRKYIKIQQRQTSVLQEMERALEMCSIRITSFVSNLSGKSVYHVIQQIVQGETSPEIMVKSVHNRIVNAHKKEKITESLTGFITEHHRFMLELLLQEYEMLIDQSNRCLLKMEELCRNNYPDQLKLLLTIPGISLISAMIVIAETGADMKAFENSGKFSGWTGLRPRNDESAGKFKSTATMKGNRFLRSTLVQVAWASTHIKGSYFKEKFSRLALRKSRKKALIAIARKLSVLIWNVLYYKQVYNPERAIVYDPAKIHAKMNYHQKEVERLQNLARR

SEQ ID NO: 338683 - protein, 313 aa, unidentified
MAMHATRPVIGIDTAKEELVIQHDDEKRHLAVDNTPAAIRQWLAGLPKGCDIAIEATSTYHMEITERAHAKGHHVYVVDGYRLKNYREGVGGRAKTDLTDAQLLARYLRKEKDEVRRWTPPPTAYRTLQSLLRRRAALVKARTALRQSLSAEPLLKTALATLLKQIDRIDHLIQKRLREAVHAAGLRDQVQRCQAIDGIGELTATALVMAFLRGDFQNSDAFVAFLGLDVRVRDSGKLKGKRRLTKQGDTEVRRLLHCSAMSGARHPTWKAFYQRYRDRGLKTTQALVILARKLARIAFALMRHQETYCPARL

SEQ ID NO: 338684 - protein, 343 aa, unidentified
MQDVATVGLDIAKQVFQAHGADASGETLFNTQIKRENVLEFFSKLKPCLIGMESCATSYYWARQLLEFGHDVRLIHTSYVKPFVKRGKTDANDAEAINVALTQKTMRFVPVKTLNQQAAVTIFRTRSLFVSQRTQLVNALRGHLAEAGLVAAKGIQNYSKLVKLMESAADTVLPTVLKQALTDICDQIHLLNDLVTKLDKEIDRRVKHDENACRLLTIPGVGPKTAMCVIATIPDIHRFPSGRHFSSWLGLTPRTHSSGGRSVLRRITKMGNSKLRTMLYLGGTVIMMRDSKTPIGRWAARLRARRPYKVAVIAVANRIARIIWALLTNGGVYDPTYGREVSA

SEQ ID NO: 338685 - protein, 308 aa, unidentified
MPQIILGCDLARGWLDVHALPAGTTARVENSAAALARWAGAIPTDALVVFEATSGCDGPLIEILAARGLRFARVNPRQAREFARALGVLAKTDKVDARVLAEMGARLPLETTVPPDPARVRLADFLRRRKQLVEARKAEKNRRHGAGQPEILRDIESMIAILDRRVEKLDRRIAALIDESPDLAARADLLRAVPGVGPTVLATLLGELPELGRLDRRRIASLAGLAPHARESGTWRGTRRIWGGRRKVREALYIAALSASRRVPTLIAMRERMRAAGKAPKTILIAIGRQLLVILNAMLRDHQPIRLG

SEQ ID NO: 338686 - protein, 395 aa, unidentified
MSAEGEAIRSNDYRKDTTVKAPSTRPAAVLGLDVGKSSHWACLIDRGGEVLASAPVRNREGALDALFSSAPAGTLVVVDQFRNIGSLAVRRARAAGLAVAHLPGLAASRAAGLFAGEAKTDERDAEVIARTALGVPDSLSGVPGRGEALEAARALSSQRDHVVACATRDKNRLRAVLLESCPALEAAVDLSDRRWLELLAGFGGAWGIARSGAGGPRAEAAGEAAAASTAPPPALVEAENRQVRFLAARISEALDEAGALEAETAGLLEGDETYACLLTVPGIGPRTAAQLAVSVDIARFPDHDHLASYRGIAPRVRSSGTSVRSVRASRRGDARLKSLLIFSCNSLVRSSGRYGEYYRACRARGMGHGRALKAVARKRLRAIYAVMRDRVPYRE

SEQ ID NO: 338687 - protein, 344 aa, unidentified
MITFGIDTHKATLAASAVDDTGREVAARTFPNTVRGHGALVTWAEAMGPERRLGIEGSGSYGAALARLLVGAGENVVEVPSNLTARERRSLRRAGKTDAGDALAIARVASREPDLGPVPMPGLSEDMKLLVDAREHKVGERTRVLNRLHAHLVILMPGYERTVPNLAASRHRREVARLLERRGGVRAELARAELTRVGELDAECLVLQGRIRALVRSSGSSLPTIVGVADITAAKIMGETGDPRRFRSAPAFAAMSGTAPIPASSGQTSRHRLNRGGNRQLNRALHTIALTQSRIDPRAKAYMEKRKSEGKSWLEALRCLKRHLANVVLRTMLADASTGSTTWP

SEQ ID NO: 338688 - protein, 341 aa, unidentified
MQITTIGLDIAKNVFQVHGIDAAEKVVVRKQLRRGQVMKFFEALSPCLIGMEACATAHYWARELRKLGHQVRLMPAKDVKAYVKRNKNDAADAEAICEAVRRPTMRFVEVKSAEQQGRLMQHRTRDLLLRQRTQAINALRAHLAELGIVAAQGREGLKNLLTIIADEKDERLPIDARASLIVLAAQLQALQMMIGSIEKRIIAQHRASEESKRVATVPGIGTLGASAITATVTDPSAFRSGRDFAAWIGLVPRQDSTGGKQRLGPISKQGDRYLRRLLVVGAHSVLRRAKQNPEKYPWLAQLLARRPFKVVAVALANKMARVAWALLAKGGTYRAPVLAAA

SEQ ID NO: 338689 - protein, 345 aa, unidentified
MELHTIGIDLGKTIFHLVGLNQHGEVVVRKKFSRKQLLHFTANLQVKLIGMEACGGSHFLGRALREQGHEVRLMPAQYVKPYVKTNKSDYIDAEAIAEAVERPKMRFVPIKSDDQLDLQSLHRVRERWVMRRTAVINQIRGLLLERGITLRQGRRHIDAALPGILEDAGAKLSGAVRSLLAQLRLELDHLQMRIDEADAVIQKIAGENEACRRLVAIPGIGPVTATAIIAAIGNGAAFKKGRGFSAWLGIVPGEYTTGGKQKLLGISKRGNSYLRRLLVQGARAVLQQSAKQSSGLSAWLAQLTTRAHSNVAAVALANKLARMAWAVLAKNEPYRPPTLAAAATT

SEQ ID NO: 338690 - protein, 400 aa, unidentified
MRVVFGIDVSKASSAVAILVNGEKVHGYTMSNDAIGFARLLGDLRTVHKPEIIFEATGVYSRRLQTFLEDNGYAYTRLNPLEAKKQLDSLRVRKTDQIDAEKLAQSQFVLNRKPTYVQEEVYQELRDLSRFYQNLTEDIVRAKNRLHKVLQVTFPEIETVLSKPTGEQYWNLVTAFPYKDFVLDLSKDELLESIRQSTSKRISDKRVAYLAEKLIALANQSYCAVKKTSPMLEEVRYYTKELLRLSGQRQAVLDEMVELAQPLPEYDILLSIPGIAETTATSIIGELGDIRRFQSANQINAFIGIDLRHYESGNFLAKEHITKRGNPYARKILFKCIHNIASASHTNPCHIADFYEKRKRQSQTTSTKPHTIASIHRLIRTMYYLITHNKLYDYRSTQNQ

SEQ ID NO: 338691 - protein, 406 aa, unidentified
MKQIVSVGIDVSKGKSTVCAMIHPNTIIKESFEVLHTVEEMSMLADYIGSLDGEIRIVMESTGHYHLPVAQFLYQKGFFVCVENAYIIRQFSHIMLHGAKTDPLDAKKLAKYGLAYWSELKPYKFHPSCYTELSLLSKQYQTYIKLLIAAKQNVIHLMDEMLPGFKEALDTASSVQFSKVKYVDFAKEFYHVDMIKTMGKEIFRENYKQWCKEKGYRFQSEKADELFHLAEDGIPTLPTEFPSTRLCMEVATEQVSQLGYALEQILSQMQNLAKTLPEYQTIRQMGGMGEKLCVRFIADIGDVRRFHNGKALVAYAGIDAPPYQSGQYTGTKRRISKRGNSALRKTGYEVMKSLKSHPPKTDTRVYDFIIKKENEGKSKKQAKIAGLNKFLQIYYARVIEIYKNIV

SEQ ID NO: 338692 - protein, 414 aa, unidentified
MKVVYPICCGVDVHKTFLVGTIISTTNGVQPHYQKKRFSTYNSDLHRFADWLHTNNCLDVCMESTGKYWVPVFNILEERGIRVTIANPKWVKAVKGNKDDTKDSKWIGDLFRLGLVPGSFIPSKKIRILREFTRYRYKLVSMKSSEKNRFQNAFTVCNVALDSVVSDMFGKSATAITDYLISEESFNPEYCVSLLQRSLKKKSDSVLESIEGYSITDEQKFRMRIVRSHLDYITDAIAQVDSAIDAMVAEFENTISLLRTIPGVDRNSAITIISEIGNDMSQFDSSKRLCCWAGLTPGNNESAGKKKSVRITRAGVYLKPALVQVAHAAVKATDNSYYRLKYEQISKRRGKKRAIIAIARMILTAIFQMMTTGEVWNPSDLFRVDMPESLKERQLSKAVKQATKFLEKQGLTVS

SEQ ID NO: 338693 - protein, 426 aa, unidentified
MNNSQKLEAITTSTLIVGVDIAKNVQWARFTDYRGLAIGKALKFNNNKEGFDSILASIEAICKFKKLDKIIVGMEPTGHYWKLLANYLILHDIKVVMVNPFHTKRAKELDDNSPTKSDKKDALTIARLIRDGRYYEVYMPHDIFAELRGLSNARVSLMKRHNALKNTITTVMDEYFPEIITVFKHPLKGKASMQILKSCPFPSLILELGVDGVLMEIKKAVKKTVGLKKAQQLVATAQASIGVNYGLRAAKLKLELMIEELELLTGQLEQIEEAMELALGETGLKEIILGIPGIGVVTAASFLGEIGDPMRFDHPRQISKMAGYNLVEDSSGKNKSGTVISKRGRKNLRSVLYQMARTMVAKNPEIKELYQYLKTRPDNPLKKKQALVVISKKIVSIIYNLVKKQTEYKAELVLGEYRKNQIKQVA

SEQ ID NO: 338694 - protein, 433 aa, unidentified
MLKLNYMSTLFVGIDVSSKTNAVYAMDFEENKYISSSFGNNQPGADKLVNMIAECMHKHKNLDTVLIVLESTSVYSVHISNFLSTSEVLMPYKPYVFCVNPKATSNYRKSYIGMEKTDPTDAYLIADFGRVGRTKKLEPWRGGQFISLKRLTRHRMHLSECITREKTYMVSNLYLKFSELQLLEGDDKPFGSLYGATSSAVLTEFLSPQEIIDMPEEELLTFLAGKSRNRISDLSKTSELLRKAARDSYRLDKCMYEPLSISLASSFNCIHAYQKEIKLIEQAIEKCINGMNPNALLILQSIPGIGPIWASGILSEIGDITVFHSSDALAKYAGLYWPKGDSGDFTSEDNKMSKAGNPYLRCYLGEAANSVRKHIPEYADFYARKYAEVTKHQHKRALALTSRKLVRLVFGLLVKNQLYTGEKLDTEYNIESN

SEQ ID NO: 338695 - protein, 387 aa, unidentified
MQKPHDNSKASPAAFMQDNTLIAVIELSLSNWLVAGLIPGVSREPLKKLEPNPEDLLKLLHGWRDEAIKAGRPITRIAVAYETGRDSFWLARWLRERGIDAHVIHATSVTVSREHRRAKTDRLDTAMLKRGFLGWLRGERGHCTVAIVPTMEEEDAKRPHREREGLVHEQTRAVNRMKSALIQFGVRNFNPKLRQASVKLETVRTPEGKSLPPNTIAALRRDMERLKIIKEQIKAIEQARLQQFEQKPEALANRMVYLLVRIYGLGLETADLLAHELLSRTLRDRKAVARYAGLTGSPDESGSKRREKGLSRSGNARVRKIMIQLAWRMVKFQPDSALVQWFKQRTENAKGSRKPMIVALARKLIIALWRYANDGVIPEGFRLHSAA

SEQ ID NO: 338696 - protein, 388 aa, unidentified
MLLDQPFDGPTAIRTHIAAIFVSLELSRSTWLVTSLSPGKGEKMSRHSVVASDTAGLLALFAELRRKAEVRTGQSYPIVTIQEAGLEGFWLHRVLQQEGIESHVVDPASIAVPRRQRRAKTDRIDGETLLRTLLAYKRGEPRVCAMVVAPSPEEEDRRRLCRERRTLIEERVTHVNRIKGLLFAQGICDYAPARRDRRKRLEALRTGDGRELPSHLQAQIGRELDRIELLLEQIKAVEAAQEALLAAVRKPASQAATDPVTMLLALKGVGANFTAVIWSEAFYRQFTNRRQVAAYAGLAATPWQSGGIRHEQGVSKAGNPRLRTTMIQLAWLWIRHQPQSALTRWFKERSPQGRKRAIVALARKLLVALWKYVTQGVVIEGAVMKPAA

SEQ ID NO: 338697 - protein, 401 aa, unidentified
MKRLSGGIDVGSESHHITILDEEGKVLYNQKVAHQLNEFAESIKLFKQIEKKEGGKISFALEGKNGYSAPFDRILLEQGFTLYNVDNLKLKRFREAFAGEWKDDQRDALMLSKMLKLKEHINSGREKVFIKIEKPSPVTESLKLLSRHQQTLIDEKVRLINRLGKKLLEVCPQILKLGKLKNKKMIAILAQYPDFSKYKRITLKSLLKIKGIGKKRAPFLLKRLNNLEYMPGLTDIYQTIILSFAKRILELQKEIKDLDKSLDEIGNQSKEVNHLKTIPGVATKLASRLIGEIGDIHRFPSEKQVAIYCGIACVDNNSGKVTKAKAVYKANKICKQTLIMMAGCSIHFNPQSKTYYLKKRAEGKSHNHTLRCLARQLIKVIYKMLTEDRDYIIRKELKKVA

SEQ ID NO: 338698 - protein, 338 aa, unidentified
MTIVMGLDQHRAQITAEWLDTETGEVTRSRIAPAHRQGVRRFCERFRGLELEVALEATTGWRFVADELRRAGAAVHLAEPAETAARRGNKKRAKSDRADARHIRELLTIGRLPESWIPPDHLLDLRAQVRLRHTLSHQRGEWQQRIQAVLYHHGCPQRGELLTLAGRAWLAAQPLAPAAREQITVALAIIDALDIQLAPLDARLRAFARHQPGCKALLGQFGVGELTAVTILAELGDARRFSSSRDAVRFAGLDITVHQSDQRRAPGHLSRQGPPALRWALFEASMCAARKCSPDYEYYAQAAERLGSNRARLSVARKILKRSYHLLRELGDEAIAAA

SEQ ID NO: 338699 - protein, 425 aa, unidentified
MTADEKIQWMHSEETVIAGVDMAKRVPWGQLVNLKGLNHGSSFPFENNLQGFRRLVQLCMEAKKQVGATRVVVAIESTGHYWKPLARFLKANGIIVVLVNAYHVKRTKETEDNTPTKTDRKDARLIAMMARDGKFLTCMLPEGPYADLRWLGQARRDKVQKRTAVVNQLHAVLDQYFPEFPQYFCKLMEKTPLLLLEVCPFPSDVLKYSEVELFQKLKAKGLSARKKTLAKVRQAASVSIGMTAGLAGARLVLASILAELRLWQAEIERLEQAMTETLAATGVGQYLVSMPGVGPISAAIFLGEVGDLSHFEDWRQIRRLAGLNLVENSSGERCGQRRISKRGRPYLRAILYQMCAAMVAWNPEFKAIYHYFRTRKFNQLKGKEALVALISKLLRVMFTLVQNRKHYDPSHVMGRVREHQRATAA

SEQ ID NO: 338700 - protein, 379 aa, unidentified
MKDIRHLGLDVDSEKIAVAVAEAGGEVRSLGTIPYREDAVRRLVKKLGPAKRLRACYEAGPHGYSLYWQLSKLGVRCDVVAPTLVPVKSGDRVKTNRRDAEKLARCYRNGDLTSVWVPDAAHEALRDLVRAREVAKKDQLRARHRLGKFLLRRGLRAAAGVKSWTTKHLLWVKTLHFERVAQEVTFLDYLHEVEHVAERVTRLDQAIDQAVESAPAEMRALIAGLQALRGIKQVSAATIVAEVGPLSRFARPKQLMGYSGMVSSENSTGSSVRRGAITKTGNAHLRRIVGEAAWAYQYRPAMSPVLKKRQEGLSEEVKEIAWKAQHRLCSRYRRLMAKGKLRQKVATAVGRELLGFIWAIGIQVEGEQRDHTNAHRRVA

SEQ ID NO: 338701 - protein, 425 aa, unidentified
MLPDVTRRDGRIKLLFIGDDWAEGHHDVVAQDDAGKTLARRRLPEGTDGIARFHELVASCLGEDAEPDPARVIVVIETDRGPWVKALAAAGYRVYPANPKQAARHKETIANSGKKDDFFDAGALADMGRTRRHQLRELAADSDIAEAVKIAARARQKLVWERTRHLLRMRSALREYFPAALEAYADLTLTGPDALELLGRAPDPDSAARLTVTPITAALKRAGRRGDLPQRARDIQAALRAPHLPQPAVIAEAYAASGQAGAAVIRALNEQCKILEAKVSELFRRHPDAGLYLSQPGIGDITGARILGEFGDAPGRYATAKARKNYAGTSPLTIQSGKKKTVHARYIRNRHLIDALHAQALSALTASRGARAYYDELRAHDAGHDDALRRVASRLVGILHGCVKTGCEYDETTAWSHRAESPQAA

SEQ ID NO: 338702 - protein, 409 aa, unidentified
MERQIERGCGLDVHRDTVAACVRVPGQGRPRDQHVRTFGTTAAALLQLRDWLGEHGVTHVAMESTGVYWKPVFYVLEDAVTCLLVNAAHIKQVPGRKTDVADCVWIAQLLEHGLLRGSFVPPAPIRELRDLTRHRKVLIQERQRVVNRVHKLLQDAGIKLASVATDILGQSGRAMLEALAQGTTDPAVLAELARGRLRAKLPALREALAGRFRPHHAFLVSQLLAHIDYLEESIATMSGEVDRVLAPFAAQVAQVDTIPGINKRTAEVLIAEIGVDVSRFPSEHHLASWAGLCPGNNESAGKHKAGTTRKGDRWLRLALVEAALAAIRTKDSALGARYRRVMRHRGHKKAVVAVAHAMLRAAYHVLAEGTTYRDPGPDYYDRRRARQATRRALELLERQGYRVTLEPAA

SEQ ID NO: 338703 - protein, 430 aa, unidentified
MEQVNGIRLQKFRQVKNEIRGSDQYLIVGIDVAKEKHNAFFGTANGKTLHKGVIFDNTIEGFQKLLTLTEVFKVQHELTKVVFGLEPTANYHKPLGEHLIECGHLVVLVSGAAVKNNRRLLDGRWDKHDTKDSANVADLICQGKFLYYEYPDPEMQDLRNLLSLKRRLKKEEHAHRVRIRNQLLAQYFPEMDRHFGPAISLAVVGRCLDPSMIAGMEFDEFRRSVAPGRINIAQQKLLQTIWQIAPESIGCHVGNAVPFEGKVMVSKLNQVRETIKAVEDKIEDLCLQFPEYPCLLSIPGFGPDVSSKVLGAIGNPFRFTSNKQVVKMAGFDLCAQRSGKTSNSVTPVISKQGRADLRYALYQAAFIASLHNKGFMTYYANKLRGRQREKGIGTKMRVKLAAKLLVIAWTLMKKKEPFDQKYLNQEDIQV

SEQ ID NO: 338704 - protein, 374 aa, unidentified
METIYIGVDFHARQQTICYLKTETGELVTAELKHQDKAVVRAFYAEFQGHVIVGLEASGYSPWFERLLEELGCEVWLGHATEIRRRARWRQKNDRRDAELILELMLHHEFPRLHRPAVQSREVMRMLRYRQKLIKMRTMSKNSLPALALQAGVARRSHLFTREGQQELTAALMSPAMQWQREHWLQLLQPLNQQVLEAMVWLKAQSQGDVEVARLRTHPGIGLLTSLCLAHTLQPVDRFRNTRKVVAYAGFDPVERSSAERKRFLGISKAGSRLLRHLMVEAAHVAVRKDEDLKCFYQRLADRRGRPKAKVAAARKLLIRAYIMLRDEIDYAEFRRRAVAARLARLGHGPQVPEVVIGQPASAERQEQLTRTKK

SEQ ID NO: 338705 - protein, 315 aa, unidentified
MDVLLKNCAGLDVHQKEIVACVIREEIDGSTVTEIRSFPTMTKDLYELLKWLEQCNVTHVALESTGIYWKPIFNVIEDYFDITLANAQRIKNVPGRKTDVADAEWIAKLLQHGLIEKSFVPPTDIRELRDLTRLRKKWIGNITAEKNRIQKTLECSNIKLGSVISDVFGVSGRKLLSKLVEQGYVDPKDVQETIHFKMMPKAQQISDSLFGTLNTHQIFLIRQSWNHIIFLEEQLEQLEKQIQELLIPYKEHVKLLLTIPGVKENSVASIIAEIGIEMNQFPSAQHLASWAGLAPGNHESAGKKKALEQRKEIHT

SEQ ID NO: 338706 - protein, 423 aa, unidentified
MDTVFERCAGIDIHKKMIQVCLRVLEGREMRQEIREFSTVTRALLELGDWLESEGVTHVAMESTGVLWKPVYNLLEGRFTVLLCNAQHLKQVPGRKTDFKDCQWIAQLLQCGLLRGSFVPSRPLRDLRDLTRERAQLVAEVTRVKNRVQKILQDANIKLSSVATDIFGVSGRAMLGAILRGRTDAGDLADLARGRLRAKRDDLEDALLGTVSEHHRFMIETDLMHLHALERLLERLEQKIDETTASTALDEPSTEGHSPIPFECSVELLDSIPGVNVTMAQTLLAEIGTNMKQFPTARHLASWAGMCPGNNESAGKRKSGKTTHGNPWLRRAITQAAWAASRQKGSYLRAQYHRIAKRRGKKRAIIAVANSMLVVIHHMLTNGTFYNELGDDYFEKHNRESLTNYFVKRLQSLGHHVHLDAVA

SEQ ID NO: 338707 - protein, 337 aa, unidentified
MKVTLIGIDLAKSIFQLCGVNQAGKAVFNRTIKRKDLLAFLANYPDATIAMEACSGSNHWGRTLEERGFKVLLIPPIHVKPFVKGNKNDRNDAFAITEAARRPNMHFVRPRSLEQTDMMMVHKLRKRRVDARTALINQLRGLLNEYGIVFATGKATLKNALHDLLEDAENGLTGAARELIRDIQQEWASLDAVIDRLDRQIKTQAQTNLNAKRLMTIRGVAEKTATTAIAFAGDGKAYKNGRHFSANLGLVPKEHSSGGKQKLVGITKRGNAYLRNMLIQGAWSILRNADKNNDRLSCWARKVNERRGKHKAGVAIANKLARIIWSVLYHQRDYQPG

SEQ ID NO: 338708 - protein, 364 aa, unidentified
MKRKVYVGMDVHKETIQIAYLTSNSKEILKEQQIKHNEVQIKKFIKKLKTEWNEIHCCYEAGVTGYPLYRYLKSLEVNCILVAPGKIPRQNTDKIKTDKRDAIKLARLMRSGELESIHVPSEEDEAVRDYLRSRDSLRLDLGRNRQRLMKFLLRKDIKYSTTKYWTVSHYKWLNNLHFNNEILQETFNDYYSRVRVQEENLKSMDKKIQEIAESEPYREKVGILRCFRGVDYLTAMFLLCEVNDFKRFKTAGSFMSFLGLVPGEYSSGSKRKQTGITKTGSPRLRRILTEAAWQHRFPGTGSKIITARRSGQPALVVALAEKASLRLHKKFRNLQLRGKTPQVMITAVSRELSGFLWAAMNLVA

SEQ ID NO: 338709 - protein, 347 aa, unidentified
MEKASQAEVQVFVGIDVSARELSVAVQCGIKEGIAITTFRNQAAGHKALLAYLLRAKGRARVCLEASGNYSLDLAFTLQAHPQVEISVVNPRRARRFAESLGERSKTDPVDARVLCEYALRMPWVPWVPPSLAALRLRSITRAIEDLVAMQVQEKNRQHALLASDALPALLIRELEQHLRYLKLRITRLRREALRLIARNPELNRRFHLMLMTPGLGETSSLQILGELAVLPETLDARQWVAFSGLDPKQFSSGTSVEKKPRISRGGNRHLRRALYMPALVATRHEPFMRDFYQRLLRRGKAPLQGVVAVMRKLLHALFAMFRRDEAYDGSKLCPVEFARHTAVVCV

SEQ ID NO: 338710 - protein, 396 aa, unidentified
MLYMGDDLHGKQMTVEVRNEAGDVVVRRQVSMRPAKVDEFLEQLHQIGDGKYVVLMEVCGFHDWLVRRLKADPYCQGVFLIQPEQALKQKTDRRDASRLSEILWVNRERLPAGQSVQGVRCVYQPTEEERQDRQITSQRQRLGRRRTQTINQVRHILRRNNLEWERPTKGFQTQKVKRWLKTLALEETERLEMDQLLEQWELWDRQIAQCEERMAQRFSRSVAAQLLATIVGVSCYMALAIASRIGDVRRFPRGRSLANFFGLTPGWRSSGERQRQGSITKQGSQLVRFLLGQLVVHVLRKDAKLRGWYKGIKKRRGSKIARVAVMRRLTGILWRMLSKQEAYRYEGVTEPRRPDPASPSEACVLPDRAALLAASPASAASQRSAGQVPVPHLCSE

SEQ ID NO: 338711 - protein, 311 aa, unidentified
MTMIGNEKYCNESSATVADVVLGVDTHLDVHLAVVLDHLGRRLSTFSVPTTKKGYESLLAWAEGFGSLRCAGVEGTSSYGAGLARHLRAMGIAVVEVQRPKRRHLRRKGKSDPIDAEAAARAVLAGEAAGAPKSADGRVEMIRTLRSARHSAVKARSQAANQLQGFVVTAPEELRHRLRELTTKKLVTVTARMRPGKDLDDVEAATKFALRSVARRYQALSREIAELDAQLDRLVAEAAPELISLPAIGTDHAATLLLTVGDNPERLGSEASFASLCGVSPVEASSGKVVRHRLNRGGNRDANRALHLTSA

SEQ ID NO: 338712 - protein, 357 aa, unidentified
MIYVGIDVASDKHNVCIIDAKETVLSEFVIANSRSGFELLLAAISGFDKVSIGLEATGIYGDNLVSFLHAHSFNTITINPLSAKRLLNAKSLRKTKTDKMDAFGIAGLLIQEFQNPDTPVSYHISELKSLTRLRYQLVTDRSKQKIRAKRLITLLFPEFKGFFFKTFCSTAMAVLSRYPSAADLSKCRINTLTDILYSASRGRYGQEKAEQMKAVAKSSIGIYSKANIIALKSCLELIDFYNQQIKEVEKEIKTLMDEIDTPITSVPGISTTLGAVIISEIGEISRFSSANKLLAFAGLDPSVYQSGKFKPTTGTMVKHGSPYLRNAIVKHRGRFPVLADFSDYSHCYTCQSAYLSD

SEQ ID NO: 338713 - protein, 316 aa, unidentified
MDQTNPCVGIDVAKAKLDVALSPTEPIVTVDNTEAGLQPLLTQLQRVRPTRIVVEATGGYEQLVVRLLVDAGLPIIVVNPRQVRAFAKATGQLAKTDAIDARLLALFAARVQPALRAQPDQATAALAALLARRRQLVAMITDEKHRRHLATPPIRKSIQKHLGWLERQVATLDTEFTTTIRQSPVWQEHEDLLQSVPGVGPVMSRTLLADLPELGTLSRRQIAALVGIAPFNQDSGTRRGHRTCWGGRAPVRTALYMATLVATTCNPVIAVFYHRLLMAGKRKKVALVACMRKLLTILNAMVQHKTKWLEIRSYTS

SEQ ID NO: 338714 - protein, 404 aa, unidentified
MLFVGVDWAEDHHDVCVMAEDGRILAKRRVPDNVAGIGDLHGLVAEHADDDESVVVGIEIDRGLVVWSLLAAGYEVYAINPMASARYRDRHATSGAKSDPGDAKVLADLVRTDRHNHRPIAGDSDLAEGVKLLARAHQSAIWGRQRQLNALRSSLREYYPGALDAFGTDLANTDALAVLAVAPTPELGRGLSRSKIASALRKGGRQRYVERRAEEIQEALRAEQLEAPELITKAHGLVTHSALALITTFNAQIAELEAALSEHFEQHPDAKVVLSLPGLGTVLGARVLGEFGDDRTRFSGPKSRKNYAGTSPVTKTSGHSRVVLARYARNRHLGNACEQWAFCALTHSPGARGYYDQLRARGKTHRQALRQLANRLVGILHVCLERGVLYDEPVAWSENSELAA

SEQ ID NO: 338715 - protein, 380 aa, unidentified
MRTVSGLDVHKDSIFMCILDEQGKNTEEKFGVTTREIKRMAVVMHSRFVSDVCMESTGIYWIPLWRLLESDFKLHLVNPQFLKQLPGRKSDVKDAQWIATALLKELVRDSFVPDGNIQRLRQYGRRINEINKDTVRCEQRIDMLLQRCNVRLSNYVSRTRSRSYRKVVDSLIRGETSVDELIRLIHGRTVNRHGKSAVHDALEGCIVESDRDLLGQYTQMLDMYQSQKQQCHEAMVQMCMNLYREAFLFLLGIPGVKELSAAIIISEIGDNMELFATAAALVSWAGLRPRNDESAGKIKSRQITHGNKYLRKALIECAWSAARTRGSVFYCRFWHLKGMKKHHNAIIVAVAREMLTVIWKLLSRHENFDETYHLKKKTAS

SEQ ID NO: 338716 - protein, 319 aa, unidentified
MSNAIEGIGIDVSKDKLDLAIRLSNQEYAESSFGNDAPGISSLCAFLERQEAAKTAPLVIESTGDYHLQSALMIKQRYFNVKLINPITTKRYQKSSIRNAKTDKIDAKRLADVAVLEQNLPDFSSNAEQVKARKLVSLLAKLEKTKQQLTLSFNRFEETAKVIDLKHSLAHFKKALIELNKQIEKTKLALVESMPEQVKQQADQTAGLSQEKLSVIYTLLNGKHFSNRDQLTAFFGLDVAVRKSGKWSGKSKLSKRGNAYARKILYQIAWGMKTHNEIFKTCYAKYREANYHYNAILMILARKFLRLYFSYNFKGATNI

SEQ ID NO: 338717 - protein, 410 aa, unidentified
MSQIIAGIDIHKKLLVVVIVDAAKPDVVLQRRRFGTGSAELRHLSAWLSEYGVKEAVMESTAQYWKPVWMELEPHLQLHLAQAQSNKAPKGRKSDLADVKRLVRRFVAGELMLSFIPEPEQRAWRMVTRGRLQLVHERVQLQNQIESLLEEGRIKLSSVISDLLGASGRRILRALAGGNTDPESLAQLGDCHLKCGVPALVDALTGSMGDIHRRILAQQLDRIEMIDRQIEELDKLAASRMQKYQDAVTRLVEIPGIGAQAAQEILSEIGPEAAAFPSAPQLASWIGVCPGSNESAGENHSGRSAKGNRFLRRVLCQAAQAAVRTTNSHLQVLFKRLVVRLGYVKAVWAVAHRLCKIIWNVLHKGARFIEFCEARNPKAVQRAINHHLKALRRLGYQLPSSSAQPEAARG

SEQ ID NO: 338718 - protein, 336 aa, unidentified
MVQIYGIDLGMSSFDVSFLSESGSVRHLSGVKNTVHGISKFLLSLPSSAVLCAEHTGVYGDLLLRLCTLNRICLCFVPGYQIKHSLGLQRGKSDPLDACRIREYAERFYDLLRPCFYPGEEMSELQELYRTRSLLVESRKRLDTLNIGDNCKSSVSLAADHARRAVLAELNTQISGLDHEIEALIQNSSEFSRNYQILTSIVGVGPVTSCELIIKTENFRKLDTAKKCAAYAGIAPYPKESGKMKCGHKISPMGDKQLKTLLFLCARSAKEHNKEIRLYFLKKHKVEKKHFFVAMNNIANKLLRLIYSLIQKQQTYDRDYIQRDPRCVVISDTNKC

SEQ ID NO: 338719 - protein, 410 aa, unidentified
MLELFVGDDWAEEHHDVELMDPAGRRLGRARLPEGVTGMARLHAMIAAQLGEGVEDAVVKVGIETDRGPWAQALIAAGYEVFAVNPLQAARYRERHSVSGAKSDKADAHTLADMVRTDSHQLRPVAADSPRAEAIKVVARTHKTLIWERTRHTQRLRHALREYFPAALEAFEDLAASDTLELLSKAPDPAAAVRLSISQISAALRRAGRRKIEEKAAVIQTALRAEHLRQPEVVAAAYAASVQSTVAVLKVLVEQVKTLQGQVESHFGRHPVAEIILSQPGLGPILGARVLGEFGDAEDRYVSAKSRKNYAGTSPITRASGKKKLVLARFVHNDRLIDALAAQAFAALSASPGARAYYDRIRARGVGHRAALRQLANRLVGILHGCLTTGTVYDETTAWPADATDSPAAA

SEQ ID NO: 338720 - protein, 420 aa, unidentified
MELKDCAAFVGIDWADQEHAICLIDRRQENPENDTLDHEPDAIDQWVAQLQQRFPGQKIAVCIEQKRGPLIYALMKFDNLILVPINPKQLARFREALGPSGAKDDPTDAAILAEFILKHHDRLRPWVPDDKSTRKIRFLAEDRRNLVDDRTRLTNRLKSTLKQYFPLALQITGDRIFSELACQLLTSYPTFEQLQSASDHELRQFYRDQHCYRQSVIDKRLQYIRQAKTLTKDPAIVDSSVLRVKALIAQIAALNASIEVYDTELKSLMRNHQDAELFESFPGAGAAMAPRLLAAMGTDRNRLASAQQVQQLTGVAPVTKRSGKSKVVHRRWACNRFLLQTFHEFAAHSIKYSAWARAYYDMHRADGRKHQATVRALAFKWIRIIFRCWKNKTPYDELSYAATLIKRKSPIIEFLKSTEI

SEQ ID NO: 338721 - protein, 354 aa, unidentified
MDKYIGMDVDIKKTVACVVTGPGDPGRYRTIATDVEAMQAFLRSERAGGYRTQVVFEVRGEAGWFYDNLEGYADEVVVCNPAQATWIYRTSKKNDRIDARKLAVLLMMGEIPRVHMPSKSIRDWRSLILHRRVQVGQVTGVKSRIKAILRSQGCGKPAHKGSWWKQVNREWMRQVAQGGIEMWRIRLSDELAHLEMMESQVRSTTKRLDAYLAGRPGGKLLMSIPGVGPRTAEAVLAYTDDVKRFSSSKEFCAYFGMTPKLDESGSCRRVGHISKKGPSVVRWLLCESSWIAKRKSPALKAFFDRVTGGQPKRRKVANVAVGRKLLSIMRAMLLTGEMFNESLVGRICAADMAA

SEQ ID NO: 338722 - protein, 441 aa, unidentified
MDSASGPASPVLTGYGRRAGGLGPGLTCDSADAVRAVLRDDLSAGPQGLMAPASGAGPICPAWTRGRGSRVRRASGCGAIPQPEKGMAVTIVEEARPVTCRTAITGGVDTHADTHVAAALDPVGGLPGVREFPATAAGYAGLLGWLGGFGTVALAGIEGTGSYGAGLARHVTAAGIRVVEVDRSDRQDRRRQGKSDPLDAVSAARAAQSGRAHGAPKGRDGAVEAIRALMVARRSAAGERTRTINQARALILTGPDDLRARFTRHTPAALVTGLASLRPRPGDVTGYAVRVALRELGRRAQFLDGQLERLDELIVPLVTAHAPGLLTVYGLGPRTAALLLIAAGDHPGRLRSEAAWAHLCGVAPIPASSGKVTRHRRGPGGDRRANHALWRIVFTRLGSHPATRAYAERRTAEGKSKAEIIRCLKRHAAREVCRHLRPAAG

SEQ ID NO: 338723 - protein, 433 aa, unidentified
MLKNVYPNCAGLDVHKKFVSVCRLTVDAHGETQTEVREFSTMTDDLEALAAWLSAGGVTHVAMESTGVYWHPIYNILEGRFELFLVNAQAIKRMPGRKTDVKDAEWIATLMQHGLLQRSLIPDKAQRELRDLTRYHQSLVQERSRFANRLQKVLEGTNLKLAAVATDIRGVSAQAILHAMLAGQTDAHALAELSRGRLRAKRAELERALQGQITAHQRFMLTDLLIHLDFLDERIATVEAEIEAKLASLPPFEAAVQLLDTIPGVNRMLAVTIVAEIGIDMSHFPSDRHLTAWAGVAPGNDETGGKQRSGKTRKGNKYLRRALVLAAHSAARTKNTYLKSQYYRLKARRGAGKAAMAVGRTILQMAYFMIQRGEVYREMGANYFDQLDKVRTAKRLIKRLELMGFSVQVAERPALQPTPQGASLALSPTPSAT

SEQ ID NO: 338724 - protein, 397 aa, unidentified
MSAVVGIDVGAYKHVAAVCRSGERDAERSVLRVSADRVGFDELECWLERQGPVDRVVLESSGHYYWPLASRLHRRGYQVAVVNPLRAKYFAKSRLQRSKSDPADARTLAALGMSEGPRIKDPLLGAEAKEAARFWGGLVKEQGQVRQKLLRLVEIGFPELKECFEDPLCETALAVLREAPTARAAARRRVTTLADTKKPGGRRRLGETKARRLHELAKQTIAPPELDAQMGFEVEIQIQQFDLLDKQIEIAEQRVAEVLDSELARRLQTIPGVGAALAATFIAEIGDIWRFEDFDQLASYAGVHPKEQSSGNKGLKAETSWRMAKTGNSYLRAAAYKMAVVGIVHNPVIRAHYLRKRAQGKSAMNAVGHCMSKGLSIVWGVWRSGLDFDPNLGGPKS

SEQ ID NO: 338725 - protein, 316 aa, unidentified
MTSKERYVGIDVSKKHLDIAIRPGNEHWVVDNDEDGIGDLVSRLKSVGPRLVVLEATGGLELSVTASLGAAGLPAAVVNPRQVRDFARATGQLAKTDRLDADVLARFGEAIKPTPRPLRDAEAQALSALLSRRRQVVGMLTAEKNRLHAALPSVRQEIRQHIVWLEKSLARLDDDLGGALRESPLWRERDDLLQSVPGVGPVLSVTLLAELPELGTLNRKQIASLVGVAPLNRDSGTLRGRRTVWGGRARVRATLYMATLAATRCNPVVRSFYRHLCTGGKVKKVALTACMRKLLTILNSMIKNHTTWHPDHALNA

SEQ ID NO: 338726 - protein, 315 aa, unidentified
MTSDIYVGIDVAKDTMFVAILPGGEKWEERVTEDGIKRLIAKLRPVAPKLVVMEATGGYEAPILEALWKHSIPVAVVNPRMVRSFAKALGRLAKTDKIDATVIAQFAEAIKPRPKLPNYRQEKVLGDLVARRKHILQMIVAEGNRKRRAVGEVQKLIEKHIKWLNKAQEEIEKKLETYISKTVEWREKSEILQSVPGIGKIVAYSLMADLPELGNLNRKQIAALVGVAPLNRDSGNMKGKRGCWGGRANIRTALYMATVVAMRFNKTIKAFYERLCQNGKHKKVAINACIRKLLCVLNAMMKNHVRWGEFKPAET

SEQ ID NO: 338727 - protein, 353 aa, unidentified
MNDATTVAIDLAKDVFELAFGNGMGQIVERKRLSRRAFARCLENRPRLEVVMEACGSAHYWARRLQALGHGVRLLPARDVRPYVRRNKTDRADAAGLLEAARCSQIDPVPVKSPRQQGLQALHRARELLKGQRTAGLNLVRGLLREYGIAIPVGAAKVPAAVRDALEDGENDLPMCLRATVAEQIERIQALGAGMAAIERRLEEEAHADVAVQRYQTVPGVGLLTATALRAGAGDLARFRSGRHLAAWLGLVPREHSSGQQRRLGKITKRGDGYLRTLLIHGGRAILRSAAMRQRAGRPLDPLQVWALELQQRQGQNKAAVALANKLARRLWAIDHHGAAFNPAHVSVKPKAA

SEQ ID NO: 338728 - protein, 340 aa, unidentified
MTITTIGIDLAKNVFAVHGVDQNGKTVLVKSRVTRAALPGLIAGLPPCVIGMEACSGAHYWARLFRQYGHEPRLMAAKFVSPYRMVGKSGKNDAADAQAICEAVRRPHMRFVPVKDESQQAMQYLHRTRQGFIEEKTATYNRLRGLISEFGVIAPQSTDALRHMVSAQKNSLPLQVQQCVDDLLEHVDRIEANITEYDQILSRMARTDHRSQRLMKLKGVGPTTACALVACIGNAHDFKNGRQLAAWLGLTPSQYSSGGKSKLGRITKAGDSYLRTLLVQGARSVLIGAEKRTDSFSRWVCSLVERRGYWRAVVAIAAKNARLCWASLHYVDDFRLYSAS

SEQ ID NO: 338729 - protein, 356 aa, unidentified
MDNKKYIGMDVHQASISIAVSDAAGKVLMECIIETKAATVLEFIHGQRGSLWVTFEEGTSAAWLYDLLKPHVAKVVVCDPRKNALLKAGTKNDRVDARKLSDLFRAGLVTPVYHGESGVRTLRELSRSYLTVSKDLTRVMNRLKGLFRSWAVPCGGQQVYSPRQRATWLEKLREAGVRRRAERLYEQLDFLMRIRKETRTEMLAESRKHPASKLLQQIPRLGPIRVALLIALLQTPHRFRTKRQLWGYCGLALQTRNSGEYQYKGGQLQHAKKPPALRGLNVNHNHDLKNIFKSAATRAGTCKDDPLGKFYQNLLSTGMEPPMARLTLARKIAAIALTIWKKGERFDPAKLNQQAA

SEQ ID NO: 338730 - protein, 363 aa, unidentified
MKIVGCDLHARQQTIAMVDTESGEFTEKTLAHEGSAVREFYAALGNGVLVGIEATGAMQWFLELLEELGIEYRVGHPAKIRAKETRKQKHDRRDAGLLLELLVEGRFPEIWMPSSEQRDLRTLLRDRHQWVRMRSRLQHTLQAIALNHALRQGHGLWSEAGQCILQALPLPPYTGQRRNELLGLYRQLQKRVQELDKEVEGQAQRRPQSRRLMTHPGVGPVTALATEVFLGDPGRFTTGNEVASYIGMIPCERSSGKRQRLGKLTKEGNSLLRYLWTEATKHAVEKDAELKRFYRRKLVQKGMGKAKIAAARKLGIRLWIMMRDQIDYQEFCRRGQLRQKGKAQTGMPDFNSGPAQAVTGSTE

SEQ ID NO: 338731 - protein, 362 aa, unidentified
MLGMDVHDATLVIRMATGTRPPQGRRVDNTAQGRRKLWGELHELVRQGGVARVVMAYEASCLGFGLCDEARDEGFDCHVLAPTKMARSSAQRRRKSDEHDAQQILELLRGYLLGGNELPTVWIPDLQTRQDREIVRARLDVAEKLTALKAQVQTLLKRHSARRPKATGKGWTNGFEAWLRGLRGPHSPLPHGAQVALATLMRQKEFLEGEILRLDAEVKALAEQPRYACPARALMGAQGVGLLTAMVYLSEMGDLSRFDNRKQIGAFLGLAPSCQESGQADDRKGHITHQGPWRVRRALCQAAWSRIRTDPAEKDAYERIAAKNPKHRKIAVVALMRRLAVALWHMGREAQQRAGCFAEAAA

SEQ ID NO: 338732 - protein, 380 aa, unidentified
MIVIGTDTHKRTHTCGAVDALTAAARGELTAPARGGAFGKLLRWARAIDPARVWAIEDCRHVSGAFERFLVARGERVVRVAPKHMAGARRSSRERGKSDSIDAFSVARAALKEGIEELPTAHLDGAALDIRLLVDQREDLVAARGSDQQRLRWHLHDLWPELEIPHGALDTAKWLGKASRRLARTEQSTRVRIARELVRQITAHTRRIHELERDITALVQGYAPQLLAERGCGPLTAAKLIGEIAGAERFRTDAKLARTSGSAPIPASSGNTQRHRLDRGRNRQLNCALHRLAVNKGNWDPDTAAYLARKQAEGKSRKEALRCVKRHLAGRVWKLLRSPAPDPDPRSNNNTKINVNTAPITDSSRYLKSCTRFPQTAASH

SEQ ID NO: 338733 - protein, 358 aa, unidentified
MQTKSTTISFKGQNIYAGIDVHLKEWKVTIMVEDRFHKTFSQNPNAETLWKYLQKNFPGANYYTAYEAGFCGFKAHRELTQLGITNIVVNPADIPTTDKDKRQKNDKRDSKKIAESLKNKTLDAIYVPSKEMEELRSLVRYRKTLVKEISRNKNRIKSFLHFNGIEIPKALDTASKYWSGKFTQWLKTLELSTPYGKMVLEETLDTSEFLRKKLLKVNRELRKVSRESVFSKKLRLLQSIPGIAMIMAMTLLTEIEDIMRFKTLDKLCAFVGLVPTTHSSGDKERIGRITHRANNFLRSNIIESAWTASRMDPSLMLSYNNLCKRMDSQEAIIRIAKKLLNRVRYVMKNEQEYEYSII

SEQ ID NO: 338734 - protein, 349 aa, unidentified
MEIDTVGIDLGKTVFYLVGLNRAGEVVVRRKFSRLQLLRFTANLRVRLVGMEACGGCHFLGHRLREQGHEVRLMPAQYVKPYVKTNKNDYIDAEAIAEAVGRANMRFVPIKSDEQLDMQSLHRVRDRWVARRTSVINQMRGLLLERGITFRKGRRHAEAALPAILEDADNRLSGLLRMLLAQLQDELRQLQSQIDEADALIAKAAREQEACQRLMAIPGIGTLTATAVAASIGNGAEFRKGRSFAAWLGLVPKQESTGGKQKLLGISKRGNHYLRRLFVSGARAVLQCRDKQSPGLSAWLGQLASRVHTNVAAVALANKMARVAWAVLAKSEPYRPPLAVIPAEAMVCN

SEQ ID NO: 338735 - protein, 358 aa, unidentified
MADKVTEAAVVGGVDTHKDLHVAAVVDQNNKVLGTQYFATTRQGYRQMLAWMTSFGALKRIGVECTGTYGSGLLRYLQNAGLEVLEVTAPDRMERRKRGKSDTIDAECAAHAAFSGIRTVTPKTRNGMIESLRVLKTCRKTAISARRVALQIIHSNIISAPDELREQLRNMTRMQLIRTLGSWRPDASEYRNVTNAYRISLKSLARRYLELHDEIADLDVMIAAIVDELAPELIKRNAIGYESAAQLLITAGDNPQRLRSESGFAALCGVSPVPVSSGKSSRYRLNRGGDRAANSALHIIAIGRLRTDDKMKEYVARRVAERHTKMEAIRCLKRYISHEVYTLLRNQNRRVNSIPIMA

SEQ ID NO: 338736 - protein, 343 aa, unidentified
MNIASVGIDIGKTTFHLVAIDEHGSIVIRRKFSRKALLAYTAKLASSLIGMEACGGAHCLASVIRDQGHEVRLIPGQFVKRYRESNKNDYLDAEAIAEAVTRKKLRFVPIKTEDQLDIQGLHRVRERLVHNRTEVINQIRGFLLERGIIFNRGPLSLRKEMPYLLEDGDQNLTPSLRTLLRHLWQEWQCLNDQIDRIGAAIEDVAESDVACQRLRKIPGVGPLVSTATVAAIGNGAAFRRGRDFAAWLGLVPKQHSTGGKATLLGITKRGNKYLRKLFVHGARAVLLRVKYDTGGFGQWVHRLAARAPRNKVIIAIANKLARIAWVVLSSGNEYQHQPVAAAA

SEQ ID NO: 338737 - protein, 374 aa, unidentified
MEHYSTLYVGMDVHRDSFTLAHYALDMKQPTGIVKTDSDYRRIVTYVHRLREKYGQEARIVCGYEAGCLGYTLYHQLTKAKIESIILAPTTLPSPRGGKRVKTDGRDAANIAQCLAYGTYSPVHVPSAEDEQVKEFIRMRNDHCQMLKKLKQQILSFCLRHGYQYSGTRSNWTQAHMKWLDALQPEGLLGDTLEEYLTSFRYHQNKLERLDRRIEEISREETYREPAGKLCCLIGVKPLTALSVVSEVSDMHRFPTAEKFAAYLGLVPGEHSSGNSVRRGGITKAGNVHVRALLTEAAQCYTRGKVGYKSSALKKRQSGQSETVIAYADRANERLRRRYYQMTLQNGKRGNVAKTAIARELACFMWGLLTDHVV

SEQ ID NO: 338738 - protein, 391 aa, unidentified
MTYFVGIDIAKHKHDCFIMNHQGEVIRDSFSFTNDRSGFTSFLELLSKLEPAQAIRIGLEATGHYGMNLKVFLEDHDFSFMEFNPMLVRRFSQATTLRRTKTDQVDAKQIAVHLSSVEYKPYPNKSYHIKNLKSLTRSRDALIKHRSLQLVTLTNILDRMFPEFKPFFKHSLTSATCLYLLDHYATPSKMARMNHESYTKMSGMLRRTFSYARFMELKRLAKETVGLEDPILAFQLQLTLKAYHFAQAQVDELEQRIEAEYAQVHTHIHSIKGIGLQSAACIFAESAPFQRFDSPDQLLAFAGLEPSRHQSGNIEAKGHMVKHGSPYLRQALMNVAESSLIHNPLLYEFYLKKRAEGKHHRVALSHVAKRLVRIIYHLEVHNLDFDFAKMR

SEQ ID NO: 338739 - protein, 376 aa, unidentified
MEIHTIGIDLGKTVFHLVGLDARGEVVVRKKCSRDQILRFTVNLQVSLIGMEACGGAHFLARALREQGHDARLIPAKYVKPYVKTNKNDYIDAEAIAEAVGRARMRFVPIKTDDQLDLQSLHRVRERWVSARTAVINQIRGLLLERGITVRKGRSHIEESLPGILEDADNKLTGALRALLSQLRLEMQYLQRQIDECNKSILRISDELEDCRRILAVPGIGPMTATATIAAIGNGSAFKKGRGFAAWLGVVPGEHSTGGKQTLTGTGRRGNRYLRKLFIQGAHAVLQQRMKQSNGLSTWLAQLTSRKRIQVAAVAMANKMARMVWAVLSKGEAYRPPLLAGTAKPETTGLQLTPGKRRQAWKSHSRFPQSQTSGGY

SEQ ID NO: 338740 - protein, 369 aa, unidentified
MLTVAHRKDSRPVVRLAEVVDGVIGVDTHRDFNQVEIARSSGAVIATRTFTNDSTGHAEALAWIFAHAPGSRLVVSMEGTRSYGVGLARAAATAGLAVIEAEQPTRKHRRGKDNSDRIDAHLAVLYALGLDANKLPTPRCDGDREALRILLCARQELTTTTTGQTNRLRALLRAGDDTDHQLARARLTDTVLASLARRRLPAHASRQQAVRHGEIRRLALALRDAGRALATNRTELAAIVHDLVPGLLSQPGIGPVSAAQAIVSFSHAGRCHSDAAFAKLAGTSPIEASSGQTTRHRLNRGGDRALNKALHVIATTRMRDDPATQAYLARRRKQGKSDREIRRCLKRYIARQLFRTLTAAMTPTTAAST

SEQ ID NO: 338741 - protein, 470 aa, unidentified
MIRHRSDSVLLGPLASVRKPVSQPVIAAVRFMQVELPLHVRLTPQEIESAMRNAGIHADSLLEVRRMYNAVGIDVSKGKSTIAVLQPGGTVIRKPFDVSHTSQSLIELAHYLGSLEGSTKIVMECTGRYHEPMLKALYEAGLFVSVVNPHLIKNFGNNSLRRVKSDPADARRIARYTLDNWAELRQYSGMDNTRTQLKTLNSQFSFFMKQKVAAKANLIALLDNTYPGVNKLFDSPPREDGSEKWVDYAYSFWHVDCVRRIGLKTFTERYKAFCKKHHYIFQQDKPEKLFNASKELVAVFPKEKTYKLLIQQSIRQLNLASEHVERLRQEMNALASTLPEYSTVMGIYGVGKTYGPQLIAEIGDVSRFTHREALTAFAGVDPGVDESGQHKSKSNRASKVGSARLRKTLFQIMTTLLQNAPEDDPVYRFLDKKRAQGKPYYVYMTAGANKFLRIYYGKVKECLRNLEQAE

SEQ ID NO: 338742 - protein, 416 aa, unidentified
MMDDLLAYVGVDWASTTHYAYALDASGRKLSHRSFPHSGDGMVELANWIRTTTDCEPNRVAIGIEVPHGPVVESLMDAGFLVHAVNPKQLDRFRDRFTMAGAKDDRLDAFVLADALRTDRKLYRFLEPMHPTIVELREWSRMTEELSVERNRLANRFRHQLWRFYPQFLDLTEDWAREWVLNLWELIPTPAKARSVRATTVARLLQRSRVRKWTAESLLAHLRQTPIVVAPGVTAACVAHCQLILPRLRLVTDQMKDAMKQLERLCAAVADLPTSAESVGETRHDPEILRSLPGVGPIVLAALLSEGHDAVVRRDAKALRALAGVVPVTRRSGKQYMVVMRKACPNRLRTAVYHWARVAVLHDFQSCNRYAAMRKRGHSHARALRSVGSRLIGVACAMLQTGELFDKDRAPQSAAA

SEQ ID NO: 338743 - protein, 422 aa, unidentified
MKTLLSQRFTAYIGIDWADTKHDVCLQVAGETLRHFSVIDHTPQSIDRWAKSLLERYGAPIAIALELNKGPLVAALQKYEFFCLFPINPSTLARHRKTFVRSGAKDDPTDAQWALELLLTHPQRFPQLMPQSPAMRILASLTEHRRALVNERVKVSNRLICTLKQYYPLALELFGNHDTVVFCDFLMRWPTLEHIKHSRQSAFLKFFNEHNARHPQLNQARWEIITQAMPLTQDPGVIRPSQLYATALASQLKGLISTIKDYDREIEETANSLADYPIFNALPGAGQHLAPRLMVAFGEQRDRFSDASAMQRYAGIAPVTQRSGKKKVVYWRYQCATFLRQTFVEWAAHSITQSTWAEAYYRQQRAKGCSYQAALRALAFKWIRIVYRCWKTSTFYDEKAYLQALTRRGSTLIEAPMEEAAG

SEQ ID NO: 338744 - protein, 431 aa, unidentified
MNYNQNDKIAQITSQTLIIGVDIAKFKHVARAQDYRGMEFGSPCFFDNTKQGFQLFLDWILQLKKEQEMEKVIVGMEPTGHYWLNLAHVLKENKIKFVAVNPLHVKKSKELDDNSPTKNDVKDARVIAQLVKDGRYAEPTIPQGVYAELRVAKKIRDLLTDDLQTVQGQIHNWIDRYFPEFLTVFKSWEGKAALQFLRLEALPHELVGYSDQDLLIHLRKAVTRSVGINKIQELKRAATESIGLRQGAAMAKLELTTLLDKYDLIQMKFEELDSKIDNLIEHIPGVQQMLAIKGVGRDTVAGFFAEVGDLQDYSHPRQIIKLAGLSLKENTSGKHKGQTKITKRGRKKLRALLFRVCMIMVAKNQAFKALHTYYTQRPDNPLKKMQSLIALCNKLIRIFFAIGKKQFEFSEERMLKDIPHMRERIEGKLAA

SEQ ID NO: 338745 - protein, 299 aa, unidentified
MAVHATREHWRVAYDTVGGKQVVTQLLALAPTLIVLEATGGLETRVVSALAAAQLPVVVVNPRQVRAFAQAAGILAKTDRLDAHVLAHFAAAMRPTPRPLPDAATQQLSAVLTRRQQVVDMLTAEKNRLLQQTESALRKRLRAHITWLTQELGRTEKELTQLIQQSPAWRVQDDLLQSAKGVGPVVSQTLLAEVPELGRLNRKQVAALIGVAPLNHDSGSHRGKRCIWGGRARVRAVLYMGALAAVKWNPVIKAFYERLLAAGKHKKVALTACMRKLLTILNAMIQHQTKWHDLSITTH

SEQ ID NO: 338746 - protein, 415 aa, unidentified
MAAGHVGGGPRLVDEDQALGIKIELTIEPALALSQDVGPVLLDSMASLYGMARPFSPASDMMLVLEEERSGPMSIVILGVDLGKNACSVVGVDAAGAVVVRRSMRRQTLVDYVAKLPVCVVAMEACCGAHYLGRLFAAHGHEIRLMSPEYVRPYVKAQKNDDRDAEGIAEAASRPTMRFVELKTQEQLDIQTLHRVRSRLVAERRSLTNQLRAILLERGTIFPVGRRKLELGIDALLADEDTTLSPRLRQLVAELRAEWRELDTRVEALNGEFVELARNDAAARRLTSIPGVGVLNATALIAAVGDASSFAKARDLGAWLGLVPRQHTTGGKPRLLGISKRGNTYLRTLLIHGARAALPSLARSETPLGRWLTGMIERGVHRNAIVVALANKLARIAWAALRKDATFERGYPVAA

SEQ ID NO: 338747 - protein, 309 aa, unidentified
MKQSVVYIGVDVAKAHLDVAWKKRSRRFPNDKSGRAALVAWIKQSPTAVQLICEASGGYEQRLLESLEQSGLKVTLVQANRVRQYARAAGILSKTDKVDARVLSAFGAAMQPKPTVPQSAEQKRLREYEAQRRHLNRILLAEQNRLAQLGSAELRALNRSLMSKIKKQIAVLDTRIGTLIAQNEELRLKAQKLTSITGVGERTAALVLAQMPELGQLNRRQAAALGGLAPFNRDSGTLRGKRTIFGGRRALRSGLYMAALAAARHNQILSPFYQRLRATGKPHKLALTAVMRKLLLALNHSLKPIPSPA

SEQ ID NO: 338748 - protein, 315 aa, unidentified
MYTIGIDVSKKELVAARTTKRGIVEERWTIPNDPAAIALWLDALPHALLGAEATAEYHNELARQCIARGVPFKLLNPIVTKQFTRATVRRRKTDRSDAEVIARCLLNGEGYLLSAESLSPVRRLLRTAEKIRRMDCTLRRMEGQMRSFVKEADTGPLLRCARSVRKAAQALQKQGLAMADETQTKLLSSIPGIGKTLSATIASEIGDCGRFGSGKALVAFAGLDPRVKQSGSTLSRNTRLTKRGSPYLRRAFFLAAMIGERSDPELRAYYEKKRAEGKRFTEATVANARHVAHRVYAVLKRGTPYVKKELSTVEA

SEQ ID NO: 338749 - protein, 390 aa, unidentified
MSEAKQERKVIGLDAHPTLFSAAALCGADALQAHVEWSVDRADLSQLETVLKRRTQPGDVVVLEASGNSFAVAERLFAVGLHAIVLESQAVGKVGKSYCATDRTDAVKIARVYFSGLAHEVWVPDGKAAERRELFFVHRNAVQDSVRARNRIWAFLNQQCQRRPRGLRLNNPKAADELLALRSWTPMQQMVLREQVQSFQQAEARRKRLRAIIAEDVISDPQILKLIRLLGIREKVAFALAAFIGPVARFENAKKLVAFFGLNPSVSRSGISGGNGPLSHYGRSDVRALLIQAAQSIMRCGNGPTHRWAVALKMRKGTNIAVAALARKLVVSVWYLLKGFFTPMTEITEHIRVKMHKIASEIGKVRVRQMGYPSLAAFEEEKLTLLSQTT

SEQ ID NO: 338750 - protein, 359 aa, unidentified
MQTSSTVLKDFSGQNIYVGLDVHDKSWKVHVYSDEFELKSFSQEPDVDQLTRFLQHNYKQANYKLAYEAGFCGYWIQRAFASKGINCSVIHAADVPTSDKERLRKTDKVDSKKIAKGLRNGDLNLVHVPDRELELDRQLLRSRKLLTRDTTRIKNRIKAMLKLQGIAIPPAYKEGKTWSKKFIEWLKKVDLFTISGNLSMQTQVKELIFLAERKKETDDVIKQLCQSERYGVNAALLQGIPAIGPMTAMILLTEIGDIHRFRRLDELCSYCGIVPNCHSSGEMESVGTLSRRGNSIIKDALIECAWVAVRKDPALLLYYKKQLGQMNAQKAIIKVTRKLLSRIRYVLMNQKEYVIGVIQ

SEQ ID NO: 338751 - protein, 429 aa, unidentified
MKFKQINGQNQRIERISPTQLVVGIDMAKETHVAQATNFRGIVLAKRHLTFKNALEGYEKLQRWMDELQRKHRLKTVIIGMEPTGHYWWNLANWLANKGLNVVMVNPATTKRNKENRDNSPSKSDPKDALVIADVVCRGYYYDYTRQASVFQRLRTMMSDREFWVTHSVRLQNRLIRWLDIRFPEYTSVFKDWTCPRSLATLKEFPSPLELESLSVSEVITGWREQHMKRAGGSTGMEKAAQLIAQAKKSVGDTTALSEAKQDLERLLEEYERIVEMLEKMEQEVRALLVKIPMAQQLRSVKGLGTIFIAAILSGAGDLKQYAHGRQLLRKAGLNLAESMSGKRKGQIVLSKRGDAKLRKYMYLATITLVGTNPVFRQMHENNVQVKKMKKQQSIFKLLGKLARILIGIVQRGETFSPEKASAVFTDAA

SEQ ID NO: 338752 - protein, 394 aa, unidentified
MKLIGIDIGKNKHFFCVMDQQTGEIISQPVSFSNDKEGFDFLIQKINSYPKDSVLIGMEDTGHYHFALLKYLLNLQYTVALINPKTTDFNRKMQGGITKNDKLDTINICDVLDTPERKKQYRITKVNSFDLYEQKQLTRHHHNLKEEENVYKNRLQKCIDIVFPEFNKLFNSKYGTVYMNILKTFGSAENIANTDIRTIRKCFEIEGRGNRISLTPERLKECARSSIGISSSAEVIQIKHLTAQIELIEEQLTEIDKKIEEFSIQNNSPILSIPGISHFSGTSILAELGDISNYSKPSQIIKFAGVAPLHYESSQFNAQHTAITKKGSKYLRKTLYQIILPVIRHNPVFNKYYQLKISQGKGHRCAQGHCVRKLLRIIYHLLKTNQQFDPQLLR

SEQ ID NO: 338753 - protein, 387 aa, unidentified
MTKQSGPVGAAAAFEHDSTLVLALELSGKGWEVGAVLPGVARRPRRRLAPRDMAGLLRQVEAWKAEALRAGRTVRRTVLSYEAGRDGFWIARYLLAQGIEVQIMHPASIPVERRGRRAKTDRIDLDMLLRTLLAWLRGEPRVCSMVRIPSEADEDMRRPERERERLVSERIALENRIENLLCLHGIVGFKPRLKKAVERLDELCSFTGTKLPPKLLEELQRLMTRHRLLSDQLKEIELAREQAAMAAEPDRAVQQIQMLAYLRGLGLATASGLAREVFCRSFADRKAIAGFVGLTGTPFNSGGMQREQGISKNGNPRVRRLLMQLAWRWLRFQPDSALSRWFVERTGGAKGRLRKIMIVALARKLLVALWRYIETGELPPGARLVAA

SEQ ID NO: 338754 - protein, 340 aa, unidentified
MHAIRFGIDLAKSVFQVHGVDVQGQVVVQRQLRRGQVLRFFARQPPALIGLEACGSAHYWGRELTRLGHEVKLMPAAYVKAYVRRGKNDARDAEACCEAVSRPTMRFVPVKTVAQQCARAIHRARDLLVRQRTQAGNALRGLLYEMGLIGSRGRGGIQALVERIEAGGADIPAELLISLRPLAGQWRALDIEINALDRQVAREVSRDPAALRLMKIPGVGPISAHAVICAIGDGRQFRSARDFAAWVGLTRLNHDTGGRATLTGHISKAGDRGLRKLLVLGASSQLRRVRTDDTGRSAWIKGVLARRPVKVAVIAQAAKTARIIWAILRSGQDYRESAAA

SEQ ID NO: 338755 - protein, 438 aa, unidentified
MSNKVIFNLDELFISVGIDVGADFSWMSIALPNQQFVGKPYKILHNSIDSLTTAVSKIKEAEELYSLESRIFLESTGIYHYPLFCYLRDKGFNCSVINPIITKNSTNINIRKVHNDRFDSKKAALVGLKPDLKVSLMPSDLALNCRNLCREYYDLMDNRSAYVNKLQGELRMAFPQYLGIFSKVTINTSLTLLETYTSPSAFLEADKQEIIDIIKSTARFGLTYAQNKYNAIIQAATDANQFGYIIESNIKRIRLYISFIRKFDEEINDILESLHKLVDSNEDTKFVKLVHLIETFKGAGFLSAATIMGEIGDFSAFSKPKQLFAYFGLDPAVKQSGKFEGTKVQMSKRGSSIARRVIHTLALQSISISRNGKAKNPVLREYYLQKCDSKPKLVAMGAVSHKVCNMIFAILRDNKPFEIITPQEHIKQYNAAKCDIAA

SEQ ID NO: 338756 - protein, 408 aa, unidentified
MEVLYPRCCGLDVHRRTVVACVRLQEHRRKRTEVRTFGTTTSEILELHRWLAEACCTHVAMESTGVFWQPVFNLLEGSFVVILANAQHIKAVPGRKTDVKDCEWLADLLAHGLIRASFIPPAEVRALRDLPRHRKSLNRDRARVINRIHKLLETANIKLGTVVTHLDGVTGRAVLKALAAGETDPGRFAAFARGSLRSKTALLSAALEGRFGVNHRFLLDQLLAQLDSGATLIAQCDARIFELARPLEPHLERLQTIVGIGRRSAEVMVSEIGVDMTRFASAAHLASWARVCPGTHESAGKRRPAAAGFGNQWLRTALVESAWAATRARRTYLSVQYRRISRRRGSKRAALAIAHRLLVIAYHVLRDEVPFANLGADYFDRLNAAKAMRYHLKRLTELGCNVSSVSPA

SEQ ID NO: 338757 - protein, 309 aa, unidentified
MEIVVGIDVSKERLDVAILPQEEVFAVGNDHAGIDELAERLKGIGVDAIALEATGGYETLAVAGLSAAGLTVLVVNPAQVRAYAHAIGRRAKTDPIDAAVIAAFVLATKPEIRPLRDAETQALSELVARRRQIVQMIVAEENRLRMALAKQAQKSIKRLLTALRRELESLDADLDSHIRKSPVWRVREALLTSVPGVGATTARTLLAELPELGSLDRRQIASLAGLAPWTRQSGKWKGKSFIGGGRSKVRAVLFMAALVASRYNPDLKAFRDRLVAAGKPKIVATVATMRKLLTILNAIIRDGRPWQNA

SEQ ID NO: 338758 - protein, 415 aa, unidentified
MEQIYGKCCGVDVHKKLIVACFRQGRKQEVREFGATTRELLELTKWLTEGGCEQVAMESTGSYWKPLYNILEAAGLDAMVVNAQHIKTVPGRKTDVSDAEWIADLLQHGLLNASYIPEKGQRELRELVGYRKSLIKEQASELNRLQKMLEGANIKLSGTISNINGVSGRNILEALLAGEKIDMAKLIEMRQEKLIANNLKASDEQLADDLNGILTSLQKQMMRVMLKHIDELAVHIKELDDDIDRHMKEDEKVAAAQIQEITGIGNTSAEVIISVIGTDMTRFPTDGHLSSWAGLCPGNNESAGKRKSGKTRKGNALLRSTLVICAHSAVKNKNSYFSAQFQRISAHRGKKRAYVAVAHSILIAIYHILKDGVSFHDLGSDYYNQFNKERKINAYLKKLKALGWQAPSALTVQPV

SEQ ID NO: 338759 - protein, 275 aa, unidentified
MENIALIGIDLGKNSFHIHCQDHRGKAVYRKKFTRPKLIEFLATCPATTIAMEACGGSHFMARKLEELGHFPKLISPQFVRPFVKSNKNDFVDAEAICEAASRPSMRFVQPRTESQQAMRALHRVRESLVQDKVKTTNQMHAFLLEFGISVPRGAAVISRLSTLLEDSSLPLYLSQLLLKLQQHYHYLVEQIKDLESQLKRKLDEDEVGQRLLSIPCVGTLTASTISTEIGDGKQYASSRDFAAATGLVPRQYSTGGRTALLQIVGGDKLIIPFC

SEQ ID NO: 338760 - protein, 426 aa, unidentified
MRFIGLDVHKDFCEVAVVEGDACWSGPRVRSTPEDLEVFAQSLGPKDQVVLEATGGALAIARILEPHVGRVLMANPMAVRAIATAKAKTDRLDARTLAKLLAAGFVPGVWISDERTRLLRRLVSRHAHLVRQRTRAKNEVHAVLQRTLKGRPPVSDLFGKRGRAWLGAQDLPADERQTVEASLRHIDFLDGELRLVDRTMAIQVLSWPEVRWIMTIPGMGAVAAAGVMAAMGDVRRFPTSRHLVGYLGLDARVRQSGSGPARHGRISKQGSAEARHLLVEAAWAAMRTPGPLRAFGERIRARRGANIATVAVARKLAVLCWHLLTREEDYAFGRPSLVREKIRRLELAAGAPNRNGYRNPVRVFATPAQRRLEREVGDQAEKAYRRFVKDFRSSGKKGAGATTGARISAARKGQAARQEQAPDPAL

SEQ ID NO: 338761 - protein, 332 aa, unidentified
MFLGIDIHKREAQVAVRNDDGDVIEQVRVNNTDLEEIGQQYAGGEALLEATTNYFYIYDMLSEHLDVVVGHPPKLKAIAQTDKKTDRIDAKELSRLLWLGSVPESYVPTDEIRECRALVRGRISLLEERTRFANKIHSLLLDNGITQRVKPLSVKGREFLAELSLPAPWDGLLSSYLSVIDTLTEEIDQLDERIEKRAKRFRETQLLMTIPGISHYSALVIYAEIGEIDRFDRAKEVVRYVGLNPVIRESGDSRFEGSISKKGSGKVRWILVQAVHSAVHTVGDEYLSRFYHRIERRKNKQKAAVATARKLLVSIYHMLDRGEVYDPPGVTA

SEQ ID NO: 338762 - protein, 405 aa, unidentified
MNTPKAFANFSPGLERSDNPDVMKQRLSVSARLTDQSCRVAQDMRLKGGAVQTIYIGVDFHARQQTICYLTTDSGELLLHQLKHQDKAAVRAFYAQFSGDVIVGLEASGYSPWFERLLEELGCEVWLGHATEIRRRARWRHKNDRRDAELILDLMLHDEFPRLYLPPLQSREVLRMLRYRQKLIKMRTMSKNSLQALALQSGLAKGPHLFTRTGLQELRTVPMSPVMQWQRDQWLQLLAPLNERLLKTMRWLQQQSQADERISRLRTHPGVGLLTALCLVHSLEPVSRFSNTRKVTAYAGLDPVERSSAERQRFLGISKAGSRVLRFLLVEAAHAAIRKDADLKRFYQRLTERHGRPKAKVAVGRKLLIRAYIMLRDELDYAEFQHRAVAARLARCTPGPPCPVP

SEQ ID NO: 338763 - protein, 435 aa, unidentified
MIDTIQPGFAALDLGATKLFAAIADTPVKAFSTFTSELRALSAWLKQHQVHSVAMEATGVYWIPVHDLLQAEGFKVTLFHGAHARNLPGRKSDVSDCQWHAMLHSHGLLRACFIPTEPIRKLRSFYRLREDHLSMAGAHIAHMQRALDLMNVRLHHVLSQLHGVSGLRVVEAIVAGQRDPTVLAALCEAQVLNKKRAEVLASLEGDWQEHHLFALRQALEAYRFYQVQINACDGQIEALLRALTAELPAQVPRPGQKIKIVRHNAPAITNLHGQLLTLAGGCDATLIPGLSPLGWMKLTGEVGTDLSAWANENHFTAWAGLAPQRHQSGRRRRRLPRPKPIVGQIFREAVLSIAKSKHLALGGFYRRIKGRRGAAVAVVATARKLAVLFYRAMTRGLEYVERGLAEYEAAYRKQSERHLRKMAARLGFTLQPKNT

SEQ ID NO: 338764 - protein, 383 aa, unidentified
MVIDAQGKRLLSQRVANDEATLLKLISTVATMADGGEVTWAIDLNAGGAALLITLLIAADQRLLYIPGRTVHHASGSYRGEGKTDAKDAAVIADQARMRRDLQPLRPGDDITVELRILTSRRTDLVADRTRTINRLRAQLLEYFPALERAFDYSTSKAALLLLTGYQTPDGLRRAGAARLAVWLGKRKARNADAVAAKALQAAHAQHTVIPGQQLAAAMVARLAKEVMALDTEIGDTDAMIEERFHRHRHAEIIVSMSGFGVTLGAEFLAATGGDMSAFDSVDRLAGVAGLAPVPRDSGRISGNLQRPRRYNRRLLRVCYLSALSSIRSDPASRTYYNRKRAEGKRHSQAVLALARRRLNVLWAMLRDHTTYQPTTPTAAAAA

SEQ ID NO: 338765 - protein, 375 aa, unidentified
MKEFSKYVGLDTHKDTIAVAISDAQGGKARYFGEIKNTPEAIRQMVKQLCPDGELISFCYEAGPCGYDVYRQLNRLGHHCDVVAPSLIPTKPGERVKTDRRDSEKLSRLNRAGELTSVWVPNQEQEAMRDLTRAREDMKTLERMSKQRLNAFLLRYGRNYSQGKSRWTQAHSRWLEGLKFDIEVQQIVFQEYVEAVKQSQARVAGLIKEMEKALKGWVLAPVVEALMALRGVKLITAMTIMAELGDITRFDSPRQLMSFLGLVPSETSSGKSRRQGGITKTGNGHVRRVLIESGWCYRFPARKTAHLQRRAEQCSDAVQAIAWKGQKRLCGRYKHLMGRGKLKVQVCTAVARELVGFIWAIACEVMNKKSLSVYS

SEQ ID NO: 338766 - protein, 359 aa, unidentified
MREQTNKISFRGQKIYVGIDVHLKSWSVTVLSETSVLKKFSQHPSPEALYGFLTRSYPGAEYHSVYEAGFCGFWIHERLTALGIDNIVVNPADVPTKSSEKLRKTDTVDSGKLARSLRANELKGIYTPDSVSLEMRSLIRLKNSITKDTTRQKNRLKSQLRYLGIEIPQEFLTPFSNWSKRFFAWLKEIETLTPSGRQALDIHIRHLEELRRQKLEMTRALRTLAKTDRFREPLRLIMSVPGFGQATGMAFLSEICDITRFRNAEQLAAYIGMIPMCHSSGEKDGTGDITIRKHAVMRCNLIEAAWVAVRQDPAMNLFYTEQCKRMPKSKAIVKVARKLVNRLFFVLKHQTEYVNSIVS

SEQ ID NO: 338767 - protein, 344 aa, unidentified
MDHFGGLDVSVKETSICIVDDTGKIVKEVKVASEPAALLKVLGNPSYRFKRIGLEAGPLSQWLFSALAEAELPVICVETRHMQAVLKAQINKTDRNDARGIAQMIRVGLYRPVHVKTLRSQKLRMLLTHRKLLQSKAIAIENDLRGTLRNFGLKVGMVGKVRFEARIQQLVENFPDLSVLVEPLLIVRRALREQVVILHRRLLAIVREDEVCRRLMTTPGVGPVVALTYRATVDVPARFRKSKSVGAVFGLTCSRYQSGEIDWSGKISRCGDEMMRTMLYEAAQSMMHSKKWSWLKAWAMQIARRRGMKKAIVALARRLAVIMHRIWVDGTEFRWTREQAAAAA

SEQ ID NO: 338768 - protein, 362 aa, unidentified
MSNYRTFVGLDVHARSIVGSALDATTGEVLRHRFGFDLSEVVAWTRSLPGPQIATYEAGPTGFGLYRLLLESGTACVVAAPSKLQRPSGDRVKTDARDAFHLMRLLHLDEITAVTVPSVEEETARDLVRSREDTRQDLMSARHRLSKLLLRHGFVYDDGAAWTRQHDRWLREHRVGDLAFMTAFDANYEAVVQGVARRDRLDEAITTMAAESPFTPMVNRLGCLRGISTLTGFALAVEITDWHRFTGSTIGAFLGLVPSEYSSGQSRQLAGITKTGNTHARRLLVEAAWHHRRDYRPTPTSVLQARWDKAPVAAQLRGQAGNERLHHQWVAFTVRKKRPVVANVAVARELAGWCWSLAVMDT

SEQ ID NO: 338769 - protein, 354 aa, unidentified
MKKMQKYIAKNKTIFVGLEDSKKSWKICVRAEGQIIHETSMPAHYSNLKSYLQNNYPDCQITVLYEAGFRGFNLYDHLTDDGNHCIVTPPNKVTAEKDFRYKNDRTDCRRLAKNLEANDYKECFVPDPERRKDRQVSRTLVQVQKDITRTRNRIRKFLEFHGIDEHLKPGRWSEKDYNDLKTLQLEETLQFCFDILLQQLDRLKKTRRLLLHKLREIREKPRYVKTFTLFKSAPGIGWLTAIRLVLEWGEDLSRFDSDKQFGSFLGLVCSEYSTGDSVRYGHITRQSAYFIRAWLIQCAWVAINKDPILNHKYQRIMINSGNKKKAIVAVARKLAIRLRHCALTNEPYCVGVIQ

SEQ ID NO: 338770 - protein, 413 aa, unidentified
MLKICYNTCCGIDVHKKILVATIATTNERKVTTYQTKQFSTFTKDIKKLKQWLINNNCKDVCMESTGKYWIPIFNILEDSCNVTITHPKYVKAISGKKTDTKDSVWITDIFKHGLVEGSFMPPLAIRQLRDLMRYRFKLVNCKSSEKNRFQNSLTVSNIMISNILTDTFGKTSKSILELILSKEDNVTLEEIIPLLRKNLKSTPQEILDSVEGNLTHEQNSKMKVCLNHYDSILDCINDIEKAILPLIAPFQNEINLILTVPGVKDISAITILSEIGADMSVFKDAEHLCSWAGLTPQCNESAGKKKSVHVSRAGIYLKPLLIQCANNAIRDKKCPYFKLRYDAIKKRRGHKRAIIAIARMLLTCIYQMLSKNEPFNHEIYEQLTQKNFKSKDKKLNINNAIKFLESQGYKVS

SEQ ID NO: 338771 - protein, 400 aa, unidentified
MGQPLWAGVDAGKSDHYCVVIDADGKRLLSRRVANDEVALLELINAITALADGGELTWAIDLNAGGAALLIALLIGAEQRLLYIPGRTVHHASGGYRGEGKTDAKDAAVIADQARMRRDLQPLRPEDDIAVELRILTSRRTDLVTDRTRAINRLRAQLLEYFPALERAFDYSASKAALILLSGYQTPDGLRHAGAARLAAWLRKRKARNADAVAAAAIEAAKSQHTVVPGQQLAAAMVARLAEEVMTLDTEIGDTDAMLEERFRRHRHAEIILSMPGFGVILGAEFLAATGGDIAAFGNTDRLAAVAGLAPIPRDSGRISGNLKRPRRYNRRLLRACYLASHIAIRTDTASRIYYDRKRAEGKRHTQAVLALARRRLNVMWAMLRDHKPYQPTAPNAAAA

SEQ ID NO: 338772 - protein, 465 aa, unidentified
MAKAHKSRSNSRAKQNHRAKLKPQDCTLGLQVVNPQAAGIDVGNDEHWVAVPPDLDPEPVRRFGCFTSALLEMADWLVRCGIETAVMQSTGVYGTALHDILAERGIRVFVVNARDTKNLPGRKTDIQECQWLLKLHVYGLLRNSFRPEEEILMMRTYWRQRQQHIGDASRCIQHMQKALTQMNVQLANAISDISGTTGQAILSAILAGERDPQTLATLRDPRVKASEATVARSLEGNWRPELLFVLRQEVESYRAFQTKIAECDQQLHRHYETMEAKADPKQLPPVPRDKRPHGNVPAGFDLREELYRATGVDLTAIDGLNVLTVQTLIAEVGSDMNRFATEAHFVSFLGLSPRNKISGGKVVGREKCKTKNRAGTALRLAAGTLLESRTYLGAQYRRLRTKLGAPKARKAMANKLARIVYRMLKYGEEYVDKGKEFYEQKYRQLQIRMLTKKATELGLQLVQST

SEQ ID NO: 338773 - protein, 348 aa, unidentified
MRIIGCDLHARQQTLAMLDTTTGEVVKLTLMHEGDKVRQFYSQLPRPSLVGIEATGSMQWFLSLMEELGIECRVGHPGQIRAAEPRKQKHDRRDADLILKLLAENRFPAIWLPSKELLDLRALLLHRHQWVRMRVRMQNALQGIALANGLRRGRSLWSYDGQAKIALLPLLPHAAYRRSALQAMYKNMEAEIENLNQQVAEQAGNRSGARLLMTHPGVGPVTALATEVFLGDPQRFADGKALASYVGIIPREYSSGGQQRLGGITKQGSPLLRFVWGEAGAHAARRDPELKRFYRHKLVQKGLGKARVAVARKLGIRLWIMLRDEIDYQEFCRRGQRQHSGAVCGGDA

SEQ ID NO: 338774 - protein, 401 aa, unidentified
MRSIGMDVHRTFAQIAVVDSGLCRDESRIGVRPEDLRVWARTLEPDDEIALEATTNSDAIATLLRPLVRRVVVSNPRKTRAIAEAKVKTDKVDARILAQLLAADFLPETWVADDRTRMLRRLVMRRTHLVKQRTRVKNQVHGILARNLAPTCPHADMFSGVGRRWLMTQDLPDDEWRSVDALLRQLDFHTDELTAVDRDVAIEALDDPVVARLMTMPGIDVTVAAAVIAAVGDFSRFDSPDRLVSYLGLNPRVRQSGNAPAVHGRITKAGPAQARGMLVEAAFAASRTPGPLRAFYRRVKDRRGFQVATVAVARKLTVLCWHLVINGEDYVFARPSLTAHKRRKLELAAGDGSRRGPVAGASRDYHIKQLRDAEKHLVEHAERAYEVTVAHWQAQRPTGRG

SEQ ID NO: 338775 - protein, 346 aa, unidentified
MVYVGIDLHRNRSQIAVLDQEGSELLSRRIVNDPELFLALLADFEQPRIALEATYGWEWLADLLEEAGYELHLAHPLRTKAIAAARVKTDAVDARTLAHLLRADLLPEAYIAPRELRDLRDLLRHRVALTRIRSALKQRVGSILAKNGIARPYSNLFGPGGSRFLVELELREGPRRRLDSLLALIADFDREIGATTNEIEQRATEDAYVEVLCQIRGVGRYIAMLVIAEVGDITRFASARHLCAWAGLTPTVRSSDGKARLGHISGQGSPALRWALVEAAQHAPTGGGPLRQSYERIAKRRGKQVAKVAIARKILTLCFYGLRDGEIRCLAPRAKPRTNRTTAVAT

SEQ ID NO: 338776 - protein, 348 aa, unidentified
MDYYAGIDVSVEFSSVCIMDATGKVVRESKVASEPAALIAFLHEFGYPLARIGLEAGPLSQWLYAGLKEAGFAVELLETRHLRDAFRAMSVKSDRNDARNIAQLMRLGWFRPVYCKSMAAQEVRAMLTARKLVERKLRDVESSLRGILRGFGLKVGKTTERSFPGRIRELVAEHPNLQHMAQALLSVREVLLREFKMFEKQVRAMARASVDAKLLMSTPGVGPIVSLSYAAGIDDPSRFKVSKEVGPHFGLTPKKYQSGQTDRNGRISKIGDASVREALYQAAHVILTKPVKGCTELKSWAMRIAKRAGMQKAKVALARKLAVIMHRMLVDRTAFNPTAKRAALMAAA

SEQ ID NO: 338777 - protein, 320 aa, unidentified
MSKPSEEGFVGIDVSKTQLDVAVGQAGETWSAGNNETGIAQTIERLKALRPQLVVVESTGGLERRLLQTLQQVGIPFALVNPHRVREFAKSLGLWAKTDKIDARLLARFGAAIQPEPTHLPGETEQLLSALIARRTQLIDFRTAELNRLASAHPAIQASIQLLLNQLAEQISLLDQQIQQLISQNEAFHNKDEILRSVPGIGPIASAILIADLPELGCLNRKKVAALVGVAPFNDDSGYRSGKRRTKGGRAAVRKVLYMAAISASRFNPVIKAFYEHLLKRGKLKKVALVACMRKLLTILNAMLCSHTPWRTNEFTLLRP

SEQ ID NO: 338778 - protein, 351 aa, unidentified
MLIIGVDFHPSDQYIAFADAETGECGERRLNHSDGEAEKFYRDLQQRGVSVRVGMEATGYSRWFERLLAELGIEVWIGDAAKIKTKRVRKQKTDRQDAQLLLKLLLENNFPRIWVPSPENRDLRQLLWHRHRLMQMRTRIMNQLQALAMNEGKRRKKKLWSEQGRAQLERLPLATWASRRRQDLLELLDRMNPTIEALTVAVEQEARKRPEVLRLMTHPGVGPLTALAFVMIIGTPERFACGKQIGSYVGLIPSEDSSAGHQRLGHVSKQGNALLRFLLVEAAQAAVRCDSDWRRRYLHLALRRERRIAKVAMARKLAVRMYWMWRNGWEYAQSVEFGSYAGQLVTGHGVN

SEQ ID NO: 338779 - protein, 323 aa, unidentified
MAVVVGVDIAKRSFDLAVRQSNGKYRTKGKLSNDQAGFAVFADWLQQHAEPGAWIVMEATGIYHESLAGHFHALSYRIAVLNPAQIARYAQSQLQRSKTDKLDAKLIATYGQRHEDSLRAWHPEPVSIRTLRALTRRLEDLQSLRQMELNRLEISPEKVQDSIRAVLQRLDEQIAWTLEQIKRHIDDDPDLRGKRDLLVSIDGIADKTAALILAELGDIDRFADARAVTAFAGLNPRLQESGLARGHTCISRMGSVRLRSALYLPAVVALTYNPAIKAQAERLKARGKKGKQTVCAAMRKLLTIAYGVLKSGKPFDPALAIAH

SEQ ID NO: 338780 - protein, 300 aa, unidentified
MKDMMIGVDLAKNVFQIHGALRTREVQFRKKLTRQQFTAFMARQAPCLIIFEACGGAHYWAREMEALGHEVKLIAPQYVRPFVKRQKNDAADAEAIVIAARQAEMRFVGPKTVEQQSRAAVFRGRERLVHQRTADVNALRALLYEHGYVFPVGMRYLDRMTALVDDDTSDLPALIREECQDLLAQIAEKTAHITERTAKLKALASQSDRARRLQTMPGVGPLTAIAVPAFGPDMAHFKTGRNFAAWLGLVPRQHSSGGKERLGRMTKAGQADIRRLLIIGAMSRLGWLGRHTIAQGNCPA

SEQ ID NO: 338781 - protein, 330 aa, unidentified
MNGEGEVLLEGACPTTKKGMAQLFGAMAHCRVVIEVGTHSPWVSRDLKKLGHEVIVANARQVKLISQSSRKNDKLDAQMLARLARMDPGLLRPIRHRSEEAQKDLMTIRIRAALLEARTGLVNAARGLRKATGERLASCDADQMNVGKLEELPADLRDLLKPLVEEVESLTEKIKECDGKIEQIGRDRYPETKLLRQINGVGPLIALTFLLTIEDKERFEKSRDVGCYVGLRPKQSESGDRQPELRITKEGDVYLRKLLVQGAHGIMAERAPDTDLKRWGTKLAGRGGKNAKKRAIVAVARKLAILLHHLWVTGEVYDPLRNNKALAKAA

SEQ ID NO: 338782 - protein, 442 aa, unidentified
MARKPSKQRFTVVHPDCAAIDVGGREHFVAVDPRHENPVQSFTSFTDDLLKMANWLESLGIKVVAMESTGVYWIPIYEILSERGFEVYLVNARATRQITGRKSDVLDCQWIWQLMTHGLLRGAFRPDDLTCCVRSLVRQRASKVKDQAQTLNRMQKAMSQMNIQLANVISDISGVTGMKILRAICAGERDPVQLAELTDRRIKAGKEAVARSLHGNWRREHLHALTQELAAYDFLEQQIADCDDAIKAALEQLPVLQNKPEPSNKPLRSPHRNGVQQTELHQTLWKALGVDLTAIPTIGVDTALVLAGEIGTDLSRFPSSQHFCSWLGLAPPTRISGGHRLAGGGAKIVNRAAQALKQAASNARNDKGFIGASHRARLTRMDTSCAIKATAHQLARLVYNLLTKKQAYVEQGLEEFETRSQDRQVRALLRKARKLGYQLVAA

SEQ ID NO: 338783 - protein, 428 aa, unidentified
MNYNTQNAKIASITEKTLIVGIDVGSETHYARAFDWRNYEYTRKPLEFSNTEAGFQTFKAWMGDIAAKHGKTAVIPGMEPTGHYWFALGKFLQDSGMRPVHVNPHHVKKPKELDDNNPNKNDRKDPKTIAALVNEGRFSYPYIPTGIHAEIRSLSNLRFQTQEELTRIRNRLARWFAIYFPEYKGVYGDLKAVSGRMVLKEAPLPEDIRKLGVEGVDRIWRDAKLRGAGMKMAKTLVTAAEHSVGSTEAPEAARMELKNLLADMDVYTSRLEGLPLKIEEKLKETPYVDKLIGIKGIGLATVSGFIAEAGDIGRFDNPKQLQKLAGYAVVANDSGKHNGESRISYRGRKRLRYVLYEAAIPLIGKNAEFRAIHGYYRTRKENPLKKMQSVVAVACKVLGIFYTILTKGVDYDAGKLMGDIRRPQIQAA

SEQ ID NO: 338784 - protein, 394 aa, unidentified
MDDLIGADSEPLDSPQARGNPTILLAIELSASTWLVAARVPGLEKPHLHRIDGGDTAALLALISSLRARAARGLDATIGVVCCFEAGRDGFWLHRLLTAHGVVCHVLEPTSILVNRRARRAKTDRLDAEGMLRVLAAYLRGDHHACSMVRVPTPEEEDAKRTHREREKLVQERLRIENRIEALLFTQGIRKRPSLRSWERDLAVLRTGDGREIPRHLRAELDRLRRRLVMTLELIREVEAERDQAAKTKPQDQTCHKIAALCRIRGIGKNFAAVLTREVFYRSFDNRRQIASYVGITPMPYQSGGMDRDRRISRAGNPRARTTMIQLAWLWLRYQPGSELAEWFRERVGTLAGRTRRIAIVAMARKLLIALWRYAETGVIPAGAEIRAETAVAA

SEQ ID NO: 338785 - protein, 351 aa, unidentified
MVIIGCDFHPGFQQVAVLDTGSGEIRDLRLGHKEEARQFYAGLRGQEVLVGIEASGYSQWFEQMLEGMGYGYRIGDAAAIRASYVRKQKTDRRDAGHILRLLVEGRFPALWVPSAAERDARQLIVHRHKRVQMRTRVKNQLHALAMNQGLRLRWQLWTAKGLEQLRALPLLPYAAARRADLLRQLEEMDAEIARLDQAVRKEAEARAAAVRLMSHPGVGPVTALGFVLTIGDVRRFAKARQVASYLGLIPSERSSGGKQRLGHISKQGNPLVRFLLVEAGHTAVRGDAELRRCYQRLQHRHSTGVAKVAVARKLALRLYWMLRNEIDYAQLRGPYAGQPVSFCGRKTRPAA

SEQ ID NO: 338786 - protein, 412 aa, unidentified
MDVVHDRSVGIDISKRDAKVCVRVPGIRLGTFTRTVTTWAATTSEVLRLCEFLEEQHVTVVIMESTSDYWKPFYYLMEDSLPVMLVNAKHARNIPGRKSDVSDCQWLAQLGAYGLLQASFVPPEPIRELRDLTRARTIATHDRTREVQRLEKFLESSGIKLSSVVTDLMGVSSRAILNALVAGERDPQVLAALARGRLKVKIPDLVEALVGRFGEHHAFMTRLHLEQIDTVTDRIDQYTARIEEAMAPFRVIREALSTIPGVSTLVADVIIAETGAGMSVFPTAGHLASWAGVSPGSNESAGRIKYTKTMPGNKHLKGALGIAALSVSHSKNTYLAVKYRRFAARRGKMKAVVALEHTILTSVWNMLTAGEVFTDLGADYYIRLDPEKAKKRAIRQLQTLGYEVTITSSVAA

SEQ ID NO: 338787 - protein, 428 aa, unidentified
MNCNTQNAKIASITEKTLIVGIDVGSETHYARAFDWRNYEYTRKPLEFSNTEAGFQTFRVWMEDIAAKHGKTAVIPGMEPTGHYWFALGKFLQDSGMRPVHVNPHHVKKSKELDDNNPNKNDRKDPKTIAALVNEGRFSYPYIPTGIYAEIRSLSNLRFQTQEELTRIKNRIARWFAIYFPEYKDVYGDYKAVSGRMVLKEAPLPEDIQKLGVEGVNKIWRDAKLRGAGMKRAKTLVSAAEHSVGSKEAPGAARMELKNLLNDMDVYTSRLEELLLKIEEKLKEIPYVDKLMGIKGIGLVTVSGFIAEVGDIGRFDNPKQLQKLAGYAIVANDSGKHNGESRISYRGRKRLRYVLYEAAISLIGKNAEFKAIHEYYRTRKENPLKKMQSVVAVACKVLRVFYTILTKGVDYDAGKLMGDIRRPQIQAA

SEQ ID NO: 338788 - protein, 344 aa, unidentified
MSTIKVLGIDLGKSSFHAIGRDYSDNQVIRKKFSRSALITYLHHLPPCIIAFEACGGAHWLGRQCELMGHTVKLIPPQYVKLYVKSNKNDFIDAEAICEASTRPKMRFVSVKSEDAQVISAIHKARQGYVKDRTACMSRIGSLLLEFGIALPTGHSVMKQLFNWLAQQPQKQPSLLMQELIELHEYYLFLNNSIEKQDKKLERLVETNPIGLLLKTIPGIGDMTASLCIASISSATDFKNGRNMAAWLGLVPAQHSTGGKPNLLGISKRSNKELRTLFIHAARAVMSRPDKKGKVYGEWLINLRATKPFNVVTVALANKLARIAWAVMKTKQAFNTNELAPGLQ

SEQ ID NO: 338789 - protein, 345 aa, unidentified
MNKSVSIFPSTVFCGIDVSAGSLAVALIEPDHSICQREFANSARGHKALLGWLGKHHALVRVSLEATGIYSLDLALALDAAASIEVAVLNPKLVNRFAQTLRRSKTDAADALVLAEYSQRMPFTAWQRPGLQELRLRTISRYIESLVVDLAEVKNRQHAAERASTTPHAVLVDLKQAQAALERRLAKIRREAMKLVQAEEALGERFALLVSIPGIAEISALHILSELVLLPPGMTVRQWVAYSGLDPAHQISGSSVHKPSRISRAGNRHLRRALYMPTLSAVRYDPHMRAFYQALRERHKTSLQALMAVARKLLHAIYGIFKSGRPYDGRRLFPQIQLAVESIAR

SEQ ID NO: 338790 - protein, 449 aa, unidentified
MNHLRLQRNRELLASKIVIGIDPAKDKHQAAVVDAQGNQRGASFSFPVSAAGYSETLWRNIAKVLPTCNAPDVVFAIETACNLWDTLAFFLFSRGYTVVLVSPLSTHHARPIMSMEFSRTDPKDAFLVATVAQRGAFQLYERFPAEQSAMHQLAITYDKLRKDLAQNRARVHAVLDRVFPEFPRILLPQRNSAVYLLTKYLFPDEFLAMDIHSEAQVISQISRRQCGRSTLEALQKAATTSIGLVRRSDERLADRLSLDAFLALIERAELQINRVLEELVLRAQELPQFERLTSLSGVGKRLAALFLAEVQDLSRFTHYKHIEKLAGLNLRLFDSGRYSGTRHISSIGNSRLRWILYKMAEETARRVPEVRVKYLRRQLKRRKHVKNVIASIPQLLQLIMAMEKHQRCYQVQPEIMKELNELEVRYEALKVARTPAPQNSPRRAGKTAA

SEQ ID NO: 338791 - protein, 354 aa, unidentified
MQNDRQSSETVILGVDTHLDIHVGAVISQAGKLLGTHIIQTNQAGYLELLDWARSFGSLERAGIEGTGTYGAALTRYLIKNSIYVVEVNRPDRSKRRLEGKSDPLDAENAARTVLSGSSKAIPKMQSGACEALRIISVARRSAVKACTQAINQLRALLVSAPRDVRDKLWKSKPHECVTACINSEVSEHSPLRIALCSTLRSLAKRWMALTEELNELDESLDKLTRKYASNLRSQFGVGPQTAATLLAVAGDNPERLKNEAALASLCGVNPLPASSGKTVRHRLNRGGSREANNALWTIALVRMRSDPRTRIYVDRRTGEGLSTKEILRCLKRYIVRELYPLILSDLAYANRRS

SEQ ID NO: 338792 - protein, 370 aa, unidentified
MEKDIKFFVGLDVHKDSISISVCAPGREASQFRGAIRHDMPALLKVLRKLGAPATQLVAYEAGPTGYGLYRRLIQEGYGCQVVAPSLTPHRPGDRIKTDRRDSARLAELLRAGELKAIWVPDLEHEALRNLWRAREDAVQMRLKGRQQLKAFLLRQGRIYAGKTSWNKTHARWLADQAFEHAADQLAFTEYVLAAHGADERLARLEQALVQTTSAWRFGPVVSALRTLRGIDTVSAIGLVAEIGDIQRFAHPRNLMSYQGLVPSEQSSGNTVRRGAITKTGNSHARRLLTEAAWNYRYPARLSSALKSRQDGQPEAIRKHAWKAQVRLCGRFAHLQRRGVHVNKVCIATARELTGFIWAIARAAAAPAAT

SEQ ID NO: 338793 - protein, 379 aa, unidentified
MYRILKIGMDVHTTNYTLCAMEDKFGEDGQIIAQVTVAPDHKLILNFIRRIKEKMDPQGKDEIDVECGYEAGCLGYSLYHLLTACKVKCKILAPTTMLAEKGPRIKTDKRDAKLIADCLAHGGYHAVHIPTKEDNAIKEYIRMRDDHLLMLKQTKQRMNALCIRHGYIYEGTKWTVPHMKWLQQLQLDPIVREGMDEYITTYGELMAKIERYDKRIQELANQAEYRERVKKLECFLGIRTHTALSLIVETGDFSRFRKGNVYAAYLGLAPGEHSSAESGGHLGITKAGNSHLRKLLIEASGGICKGSIGYKSKDLKARQAGNPADVIAYADKANTRLRSKYYRLIRHGKKRNVVIAAIARELACFVWGMMTDNIHGNAA

SEQ ID NO: 338794 - protein, 419 aa, unidentified
MSFKIFKFNCCGLDVHETWIYACIGITDSNNRTEYKQARFSSFTKGLNELCDWLAKYNCKDVCMESTGKYWIPVFNILEQHSFWVTLSHPKYTKPMKGNKTDRKDAKWICDLYMCGMVKPSFIPPADIRELRDLVRYRFKLTCMITGEKNRAQNCLTVSNLKLDDVFSDVFGKSSRSITEHILQHPGEKFDIAPFVDSRCKTPITEIQAAVDGAISKEQVVKLRQCLDHIDELNKHISEVEQEILRLSDKYEAALNLIRTVPGFNKNPLTAIQVLSEIGGDMSVFPTAKHLVSWAGCCPRNDQSNQKIKSTRISRAGSYFKPVLVQVANALIKSKKHSEFTSRYKRIKARRGHKKAIIAICRMILTAIWHILSDLKPYTPEGFLESRPVKEGKVLSTSQALNLLKQRGYIIKGEPLAVS

SEQ ID NO: 338795 - protein, 360 aa, unidentified
MTIVAHSHPFVIGVDTHARTHTLAVLVAATGELVATEQFPATDAGMGRAVAWAARRTDGELATLWVIEGVATYGAHLASVVKRAGFKVVEAAAMDARAHRGTGKSDPLDARRIATAVLSLQPEQLRRPRSDDGIRTALRVLVTARAHMTTERTATVNALTALLRVASLGIDARRPLSVKQIGEVARWRTRVEDLATITARAEAVRLAKRVVDLNEELTANQVQMIDLIRASKAAVLLDKTGIGPVTVAVVYTAWSHAGRVRSEAAFAALAGVNPIPASSGNTIRHRLNRGGDRRLNRALHMAVITRMTHDPETRAYVERRRAEGRTIKEIRRCLKRYLARQLYRTLERLHTEHDAYPQDA

SEQ ID NO: 338796 - protein, 376 aa, unidentified
MIEKLRFLGMDVHAETIAVAVAEPDGEVRSLGTIVNREDSIRKFIRKLGSPEQLRACYEAGPTGFVLYWQLTQLGVQCDVIAPSLVPKKPGDKVKTDRRDALKLARSHPSGDLTAVWIPDEASEALRDLVRAREAAKCDQLRAQHRLTKFLLRTGRRPPLGVKVWTERHAEWLQQVRYTHPAQEATLLDCLHEVQHMAERVKRLEKSTVEVIQLAPASMQEVIRGLQALRGIAHLSAVTIAVELGNITSRFEHARDLMGYSGAFPDENSSGKRIRRGGIAKSGNAHLRRIIVESAWSYRHRPAVGARLRRRQEGLPAEITDIAWKAQNRLHKRYMALMARGKEQRKTMTAVARELLGFIWAIGIKAEASCKQQMAA

SEQ ID NO: 338797 - protein, 429 aa, unidentified
MTKTYILKTQTVPAKRSAVETYLAPPPPSKGKIIGLDCHPDTFTAAVFVGQTPHDARKIGSRENLSLEALVKWAAAELTPQDIILMEAGSNSFELCKRLGNLGLKACVLESCHVGKHAKTYADNDKMAAARIALVYLAGNAPCVWVPDEQSRERRELLHAYRKSVDDHTAATNSIKSYLNGRGLRLGKHSLNEKTTSQWILEQAGWSVLQKNILAEHLANITESKERRKRLYRLIAAEMAADPKMMRCMKVLGVGIVSAFALMAVIGDIGRFHSPEKLVAYIGLNPGQRQSGKGKEIRLGVGRRGRGDIRNLLIQGAHAIMRSGRNTPLGQWGWKLFARKGNRNVAVAAIARKLLVQVWHLLHGNPPLALESDTCFRIKLQKLAVALGSTLRTGIGLGKTLEDTVKTLLSRCQTHPELSASPCETPQPA

SEQ ID NO: 338798 - protein, 383 aa, unidentified
MSRQTKQADPLEPERHQCARVEVSSNHSRDRGSTMNVTTYGLDLAKRVFQVHWVEPETGELKRKTLARAEVCAFFVRRAPGVVAMEACGSAHYWGRVLSGLGHQVRLIAAQFVRPFVKTNKTDAADAEAIWEAVQRPGMRFVALKSEEQQAVLSLHRMRAQLVKIRTMQAYQVRSLSYEFGVVAPKSWRALLAQVAPLLADPTRCPVPELVRGELLSQLEGLRTLTTRIDELERQIAGWQRREVECQRLAGIPGVGRLTATAVVATVADARSFRSGREFAAFLGLVPRQSGTGGRVKLLGISKRGDPYLRTLLIHGARSVLLSQGRADRVMDPWLRGVLSRRPKNVAIVALANKMARTIWALMAHGRSFDRNWAQPAIAAATE

SEQ ID NO: 338799 - protein, 343 aa, unidentified
MQAVTTIGLDIAKSVFQVHGVDAEGNVIVRRQLKRRHVLAFFQKLPLCVVGLEACASSHYWARGLQALGHTVRMMPPAYVKPYVKRHKNDAADAEAICEAATRPTMRFVTIKTPEQQSCLMLHRTRHLFIRQQTAVINAIRAHLAEFGIVAPVGRNGVEQLLEVVANPDDKRLPEIARACVAALGAQLQTLKAQILQFDRLIMTWHRSNEASKRLDEIPGVGPVLATALVASIADPKAFRSGRDFSAWIGLVPKQNSSGGKERLGNISKRGDRYLRSLFTTGALAVIRYAKIHGTKHRPWLTALLARRPTKVAAIALANKIARMAWAIMTRGERYQEPAALTA

SEQ ID NO: 338800 - protein, 327 aa, unidentified
MRTSTIGIDIAKDTFDVALYRDEQYQLAQFANTAEGHRQLLKWLKKRQAQGSHACLEATGQYGEALAQALYERGYPVSIVNPMRVKAYGASQLKRNKTDREDAKVIAHFCASQPLTLWSPPPPEVVELQALSHRLLTLKEERTAELNRHQSGIRSEAVLQDIADHIAFLEAQITTIQERIADLIDRHPDLRRQRELLTSIPGIGDITAAHFMAEVPDISRFHSAAQLAAYAGLTARRHQSGSSVHRPGRLSKVGNKRLRTAFYMPALSAKRYNPLIEALVARLEARGKRPMVILGAVMRKLLHIAFGVLRSGRPFDPNIAAFRPSAS

SEQ ID NO: 338801 - protein, 338 aa, unidentified
MTSKISILAIDLAKGSFQVCAVGQDGVVVFNRAMSRTRLATLLADHPACIVAMEACATSHHWGRFAQSHGHEVRLVPAAYVKPFVKRQKNDRADAEAIAEAAMRPTMRFVAVKSAETQGRAVAFRTHQCMVRQRTQLINALRGHLAEFGLVAPKGPASLKLLENALADESTDLPEPVRHMGSIYVEQIARLTEVIDRLSDALETSSKTDEQLRRLCTIPGIGPVTAGAVAAFAPDLDTFDSGRNFAAWLGLVPRQRSTGGKARLGSVSKMGQTDIRRLLIVGAMSVIRWVVRRGGSTNRWLAALVARKPKMVAAVALANKMARMIWALSTKQENYRMA

SEQ ID NO: 338802 - protein, 416 aa, unidentified
MNAAGIDVSSRRSTVAVLRPFGEVVKLPFDVRHNAEDLAALAEQLKSIEGETRVVMEHTGRYYESVAKVLHEAGLYVSAVNPLLIKEYGNNSLRKVKTDKADAMKIAKYALDNWTELRDYTPMDTIRYDLKTLNRQFQLASKQKTATANNLIALQEQSFPGIRKLFDSPVRSDGTQKWVDFTHDFWHVDCVRSGSQNAFAERYRKWCKRNRYQFSMEKAAEVYALAKSAVVLVQKTSVTKTLVQEAANQLTAISRSVETYRSEMNKLASQLPEYPVVMEMYGVGESLGPQLMAEIGDVRRFERKQSLVAFAGIDPAPSESGNYCSRSNRTTKRGSPYLRKTLFNIMTVHLQRAPADEPVFQFLDKKRAEGKPYYVYMTAAGNKFLRRYYGKVMAYFSTLEDLPPVDMDSTGLHRAE

SEQ ID NO: 338803 - protein, 407 aa, unidentified
MEVLHPRCAGLDVHKDTVVAAVRCVSEPAHQEVRTFPTTTTGLHALTDWLTSHGCTHVAMEATGIYWKPIWHILEGNFELVLANAQHIRNVPGRKTDVNDATWIAELLAHGLIRSSFVPPPPIQELRDLTRTRKQLVREVSQHTLRIQKVLEGANIKLASVLSTVLGRSGRAMLDALIAGETNPERLADLAQGTARKKRADLVEALRGRITPHHRAMLKLHLQVISALDAALQEVDLAVGKALEPIRAAARLLTTMPGVSDIVANVIVAEVGTNMARFPTAGHLVSWAGLCPRNDESAGKRRSTRLRRAGTWLKTTLVTAAWAAARTRGTYLRAQFLRIKARRGAKKAIMAVAASMLTASYFMLRDGVDYTDLGPNHFDRHDKTKTISRLVKRLRDLGCQVQVAHAG

SEQ ID NO: 338804 - protein, 397 aa, unidentified
MFYLGIDIAKHKHYASIIDSTGKPITKPFPFHNHKEGGQALLTWLYRYISSPTELSIGMEATGHYWIAVYSFLLDHGFSVIVLNPLQTNAWRKGTEIRKRKTDAIDAIMIADVIRFGRFLETPLVDEKMFALKQLSRFRNSLVRNISDLKRKALVVLDQTFPEYQSIFSNVFGKTSSQLLIEYTSPSDYERLSIDDLTLIIEQASRCRLGKKTANQLMELASNSFGVTFCKDAFSFQLKMLMEQIRFIETQLRECENQMSQLLSDLDTPITTIPGIGPILGATILSEIGDIDRFDKPSKLVAYAGIDATISQSGQYESTGMSMSKRGSSHLRRALFQAAITAYKHDPVLKAFYEKKRNQGKHYYVCIGAVARKLCYIVYAILKSNKPYKIPPFPCQR

SEQ ID NO: 338805 - protein, 364 aa, unidentified
MAEPTHIGLDVHKETIAVAVLRPGGIECDERVIPNTPEALRKLLARFDDPAALRTCYEAGPTGYDTQRLISSLDVSCEVIAPSLVPRRAGLRVKTDRLDARNLARLHRAGELTCVRVPTPAEEALRDLVRARESLKDDRRIARQRLRSFLLRYAVRYPNGSDRWSHRYEVWVRALRFEQPACQEAFDHLLGAYFVRDTQLAALSRRIEELAQEEPLAAGVARLRTLRGIDTLTALTIICEVCDFHRFGSAGSFMAFTGLVPSEHSSGASRRQGGIAKTGNRHVRRVLVESAWAYRHAPALRGTLRARQEGQAPEVVAYSWAAQCRLHQTYRRIAARKGSRTAVVAVARELAGFVWGAMTDQMAA

SEQ ID NO: 338806 - protein, 313 aa, unidentified
MSESVYVGIDVAKDTFCVAATPDLVCTTLPNTPQGHRQLCQRFRHQPVARIVVEATGGYERTLVAELLAVTLPVVVVNPRQVREFARGMGQWAKTDPIDARVLATFAQIVNPKPKTHATPQTEALTELVRRRRQLSDLHTQETNRMEVIRHPKVKKSIQKMVRIIDAQIAQIDTLIRDNIEADDNFKHKDRILQSVPGVGPQTSAMLIAALPELGKLNRQEIAALAGVAPWDRKSGKYDGKAHIFGGRKDVRCALYMAAFSACRCNPTLHGFAQRLKQQGKAYKVVQTACMRKLLTTLNVMMRNQTPWTPKLT

SEQ ID NO: 338807 - protein, 425 aa, unidentified
MRDIALDVHIDFCEVAIAEAGEVRSAGRISTKPEELELFAGSLAPTDRVALEVTGNAWAIKRIIEPHVAEVIVVSPNDTGIRGARAKTDRLDARTLARLLAAGELEGVWMPDRETQVMRRRLGRRTQLVRSRARAKNEIHATLMRCLVGRAPFREPFGPKGRRWLAELDLPAEERESVDAALRQIDFLDSEIEAVERLIAAEALRSAEIKRLMTVPGVNVIVAATFMAAIGEIDRFASPRKLTGYLGLDPRVSQSGSAPATHGRISKQGSVSARHALVEASWSAVRQPGPMHAFYGRIRARRGHSIAIVACARKLACLFWCLLTREEDYAYAQPSLTAKKLRLLEIRAGSPSHKGVYTGTFVTRERMRAAERELAAQAESAYTRMVAEWQRTQTKRGAGATPGRASQRPSMRQAARQVQAPGPAL

SEQ ID NO: 338808 - protein, 338 aa, unidentified
MEYGAIDLHKQRSVIRIVDAAGTVVLDRTVPTSRAGFASVFRGRARLRVLIETGTESEWAAQTIEADGHAVVVVDPNYALMYGVRQRVVKTDRRDVAALAEANRLGIFRAAHRVSAAQRERRRQLRVREQLVRVRTQAINLLRAQLRQEGYRLGSGSAETVVARYGRLQLPTTLQTSLQPVIALLTHLRPALAALDTTTAAQALADPITRQLMTAPGVGPVTALTYRAVLDDVGRFADAGRVTAFLGLVPQEDSSGARRRKGGITKAGPARVRALLVQAAWTIWRQRHAGDPLQRWVHAVADRRGRGIAIVGLARRLARVLFAMWRDGLPYRVMPLTA

SEQ ID NO: 338809 - protein, 335 aa, unidentified
MKHYAGLDLSMETTHVCVVDDYGRKVGAQCVDSTPKAIAAALERYGPVERAVIETGRMTPSVALGLRELGVAIVCIDARQAHQSLKAMKANKTDPHDAAGLAQLARTGFYKEVHVKSPAAHGVRAVIAARGHLVEARVRLDNTIRGLCATFGIRLGIGQGERFLARMQVAASVPGLSEAVASLLRARERLVVEIGQLDRQLKTITTASPVCQALMSIPGVGVQTSAAFAAAIDDASRFKRSRTAGAYFGLVPRRHQSGELDWTGRITKQGDGTVRKLLYEAANSILTRTKQSFALKAWALKIAKRRGLRKARVALARRLAVVMHAMLRDGTLFEA

SEQ ID NO: 338810 - protein, 399 aa, unidentified
MHYLGLDVSKNQSYIAHYEDQKLINEFLLTHTKQSFQKFRVYISSLDNPIIIYESTGVYSRPICDFCTNNRFKFYELNPLEANFKTKSLRANKTDKADAHKLALLGYSLPSLTSKHQNRELYDELKEYARFYLELEKQENVLKVQLLETMHQTFPFFEKLFKNRYSTISLNLAHVFPHASMVSDLTKEEITEVISNASLKGMSAIKIENYGDKLIHLANESFPCVSKDHFLVKKVRFVAKSLLHLQEERKHYSQEMINLAQQLPEFEILLSIPGFGRLTTALFIGELGDIRRFSSHKKLNAYVGIDIRRYQSGQSHYKDTINRRGNKKARKLLYLIVLNIIRGQSRFRNHINDYYYKLKSQPYGKPHKTAIVACINKLLKTIHYLIMNNCTYDYEMSPH

SEQ ID NO: 338811 - protein, 408 aa, unidentified
MARYYLGVDWADQSHQLYVSDESGRKIREMEVQQTADGLAELGRWLEESRGQGIELWAAIEKPEGRVVDFLLDHGVVVYPVNPKALDRARDRFRMSPSKSDGFDAYVLAEFLRTDHAHLRALEPNSAEGQELKMLTRDHQRLGRQKTRLLNQIGITLKEYYPVPLEVFESLDTKIALDFLKAYPTPQALSKLTRRGWKRFAKRDHHLSEARCSELWDKLNKPQLAVPTHVVRAKAKLLAALVMQLETSVKAVDSYSQEVQSFFAAMPAAEIAKTLPGGKSGTTVASIWAELGDAPKRWNSFRHLQAEGGAVPVTKASGKSRMVQFRFACNKHLRQAMYWFSFNSLQRSEWAKKYYRNQRAKGHSKHESLRALGAKWLNIIFVMWRDHKPYDENYHLANIARQMMRQAA

SEQ ID NO: 338812 - protein, 331 aa, unidentified
MKIKEFIGIDISKLKFDVRIHSNQKASVFDNNTAGFKKFIAWLMKNVSCSKEEILIAMEHTGIYSFPISVFLTEKHFNFVLLPGLEIKRSLGIQRGKDDKIDAKRIAEYAYQKKDKIVPSQLPFKNIFKIRRLLALRERLVKQKGGFLKDKKENKMFIKQSENKVLFEAIEKSIKEHDKLIVKIEKELDEIIANDELMKKQYHLIISIKGVGKQTALVMIAYTNCFTNFENWRKFASYAGTAPFPYSSGTSIKGRNKVSHLANKKIKSLLNLCARSAIVCNHEMKIYYQNRKAKGANGMSTINIIRNKLIARIFAVVKRGTPYVDTFKFAA

SEQ ID NO: 338813 - protein, 385 aa, unidentified
MSQAFDASRSLTALEQDSTIIAVIEMSQAKWLVAGVVPGVERQPLKRLAADEAALLKLLHRWRNEAGQGGRQIKRIVVAYEAGRDGFWLARWLRVRGVEAYIIHPASIAVSREHRRAKTDRLDTELLMRAFLGWLRGEKRHCSMVAIPTVEEEDAKPNRERGNLVTEQTRIVNQIKAVLTRFGIRTFRPTLRKAEEQLEGLRTAEGAPLLENTRAELRRYLARLRVVREQIRAIEQSRLGKLATTPEKGPHAMVRLIARVLGVGVETADMLVNEVFSRHWRDRKAIARYAGLTGSPDESGRRRRERGLARGGNTRVRCGMIQFAWRFLRFQKDSALAQWFAARTADRRASTRKTMIVALARKLLIALWRLATSGEVSDGIVLRPA

SEQ ID NO: 338814 - protein, 400 aa, unidentified
MNDSDEAGVFLGLDVGKSAHHGHGLTPAGKKVFDKQLSNTEPKLRAVFDKLREKFGTVLVIVDQPASIGALPLTVARDAGCKVAYLPGLSMRRIADLYPGEAKTDARDAAVIADAARTMPHTLRSLQATDEITAELTVLAGFDQDLAAEATRTSNRIRGLLTQFHPSLERVLGPRLDHQAVTWLLERYGSPAALRKAGRRRLVELIRPKAPRMAQRLIDEVFTALDEQTVVVPGTGTLDVVIPSLARSLGAVHEQRRAMEAQITALLEDHPLSKVLTSLPGVGVRTAATLLVTIGDGTGFPTAAHLASYAGLAPTTKSSGTSIHGEHAPRSGNRQLKRAMFLSAFAALHDPASRTYYDKCRARGKTHTQALLRLARHRISVIFAMLRDGTFYEPRTPRLA

SEQ ID NO: 338815 - protein, 345 aa, unidentified
MEISTIGIDLGKTVFHFVGLNARGEVVVRKKGSRTQLLRFTSNIRGCLIGMEACGGAHFLGRALREQGHDARLMPAQYVKPYVKTNKNDYIDAEACAEAVTRPTMRFVPIKTDDQLDLQSLHRVRERWVVRRTAVINQIRGMLLERGITIRKGRLHIEEALPGILEDPDNKLSGALRVLLTQLRSEMQYLHGQIEETDKLIARICGELEQCRRLVAIPGIGPITATATVAAIGNGAAFKKGRGFSAWLGVVPGERSTGGKQKLTGTSRRGNKYLRKLFVQGAHTVLLQKTKQSSGLSTWLVNLTSRKRKQVATVALANKMARMAWAVLYKGEAYRPPTVPQVIAA

SEQ ID NO: 338816 - protein, 344 aa, unidentified
MKVTTLGIDLAKNVFQLHGVNEYGKTVIKKQIRRDQMAEFFANLPACLIGMEACGSAHHWARMLEGFGHTVKLMAPQFVKPYVKTNKNDAADAEAICEAVARPNMRFVSIKNIEQQAVLALHRVRQGFVKARTAQANQIRGLLSEFGLIVPQGIGYIASRVPELIEDAGNELPGSFRMLIERLLDHLRALDHQVVELEAQIVSWHRQSAVSSKLAQVPGIGPITASALVASLGDAKNFDGGRQVAAWLGLVPKQHASGGKQKLLGISKRGNTYLRTLLIHGARSVIYRAQNKPESCRWINGVVSRRNKNVAAVALANKNARIVWALLANEREFRPDYTTAKAAT

SEQ ID NO: 338817 - protein, 310 aa, unidentified
MDKIIVGIDVSKDRLDVAVRPSGEVFVVERNAAGLEELVERLRPLGPHLVALEATGGFETVAAAALAAADLPVVNPAQVRAFAKAIGQRAKTDPIDARVIAHFAEATGPEPRPLPDEATRLLADLVARRRQIIDMIGAERQREKRAPARLKKSIVRLVKALEKELTSVEGDIDDAVRGSPAWRETEDLLASVPGVGPTIARTLIAELPELGTLDRKQIAALAGLAPHTRQSGQWKGRSFIGGGRTTVRTALFMGAMVGKKYNPVLRAFFERLVAAGKPKMVALIAVARKLLTILNAILRDRQPWRQPART

SEQ ID NO: 338818 - protein, 388 aa, unidentified
MTTDHEFAVVASTTDIQKVFVAIELSKSTWVVAIQPPAVDKVSLFRIAGGEIERLFELFEQARRRAGQPIEICACYEAGYDGFWIYRALTARGVACTVLDSASIQVSRRARRVKTDRTDAESLVRVLMAIYRGEHQVAKIVQVPSPEEEDDKRLLRCRGNLLRDRIQHMNRIRGLFNLQGVRHIDPNRSNWENELVNLRTGDGRSFPRQLMNEVRREGKLLGTVVRMLKEVEAEIAGMIRDERKRRHPAQRGQNHPIARRLAEIHGVGPQTAGILATEVFYRGFKNRREVASYVGLTPTPYNSGTMVRDQGISKAGNRRARAVAVELAWIWLRNQPESKLSRWFRTRVGDSAGRVRRIAIVALARKLIVALWHFLEAGVIPEGAKTNA

SEQ ID NO: 338819 - protein, 372 aa, unidentified
MKTVHTKRTGQAGRPSVGADRCVARVVPSLLPKSSNSCQGYPSPHLSQGRASLEQIKSIKEDCLLEAPLIFVGIDVSKAQLDVAIRPSAQSLSVTNDRAGIKSLIKHLKKLRPQLVVLEATGGLERQVLSALIAGEIPVVMANPRHIRDFAKSIGQLAKTDRIDASVIAHYAEAVRPKPRPLPDEASLELRALSARRRQVVDMIVAEKNRLATASKVVKKRITAHIAYLEQELNDADQDLDRFIEKNAAWKQNQQILCSTPSIGPVSSRTLLVELPELGALDRKKISALVGVAPFPRDSATLKGRRTIWGGRASVRSALFMATVVATRFNPVIRDFYKRLKAKGKPSKVCLVACMHKLLTILNAMIKQNSLV

SEQ ID NO: 338820 - protein, 370 aa, unidentified
MEKKILYVGMDVHKKSIDVAITDERTNGKVRSYGKIDGTLEALDKLVGKLKSNASDLHFAYEAGPCGYPIYRHLTSKGHSCAVVAPSLIPRRSGDRIKTDRRDAANLVRLFRAGELTSIYVPTAEDEAMRDLLRCRVDIRRIERKTRQQLLAFLLRHGLHYPGKKNWTKGHMNWLAELKPAHRAQQIVLQEYIDAANECTRRIQRITEQIQGLVVQWSRAPFVRAYQALRGVSLIVATTVVSEIGDMNRFKNPKQLMAYLGLVPSEHSSGNRIRRGPITKTGNSHVRRVLIEAAWTYNLRARKTKIILKRQQGLDDRICEISWKAQLRLCGKYRRLFARGKSKPAITTAIARELSAFIWAIDQQVQQLTA

SEQ ID NO: 338821 - protein, 402 aa, unidentified
MNAVGIDVSKGKSMVAIMRPFGEIVSTPFEIKHTTSDINSLVELINSVEGESRIVMEHTGRYYEVLAHQLSEANLFVSAINPKLIKDFDNDSLRKVKSDKADAVKIARYALDKWQNLKQYSDMDELRNQLKTMNRQFGFYMKHKTAMKNNLIGILDQTYPGVNAYFDSPARSDGSQKWVDFASTYWHVDCVRKMSQNAFVDHYQNWCNHKKYNFSKSKAEEIYGKAKELVHVLPKDDITKLIIKQAVDQLNSASATVESLRTLMNETASKLPEYPIVMAMKGVGPSLGPQLMAEIGDVSRFTHKGAITAFAGVDPGVNESGTYEQKSVPTSKRGSSDLRKTLFQVMDVLIKTKPQDDPVYQFLDKKRAQGKPYYVYMTAGANKFLRIYYGRVKEYLASLPES

SEQ ID NO: 338822 - protein, 349 aa, unidentified
MRFYTESHHHYGGIDLHAKTLYLCILDREGQVLLHQNVKSRPEAFLAAVAPYREDLVVAVECMFTWYWLADLCRREGIGFVLGHALYMKAIHGAKAKNDRVDAFKIASLLRGGNLPLAYVYPPEMRATRDLLRRRLHLVRRRGNLLAHVQNTHHQYNLPVPAAKVAYAVNRVGVAEAFADPDVRKSLEVDLHLVGHYDAQIRDLELHLVRRAKQHDPQAFHRLRSVPGIGKILALTILYEIHDIARFPRVQDFLSYARLVKCEHSSAGKRLGSGGAKIGNVHLKWAFSEAAVFFLRNNPEGQQHLRRLAGRHGKAKALSILAAKLGRAVYLMLSKERVFEMERFLAQPH

SEQ ID NO: 338823 - protein, 400 aa, unidentified
MHLTANISIPQKNFIAIDLHSDNAVICVRRNALNKAGELVGKNIWCGRVSIRDGLDNFIKVLVPHCQDFDHVAVVESTYNWYCLVDAFEERGWLLRVANPSTVSQANLKSSDDRTDAQYLAERLRVGSLKHYLPLNYSSRALRDLCRYRMAMVQDCASLKIKLINLYRNQLSKNVRVADLLDRCQPHMQPNYRFNSDILEEFKDPNIRLRVAFEISRIAMLEEMLEECNAEIQKQCKDQELVKLCKTIPGCGPVLSAVICTEIGTMQRFKSAGDFVSYCRLCSTSKLSNGKSKGLGNAKNGNAYLSWAFTEVAQYASRNPVIREILQRLLRKYGGLRVKAIRTLAAKIARVTFYVLKNKQPFNAAKCFGMELTKSIVKKLPHKPLREDAAVVLPTAAGQA

SEQ ID NO: 338824 - protein, 409 aa, unidentified
MELLYDRVAGLDVHRDSVAACVRLPGPRGGAVTDKQRFKTTTAGLGRLAGWLAQRQVALVAMEATGVYWKGVYYALERDFAVWLCNAHHVKNVPGRKTDMSDAEWLADVAAHGMVRPSFVPPPPIRELRELTRYRKTQIDARAAEIQRLEKVLQDAGIKLTSVASKVLTQSGRAMVEALIAGERDPARLAALAKGKLRPRIAELTEALAGHFGSHHAVAARRILDHLDFLEASVAALTEQIDARTRPYAAVFELLLPVPGLDRLTIDVVIAETGADMDRFGSPAQLASWAGLCPGNHESAGKRRRVGTPPGNQWLRRALVEAARAAARTKGTYFAAQYRQIARRRGPNKAAVAVAHSLLDLIWHLLSTGECFQDLGDDFFDRRRDPERETRRLVHQLQQLGYTVTLATA

SEQ ID NO: 338825 - protein, 367 aa, unidentified
MKEQENKRNKITIGLDLGDRRHRFCVLGESGQVVEEGSVANNRVALSELSSRYPGALVVMEAGCHSPWVSRHLEQAGCEVVVSNPRKTRAIYQHERKSDRRDALMLARIARMEPALLYPVRHGSEEAQQDLLRIKLRDSLVRARVALINSLRFTLKSLGYSIANPSTERFHKVIQSALPQSVAQVIAPSVQALEELTLRIKLLEREISDQARSKYPDTAWLEQIPGVGPITALYFVLKIEDPARFKRARDVGAFLGLCPRRDQSGENDPQLRISKRGDAYLRRLLVSSAQYILGPFAPPSALRQYGLALASGATARAKKRAVVAVARKLAVLLLTLWKNKSSYQAFPQRSSREKMRTNDLERLRCIA

SEQ ID NO: 338826 - protein, 339 aa, unidentified
MKKPKYFVGIDISSADFAVSVGTEPWKIVGKTATFDNHPDGYEALLAWLRQQGIQVKETVVCMEATGVYGEGLAYHLSAHEFRVAIEAPLKVKRAFMPYGHKNDRVDSRQIAEYSCRFYDELRFWQPREEILEQIKVLLSTREHFTRQKSMHRNALKALKRKIVATPFAENLHQQSIERIQKSIQQIDDEIQRLIDQDPKYRQLISLLTSIPCVGFLLATNILLIMETSPKDPTNYKQLAAYIGICPYEYQSGTSVFRPASDRHHGPGQVRKLLYLAALSARTHHPQFKHYFLRKKAEGKPGNLILNNIANKLLRIMCAVVRTQTPYIPNYRSVNPTLL

SEQ ID NO: 338827 - protein, 410 aa, unidentified
MLNTLFVGIDVSKKNNVVRFTDSQGDTLSLFHVPNNQIGADTILDKLHDTILHSDFQAVSIGIESTSVYADHLAVFLRNDNFLKKWDVKVFILNAKQVKAFKEAYPDLPKNDNIDTLIIADYLRFGHISKEVNFDEKYIALRNLTRARFQLAQNLSREKAWFLDTLFYKFFSLDSSNVFSNTFGATSIAVISDFFSVDDINEMPIEELADFLMGKGKNKFEDPQRIAKELKAASRSSYRLSKTVNDSVNQLLAVRLVGIRSLQQQLQDLDKAIESYMQLFPAILTSIPGIGSVHSAGLLAEIAGIHRFKGHAFLAKYAGITWTRYQSGDYEASNTRLILSGNKYLKYYFLEAANKVRMHDTEFKRYYQSKFKEVPKHQHKRALALTARKLVRLVYSLLYTNQLYIPPNNR

SEQ ID NO: 338828 - protein, 387 aa, unidentified
MKKAYIGIDSHKAQNTVAIALAGREDPELYGKAPADLDGFERVLRRVLAKYGLEKADVAICYEAGPTGFVLARRLRSLGFECEVVAPSKIPKAAGDRVKTDRRDARKLARMFRAGDLVFVNVPDVADEVIRDVCRGRTDAAEVRGRARQQLGALLLRNGYRYGDKTNWTEAHMRYLRELVLPDPAQKFVLEEYLQRVDASVAQVERIEAQMARLLPAWQRRKFVEALQGFRGFQLVAAMTLGSELGDLLRFDHPRRLMAYIGLVPGENTTGERRRQGPITKCGNSHVRWMLVEAAHHYHYPPKVSKELSKRQEGLSREVRAVSWRAQERLHRRFWRLLKRGVHRNKVVIAIARELTAFVWELAQVLERERAAADPRQPARPAARKAS

SEQ ID NO: 338829 - protein, 440 aa, unidentified
MAMRKREDEVFPNAAGIDVGASSHWVAVPGHCTDAPVREFGAMTDDLHAMAEWLLACGVDVVALESTGVYWIPVYELLESRGLKVWLVDARQVKYVPGRKSDVADCQWLQKLMSHGLLRAAFRPAAEVCVLRAVARSREVLLTEQASWVQRMQKALVQMNIQLTEVISDVMGQTGQAIIRDIVAGQRDPARLARHRHRRIKASEQDIVRALTGHWREEHLFVLGQALGMYDDIARHLHACDTKLRTLLAERSSACVDVGKTPRTGSKARAQFDLRQQLANWAGCDLTRINGLGLESVMKILSELGTDLSRFANVKHFCSWLGLCPATKISGGKVISARTKRSANRVRQALKMAAMSLSHSDSALGAFYRKLCTRMDKPRANTATAHKLARLVYFMLTRGEAFVDEGQQRYEEQQRERSIAALKRRAATLGFQINPIATAA

SEQ ID NO: 338830 - protein, 345 aa, unidentified
MKIVGCDLHTRYQQIAMLDEETGELTERRLEHATGEAKGFYSRLTGPVRVGIEATGHTRWFEQLLAELGHELWVGDAARIRAAEVRKQKTDARDAALLLELLLSGRFPRLWRPGREERDLRHLLWHRQKLVWMRNAVGNQLHALAMGEGLCRKKQLFTRKGRRELEALKLDAWASRQRQELLHLFDQLDASLAQFDQAVNEQAAANGEAVRLMTHPGVGPVTSLAFVLIVGPAARFERSKQLVSYLGLNPCEHSSGGKQKLGAISKQGNPMLRGLLVEAGHTAARMDPELRQDYQRLRLRRGGSVAKVAIARKLAVRMYWMLRRQVNYTQLVRTQGSSRATLVQQ

SEQ ID NO: 338831 - protein, 418 aa, unidentified
MEKREKRYIGLDVHKHYLIALGVDEDLNIVLPARRVELSRLDAWMQKTLTRQDEVVLEMTTNTWQLYDELVVHAGSVMVVHPPHVALITRSQVMNDKIAASILARLLAKGLLVGIWVPPQEIREMRGLVAQRRKMTNLATQAKNRLHAVLQRHHLVPPEGNLFGVSNRAWWQSLSIGKLEKLNLQSDLDTLQFAEKPVDRMTEIMEEMAAEQEPIGRLLHLPGFGVVTAVTVWAAIGDIRRFAEPKYLVGYAGLGTRVHDSGMTTRTGKITKAGRRDLRTVLIEAAQAAASSHPHWKAELARLQPRLGHNTPALAGGAREAIVAIARKLLIAVWHVLAEKQTDRFVDPEKVSQKLLRFAYDVGKSNRAGQSAAQFVRQRLDALQIGQELTSIPWGSKRPIPLPPSAVKTEGSDVPNTK

SEQ ID NO: 338832 - protein, 416 aa, unidentified
MEIYPNTRAIQRYIALDIHREYVLAGGMNASQEWVLSPHKIEMGKFREWARKNLSGTDAVVIETTTNVWDIYDIVQPLVGHAVVAHAGAVRQIAEARVKTDREDVKRLIRLLIAGIVPEVWVPPQHVRELRGLVAYRQQLVKTGSMIRNRLHSLLHRHNLCLPEEGLADREWWTQQEKICALEKLQIRQELSMLQQIETHKAEVDHELGRQSLGETWGKAAVRLMQLPGMGIVVAMTVLSAIGDIHRFESADKLVGYSGLGAGVHDSGKEHIEKRITKSGRKELRWAMVEAAWRAVRMSPYWKEQYEKFLKRMRRPNQAIVVVARKLLVAVWHVLSKDETDEHATEEDLAYKMLLWSWSLSEEARQGLTHKQFAKYALMRLGVQTDLTRFVRGKVPRRIASREEVLVWMAELGLNG

SEQ ID NO: 338833 - protein, 403 aa, unidentified
MDNGSTVVGLDVHKATVVAAVLPPGADRTRETVTIENFPKAVERLVTRLAARGPLAFVYEAGPCGYEIQRQLTALGQPCAVVAPALTPLRPGDRVKTDRRDAEKLARLYRAGELTPIRIPTRAEEAARDVVRVCEDVLADRLRARHRLAKFLLRQGRVYRETKAWGVAHRAWLRSQRFEWPALQQTFAAYLRALEEVEAHLEALDQQVADLAQQAPYRTLVQALRCLKGIDTLSAVTLAVEAQEFRRFPRARAFMSYTGAVSIERSSGGTVRRGSITKAGNAHLRRILVEAAWSARHGTGVSRAQRAAHRLPRGGGPNRQEGAGATAPHVLAADQPHEARAGGGRGGRPGVGGVRVGDHAPGPRGGTGLGARTVLGESWARRRGPGTENPRRHYVQWGRTIQP

SEQ ID NO: 338834 - protein, 461 aa, unidentified
MPDGGGENSSPKRTKQIEGLPVIRRNVAGIDLGSERHWVCAPVAGSISREVADFGATTPELIRMTKWLQACGVESVAMESTGVYWIAPHEVLEAAGLEVLLVDTRQLARVPGRDKKTDPSDCEWIQRLHSCGLLRGSFRPREEVCMLRTLVRDKANLVAECGDWLRRMQKSLDQMNVRVHRAVSHMDGITGMAILRAIAEGERDAQKLAKLRDTRCHKSEEEIAEQLSGHWREDHLFSLRQSLKMYDAIQQRLADYDREILQRLAAMQREEFRQQPPPPVKNPHKAKNMKKRGEEPMREALFRMSGVDLTGIDAIGVETVQVVLSEYGPDLSRFPTEKQFVSHVTLIPHKPMSGGKPVRKKRRSSASTRVAAALRMAALSLRNSATALGAYYRKIARRLNGDVAVFATARKLATLIYRLLRWGQPYVDEGAEAFERRYQETRLKTLKAKAKDLGYQLVASN

SEQ ID NO: 338835 - protein, 367 aa, unidentified
MKKVYVGIDTHKDENVFGSAHDGRCKGELIGKCSADMNRTLTFIRTFMKKNNLTKEQLHICYEAGPTGFVLARRLIKLGFDCVVIAPSKIPERAGDKVKTDRLDACKLARLHRAGELVPVHIPNVEDEVIRDVCRGRTDAVNETKRGKQQLSSFLLRNGYHYKGKAKWTEAHMRYLRELVMPERAQKMVMEEYLLRIDAATAQVGRIDHQMELLLQTWNRRPFVEALMGFRGFQTTAAMVLTAEVGDFLRFGHPKKFMGFLGMVPKENTTGNHRRQGNITKCGNSHARWMLIESAGHYRMPPKVSKALSKRQEGLSREVRALSWHAQNRLNHRWCKLMFRKVHHNKIQVAVARELSSYLWDLAHLVR

SEQ ID NO: 338836 - protein, 350 aa, unidentified
MIVGIDIHKHNHAAALIDDRGGEIATLTIPNTPKGYRSLIDWLVDRGAASAVIGAESPGSYGRCLVSALIGAGFEVLQVPAWRTHRERHRRGPGKTDPGDAISIAHVVRTKRDELGPAEEPELVRALGMLELQRRRFVRDRTQAIQRLRADWTQHDPVAEAGVVRCDRRRELNKLRRLQLGSSLAARTAARCIRELARDIADLNTRIAELDREIAELLAEHENPLADLHGAGTNLAATIIAQAGDVRRFRNASAFARFCGAAPIPCGSGQTANRHRLHRGGNRQLNAALYRIAVVQQRHHPQAKTYLARKIAEGKTPREARRALKRHLANVLYRRLYAWANTAPSMNLLT

SEQ ID NO: 338837 - protein, 358 aa, unidentified
MKKNSKVEASGQLTIGIDVSDRSSCYCYLNQAGEMCGEGKLRSTPEAFRQHFGGMARAVIALEAGTHSRWMSALLRECGHEVIVANPGRLRLLTTSNNKNDPRDARTLAEIAWAKPALLQPVRHRSAEAQRDLNLVRARDLLVEARTKLINGVRCLVKGLGARVPKCASGQFCQQAHQHLPEEARPATGPLLEVIDELSVRIAEYDEMLEHVAQTRYPQTTLLKQVSGVGTLSALAFVLTIEDPHRFARSRDVGSYLGLRPKQQDSGDRSPQLRITKAGDSYLRRMLVSCAHYILGPFGPDTDLRRWGLKLCERGGKNAKKRAVVAVARKLAVLLHRLWVTGEVYEPLRNQAEADVAA

SEQ ID NO: 338838 - protein, 352 aa, unidentified
MERYVGVDAHARSCTLVVMSATGQHLRSLVVETNGEALVQAVQGIGGRVHVCLEEGTQSAWLYELLKPHVAEIVVSMPPEKRGAKSDERDAWTRANELRTGTIETRVYKAPRQLAALRCAVRAYDFAVTDVARAKNRLKSVFLSRGVRAESGVYDPERREEWLAQLPLPYQRLASWTCREIDELLPLREEAEAWLQAEVKAHPIIRKLSTVPGMGPIRSAHVVAIGGTPERFRTRRQFWSYAGLGIITRTSAEWGRERGGEWMRSPKVQTRGLSRRRQPRLKAVFKGAATTVISQLPEDPLHADYQRSLRSGTKPPLARLTLARKIAAIVLSMWRHQEVYNPKRRRLATPRP

SEQ ID NO: 338839 - protein, 371 aa, unidentified
MKSIIYIGMDVHKKTYSLCALLKETGEIIGETKIPADVSLIIKFIENAKKSVDSDDVQIKTGYEAGCLGYSLYWQLAEKGIECDILAPSTMHRSAKNKVVKNDRRNAKNIATNLANGTYKSVYVPTDEDVEIKEYIRMMHDFKIELKKVKQHINAFLLRFGHHYPGKSKWIPAHIKWLKELELSDMYREILDEYLSQLEILTEKIERFKYRLEELSQKETYNEKIGQLRCIKGIDTTAAMTMHAETSDFDRFPTANAFASYCGLTPGEDSSGESYHRLSITKQGNSMIRTTLIEAAQVLVRGTIGKKGKKVKSKQKDQDVKVIDYADKAVIRLQKKYHRMIFRGVKRNIAITAVARELACFVWGIETGHIS

SEQ ID NO: 338840 - protein, 363 aa, unidentified
MSGLKHQKEKRSMDHFAGLDVSVKETSVCIVDDTGKIVREVKVASEPEALLAVLKNPVYHFRRIGLEAGPLSQWLYSALAEAELPVVCVETRHMQALLKAQINKTDRNDARGMAQMMRVGLYRPVHVKTLRSQKLRMLLTHRKLLQSKAIAIENDLRGTLRNFGLKVGMAGTVKFETRIKELVGNSPELAALVEPLLVVRRVLREQLVILHRRLLAIVRDDEVCQRLMTTPGVGPVVALTYRATVDVPARFRKSKSVGAVFGLTCSKYQSGEIDRSGRISRCGDEMMRVMLYEAAQSMLYSKKWSWLKAWAMQIARRRGMKKAIVALARRLAVIPHQGGRHRVPLDPGTNRGSSMKTLQDQIQ

SEQ ID NO: 338841 - protein, 311 aa, unidentified
MEQDIFVGIDVSKDRLDVHVLPVNEAFDVARDADGVADLVARLAALPPALVVLEATGGFEQVVAASLAAAGLPVVVINPRQIRDFARAVNRLAKTDRIDAALIALFAERVRPPVRPVPDAQARLLDELVTRRRQVIEMIVAEGNRLRQVENRRLKTRIERHRKLLQDELSEVDRELDDSIRGTPIWRETGDLLQSVPGIGKGTARILIAELPELGKLDRRKIAALVGVAPFNRDSGLLRGKRMVSGGRAGVRAALYMAALVASRHNIVIAPFYQRLRASGKPAKVALIACMRKLLTILNAILRDHKPWQHA

SEQ ID NO: 338842 - protein, 417 aa, unidentified
MTTNSLMQRRSAIKPDTLIVGVDVAKFNHVACTLVPGGAIGRPLEFSNSREGFIVLSAEIEARKPTPASAVIVGLESTGIYWINLARWLAEHGCQVVQVSGLYVHRAKELADNSRGTSDGKDALLIADLVAQGKYLGFVRPAGVLADLRQLVGLRQRLVRERTARYSLLHQSVDLLFPEFADVFRDVTGPGARRVLRRFPAPAAALVHPPDEMRRQLSEDGRVRVSVTKLAELQAVARQSIGACEGTTGLEYALNDTLLELGSLDIRVKKVEAEIDRLLAQVDETPILTSLVGRMTAAVILSETGGIRQYSCAAAVLKLAGLNLYQISSGQYCGNRHISQMGRSLLRQALYLAALQHTHPGTPLYPYYAELLRRGKPKPVALIAVCCRLVRLLYALVRDGRCYSAQPPENNQQAQAA

SEQ ID NO: 338843 - protein, 322 aa, unidentified
MNARIFVGVDVSKDSLDVHLLHVQSNEQRSTSLRVDNSQKGIDELIQKLKDKPIELLVIESTGGYERRALLELLNAGVNVAMVNPTRVRRFAEAFDTLAKTDSIDAAILAQFALRMEPRRSEIPSQNQIVLNELMTRRRQLIVMRTMEKNRAQQAVGKLPVKQIRSLLKLIDKQVEEIDRQLEKLIQADPDWKERAELLDTIPGIGKNTAFRLIAELPELGKLNREQITALAGIAPMNRDSGRQRGKRHIRGGRVEARNALYITAWVAKRYSPKIKAYAERLKAAGKPFKVIMIACMRKLLIIANLMLKSKTPWNENPVLGA

SEQ ID NO: 338844 - protein, 339 aa, unidentified
MKYTPVGVDIAKHLIQVHFIDEHTGEVIDKQLRRQDFLMFFCNREPCLIGMEACGGSQHWARELTKLGHKVRLLQARFVKAFVMGNKNDVMDARAIWMAVQQPSKDIAVKTEEQQSVLVLHRSRRQLVKFRTMQINSLHGTLLEFGETIHKGRAAMEREFPEALERMKERLPPYLITVLENQYNRLNELDSLIEDIEKQLTSVAKQNETCKRLLDIPGVGPLIATAAVATMGEASAFKSGREFAAYVGLVPKQTGSGGKIRLLGISKRGDTYLRALFIHGARAAALLTKEPGPWITELKKRRPASVAIVAMANKLARTVWAIAAHGSKYDKNHVSIRPY

SEQ ID NO: 338845 - protein, 366 aa, unidentified
MKQQHQDSEVTIGLDLGERRHRFCALDGRGEVVEEGSLLNNRASLARITARYRGALAVMEAGTHSPWVSRYLEGLGWEVIISNPRKVRAIYQHERKSDQRDALMLARIGRMDRALLYPVRHGSEQAQQDLLRIKLRDSLVRARVALINSVRFSLKSLGYAVCNPSSERFHKVAMERLPERVQQMIAPSVQALAELSTRIAVLEREINVLARTKYPQTLWLQQVPGVGALTALYFVLKIEDPQRFENVRDVGAYAGLCPRRDQSGQSDPQLRISKRGDPYLRRLLVSAAQYILGPFGPQSALRAYGLMLAADGSARARKRAVVAVARKLAVLLLSLWKNRSHYEAFPHWQTIEDKRSGTIAMHRVEG

SEQ ID NO: 338846 - protein, 402 aa, unidentified
MYNAVGIDVSKGRSTVAVLQSAGVIIRKPFNVNHTSSELDELAKYIGSLEGETRVVLECTGRYHEPVVKTLSEAGLFVSAVNPHLIKNFGNNSIRKVKSDPADAKKIARYTLDNWIELRQYSSMDNTRTQLKTLNSQFSFFMKQKVAAKANLIALLDNTYPGVNKLFDSPVRDDGSEKWVDYAYSFWHVDCVRKIGLKTFTERYQAFCKKHHYNFQPAKPAELFLASKDLIAVFPKEASYKLLIQQSIQQLNLASSHVEELRSKMNELAYTLPEYATVMGMYGVGKTFGPQLIAEIGDISNFSHREALTAFAGVYPGVDQSGTHNSKSNKASKCGSNRLRKTLFQIMSTLLQTAPEDDKVYQFLVKKRAEGKPYYVYMTAGANKFLRIYYGKVKECIRNLEQ

SEQ ID NO: 338847 - protein, 416 aa, unidentified
MNAVGIDVSSRKSTVAVLRPLGEVVCLPFDVTHDIAGLASLVEKLKALDGETRVVMEHTGRYYEAVEKALHEAGLFVCAVNPLLIKEYGANSLRRVKTDKADAIKIARYALDNWADLRDFTPMDAIRYDLKTLNRQFQLASKQRTASANNLIALLEQSFPGIRKCFDSPVRSDGTQKWVDFAHSFWHVDCVRKQPFPAFCERYRKWCKRHAYLFKLSNAEEVYALAKRAVVLTPKAKVVKVLVQEAANQLISISRSVEVYRAEMDRLAAMLPEYPVVMAMYGVGKSYGPQLMAEIGDVRRFERKQALVAFAGIDPMPNQSGDKNVRSNKSSKRGSPYLRKTLFNVIRTYLQCAPQDEPVFQFLNRKRAEGKPFYVYMLAAANKFLRRYYAKLRDYFASLDTLQPVAPIPTILKATL

SEQ ID NO: 338848 - protein, 349 aa, unidentified
MIYVGLDLHKSFSVITMMDAGGKEMVKQRKLANDGGIVKLLHEFDQPVTVAMEATRSWYWLYDLLEENGMEVKLSHPLKTKAIASAKVKNDKIDSRILAHLLRADLLPLSYVPPKPIRMQRELLRYRASLVKIQTGVKNRVHAMLAKNNMTHDFTDLFGKQGKAFLSSLSLPEIYRMALDGYLSVLDELEQQIKAVNKKIVVSAKDDEEAKLLMTIPGVGYYSALLIKSEIGDITRFPSAKQLCAYAGLVPSTYSSGDTTFHGHIVKQGSKWLRWIVAEAIGHCITKPGHLQAFYWRLERRKGRKIAKVATERKLLEWIYHMLKQRRTFEEMDKIASNWGEPVPLSGLK

SEQ ID NO: 338849 - protein, 340 aa, unidentified
MKRYLGVDLHRNCFTVCTLKEDGQSELRKWSIHSLCDFAQEVQATDAVAVEATGNARYFCQALKERGCRLVVVNPHQFQVVSRSVKKTDAHDAKTLAEFLAKDMLPEVRMKEALPAEIASVLQTRDKLVKLRTVLKNKINNLLAGQGILIRRESLSSDKGLEQVLQAPVSDLERVELEVLVGQIRHLNDSIRRLEAAIKEQGPKLPGYESLKSIKGIGDIGGSTMLSTIGDINDFASEGKLAAYFGIVPRVQNSNATERSGRITKRGSKLGRTALVQCALIAMRYSPYLANYYARIKAARGSGKAIIALARKFLGIIYKTLKNGWVFEDFPAFVLAPATG

SEQ ID NO: 338850 - protein, 367 aa, unidentified
MKKISTAAVKQVRNFSEQKLTIGFDLGDRSSWYCVLDEAGSVRLEQRLSTAPKAMKEVFGAMPRSRIALETGMHSPWVSRLLSELGHEVIVAHARNVRLIGESRKKDDRLDAQTLARLARIDPQLLCPVKHRSAKAQSDLTVIRARAGLVRARTALVNTARGLAKSYGERLRGCNVRNMNPEKAQELSPELQRALEPLLAGIESLSERICEYNERIEQLAQESYPQVARLQQVKGVGTLIALTFLLTLEDAQRFRKSRDVGCYLGLQPGRRNSGQSVPQMHISKEGDPYLRTLLVQGAHHILGPFGADSDLRRWGLKLAERGGRNGKKRAVIATARKLAVLLHRLWVSGEAYEPLRNSNQRAMPAAA

SEQ ID NO: 338851 - protein, 358 aa, unidentified
MQRNKKTFKGQNIYIGIDVHKKNWQIAVITESGYTERLSTAADAKALFKFLKSHYPDGNYRAVYESGFSGFATHYALSELGVSCVVAHAADIPSSQYELTMKSDRIDAEKLARALRAGLVRGIYVRPKDNLDDRGVLRIRKTIQIQVGGYKTRIKHLLHSNGVELPERFSRSGTHWSRAFIAWLREDVRLLSDTRRSLDLLLLQVETLRANLLEATRRVRALSMTDRYREDCALLMGIPGIGLTVAMTILTEVCDIGRFGNERLFASYLGLVPTSHSSGERVSHGEMTFRGNKHIGPLLVEASWVLIVRDRELGRMYTEYRWRMAGQKAIIKIARKLSNIIFAVLKTRKAYEPYRRDA

SEQ ID NO: 338852 - protein, 365 aa, unidentified
MSTITIGVDLAKSVFSVCEVDGTGHVLRRLDLKRDAFAIWLAQLPAGTVVAMEACSGAHYWARRCLEYGLQPRLMAAQFVKPFRKSQVSKNDRNDAEAIATAARQGNMRFVPVKDVDQQARLAWHRVREGYKIESLAIGNRLRGLLVEFGIVVTPGDSALRRTLADLDKQRSLPGEFKELIRDLEAHWTQVRAAFDACDARIDVHAREDERCVRLRAIIGVGPITADAIVASVGAAQEFRNGRQLAAWLGLVPTQYSSGGHARLGTISCRGDAYLRTLLIQGARSSLQRAKAVSVEKSTPEQIWIRQLSCRMCFGKVLVAIANKHARQLWAMLAHKENYDAGAWLKHPMVQRPAGKDAITVVAMA

SEQ ID NO: 338853 - protein, 385 aa, unidentified
MAPPRMPEAVIGLDVGKLSHWACVATRDGEILLSAPLANREGDLDSLFGRFPDALVVVDQSRNIGALALARAKAAGMSAAYLPGLAAHGAARLFAGDAKTDERDAMVIAKTALGIPDALLPVGDPGPTVAAARALAAQRNFLTCENTRSKNRLRSILLESCPAFEALVDLSDGPQLRLMASLGGAWSVADAGPRRAAALTRGAARGKIEALVRSTASSTRPDAAAIAAEDRAVRLLARRISENSAEIDVITAEISALLEGDDTYRCLLTVPGIGPKTASELAISIDIEDFPSHDRLASYCGLAPRNRQSGTSISSVTASRQGNKRLKNLLIFSCNCLTRTEGRWGDYYARCRERGMPHGKALKALARKRLKVIYAIMRDRVPYAA

SEQ ID NO: 338854 - protein, 335 aa, unidentified
MKVFYLGVDVSKKKLDLCLRSNGKDILYDVIPNDLSSIKSWLTRTFEKFFLSEDSLVVCAEHTGQYTYPLVYATKSIGVYLCLEDAAKIKYCHGIPRGKNDKIDACRIAMYAERYNDCLQPYTASELIIQKLKNLSTERSMLVADRAKYQSQLKDQVDYMEHSIYIAKCNRVEGIINTFTDYIAQIDLEIKELINQAPVIAHQMDLLMSVDGVGERVALKMIMETDAFTSFTDPRKFCCHAGVVPFVYVSGSSQRSKNRVSNRADKSIKHLLHMAALSVSQVKNSPLKKYYDRKVEEGKNKMSVLNAVRAKLVTIMFAVIRADAFFSRNYQNSLA

SEQ ID NO: 338855 - protein, 313 aa, unidentified
MERSLFVGIDVAKDHLDVHAVPTDAAFRVTHDAAGLATLCERLVAWAPTLIVLEATGGHEVTVVAALASAGLPVAVINPRQIRDYARATGQLAKTDALDARILAKFAAAVRPEVRPLPEPQTRALDEAVTRRRQLIEMLGAEENRQRLVRDRRVQGQIEAHITWLKRAIKELDRELQATIRASPLWRDAEAVLRSTPGVGPVMTTTLLAELPELGQLSRHKIAALVGVAPLNRDSGQFRGRRMISGGRASVRRVLYMATLSAIRRNPVIKTFYDRLCANGHPKKVACIAAMRKLLTILNAMLRDGRRWHAQIA

SEQ ID NO: 338856 - protein, 413 aa, unidentified
MKQIPLQFAAKIGLDWADRKHDFCMKPSDSDDFEYGTIEHTPEAIEEWALILQERFHNEPVAICLELKAGPVVYALLKYRFIVLFPIPPKALAKYREAFTQSGAKDDPTDAYLQLDYLVSHPNALKALVPDNKDTRILQRLVEDRRTLVAEKVRLTNRITAALKSYYPQALQWFDDIDTQIFCDFIQQWSTLKQAKRARKPTFVKFFKAHRCVRPTVIEKRIDAIKAAMPLTEDDGVIIPFERLTRALTLQLSQLLITIHDYDLDIAKRFRKHSDYEIFESLPGAGPVFGPRLLVAFGSKRERFQSANEVNRLSGIAPVLERSGTYSWTHWRYSCPKFLRQTFVEWANQSIRYSFWARQFYDDKRAQGKSHQATLRALAFKWIRIIFSCWKNKTPYDESAYLFALKKRKTSVN

SEQ ID NO: 338857 - protein, 438 aa, unidentified
MSDKVIFNLDELFISVGIDVGADFSWMSIALPNQQFVGKPYKILHNKMSSLTTAVSKIKEAEELYSLESRIFLESTGIYHYPLFCYLRDKGFNCSVINPIITKNSTNINIRKVHNDRFDSKKAALVGLKPDLKVSLMPSDLALNCRNLCREYYDLMDNRSAYVNKLQGELRMAFPQYLDIFSKVTTNTSLTLLETYSSPSAFIEADKQEIIGIIKSAARFGLTYAQNKYNAIIQAAHEANEFGYIIDSNIKRIRLYISFIRKYDEEIANILHSMHELVDTNEDTDFVKQIHLIETFKGAGFLSAVSLMGEIGDFCAFSKPKQLFAYFGLDPAVKQSGKFEGSKVQMSKRGSAIARRVIHTLALQSISTSRTGEAKNPVLRDYYLGKCGAKPKLVAMGAVSHKVCNIIFAMLRDNKPFEIITPQEHIKQYNAAKCDIAA

SEQ ID NO: 338858 - protein, 388 aa, unidentified
MFVGIDVSKDKFDACGIGSGGEKVFSLTASMDRKGFEKLIVHLKRKSSLLLGLESTACYHIALFSYLTAKGYRVVIINPLLIANFVKLQLRKTKTDKKDALTIAQFLLLKKETFENQSFSADLMELRDLARRRERLTDQVTRLKGNMKRILSVTFPELEQITGVFAKSILQLLIRFPSADALRKADVETVAALVVPRSWGRKSRTWVDTLMATAATSIGVSSPAKELVLKQDAALLLYVQEQIKETTKVLTTLCTDRMKKDVEILDSIKGIGKATTLNFLIEMGGDITLYGNDKKLIAASGLDPSTYQSGKYEGVSRISKRGNRHLRRVIWLMTRGVIFSNDLFRTYFYKRRNEGLCYKMAMLATAHKLIRVLFAMLVHQTYFVQGGR

SEQ ID NO: 338859 - protein, 436 aa, unidentified
MPVEEVTDEPLFRERVCGIDIGKAELHATIRVPSDTNPERRMSETRAFAATRRGVLALADWLRCWQVPAAVMEATGTYWMGPFLRLEAEGFECVLADPKQVKNLPGRPKRDPSDSSWLAQCFERGAVRPCFVATAEFRVIRLHTRYRRDLINERTREKNRAGKLLETAAIKVSSVITDLHGVTGRDIMEHLIAGERDPKVLAQLARTRARAKITELQHALEGAEFFTSHHARLLKTMLGRIGQIDAQISELTAVIEELLAPYEEQLAQAESMPGWGRRSAQDAVAETGADMTRFATGGHLVSWAGRAPLDKQSGKRKGQARHKKGNTYLGGVLGETAICAGRTQTREGARYRKLARSRGKAKACVAVGNTQLKVYHKLLSNPGMRYDDLGPDYYDRRAQTRRKIGYHVRELEALGLEVTLCRPSPAQDDPEPTQAA

SEQ ID NO: 338860 - protein, 399 aa, unidentified
MVHPQSLELRVGVDVGSQSHHVAVGLSDGRLLDEFEIPHTAAGFREFFARIEGHAKRHPYPIAVAMEGYNGHVRPLDSLVKARGWRLFNVNNLKLARFKEIFPAPAKSDRIDSAKSLELFQLRDHLPMAGDVLQEVMPTPEENDILKRLSRRRRRLVNERGRVISAMQADLQAAAPGLLQITRSVGNLWFLNFLTCRKDIRKLARVRRASLLKLPAIGPGYADRIQAWQHDPCFGPDAGLVGDMIRQDAIRVLELNRQVKALEVEEARVAANSTIACQLASIPGYGLVCTAELAGEIGTIARFRREASLALYLGMATLDNSSGKFRGSKAPKHVNARAKAAMMAAVDNHRKRVPLSQRYYKKKRAEGKRHNQAIRALGRHLCRVIFKMLTEERPYRIDP

SEQ ID NO: 338861 - protein, 413 aa, unidentified
MFCGIDWAEAHHDVAIVDPEGRLVARQRISDDAAGFAVLVELLAAHGDTPTDPIPVAIETSRGLLVACLRTTGRLVFAINPLAVARYRQRHSVARKKSDHGDALVLANILRTDLAAHRPLPADSELVRAIAVLARAQQDAVWDRTLAHNKLRSVLREFYPAILAAVAGKRGGLLRPEARMILAAAPTPTAAARLTHAQLRSLLTRAGRRRDLDGEARRLHAVLRASYLHQPPLVEEAMGRQALALLRQLEAACTSAEELAATTIQQFNKHPDAELLTSHPGLGALTGARVLAEVGDDRSRFADARAVKAYAGAAPVTRASGKSHQVSHRRQPAAGLPAPLPTDPHPLRRTGRLPQPGGNRRLTLRRAGCLIGATQLALVAGQLRPSPLPGHGANRARVGASRHPGAGQRLPSA

SEQ ID NO: 338862 - protein, 308 aa, unidentified
MDIYVGIDVSKDRLDVSVQPSGESFAVARDGEGLAALVARLQPLAPRLVAVEATGGFEIVVAAAIGAAALPLAVVNPAQVRHYAQALGRRAKTDKVDAVVIARFAEATKPEPRPLPDEAMRLLADLVARRRQIVVMIGAERQRATRLPKRLMKSCERVIRVLEKELAALDQEIDTTVRGSPGWREKEDLLASVPGVGPIVARTLIAELPELGSLDRRRIASLVGVAPFTRQSGQWRGKAFIGGGRRTVRAALFLATMAAVRHNPAIRAFRQHLIAAGKPKMVAMVACMRKLLTILNAIARDQKPWQAA

SEQ ID NO: 338863 - protein, 318 aa, unidentified
MSKETLDANCTRGQRKQAKIFANSPDGWKLMLSWLKAMGSKQAHVCIEATGHHSLGVALALHDAGHVVSVVNPAQIRDFARTKLGRNKTDKVDAALIRDYAALFNPAPWTPPSPAMRRLCELQTVRAGIIGSRTEWKNRLASGLGDSTATGLAATTIEHFTHQLETVDRAIAETIDQDATLRGRRDLLLSINGVGETLAASLLAEMPEPGVLRRSGELVAYAGLNPRHHRSGTSIDRPTRISKIGNAALRSSLYMPALSAMRFNPAVAALVARLKEAGRLTPMQIVVAAMRKLLVLCFGVLKTGKPFDPAIAMPAEPR

SEQ ID NO: 338864 - protein, 349 aa, unidentified
MRFYTNQHRHYCGIDLHTKTMYVCILDRDGQVLVHKNLPSNPEAFLEVIAPYRDDLVVAVECIFTWYWLADLCAAEGIAFVLGHALYMKAIHGGKAKNDKIDAHKIAMLLRSGMLPQAYVYPAGMRATRDLLRRRLHLVRKRGQLLAHIQMTNQQYNLPAFAKRIAYPSNREGVADHFEDRVVRKSVAVDLALLDRYDTLLTDLESYLVRQAKQHDPQAFALLRSIPGVGKVLALTILYEIHDVKRFDRVQQFASYARLVKCAKESAGKKHGTSGAKMGNVHLKWAFSEAAVLFVRHNEPGKKLLAKLEKRVGKGKALSILAHKLGRAAYYILLRGKAFEIDRFVATAN

SEQ ID NO: 338865 - protein, 345 aa, unidentified
MIVCLNPPLRLMYSEVKNMLYAGMDIHKIHCQAILMTKDGEIVKEERIKSDKEEIKDFFSGFKDVNIAFEASTNYEYFYEVFEDLGYKPFLSHPYKTRLIAESMIKTDKIDARALAHLLRADLLPLSYVPPPEIRELRHLVRHRIFLGRHRAKVKNQIHAKLYRRNIKYSGSNLFSKQGIKWLHGLGIFIVESYLNIYNLIEEEIKAVELKIKFEGSKYKEVLLLTTIPGIGLYSALIIFSEIGDISRFHSEESLFNYAGIIPMVRQSGEKKYHGRITKEGSKYLRWILTEIIRVHIRWAPESKITKFYYRIKKRKNDNIAVIAASRKLLQTIYHMLKNNNEFQG

SEQ ID NO: 338866 - protein, 373 aa, unidentified
MPEAVIGLDVGKSSHWACVATRDGEVLLSAPVANREDDLDSLFGRFPDALVVVDQSRNIGALALARARAAGMSAAYLPGLAAHGAARLFAGDAKTDERDAMVIAKTALGIPDALLPVGDPGPTIAAARALAAQRNFLTCENTRNKNRLRSILLESCPAFEALVDLSDGPQLRLMASLGGTWSVADAGPRRAAALTRGAARGKIEALVRSTTSSTRPDASVVAAEDRAVKLLARRISENSAEISALLEGDDTYRCLLTVPGIGPKTASELAISIDIEDFPSHDRLASYCGLAPRNRQSGTSISSVTASRQGNKRLKNLLIFSCNCLTRTEGRWGDYYTRCRERGMSHGKALKALARKRLKVIYAVMRDRVPYAA

SEQ ID NO: 338867 - protein, 412 aa, unidentified
MEELLDRCCGLDVHKKTVAACMRVPGPDGHPREVVRTFGTTTHELLVLHDWLQANGVTHVAMESTGVYWKPVYYVLEDSFTVLLVNAAHLKRVPGRKTDVSDCRWIAQLLAHGLLRASFVPPRALRELRDLTRYRKSLIQERTREANRVQKVLEDANIKLASVASDVLGVSGRAMLEALVHGTTDAEMLAELAKGRLRAKLPALRQALSGRFRDHHGFLVAQLLAHLDYLEDAIGQLSERVAEVIRPFEPELKRLMTIPTVKRRTAEVIVAEVGTDMSRFPTAAHLTSWAGMCPGNNESAGKHRSGKTRKGSKWLRGALIEVGQVAGRMPDTAIGARYRRLQRRRGKKKAVVAVGRHILEVSFHLLSTGRTYHELGPDYFVRARADQVRRRSVRMLERLGYQVTLTPLPAAA

SEQ ID NO: 338868 - protein, 422 aa, unidentified
MNFTVAPASMRVLNVAFDVSSESLNWSIEIGETRSDGVCDNTTESIRRTLLKFKRVAVSNGFGEVRVICESTGVYHRNLLRTAAGLQMRTNLVHGDAVSKYRAIQFADYGKTDLKDSQAILTVARVGRLIKHRQLDGRYAELRELHRLVLRLERRKRSAKNELHADLRMLFPDLRLDKSVLYGPTGRALIDQFGANPNKIVAVGYEVFCSQIKSQSKNTKRATLQRIWNCAETSASDDCRDAVASIQQRGVEQLYAEITGFTEQINDLESQMQILYDQLCEQDSRLPRPQKYVVSRRLLSRLVAETGPLDDFQTLRQLIRYAGLNLCERQSGKWRGRTMISRRGRSEIRYVLNLMALPLIGRKKLFGDYYWKKKEQDRMPGEKAITCVMRKILKMVFGWYRSESEFDQTRVFAMASQIKRAA

SEQ ID NO: 338869 - protein, 370 aa, unidentified
MEKITTYVGLDVHKETISAAVADDGLRGEARFVGTIPNTAGALTKLAMRLSRKGGSLRFCYEAGPCGYGVYRHLRALGHDCVVVAPSLIPRRPGDRVKTDRRDCLGLAKLDRAGELTAVWVPDADHEAMRDLVRARAAAVRALRRARQQLTGFLLRHGRIHSGKNWTLAHRRWLTTLRFEHPAQQIVLQDYIHAVEDAKARRDALMAQVEALLPRWSMAPLVEALQAMRGVALIVAVTLVAEVGDLTRFDNPRQLMAYLGLVPSEHSSGQSVRRGGITKAGNGEARRVMVEAAWTYRMQARVSRARLGRMEGLPKPVRDIAWKAEVRLCARYRRLNAAGKPANVVTAAIAREMLGFAWAIARHVKPQPAI

SEQ ID NO: 338870 - protein, 348 aa, unidentified
MSKISQYVGLDVSLKETSICVIDDAGKIVWCGRTDTTPEAIASAVKQHAPNAVRIGLESGQLSTWLFHELKGVGLPVICVDARHAKAALSLKVNKTDANDALGLAQIMRVGWYREVSVKGLDCQAVRTLLVVRAQLVSQVTTLKNCVRGVLKTFGLVLPKGLRSQFPGRVRAAIDGHPVLGAIIEPTLLVLEATRAQLIVYDRAIIQRARSDDTARQLMSAPGVGTVVALAYMTGVEDPARFKRSSSVAAYFGMTPRRYQSGEVDRAGRISKCGDGMVRGLLFEAAKVLLSRSARPSALKTWGEALGKRIGPKKATMAVARKLAVILHRMWITGTTFQWNAEAASLAA

SEQ ID NO: 338871 - protein, 301 aa, unidentified
MDKSGWLDTATGESGEQKLVQASGDAERFYRQVAAPAQIGMEATGNCHWLVDLLAEIGHELWVGDAAQIRASYVRQQKTDKRDAVHILKLLVEGRFPRIWMPSSQVRDLRQLLLHRYKLVMIRARVKNEHQHLCLKAEAQGDKMARLLQTQPGVGPITALAYVLTMGDVGRFPRGKQVASYLGLIPREHSSGGRQKLGAITKQGNRMLRMLLVEVAQIAVRYDPEFRRQYLHRCHQKPKAVAKVAAARKLAVRLYWMLRTQVAYPEIVRIESSPRVPLVGASSTVNVDWALSHPALGGMFA

SEQ ID NO: 338872 - protein, 423 aa, unidentified
MVLHDSVDSEEIIERVAALDIGKAELVACVRVPNPDRPGRRSQEITTYSTMTRALLVLADRLRELGVTRVVMEATSDYWKPVFYLLEAQGLDPWLVNAKDVKHLPGRPKTDKLDAVWLAKVAERQMIRASFVPPAPIRLLRDLTRYRADLVNSRTAEKNRVEKLLEDAQIKLSVVASDIFGMSGREMMAALIAGERDPKALAQLARTTMRAKIGLLEEAFVGHFTDHHAFLLRTMLTRIDETSADIAAVETRIEELIVPFAPAVARLDEITGVGLTAAHVMIAEIGVDMTRFATAAHLCSWARFAPGIKESAGKNKGRGATGHGNPYLARVLGEAAVSAGKTSTFLGERYRRIARRRGKKRAIVAVGRSILVIVWHLLSDPEARYHDLGPDFYDNRISPDRKKHNHIRQLEALGFKVTLQPAA

SEQ ID NO: 338873 - protein, 341 aa, unidentified
MVEVSTIGLDIAKQAFQVHGADASGHMVFRRKVVRTKLMAFFSSQPQCLVALEACGGAHYWGRQIEKLGHAVRLIPPAYVKPFVKRQKNDAADAEAICEAAQRPNMRFVAVKDEAQQASSVVFRARDLLVRQRTQCINALRGHLTEYGYVVPKGATHVPALVAQIEDPNCQLPEGARGILRVLVSTLRSLDENIAILDVEIARRSKEDPAARRLATIPGVGPITATAIVALTPPIETFRSGRDFAAWLGLTPLQKSTGGKHRLGATSKMGERTIRRLLIIGACAVVRQACRCGAPEGSWLAGILARKPRMLVTVALANKTARIVWALLTKGGVYRAPVAAA

SEQ ID NO: 338874 - protein, 384 aa, unidentified
MRSVGLDLGKKEVSYCEVRDGVAVVRRTVRSLRELKDLLGPTSSPATVAIEACREAWHVYDVLTKDGHKVLLVDTTRVKQLGVGHHGRKRDRIDAEVLARAVERGHIPLAHVLSPHRRELRDKLNTRRLLVETRASFVTTIRGTVRGRGEDLATCTTDHFRRTVVAAKLSDGARAAIAPMLAILETLDAQLSQVEVELEQLASQEPTIARLTTVPGVDLIVAGVFVSVIDEARRFSNAHKVESYLGLVPREDTTGGRENQKLGSITKCGNSYARSMLVQAAWGLLRGRGKDPLRTWARRIAERRGKRIAVIALARRIAGVLWAMWRDGKTYDPCRAATASGRGLQQASDDTRAAAEQMKLIAIKAARRARKRAVRITTKEATAQ

SEQ ID NO: 338875 - protein, 296 aa, unidentified
MMIIGCDLHTRYQQIAMLDTETGELVERRLEHESGEARTFYAALVGRVRVGIEATGHTHWFEAMLAELGHELWMGDAAKIRAAVVRKQKTDARDAAHLLELLCSERFPKIWRPSWAERDLRQLVWHRQKLVWMRGAVKNQMHALAMGEGVCRKKKLFTAKGRQELEALALGPWASYRRQELLRLFDELQASVARLDQAVEQAAKSQALTARLMTHPGVGPVTSLAFVLIIGPVERFAGSRKVVSYLGLNPQEHSSGGKQRLGSISKQGNPMMRSLLVEAGPPRRVSIRSCGGCIND

SEQ ID NO: 338876 - protein, 389 aa, unidentified
MIFVGIDVAKDKHDCYILNSDGEVLSDVFTIDNNITGFNLLYQKIKSVANDLSNAKVGLEATGHYSYNILGYLLSKSLQTFVINPLHTNLYRKSLSLRKTKTDKVDARTIAMMLMSDVDLKSYSDTLYHNEELKSLSRYRFDKVQERAKLKQSVSRLVTILFPELEKLIPTIHLTSVYKLLMEYPGASQIASAHLTKLSNLLLVASKGRYKKDTAITIRESAKNSIGSVMPAKSLELKHTIKLILEISSEIDEIEAEIKSIMDEINSPIMSIPGISYRMGAMIIAEIGDFSRFDSPDKILAYAGLSPSTYQSGHFESSHSKMEKRGSRYLRYAIFNATKFVCNWDSTFSEYLAKKRAEGKHYNVAISHAAKKLVRVIYHLETTGQLYIK

SEQ ID NO: 338877 - protein, 482 aa, unidentified
MKKRTIYQNQSQELLHLFEAAGSGAKVMCVPMDYAKKDHLAMLCNGHGAILRKPFSVKNSPDGIEYLVDQVTRSCRRRGIKKKHVFFGGEDANSFAENFVSTLRYKGWLVAGVNAQDAKKQRANLQASTDRIDLMGIATMLLNCRANCCPAQSGIYRNLRTLVRHRRKLVAMLTEVKNRVHGIVDRLFPGFLNESKCGIVPFTQSSLYLMEDRFSPKQIRRRKREKLIEILKRFGTSKAEETAFKLQQYASQVLHSPVEYVDTLQLSLAQHVKHIRCLQESVAQLEKEIAVNLAQTQGAFLTSFRGIGIVLAAGVNAEIGDPNEQKPLNNLVSYSGIIPRVKQTGGSEGKTYTGKVAKRCNRILKDYVVQSAHHLGLYGPDDLMTDYKRRDASGQHANFGIGRRYLRTAMSLMRTSQIYLPPWLRKADATLEERAGYYLMIWPKLREKWLKLGALEVAFAKDRPLGLWRQMVQELYEIKLKL

SEQ ID NO: 338878 - protein, 330 aa, unidentified
MTREYIGIDLHKAFFQACAVAGGGERLWEGRFARSADGIAAFRQRGIGEVHAIAVEASGPTWTFVDALAPSGARICVVDPRKTQLKAGVAAKTDRLDARRLADALRRDSVVSIYVPPPAIRELREVCRGRHQLVRLRTRLAQIIRALLLRCDAGDPPGTQLYAPKALAWLDHVTLRPDAQAALRRLVTAYRAVHTEAQAADTAVRTRAATDPIATALDAMVGVGPVLALTLRAEIGDIARFPGGPALASYAGVVPHVEQSAGHVFHGRITRHGSPWLRWALVEAARHAIRRQDATGRWARRLTGRKGIAKARVALARVLCNEIVATWPRL

SEQ ID NO: 338879 - protein, 338 aa, unidentified
MKLYGGIDLHSNNSYVVLLNEEDKIIYQKRLVNDLAIILSELAVHREDIIGLVVESTYNWYWLVDGLQEAGHTVHLANTCAIAQYSGLKYTDDKTDAIWLARLLRLNLLQEGYIYPKEERGIRELLRRRLQLVKQQTMFLLSIQSMVSRYENVRLSSYKIKHCTIEEIVCYLKETHVECAVQSQLTVLKCLMNEIKVLEEAILKEIKENKFFKLLQEIPGIGPILAMTILLETGDISRFRDAGNYSSYCRCVESKRISNAKKKGENNRKNGNVYLGWAYVEAANFSIRSSEIIKRYYQRKLSKTKRVIALKTIANKLAKACYFILRDEVSFEVNRLFV

SEQ ID NO: 338880 - protein, 313 aa, unidentified
MSQEAFVGIDVAKDHLDVHILPSGTSARFDTDSRGLDALVEAVKEIFPKSIVLEATGGYERVVAASLTAEGLSPAVVNPRQIRDFARATGRLAKTDKIDAQILAHFAQTIRPVARPIPTDTEKALKELVVRRRQLVDARAKEKNRHGQMSSESALGSIQRMIKTLDQEIAEIDRELDDHIKQNPAMVEKYELLITTPGIGPNTARVIVVQLVELGQLNRRQIAALLGVAPMNRDSGSMRGRRMISGGRSDVRKIFYMATLVATRYNKKIREFYQRLRAAGKPAKVAIVACMRKLLGILNAMIKHKEPFMAFSA

SEQ ID NO: 338881 - protein, 450 aa, unidentified
MGNGSGVSRGDRNRNARLARLRVLVPVRNAIVGIDLADRKQVVVVTDHDSRVLARKTFRCRAWDLGAALDWADKQASATGFASVTVACEPTGHRWRVLAQLAAEREMPFVCVQPMLMSWARRGEDLTFDKTDEKDAVIIARLAGQLRCYVPEPVDETWGRLRHLGARREQLLAEAGSQIQQMRALLECVWPAALLTARQPFRSSTWTAAMGVVLGRDGGDLARTRRLGLARLASAVRREITRRGKQRLCLRIVRLPFSALTDCAGVTAHRPGALERVCLLLGDWLETHRRLRDTEQRMTAILDQLRLTELVTSITGLSATGAAALLAETGDPHRFATARALVKHAGLAPREKLSGTFVGRTKLTGQGRPSLRLAAWRAVWGAQRANPVFATRFQHLTTRETNRLTATQAQAVIAAAILRQLHAVVTTGQRWNADIATHGTKPAAVMPIAA

SEQ ID NO: 338882 - protein, 416 aa, unidentified
MTGTGLLPAMEEGPVPNWDALSSPVNALERCRKDGTGMKKNNKKETLKSKRETKKVAELEAGEAPLVEREANTLVIGIDLGDRTSAYCVRTLGQHIVKEATVATTAPAILEAFQGLRRQRIAIETGTHSRWVAQLLELMGHEVIVANARKLKLISENNQKSDKVDARLLSKLGCMDVDWLHPVYQRSQAAHSDLLLVRARQALVDARTALINHVRGSVKSFGSRLVKCASERFVEVARGALPEALKPALSGVLATLEELNEQIYGYDCQIEHLCNTKYREAAKCLLQVNGVGPVTTLTFVLTIENKDRFEHSRDVGPYLGLIPKKRQSGQRDPQLGISKEGDEMLRKLLVNCAHHILGANGQDSDLRRWGLELVRAVERKGKKGARKLAVLLHRLWVTGAEYEPLRNRGARQAPAA

SEQ ID NO: 338883 - protein, 343 aa, unidentified
MNKYAGIDVSLEVSSVCVVDGEGRVLREGKVASDPACLANWFGGLGFELSEIGLEAGPLSQWLYAGLSQAGLPVTLLETRRVRDAVRTMPVKTDRKDARILAELMRVGWARPVHCKSLPSQEIRTLLAARKLLQAKRHDIEMSLRGLLRGFGLKVAQAPGKRFEPRVRELAAGHPTLELATNALLAARAALDKEFHQLDRMLRRLARSHEQARLAMTAPGVGALVALSFVAGIDDPARFASSRDVGAHFGMTVRKYQSGQTDINGRISKCGDRSVRTMLYEAAHVILTRPTVAKGTGLKSWALRLQRHKGAGKAKIALARKLAVILHRMLADRAPFDASRVAA

SEQ ID NO: 338884 - protein, 406 aa, unidentified
MTAVMIGVDPHKGSHTAVAIGAGEEPLGKLRVRASTAQIQKLVAWAAAWPERIWAVEGAAGLGHLLAQQLVAAGERVLDVPPKLAARVRLLEAGDTNKNDPNDALSVAVAALRSKSRREVTAEDYAAVLKVWSKRHRDLSRARNQVACRLHAVLCELVPGGLSKEITAGQAARVLEQVTPSGAIAQARYELAGQFLDDLRNLDAQLRQTKKKLAAAVRASRTTLTEIFGVGPVIAGTVIGDIASISRFATRDHFASYNGTAPVEVSSGGRITYRLSLRGNRRINHAIHMAAITQIRNRHSDGRAYYDRKVAEGKTGKEALRSLKRRISNAIYARLQADTRQAAQTDAMGPGGQSGNGSVSSAAGSHPGHQLFGQATPGPATSLRPTTRPNPAPSPKATSRKTQRSP

SEQ ID NO: 338885 - protein, 313 aa, unidentified
MKNISKVCVGVDVSKNSLDIYINPLGKLFKIANTEVEIKKFIKELDKYEVDQVAAEATGGYEKLLAKVLRKHSYNLWIIDPRRIKGFIIASGCRCKTDKIDAQKIAEFASINSKEYEPIIKTENQEKVQALINRKKDLTVVLAAEKTRLKHPSHVLSVPSIKRLIKTLEKEIKAIDKQVQSLIESDKELHKKANILESIPGIGKATAALLVSFVPELGKLSKTKISALIGVCPYDNASGKYKGKKFIRGGRTIPRNVLYMCALTTIKYHLPLREFYDRLKAKKKPFKVAIVAIMHKLIIIANSLLKKGELCRA

SEQ ID NO: 338886 - protein, 459 aa, unidentified
MSRKKTAKNQNQWAELPTVHPHAAGLDISATDIVACVPADRDERPIRTFGVYTQDLEELADWLIACGIETAAMESTGVYWIPVYEVLETRKLDLYLVDARHLKNVPGHKSDVSDSQWIQTLHSYGLLHKAFVPEANVRALRAYWRQRTMLVEHRAAHIQHMQKALQQMNLHLTAVLSDITGVTGMQIMRAIVAGEHDPRRLAQMRDRRCQRTEQEIIKALSGNYRPEHLFSLQQALRLYDVYSQAISECDAQLKEQYQSMAGLDDGDAGTPLPPLPPLPPAKQGAHCKNAPAFEAREEVYRLLGVDLVSVTGLQENLVQGILTEIGFDVTPWPTVKHFCSWLSLAPHNDVSGGKVLRSRTHKHRNRAGQSFRLAAQSIMRSGNPYGIFYRRLAARIGKQQAIVATAHKIARAVYAMLKYRRPFELVAAQEYERRLREQEIARLRKRATRLGMSLVPLTT

SEQ ID NO: 338887 - protein, 347 aa, unidentified
MRKIAYLAMDVHARNCVLGDMDGNGKFHGNRSFTTCEINIIKALKTIKAKRKYLVIEAGPLSNWVAQVANDHVTKVIICDPRENALIYKSSQKRDKVDTKKLCRLLRLNEFKEVYRPENDQRAIFKAAVQHYLDLRDQLKALKQKIKAMYRQWGVIDVFTESVYSVSGRDKFLNQLKHRPIYLQLKRLYTLLDTTADMKQDAQKSMTSLGRKYPEIKEFKKMPGMGIVGPHTFDAYIQTPHRFAKSSRLWKYCRLGITDHTSDGKPLGYRRLDKSGISELKAVSYRAFLSAIKGDNEIRRFYLSSLKRTHDKKHARLNTQRKILSVMLSIWKKGSAYRAELFLDPST

SEQ ID NO: 338888 - protein, 345 aa, unidentified
MDKIIRIGMDTSKHVFQLHGVNAGEEPVLRKKMRRKEMIDFFTTCQPTSVAIEACGGSHHWARLLASFGHEVKMIAPQLAKPYVKRNKNDAADAEGLCEAMARPTMRFVPVKTVDEQAALMLISVRTRLIANRTQLANAIRGYANEFGISAAKGLAHIPMLLERIKVEKTVPELAQELFMSQAEEYAELEKKIADVEAKVKAWQRNDERSIRLNTIPGIGPIGSALLIMKTPAPELFKSGRQFAAWIGLTPKDHSTGGKVRLGGITRAGDEALRATLVNGATAVIHHARRSGKASRWLVELLKRKPPKLAAVALANKIARIAWKLMVSGEPYSTQSGSALNGCAT

SEQ ID NO: 338889 - protein, 287 aa, unidentified
MESVKYLGFDVHQSTISVAVVNADGKLVMQSVIATHAATILDFIHGLRGTLHLTFEEGTHSAWLYDLLARRVARVVVCNPRQNALLKAGNKSDTGDARKLAELLRAGLLAPVYHGEGSTRTLQELVRSYAALTEDTTRVMGRVKALYRSQAIACAGKKPYGRRHRPEWLSKLSQAGLHRRAERLYEELDALQGLRRAAKRELVMESRKHAAAKLLRTVPLLGAIRAAWLIGRVQTPHRFRTKRQFWAYCGLALETRSSADYRFQDGQLVRAKKPVFIRDSTATTITI

SEQ ID NO: 338890 - protein, 343 aa, unidentified
MYIGLDVHKKLSYYSMIDGEGTEIKRGRFPTTCEGLDEFANELPEGAKVAIEASTSGIFAYEYLDEGGIEVHLAHPVYVKPFAKKHVKTDKVDARVLAQLLRMDYLPESYVPGKEIRDQRVMIRHHASLVRLRTSIKNRVHALLAIEGIQTSEFSDLFGKRGMEFLRRVKLRQVRREALDNYLEVLKALEERIEEMEAILKERAKITDEAKWLMSIPGIGYHNALLILSELGEIERFSNPRSMVSYSGLAPKVEQSGDYKRYGHINKHSNGFLRWAFIQSARAAVRSSKPNRFQRIYNKIKARRGEKVAIVATARHMAESVYWVLTRKEYYKENRAIRASSFS

SEQ ID NO: 338891 - protein, 430 aa, unidentified
MEIVYPRSCGVDVHKSFIVAVICISESVKPKYIKKRFSTFNNQLIQFRDWLIENNCQNVCMESTGKYYIPVYNALEGHISNVVVANPKWVKAIKGEKDDNKDAKWIADLFKFGIVRSSYIPEKDIRILREFTRYQYKLVNMRSSEKNRFQNALTTGNCKLDIVFSDIFGKSASAIVDTILSNNPYTSEDILSKVHARCKASHEDILSAVDGIQLTQFQKARIRIVQKHMEYLDSLLDEIQHHIDLMVANYEEYIQILCTIPGINRKSAITIISEIGTDMSQWSSHRKLAAWAGLAPGCNESAGKKKSVKISKAGVYLKPCLVQVAHAAVKDKNCDYYATKFKKISKRRGKKRAIIAIARKILIAVYHLLKTGEVFNPTDMADVETTKKQRIEYVKNNLRNAFNQLSRTGLSEAEILQLIRKESTNSPQTE

SEQ ID NO: 338892 - protein, 421 aa, unidentified
MKESHDEEQIIARVAALDIGKAELVCCVRVPTPDSARRRLQEVSTHSTMTGSLIELANRLVELGVERVVMEATSDYWKPVFYLLEAHGLAPWLVNARDVKHLPGRPKTDVLDAVWLCKVAERQMLRPSFVAPPAIRRLRDLTRYRIDLVGVRTAEKNRVEKLLEDACIKLSVVASDIFGVSGRAMMAALIAGERDPKMLAQMARSRMRTKIGRLEEAFNGHFDDHHRFLLARMLHRIDDIDADIAAVDDQIEAYLAPFASAAARLDEIPGIGPVAAAVIIAEVGADMSRFPTAGHLCSWAKFSPGINSSAGKTKGNGSTGHGNRYLARVLGEAAVVAGRTDTFLGERYRRIARRRGKKRAIVAVGRSILVIVWHLLADQDTHFTDLGADHFTKHTNPEVKKRNHIRQLEALGYTVTLTPAA

SEQ ID NO: 338893 - protein, 358 aa, unidentified
MKQVQNKQLDFNGQDIFVGLDVHKKNWSVCILTKDMEHKVMTIDSKPEILIGYLRKNFPNANYHSAYEAGYCGFGWHDDLKNGGIDSMVVNPGDVPTTNKEKTNKTDPIDRRKLARSLRNGELSSIYIPDSIAREARSLVRTRYQFVKDQSRTMNRIKSIVSFYGIEIPLELENSHWSRKFIEWLKNYKLKTNYGTKCLQYHIERLISIRSDVAKVTQQIRIMGREPRYKENIDLLMSIPGIGILTAMVFMTEIIDINRFKGLNELASFIGISPGEHSSGDIKHTKGITKRGNRYLRSLLVEAAWMAVRHDPSLMMAYTEYKKKINHSKSIIKITRKLLNRIRFVLKNHKKYEKGVVQ

SEQ ID NO: 338894 - protein, 405 aa, unidentified
MSFFVGLDWGGQSHAVCVLDAAGAVVDRFQIAHDRDGLAALASRLRKRGPADQIPIAIERPSGLLIDTLVEVGFAVTPIHPNVVKACRPRYRAVAAKSDPGDAYILADILRTDGHRLSSLQPQSDAVKALRALVRGRDDLVAAKVALANQLCALLDSFWPGAAALFADIASPIALAFLDRYPTPQSAHRLGEKRMAAFLAQHQYCGRRTPKDVLVRLRAAAIGCAGEAEAEAKGELVRALARMLESLLAHIAKLTSRIEHDVAELPEGRIVMSFPRAGKICAAQIAAELGDVRARFQSEDQLAAEAGVAPVTYQSGKSRGVGWRWACNKRLRAAVACFADNSRHASPWAADVYKRAKARGCNHAHAVRILARAWIRILWRAWVDGALYDPAKHPAAHALLSAQQP

SEQ ID NO: 338895 - protein, 416 aa, unidentified
MEIYPNTRAIQRYIALDIHKEYVLAGGMNASQEWELSPHKIEMGKFREWARKNLSGTDAVVIETTTNVWDIYDIVQPLVGHAVVAHAGAVRQIAEARVKTDREDVKRLIRLLIAGIVPEVWVPPQHVRELRGLVAYRQQLVKTGSMIRNRLHSLLHRHNLCLPEEGLADREWWTQQEKICALEKLQIRQELSMLQQIETHKAEVDHELGRQSLGETWGKAAVRLMQLPGMGIVVAMTVLSAIGDIHRFESADKLVGYSGLGAGVHDSGKEHIEKRITKSGRKELRWAMVEAAWRAVRMSPYWKEQYEKFLKRMRRPNQAIVVVARKLLVAVWHVLSKDETDEHATEEDLAYKMLLWSWSLSEEARQGLTHKQFAKYALMRLGVQTDLTRFVRGKVPRRIASREEVLVRMAELGLNG

SEQ ID NO: 338896 - protein, 343 aa, unidentified
MSKISIVGLDLAKNVFQVHGVDASGGVVLRRQFRRGAVEKFFAQLPPCTVGVEACGSAHHWARVIGRYGHQVRLMPPAYVKPYVKRNKNDGRDAEAICEAVSRPTMRFVPVKSVEQQATMAVHTTRALLVRQRTMVANSLRAALSELGIVAAQGIKGLRELMAKLEAPYEEVPEIMRGALLLLARHWQSLEADERVLEQQIAKAARSDREARRLMEVPCVGPIIASTVLAKVPDATVFRSGRNFAAWIGLTGRDHGTGGKHRPGRISKQGDRMLRALLISGASAYLRHQRTRGVSDPWLRDLLARRPYKVVMVALAAKTARILWAMLVKGEPYRDRASAPAAA

SEQ ID NO: 338897 - protein, 427 aa, unidentified
MSHRIAGIDVHKRMLAVVVSDVEVDGEYEFEARRWSTNPAQLRSLAAWLVEQQVEEVVMESTAQYWRPVWEALERYWKPLFQKREGAGPLSGTLHLAQAQSNRGPRGRKNDFADAERLVRRLVANELILSLVPDPEQRLWRTITHTKYQLRRNRVQLQNRLEALLEEAHLKLSSLVSDLLGVSARRMLKGIADGETDPAALAGLADQSLRATPEQLCDALSACQELDPVYRQLVRMALEELQLIDKQIGELDREMANQLRLHPDQVQRLAEVPGLGVDSAQQIIAEVGAKAATFPSAKALSSWVGACPGEEETAGVNHSHRSPKGNRHMRRLLNQAANAAVKHKGSIFEILYRRYVPRLGHNQAIAVIGHRHCRLIWKILHLGVHYEERGPAVSERSKRSRTARMIRQLRRLGYRVELPGSLSPVPV

SEQ ID NO: 338898 - protein, 351 aa, unidentified
MMIIGVDYHPSFQAIAFLIEETGECGEQELNHSDGQAEKFYRDLKERGISVRVGMEATGYSRWFERLLAELGFEVWMGDPAEIKAKRIKKQKTDRKDAQLLLRLMLENNFPQIWVPGPENRDLRQLLWHRHRLVQMRTRIMNQLQALAMNEGYRWKKKLFSEQGRALLEKLALAPWASRRRQELLELLDRMNPTIEELTAAAEREAKKRPEVLRLMTHPGVGPLTALAYVLIIGTPTRFQRGKQIGTYVGMIPCEDSSAGKQRLGHISKQGNSLLRFLLVEAAQAAARIHPDWRRRYIHLAMRRHKSIAKVAMGRRLAVRLYWMWRNGCEYSASLEFGSYAGQLGNRHGVK

SEQ ID NO: 338899 - protein, 438 aa, unidentified
MVAVMIGVDPHKASHTAVAIGAAEEPLGELRVRACAAQAEQLLAWAQAWPQRTWAVEGAGGVGHLLAQQLLAVGERVLDVPPKLAARVRLLQAGNTNKNDPNDARSIAVAALRSPACPRARRDDHVAVLKIWSKRYKDLGRTRTQVACRLHQVLCELIPGGVPGQITAGQATRILESTTPADAVAAARCQLAAAFTADLRGVDAAIRDTRKALATAVAAAGTSLTGLFGVGPVIAAAVLGDVRAVSRFPGRDHFAAYNGTAPIEVSSGGRKIWRLSRRGNRRLNHAIHMAAVTQIRYRHSPGRAYYDKKLAEGKTGKEALRCLKRQISDAIFACLQADAQRATAKGPGGQPGNHSASRAAGLHPEHRRFGQATPGPATHPTAPAAAFPAPLPSRANGRPGQGPRRSPAAQRRPQGVLDAAAREPIMPAAGKAGRKHSR

SEQ ID NO: 338900 - protein, 376 aa, unidentified
MKKELYLGQDVHKDRIITAVAEEGRTGEVRDTGAISNDLQALEKFIARLRKAHGKEVIIRACYEAGPCGFGIARRLKQLGVECDVVAPSMTPKRSGDRVKTDKRDARKLARLLRAGELTAVYIPEATDEAMRDLCRARTDAVDDRRRSRYRLKGFLLRHGYRYQGKSSWNAAHERYLRELVLPHPAMKVILEEYLQGIAAAGERIARAETAMHELLEKWRLASAVRALMAMKGFQTVAAMILVSELGEVHRFSHPRQVMAYLGLVPTENTSSDNRRQGHITKCGNAHARWLLVECAQHYATPPKVSAHLSRRQQGQGKEVRAISWRAQLRLHSRYNRLLARRLLRNKAMVAIARELCGFVWELLRTQPCYQAQSNP

SEQ ID NO: 338901 - protein, 344 aa, unidentified
MSEVTTIGLDIAKTVFHAHGADERGGLVFSRKLGRAKLLDFFAKQPACLVAMEACSGAHHWARELRTMGHEVRLIPPAYVKPFVKRHKNDAVDAEAICEAVQRPGMRFVAVKSEEQQAAGMVFRTRDLVVRQRTQLVNALRGHLAEFGWVAPRGLAQVTMLADLLDEEEMASSLPEAAQAMLRVMADMLAGLDDRIADLDKEIARRAREDEVARRLMTIPGIGPIAATAIVALAPPAETFTKGRDFAAWLGLAPLQHSTGGRQKLGRISKMGERTIRRLLIIGGSSVVRQATVRGAPAGSWLERMLARKPHMLVSVALANKRARIAWALMTRNEDYRDPAAVAA

SEQ ID NO: 338902 - protein, 409 aa, unidentified
MYFVGIDIAKSFHVAAVLGIDNDKVLHTLKFNNDEEGFEKLFLLLSSLDEISNFTVAMEATGLFFENLYLYLKAKGFKVVLLNPYQTNRFREMDTMKKVKNDNIDALMIAELIKSGRYSKAYVSEDTYISIKSLYRHKASLQDELKKHKRQVSTLLTVVFPEMEQVIRDPFNVTGIALLEKYPTAKHYHHASVDRILKTFRGIKGNNFNEAKAWKLLELAKHSIYQGNGMDERAFVIKSHLRQIKFINNEIASVEEQMLKLFNQQPSLDKDEEQEVMSIIDNLRTIPGVSDKTVFALMSECGDLSRFKNQNSFIGYLGLYPTLEQSGNKTVHGPLAKRGAKLAKKALYQAAIASIRHNKELNKLFHDKVSQGRAKKEAVVIVARKLAHIILAIYKNNVAYNPQRVFLAS

SEQ ID NO: 338903 - protein, 401 aa, unidentified
MHAVIGIDVSKATSQVAVAVDGKVVQNFKITHDVFGFNQLNTVIMQFNTFPDIVFEATGVYSRRLKTFLEAHNYPYTYLNPLTVKKQLDQLRPNKNDLNDAKHLAETQFILKRAKSYVQNPIYIELQDMSRFYQQLNHDIVSAKNRLHRLLQLTFPEIETLFSTTDSQQYWEIVSLIPHATMAKHSRQTLSDTIQSSVSRQIGVARLTRLVDKLVALGSLSAPAVAVASYNVTEVRYYAQRLIALSQSKANVLATMVDQTKDLPEYDIYQSIPGFSDKTVVSLIAELGDLHRFATSNKLNAFVGIDLRFNDSGDYKSSGFITKRGNTIARKVLFKAISNIASTATYGHQNHINDWYQKKKQSSMSKGTKKIAIGAMSRLLRTMHYLVLNNQLYDYDTASKR

SEQ ID NO: 338904 - protein, 412 aa, unidentified
MDVIHQRCAGIDIGKADVKVCLRVPGPGTRRRTEVRTFSSMTRDLLAMRDWLASEQVTLVGMEATGAYWKPIFYVLESEVECWLLNARHMKTVPGRKTDVKDAEWIAKLVEHGLVRPSFVPPQPIRQLRDLTRYRTEVVRERTREAQRLHNVLEDAGIKLTSAVSDVLGKSGRAMLEALIAGERDPHTLAELALGRLRGKHAVLIDALTGQFTEHHAFLVRAMLDRIDAATAMHNRLTTQIDQLLKPYRRHIELLASVPGVSEHTAQVILAEIGDDITRFPSAGHLASWAGVCPGNNESAGKHSSGTTRPGDPWLKSVLGQAAISASRGKDTYLAARYRRLMARRGRKRALVAVQHSILIAVWHMLTNNASYCDLGGNYFIERAGKGRATRRLIGQLNHLGYQVTLNPLAAT

SEQ ID NO: 338905 - protein, 407 aa, unidentified
METKNPRCAGIDVHKDSLKVAARVDGQVFVQTFGATSAEIFAMADWLDSLGVKIVAMESTGVYWKPVWNLLEDRFELILANAHHVKSIPGCKTDVKDCNWVAELLEYGLVPRSLVPPRPQRELRDLTRQRTSLNEDRARVVNRVQKTLEDANIKLGSVATDIMGKSGRAILEALIEGKLTVDQMVQLVHKRMEAKKPALRAALEGRVTEHHRFMLRQALDQIDHLDRQIQDFDRRIDQVMSPLEREAVKRLDAVPGLDVRSAQIVLAEIGTDMSRFPSSRHLASWAGLCPGNHESAGKRRSGRTRQGNGYLKATLCQAGWGASRTRRSYFSAQHKRLTTRRGVKRANMAVAHSLLVTCYHLIKTPQDYKDLGPDYFQKTPDPERSAQQMVKRLQKLGYSVKIERVAA

SEQ ID NO: 338906 - protein, 295 aa, unidentified
MATLVGLSLREKGASAHGKYEYIGMDVHKDTVSVAVMNAAGKVVMESILETKAATLLQFIRGPRGTLLVTLEEGTWAAWLYELLKPHVTQVTVCNPRKNALLRWGNKGDRIDAQKLAELLRQGSLSSVYHGEKGLRTLRELSRSYLTITKDLTRVMNRLKALYQSWGIGCSGTQVYAPRHRAEWLSRIKEAGVRSRAEFTYHQLDGLQALRQAVRRDLLAESRKHRATKLLRQIPGIGPIRAALVVALLQTPDRFRTRRQLWAYSGLAIETHGSGEYCYVEGQLRRSQKRWRCVV

SEQ ID NO: 338907 - protein, 336 aa, unidentified
MNTIRDVLGIDVSKKKLDLALLVNGKAKSKVFDNTSAGHRALVAWLRDSKASLPTLHVCMEATGVYYEAVATTLHAEGFKVSVVNPACIKGFGLGENIRNKNDEIDAGLIARYCLALNPEPWTPPPLEQRQLRAWTLRVQSLKDIRQQEENRIEAHMVADLRDVAANVAGHIKWLDAEIEKLQKEIDDHIDRHPGLKNDAALIASIPGLGATTVARILGHLGDIRRFKSAKAFAAFLGVTPRQRTSGTSLKGRTMVSKTGNTSLRAALFMPSMVARRHNPILRQFAERLLANGMAKRAVISAVTHKLTHLIYGVIRTGKPFDAGYLQKNLAIQDGI

SEQ ID NO: 338908 - protein, 315 aa, unidentified
MNPTVAQSVGVDIAKDTLDVAILPAGESFRLANDSEGHRALVKRLARLDIARIVFEATGAYHRLFQQALAKAGLPFVKVNPRRARRFAEAAGKLAKTDRCDALILARMGSALELEPCLPASETALAMKELVGARDALIKDRVAALNRQAVALDPLVKRQIGQRLRQIDRQIKAIDKRLKTLRGADPGLAMRGDIITSIPGFADASANALIVEAPELGRLDNAQAGSLVGLAPIARDSGKTHGRRSIRGGRPRARRALYMPALNAIRFNPEFKAKYQAMIKAGKPPKVAIVAVMRKLFILANALIRDQRKWTPEAP

SEQ ID NO: 338909 - protein, 335 aa, unidentified
MEKKYSMFIGIDVSKNKLDVCLLSTKDSKTNHFIISNNEKGIKKMIQFIKKQKQSLSNCLFCFENTGIYSMPLCFCLAQMEMNYCVVPAYEIKCSKGVRRGKSDKNDSKDIAFYAFTNLHKLQLSKIPQNEIMELKLLFTEREKLIKALKMMGTTSELNGFMPSKIINETLKINAKTITYLKKILKQLESKMLIIIEENEKIKSQINLIKSIPGMGTHTALYLVMTTKCFESFNNWRKLACYAGIAPFEYSSGSSVRAKTKVNHLADKKLKSLLQMCVLTAIKNDPEMKSYYNRKKLEGKNSMLVMNNIRCKLISRAFAVINRGTPFVNTQKFAA

SEQ ID NO: 338910 - protein, 353 aa, unidentified
MRAVFGIDVSKASSEVVILVNGEKGHGYPITKDVIGFNQLLGDLKTVHHPKTTGVYSRRPQAFLDDHGYAYTRLNPLDAKKQLDSLRVRKTDKIDAEKLAQPQFVLNRKTTYVQEEVYQNLRDLSRFYQNLTEDIVCTKNRLHKVLQVTFPELENILSASTGEQYWSLVMAFLFKELVLRLTQSELMAIIFRFTSKRISDKRATYLADKLRELAKQSYCAVKKTSPILEEVRYYAQELLRLSERRQAVLNEMVFLAQPLPEYNILLSIPGIAETTATSLIGELGDIRRFQSANQINAFIGIDLRHYESGNFLAKERISKRGNPYARKILFKCIHNIASASHTKPCHIADFYEK

SEQ ID NO: 338911 - protein, 404 aa, unidentified
MNNVAGIDVSKGKSMVSVLRPFGEVVAKPFSVGHTGSELKELADYLKSLDGETRVVMEHTGRYYEPVARFLHEEGIFVSAVNPKLIKDYGNNTLRKVKTDKADARRIARYGLDNWVELRQHTPMDTIRMQLKTLNRQQGLYSKTKTMMKNNLIALLDQTYPGVNSLFDSPVREDGRQKWVDFATAFWHVDCVRSMSLTAFTERYRKWCGHHGYNFSQGKALEIHAGAQDLIAMLPKDALTKTMVRQAIDALNAVSASLERLKAEMRTLAAQLPEYPVVMAMRGVGDSLGPQLMAELGDVTRFTHRNAITAYAGVDPGADQSGTHEAKSSRTSKSGPPELRKALFLVMDCLLKTMPADDPVYCFMDKKRAEGKPYLVYMTAGANKFLRIYYGRVKEYLALQENAD

SEQ ID NO: 338912 - protein, 370 aa, unidentified
MGKYSEVYVGFDTAKLKHAVAIAEGGRRGEIRFLGEIANQPATIERLIKKLSGRYSRLQVCFEAGPTGYGLYRQVRELGHECLVVAPSLIPRRSGDRVKTNRRDAMTLARLFRAGELTGVWVPDSIHEAVRDLVRGRLAAADDLRRKRQQLLSFLLRHGRIFTGGDHWTRAHRRWLADQSFEHPAQQIVFQDGAAAIEDALERLRRLEDQLVSIVPSWSMAPVVAAYQAMRGVSFLVAVTFAAEIGDVRRFDTPRQLMSFLGLVPAERSTGDKVRRTGLTLAGNRRTRRVLVEAAWSYRHPARVSNTQRPRLEALPKAVRDIAWKAQVRLCGRYRRLSAAGKRQPVIIAAIAREMAAFLWAIGRQVTPAS

SEQ ID NO: 338913 - protein, 441 aa, unidentified
MSHGRALSRGDRRRNERLARLRSDVRRDFAVVAVDLASAKQAAVVTDHDSMVLGRRMFTGNTWVIDDILDWAEPIAAKAGYAGVVVGCEPTGHRWKPLLDRSRARGLELVCVNPMLVHRGREEEDFTRDRSDFKDATIIAKRVAELRCYVPYVMEGHWCRLRHLGARRADQLVAVGSARQRLRDLLECAWPAVLSAAADPLDALTWRAAMAVSTDPGRIVAMGFGAFADAVREQLPRWGGTRRNLRILRAIFDAAHAPGGVETERAAACERAAYALEDWHYALDQVTDVEHRMVEVLDALDLYELVTTITGLSVVGAAAILAETGDPARFDCARTWAKHAGLCPRANESGNFHGSTNVSRRGRPGLRLAAWRALWGALRHNPVYAARYTHLTTRADNPLCDGQARAAIAAALLRQLFVVVTQRVAWDPAIAAGTGVVPQAA

SEQ ID NO: 338914 - protein, 327 aa, unidentified
MSIITLGIDISKAKYDVALLQDEQYLEGVFENNAKGHRSLAKWLKKHRAQSAHVCIEATGRYGDALAASLYERGYAVSIVNPARITAYGASRLMRNKTDGEDAKNIAHFCATQKPRLWSPPPPEVQELQALTRRLENLKADRTRELNRKKSGIISQSVLQNIEEHIAFLDEQIAVVEKQIFGLIKEHPDLRRKHDLLASIKGVGNITAANFLAEIPDISRFDSAPELAAYAGLTPKIHKSGSSVNRRGRLSKTGNSHFRTAFYMPALSAIRYNPIIHALAQRLEERGKQPMTIIGAAMRKLVHLAYGVLKTGLPFDPNYLVNVQETA

SEQ ID NO: 338915 - protein, 367 aa, unidentified
MIVNEVAKNVEKIISIDTAKNSFQVLVVNQKTGKKKNTKVQRSKFVEYILKQGPCLIFMESCSASQHWARLFESFGFTVKLIAAQHVKAFLRNRRVKNDERDAEAIYKCGIQPDTKFVRIKTVEEQTVALLHTLRKAAVSQRVELSNRIRGILAEFGIVVARGRGSFNSEIEALFNECEKIHDVNLRVAISSLFEDYHRLEQREKELSEKIEALNKDNELVKIALTCPGVGSLTASAIVAEVGDASQFRNGREMAAWNGVVPSQHSTGGRSTLGGITKTGNRYLRTLLAQCACAVIQNASRHLEQGKDTHLDRFALRLKLNGKPVKKIMIAIANKIIRILWAMLTQRKTFENKANEISDTSAELQLA

SEQ ID NO: 338916 - protein, 397 aa, unidentified
MYIVGIDIAKRKHEAAVIDGEGTVIIKPFSFTNNCSGYNRLLAMLAKAKLPLDEVSFAMEATGHYWLALFTRLQKEGFRVQVINPVQTNSIRSFYIRQAKTDPRDALLIAEVIRFGHFSESTLHPENIYELRELCRGRHAIVSMQADVKRKVVALLDQVFPEYETAFTNMFSDTSMAILQTCPTPKELSEIPLEELCHLIEVSSHKRFRMAKARELQELARNSFGFAMAGDVFSTMIRLYAKHLDFLKQQVREMDRKIAEIMDTLDTPITTITGIGPTLGAYILSEIGDISRFSSAAKLAAYAGIDPTMRQSGEYNGVRNRMSKRGSPYLRHAIWLAASSAVLHDPALKLYFQKKRDEGKPYMASVGHACRKMVSIIYAVMRDNKAYTPCIPNEISA

SEQ ID NO: 338917 - protein, 347 aa, unidentified
MSISMIGLDTAKSVFQIHGVNKTGKVEIKRKLRRSELIAFFEKQESCTVVMEACGAAHHWARMLTGLGHTVKLIAAEAVKPFVKKGKKNDAADAAAICEAASRPDAKFVPVKTVQQQGILALHTARSLLVKQQTMLANAMRGLATEFGVIVPKGIRKLDELMTLVDADDTISKQAKQAITGLHDYCNDLSEGIETFEAEIVTHARTDETARRLATIPGIGPITASLVAATVVDIGLFKTARQFAAWLGLVPRQNSTGGKTRLGRITKAGNQEIRRLLVLGATSMVHRADGWNSATGAWLRTILERRPVRLVTVALANKMARIAWAVMTRKEVYRPKEGVAAAAQATA

SEQ ID NO: 338918 - protein, 360 aa, unidentified
MKIVGCDFHPSWQQIAVFDPETGEITEHKLVNGDGEAERFYRELEAPALVGIEACGNRQWFIELVERLGHMMWVGDAAKIRASYVRRQKTDRRDAGHILKLLMESRFPRLWTPTAEQRDLRQLLIHRHKLVEIRTRVKNGLQHLALNRGFPKQRSRLCGVRGRAYMEKLPLTGWTARRREDLLKLLAELDRHLGELDEAVERAAAEHPQARLLMTQPGVGPITSLAFVLTIGDVSRFEHSNQVSSYLGLIPCEHSSGGRQRLGSISKQGNRFMRQLLVEAAQSVTRLDEGFRKQYQARCHHKAKGVAKVAAARKLAVRLYWMLRQNVGYPEIAHIESSSRVPLTGGSHVATLNEPSRTQQ

SEQ ID NO: 338919 - protein, 453 aa, unidentified
MQEKSKRSVKQVLQKLKMEIRSSQNTLLIAVDIGKIRHCACFVSSAGKVLRRKFFFTNTIDGFNNLIRQSKFYQNKEKLPKTLFGMEPSGYYWIHLYEHLETLGKRIVTVSPLAVNRNRETINVSKDKSDPKDAYNIADLMRQGKFYFPIYRDKEIRELKRFMQIYYRLITQKASLRCRLRGVIGYIFPELERYFRDITAKSILAILQTYPFPSQIKKLGKSRFVSFLKRKNSRLSRKRTEEIYELASSSVGIRGEEKAVLFEIRLLLDELRGIEQNIAKINTNVQAIVEDREDYQLLLTIAGIGPITASSIIAQIGDIANFSSGKQLIKLAGLDLYGSESGISVHSLRHISKRGRKVLRTVLYQATIACIRLNNHLKACYLKILANQPNKKKVKPKAIVAIACKLLRIIYRMLTEKKPFDSNYDEKLKRRASFKETRIISIEKIDLLEPVIC

SEQ ID NO: 338920 - protein, 349 aa, unidentified
MTMVGGFDVHRQQITFDYVDNDGLVRWGQIRPATRSTLRSWLAEHCADGDGEFALEGCTGWRYVSEELAAAGVGVHLGDPAEIATLRGPKKRAKTDRADARLLRTLLLEGRFPESWIPPVHVLETRTLGRLYCALMDERRAWQQRIHAQLFHQGCPPVKGLLSAAGRDALAGAELSAAGRQYVDTALRRIDELTIEIDPVRMQLINFARRQVGCQALQARQYGVGWLCAAIMWAEIGDARRFHSSDQLVRFAGMDVTVYSSAGKRSPGHLSRQGSPELRWATFEAAKCAARRGAPDYAYSQRLAARPGSGKNPTLAVERKILRRSYHTLRELGDAALAPPVPEAKGVAA

SEQ ID NO: 338921 - protein, 348 aa, unidentified
MMIIGCDYHPSWQQICWLDTVTGETGEKKLEHASGEAEKFYRGLPGPALVGMESTGNCQWFVEMAAALGHDVWIGDAAKIRAAEVRQQKHDRRDAALILKLLLEGRFPRIWTPSGEEKDLRQLLIHRYKLVRIRAQVKTELQHLAMNQGITKKRKLWSKAGEKVLRELPLKPWASRRREDLFKVREMLHGQIDLLDQAVVEAAEKNEKARQLMTQPGVGPITSMAFVLTMGDVSRFQRGKQVASYLGLIPREYSSGGHRRYGSISKQGNRFMRMLLVEAAQGAVRCDPGMRSEYLHRCHRKAKGVAKVAAARKLAIRLYWMLRTNTGYPEVVRVESSSRVPVVVRHGG

SEQ ID NO: 338922 - protein, 412 aa, unidentified
MIKREKIELVKGSDIYAGIDVASDIHRVRFIDNLGQEVIKGISFSNDREGFKELEEHMKKFGIDHNIIFGLEPTGDYWKPIGYYLRSKGYKVVLVNPYHIKRTKEIIDNSQQKDDRKDSYLIADLVKQGKYFFPIIPEGIYGEMRELSISWKRTKQQITRLKCYLSNFLAKYFPEYKSIFSDILGKSSFYILSHYPLPEDIKRIGKKRLTKIIKRISKGKIREEKIDRLYERARDTVGIKEGREAAKMFLKEVLKELERLMGRRKKIKEKMKELLKISGYGDYLLSIKGVGVVSACLFLGDIGDPRRYKRASQIEKLAGYNLVEESSGKKKGEKQISKRGRKTLRYVGYLVANVAIAKNKEIRELYRYKVDVLKKNRIKVMVGIAAKMLRIMFAVCKNKEYYNSEKVRANFI

SEQ ID NO: 338923 - protein, 407 aa, unidentified
MLFVGDDWAEDHHDVELMNAAGRRLATARLAEGVAGIERLHAMIAEYAGEDAAAEVAIGIETDRGPWVSALAGAGYAVYAVNPLQASRYRERHAVSGAKSDKADAHTLADMVRTDAHQLRPVAADSSRAEAVKVVARAHKTLIWERTRHQLRLRHGLREYFPAALEAFADLGAPDALELLAKAPDPASAAKLNRNQIRAALKHARRRDIDTKTTLIQAALRGEQLGRDAVITSAYAAATRSIVAVLGALNEQIAALQGQVEQHFGQHPDAEIILSQPGMGPILGARVLAEFGDAPGRYADAKARKNYAGTSPITRQSGKRKVALARFVHNDRLIDALITQAFCALRASPGARAYYDKQRARGLDHHAALRQLANRLVGILHGCLKTRTHYDESTAWSHHNQHEQPAA

SEQ ID NO: 338924 - protein, 420 aa, unidentified
MNTFRGEAFGVLVGIDWADTKHDVCLQAAGTTHRVFEQFSHNPADIEVWVQSLRTRFSGPIAIAIELSKGPIVYALQKYDDIVIYPINPATLAKYRVTFTPSRAKDDPTDAELALDLLLTHPGHFKPLNPQSVKMRTLTSLVEQRRFLVGDRVRLTNRIRNTLKQYYPQALVWFDRIDTPMFCDFIERWPTLAQVKRARKSTLTKFFRDRNLRSAKVLESRIESIREATPLTKDEAVIIPHRLQALTLVDLLRVTLSSIKRFDKEIAELAPQHPDYKLFSTLPGAGPSLAPRLLVAFGEQRDRYKSAAEVQKYSGIAPVTERSGKKSWVHWRWQCPTFQRQTFVEWAGQTVNKSYWAGAYYRQQRDKGCAHQAALRSLAFKWIRILYRCWETRTPYDEAVYLKALERRGSPLLKQAGAPN

SEQ ID NO: 338925 - protein, 365 aa, unidentified
MSNGYYTIIGMDVSDRKTQVCVMAKEGRSINIVMETTIPTTNEGLSRFLSAQDKSVPLAFETGTHCRWMHELATNLGFKVYLANPYRLKVITSSKTKNDTNDARLLARIALADPELLHPVKLRGAEYQKMINLHEMRNLLVKQRSGIIVQMRAIAKSMGFRLAKGSAAQFHKLDAKSWPKEFRDIAWPMVKNLTQLAITIRTYEKLIRELAGTPAFKAKVDRLMEIHGVGIMVATGFIATIGGDVDKFEKPRDVGPWLGLVPKQAQSGDVDRQCHITKAGSPFMRRLLVESAQRIMCECMADTDLKAKGMRMCVRGAKIAKKKAITAVARSLAVLMVAMLKRPDAPYVPLSERGKRDLLAARACA

SEQ ID NO: 338926 - protein, 353 aa, unidentified
MTDQRNGVVAGVDAHLDEHHVAVLDAQGRLLETAAFPTTGEGYARLIGWLRGHGPIDRVGVESSGAYAAGLVRALLAHGIRVVEVNQPHPHARQRRGKSDPLDAELAARAALSRTASALPKQTSGIVEAIRQLSVARNGALKARTAARQQLDSLIITAPEQLRGKLRQARTLKARTRLCLQLRPDSNRLHQPAEAAKLALRSLGRRIRDLEHELSELDRQLEQLVHAAAPRTSQLFALGTQSTSQLLVTAGQNIDRLRGEASFAKICAAAPIQASSGRTSRHRLDYGGDRQANRALHMIAVCRLRHCQRTQAYAARRKAEGLNRREILRCLKRYIARETYHTLRADLEALNST

SEQ ID NO: 338927 - protein, 446 aa, unidentified
MSKGAKKSKKGNVSMPLVHVNAAGIDIGDSLHVVAVPSDRDPVKVRRFGAFTQDLENIANWLEECRIDTVAMESTGVYWKNLFAVLIERGIDVYLVNAKHTRNITGKKDDESDAEWIQKLHSCGLLKSCFLPDDRTETLRTLVRHRRSLTQDSSRYVLRMQKALELMNIKIHTVIADITGKTGIAILKAIIGGERNAKNFLPLIDNRIKAKPETILKSLQGHWREEHLFLLTQCYNLYQHMQLQIELCEREIEKVLQLMANVKDKEVPQQGVGKKSKSKNQPRFNTVSYLKGIHKVDVTQIFGISEISALEILSETGSDLSKWATENRFVSWLNLCPNNKITGGKLISSQLLKKKPNAACQAFRMAANSLKQSQHWLGDYFRRMRSKGGQKYAIVATARKLAIIYYKMVRYKESFTPLNLDKYREKYRLARIKHLEKVLHQLKHAA

SEQ ID NO: 338928 - protein, 361 aa, unidentified
MNATTAAIDLAKNVFQVVLADANYRVLEQHRLTRAQFERFFDNRKVSRIVMEACGSAHHWARVFGARGIEVILLPAMYVRAYVRRSKTDAADALALLEALRCADIVAVKVKSVEQQSLQALHRTRSLWMGTRTSRINALRGFCRELGLHVPIGARTGMEAIGRAVADEQSPITPLLRPIMLQLLDEIRLLETRVAQLERQLAQLARESHACKLLMSIPGIGLLTATAILAATAGSVAHFKSARHFASWFGLTPKENSSGTLRRMGRISKMGDRYLRMLLTHGARSVLRAAKVAQMKGIELIGLRHWALALQARSNHNKSACALANKMARICYAVLRDQTPFGQPAARLAKKMQRQSFELAY

SEQ ID NO: 338929 - protein, 430 aa, unidentified
MSVDRSGGHEPLFAAFVGIDWADQKHVWSLQTADSQKRESGELEHAPEAVEVWVTQICQRFAQGPIAVALEQSRGALVFMLSKYERLHLFPVPSTMAGNMREALYPSGAKDDPRDADLLLDLLLKHRDKLRRLSPDTEATRRVQNLVEERRKLVDEKTEQINRLTSHLKIYFPQMLDWFDRLDREAACALLERWPTLEELQKVPPVKVRAFLCKHHCRDQGVIERRIVGIRQAVPAIRDRAVIEAKSAVVQVIAQLIRILVQGIGKLDRKIEEETAAHPDFFIFDSLPGAGPALAPRLLSAFGSQRAGYGSAQEVQAYSGIAPVIERSGKKKWVHFRWAAPKFLRQSFHEWAGRSIAQSQWARAYYEQQRQRGKGHHAAVRALAFKWIRVAFRCWKNRVAYDESMYLATLARRASLQSGSTIPLSAAKTL

SEQ ID NO: 338930 - protein, 337 aa, unidentified
MTLYCAIDLHSTNNVPVVIDENDKILFQKRLPNDLTIVHSALAPYQSELHGVAVESTFNWYWLVDGLIDHGYRPVLVNTSAVKQYEGIKHTNDHSDAFHLAHLMRLDILPTGYIYPREERAVRDLMRKRLQLVRHRVTHMLSAQNQLWRSTGVNTTTKLIKQADFSLLNLVEDRHIQMAIKSNLVIIKALNQQIDLLEKTVKRQAGLKPEFQSLLTMDGVGDILGLTIALEIGDIRRFPRVGNFSSYCRCVDSSRLSNGKKKGVNNRKNGNKYLSWAFIEAAHSIIRHNKTAHRFYQRKRAQKNGALATKALAHKLARAAYYMIRDQEPFKLDLLFR

SEQ ID NO: 338931 - protein, 312 aa, unidentified
MADMVRLAGIDVSKETLDVYVVPSGESRTVRYDRRGLGELRGWLLDLGVAVAAVEASGGYERKVSDVLEGAGLVIHRLNPLRVRRFAELRGRLAKTDRLDARTIAEFSRAYPQDHQLARDPRRDHLAEHLLVRRHTQDAIIDCINQLEHLRDSRLRRLVTARKAALERTLANLDQRLTTLLAEHDDLVALSDQLRSMPSVGPVVATTLIALLPELGALTRRQIAALVGVAPFDRSSGRQIGAKSIQAGRVLVRNVLYMAAMVAIRRNPDIKAFAKRLAAKPGKVRLVACMRKLLVTLNAMVRDGAHWQPRIV

SEQ ID NO: 338932 - protein, 341 aa, unidentified
MENCGIDLHQKSSQVTVVDEEGEVLERASIPTTRAGLERWFGRRERMRILVEASGSSPWVVRVLLELGHDVDVIDPRRVRLIAQSTLKTDRIDADILAELARLRTKLRTLVWQRSETTQRQRGHLRVRRALVGARAAFIVTVRGLLRSFGVRVASCRSDRFAARCQATAIPPELAEVMTPLLDAIRDLDARIASMDAVVKQVGQGYPAVASLQDIPGVGPVVALAYVLSIEDPGRFRRSRDVPGYLGLRPTLRASAATVRQGHITKEGDADVRRLLVQAAHAHLRSHVDTALKSWAETLIPRIGKRKAIIALARKLAVLMHRLWITGEVYQPFPNDVSKAA

SEQ ID NO: 338933 - protein, 354 aa, unidentified
MRVIIGIDPHKASHTAVAIGCDEQQLAEIRVRATCQQTAKLLAWAEPLGERTWAVESAGGLGYLLSQQLVEAGEHVLDVPATLASRVRVLGTGRSNKNDPNDALAVAIAALRSPGLRSVEPANHTEVLRLLAKRNHEIGRLRNIVVSRLHAALANLSPGGIAKELNASDAVRLLGDFNPKTAVEQTRYDLALELLDDVRRLDVQLKESHKRIKTAVQASGTTLTELYGVGPILACELIGYTGDVRRFTTRDKFASYAGVAPIELSSGGRIVHRLSRRGNRQLNHAIHMVAICQIRQTNSEGRAYFSGRWPRARPSGRRSARSSDTSPTPSIASSSSTPTSRGPGRTSGNDSWPA

SEQ ID NO: 338934 - protein, 466 aa, unidentified
MAVACRDVEAATLARDGSPPITRTTFPTCRAHYPGGSSGCACRLLPRSCSLPQMAGGSASALSLSRCYGASGEDNGTIVAPMQKLNDLSRSLTPLNPDGTLIAVIEMSQSSWLVAGIVPGIERHPLKKLEPNEGELLRLLMRWRAEATKMGCTITRIAVAYEAGRDGFWLARWLRARDIETYVIHPTSVAVSREHRRAKTDRLDTGLLKRVFIGWLRGEPDHCHMAAIPTLAEEDAKRPNREREGIVRERTRIVNRMKSCLARFGVRNFKPTLRKAPERLATLVTPEGVPLPPNTLLELRRDMARLRFVMDQIKEVEEARAQRLEQAPQEKTHAMVRLLARVIGVGIETADMLVHEILSRSLRDRRAVARYAGLTGAPDESGSKRQEKGLAKAGNARVRRGMIQLAWRFLLFQKDSALAQWYRTRTERGGKKRKTMIVALARKLLIALWRLVTTGEVPAGVVLRAA

SEQ ID NO: 338935 - protein, 350 aa, unidentified
MEYVIGIDVHRKFIQVCLLDAEGQELINDRWDLGNPDGIVALFSSVPPETEIAMEGSFGWMWLTDLLQQMGFSVHLADCKRVRLIAETRLHTDKVDARTLAQLLRTHFLPEAYLPPRSLQQKRMLLRHREGLLKVRTSVKNRVHALLVRYNLHPAVSDIFGRGGMQWLRALELEAPARGMLDDHLEHLEFLNQQIRRVERRLNAALGADERVVWLLSLAGVGRLTAYFILAEIGEIGRFSRPAKLVSYSGLCPSTHQSASKVFHGRTAGNGRRLLKWALVEAAHTAVRRDPYFASIFHRLAKRKGKGKAYVAVARKMAIIIWHMLNEERAYRVRGKETQVGSAVAMTVRA

SEQ ID NO: 338936 - protein, 426 aa, unidentified
MKCKQNQRILQVSETVLIIGIDVASEIHYARAFDNRGIEQANVLRFTNDLEGFKAFTKWADAIRLKAGKQDIIVGLEPTGHYWFNLAQYSKGHSMKIVLVNPFAVKRSKELDDNNPSKNDRKDPKTIAMLVKDGRYMEPYIPEGVYAELRTAMNTRWQIVKNLTSIKNQINRWLSIYFPEFLRVFADWEGVAALIALRDFPTPAQVVKKGAEGIVERWKEDKIRAVGKKRADRLAEAAQSSTGMRDGQQAAVMEIKLLLEDYDRKSKQYELVMELVEKLVEQIPGVNGLLKIKGLGIVTVAGFLAEVGDISRFSHPKQIQKFAGLNLRENSSGKHRGKTVISKRGRKRLRSILFRAVMPLVSKNDEFRAIHGYYTTRQNNPLKKIQSLILLCCKLIRVIYAILAKGIHYEAEKLLFDMKKTELLAA

SEQ ID NO: 338937 - protein, 320 aa, unidentified
MSKIILGIDISKKHFDVSRYISDKHNNKKFINNNSGFKSLISWINQYTSNNIHICLEATGVYGEALAEFMYKHGYKVSVVNPSCIKSYAKSKLSRHKTDKIDAQLIAEYCDKYNPNLWKPLPNEIKELRELSRCIDSLKIQYNQVINQLERKSDKSKLVSKVWEDLKLKIKFQINDLRQKVDSLLIKSSYLNQAYKNLQTIPGIAKTSAITLLAEIPDINTFNNAKQLAAYAGLSPSQKFSGSSVKGKSKLSKIGAKRLRKALFFPAIVAKKYNPYISKFCKVLENKGKHVFSIIGAAMRKLLHIVFVILKNNTTFNYNL

SEQ ID NO: 338938 - protein, 410 aa, unidentified
MKVAGIDVHKKVLMVVVVDASMPEEKPARRRFVTMPSELRRLLTWLREQEVEQAVMESTAQYWRSVWLELEPHMRLHLAQAFSNRAPRGRKHDFKDAERLVRRLIANELILSFVPSGEQRIWRSMTRMKLQLTRDRVRLQNQIECLLEEMRIKLSIVVSDLLGASGLRILHALANGETDPRKLAQLGGERLQCTEEQLVDALTGRAQPVHGAMLALQLQRLQLIDQQMERLNSMIAAAMKPQQDAVIRLAEVPGLGVDSAQQIIAEVGAQASTFASAAELTSWVGTCPGKDESAEQNHSSRSAKGNKYLRRVLNQAAHAAVCKKGSHFQALFRRLLPRLGYKSAIWAVAHRLCRLVWKILHEGVRFIEQGIEVGPREKKKRAQMLARALRKLGYDVTITPINQLAPKPVV

SEQ ID NO: 338939 - protein, 316 aa, unidentified
MAEEWYVGIDVSKAELVVAVRPSGERMTLANDRAGIKRLVGRLGEIKPQLVVVEATGGLQRQVVAGLWMAGIAVAAVNPSWVRNFAKGRGVRAKTDRKDAELLALFAERERPEARPPADAETQALQELVMRREQLLEMSVAEKQRLSRASGTMRKELRHHIAYLERRIKELEQDIDKTVRRSDAWRRKSEIVRSVPGFGKGFCAMVLAKVPELGTLNRKQIGALVGVAPMPDDSGSRHGRRVIAGGRFEVRNKLYMCAMVAARTNPVFKEFYQRLVARGKPKKLALAAVMRKLIVTLNAMLKPDSLWRPPCPDLNV

SEQ ID NO: 338940 - protein, 439 aa, unidentified
MTTPSLPVLDPSAAAIDVGSEQLHVSVAGGPPKVFGTMTGQLHEMRDWLKAQGVRSVAMEATGIYWLCPYEVLEQAGFEVVVVNGKYVKNLPGRKTDMKDCQWQATLHAHGLLKPGFVPPAHIRRLQDYIRVRTDHITLAASHEQHMQKALDRMNVKIHEVISDLTGASGRSVIRAILEGWRNPAALLACCDRQIQDRKAERMLAALEGNWKEEHLFALRQAYELWNFYQDKISECDEAIEKVLKEMAGPEDPTKPTPPTTKRGGVNSPGIFELHSLLYRLCGHKDPTVLPGVADYVLLQLLAETGTDLGQHWKTEKHFTAWLGLAPGSRQSGKRRGNQKRGRNRAGRLFCVIARSVGRSVDKALGGFYRRLKGRRGGLVANLALARKLAELFWRLMVHGITYVEQGLKKYEEKVAQTERRLLQKLARKYNMVLQPKAA

SEQ ID NO: 338941 - protein, 436 aa, unidentified
MRKIRNNAAGIDIGAKMVYVYVEGLAVVSFLTFTEDLLNLKDYLVNNKVETVAMEATGVYWVIIYEILEEAGLDVWLVDGRQTKQVPGRKTDVKDCQWIQQLHSYGLLNRCFVVKADVKELRSYLRLREDHIRTSAMHINHMQKALTEMNIRLKEVIDQIHGRSGMAIIEAILKGERDRAVLVNLCHVSILNKKKDLVYKSLEGKYTEAGLFALRQAYNSHMFCNQQIQQCDEQINTVINRMGESGQGQHKSKARKPIRHHKPDVEQLGSNLLNVFEGKDATTISGITDYTWMQLLSETGHDLSKWPTEKHFTSWLGLAPGQNNSGKKQGKPRKKKGRPAAGQIFRVIAQSLINSKHIAIGAFGRRLRARKGPTIAIKAMARKLAEQYYHTMIDGVEFVEFGIKKYEEQIKQQKVKTVLRLANELNLSISNSQPLN

SEQ ID NO: 338942 - protein, 320 aa, unidentified
MRKALGLDISHKTFDAALLIDGVIKTAKFENGIKGFQKLKDWLNTFNHSDIHICMEATGNYFEDVADYMGKDYKVSVINPLKISDYAKSRFSRTKTDKQDAKLIAEYCSTALPKDLPLRQPVSKAHYRLKRVLALQEQLIESQTAEKNRLSAAKDEFVKQIHHENIAHIKKQLSLVKDEMEKIMQNPELKDVSDGLLTIPSIGKLTAAILTNHLLSGTFKNAGQFVAFAGLSPHQRQSGTSVNAKCGITRLGNRRLRAALFMPAMVAYSRGYFPDFIDRLKQKKKKSKVIITAIMRKLAVIAFNLYKNKTTYQPERYQAV

SEQ ID NO: 338943 - protein, 378 aa, unidentified
MPSESIVHVAIELSVSSWLIAARLPGAEKSRLHRIEGGDTAALLALFAELRSRASAELDGNADVACCFEAGRDGFWLHRLLTAHGVATYVLEPTSILVNRRARWAKTDRLDAEGMLRVLAAWLSGDRQVCSMVRVPTPDQEDAKRTHREREHLVQDKLRIENRIQALLFTQGIRARPSLRSWALDMAELRTGDGRALPPLLRTELNRLRRRLVLILKLIRELETERAEALAAAADDAMVRKITALQCIRGIGSNFAAVLVREVLYRSFANRRQLASYVGITPMPYQSGGMDRDRSISRAGNPRARTSLIQLAWLWLRYQPGSALATWFRERVGTLQGRTRRIAIVAMARRLLIALWRYVETGVLPEGVEIRAETTPIT

SEQ ID NO: 338944 - protein, 349 aa, unidentified
MLIFAMDLGSSKSAICTLDTTTGAVRHSTCHTQAARIRTLLQRQRPNLVVVEISPLAAMVHDVAVSLGIAIQVADTTQDAWRWRNVKRKTDRDDALKLARLAALGQINPVHIPSPQMRQWRELVEYRQTLVAERTRVKNRIRQVALVHADHRSRPGKYGWSQTARAALRELARPLAECAADELWRGLLAAELDRLTDLDARLAALEQRLDRLGRADARVAIVQTLPGCGARVAEAVVTTLDRPERFGHRRQVGAYAGLTPRRFQSGQMDRHGRISKRGRPLLRQMLNQAAWQAIRRDGYFRALFLRVSRGVKGRRKIAIVAVMRQLLVVAWAMLRDRQPYRPARLARAA

SEQ ID NO: 338945 - protein, 352 aa, unidentified
MEIIGLDLHKRETQLCRRQSDGRIVDERIPTSRARFTQTFGALAPATILLEASTESEWVAAHLEQLGHTVIVADPNFAPMYATRSRRIKTDKRDARALMQACALGAYRPAYRLSPARVHARAALAVRDTLVRTRARVITLLKTLVRREGLRVPTGTSRTVAARVAALDLGATAPALGAELAPLLALLPALNTQIAALDATLAAIALDDPVVARLATAPGVGVVTAVAVAATLDDITRFPSAHAVEAYLGLVPSEYSSADRRHLGHITKAGNARARWLLVEAGWRILRSKQPETAALRAWGAAIAARRGNRIAAVAVARRLAGVLYAMWRDGVPYDAAKLARGQRGAPRSPTA

SEQ ID NO: 338946 - protein, 353 aa, unidentified
MKILALDLGKYKTVGCEYQAEHGRHKFHTAASTAQALHDLLVEVEPERVVIEICSMAGWVSDLVASLEIELQVANPSADAWRWRKVKKKNDRQDALKLAQLSAVNQLGTVHLPERETRQWRALIAYRQQLVRRRTKIKNHIRDLLLREGELLPRGAKCWSREGVAALAAKARPLGEVGMNELWRGELGVELTQLGEMQAQVELVEEKLNQLGAADERVKRLRTAPGVGPRLAEAVVALFADPKRFKTVGQVSAYIGMVPKQLDSGETERSGRITRQGNRLVRSLLVEVAWAGLRHSPWARATYERISGGKKSRKKIAIVAVGRKLLVRCWAMLRDEQPWRGETKPKPALPATA

SEQ ID NO: 338947 - protein, 326 aa, unidentified
MVETETGEHTEKRLTPSEAVQFYSQLKGQVLVGMEGCGNTLWFERLLAELGHELWLGDAGKIRALEVRKQKTDRRDAELLLRLLEEGRFPRLWVPSLEQRDLRQLLLHRHKLVGMRRGVKNQLQHLALNQGVQRKAKLWSRAGRKLLAELPLSGWTARRREELLRLLDDLEQKIGELDVAVEEAAEKDAVAQLLKTHPGVGPVTALAFSLTLGQIERFAHSRQVVSYLGLNPSEHSSGGRQRLGSISKQGNPMLRSLLVEAGQSAARLVPELKRAYQRLKHRKHSAVAKVMVARKLAVRLYWMWRTQQPYGATRMQGSPTGPVAER

SEQ ID NO: 338948 - protein, 393 aa, unidentified
MRKPKKQKKPLNDLSRSLTPFDPNSTLTVVVELSKKNWLVAGIIPGVERQPLKKLPTDESELFKLLERWRAEAERAGHKITRIAVAFEAGRDGFWLARWLRARGIEAHVIHAASVAVSREHRRAKTDRLDTQLLMRAFLGWLRGERDYCKMCAIPTFQEEDAKRPHRERETLVGEHTTIINRIKSTLARLGIRSFDPQLEKAPERLQQLRTPEGEPIPPNTLAELSRDLARKQFVAEQIQQIEKARLEQLKLAPKTGPNLMVLLLMRVIGIGIETADMLVKEILSRNLRDRRAVARYGALTGSPDKSGNSSREKGLSRSGNARVRRGMIQLAWRFLRFQKESALAKWFEARTKNARTSRKKMIVALARKLLIALWHLVRDGVVPEGVALRPAH

SEQ ID NO: 338949 - protein, 360 aa, unidentified
MAIVAQTHPFVIGVDTHARNHAVSILACPHGEILDEAEFPATSAGLARAVSWAGRRTGGDLGALWVIEGTGTYGARLARAAADAAYAVVEAPRMNARANRGIGKSDPLDARRIAGAALPLHETQLRQPRADDGIRAAVRVLLASRDHMSTERTATINALTALLRVSDLGVDARRPLTAGQITTIAAWRSRDEALATATARWETIRLAKRVAALDNDLKEITKRITDLVHQSPARTLLEQPGIGPVTAAVALTTWSHLGRIRSEAAFASLAGVNPIPASSGNTVRHRINRGGDRRLNRALHMAVVTRMRMDPATRAYVERRTAEGRTLREIRRCLKRYLARQIYRYLNSAAATEERQPTTT

SEQ ID NO: 338950 - protein, 454 aa, unidentified
MPKQKRTRNARTLPVARVLEPNAAGIDIAATEVYVAVPTGRDPQPVRRFSTFTDDLHRLADWLQACRVQSVAMESTGVFWIPLFQILEDHGFRVCLVNARHVKNVPGRKTDVSDCQWLQYLHSVGLLRASHRPTQTICAVRSIWRHRESLVQMAAVHIQHMQKALDQMNLQLHHVISDITGTTGLAIISAVLDGERNPENLATLRDPRIVASRETIARALVGDYRAEHLFTLRQSLQAYRQYQQWIAACDSEIERQLQVLPSNLPDDPKPLSKPRDHHKPRRNEPRFDLRSQLYRVFVDLTAVPGVSSLTAHTLLTEVGPDLRRFPNAAAFASWLGLCPDNRISGGRVLSVVTRKVKNRLTIALRMAAQSLHRSQSYLGQYFRRMRIRLGTPPAITAAAHKLARVLYHLITTRQPYEESTFAAMEERARQRQLLRLTKQAARFGFQLVPGRSVP

SEQ ID NO: 338951 - protein, 316 aa, unidentified
MSQFSVFVGIDVSKDHLDVHVLPEGQAWRVANDATGCAELSERLSGLTGSVLVVMEATNVFWRLAATKLASAGLSAAVVNPRQVRDFAKATGQLAKTDAIDAQMLARFAEAIKPPVRALPSEQCQVAGELLARRAQLMGMLVAEKNRLSTARAAKVRKDISATIAFLEKRLAALDEEIDQWLKSTPIDQSRVNLLKSFVGIGERTAKSLLISLPELGSLTSKQIGALAGLAPFARDSGHKRGQRHIGGGRSIVRAALYMPAITAIRCNAVIRALYERLIDAGKHHYVAITACMRKMLIILNAMLKSNQPWKDPQKV

SEQ ID NO: 338952 - protein, 383 aa, unidentified
MQPTQHNDCMPAEVVLAVSLELSGASWKIALHDGKRDKPAIYTVSEEAPASRLEHAVAVIEAVKQKWSLPEQAPVTVIYEAGQDGFWISRALSARGYQVLVVDPASIPVERHARRAKTDRLDAIRLVMCLRAWVRGERGQMRVVQVPSLEAEAQRHLVRDRGELQKEIGQHHDRIRKLLRTVGCWDPVDSKLSSSLQQGLVRCADGSALPALLQARLERECERLVLVEKQFHELEATLMEQLPAPVQQRVTHLMKLKAVGPVGATRLVLELFWRDFHNRRQVGACVGLAPQPYDSGQSQVDQGISKQGNRRVRALLIEMAWFWLRYQPRSALSQWFACRTQGSGPNKRARRIAIVAVARRLAIALWRYLKDGEIPAGANMKAV

SEQ ID NO: 338953 - protein, 385 aa, unidentified
MRNKAFVPRDYDVFGGLDVDKKSISVTFTNHQGFIRSLRMSYSVEQLVNHVRKHFPDQKVAFAYEAGPTGYGLYDGLEAKDYRCLIASPSMIPKAPGQRVKTNRLDSVGLSENLRGGQLKSIHVPSPLYRELRHLTQLRDTFVSDMVAMKQRIKSLLLLEGLEFPPAPAGSQWSFLVRAKLRKLPCSSTVRFKLDELLDSLEFNEKRVVKTTQQIRRFCRNDPELSQCIEHEMSVSGIGWIVASQLLARIGDWRELKNVRQLGGFLGLVPTEHSTGDRTDRGSITHIGDGRLRSKLIQASWSAIRKDAELREFFRSVCQTHPRHLASRVAIVAVARKLSVRISVVLMKQRPYVVREKVHSAPLTQEETSPQGTTRRLAEPGEKNS

SEQ ID NO: 338954 - protein, 349 aa, unidentified
MVILGMDAHKRTHTVVAIDQVGRQLGTKTTGATTTEAHLELVRWADRFGAERRWAAEDCRHLSRRLEADLLAAGEELVRVPPKLMAHARDAARTYGKSDPIDALAVARAALREPGLPLARLDGASRELRLLVDHREDLVRDRTAHINRLRWHLHELDPSWDPKPKCLVRYKHIDVVAARLEDFDGMVARIARDLASRIRELTHAANALEREIEGRMRELAPRLLEVVGVAALTAAKIVAETADVRRFRSKDAYARHNGTAPLPVWSSNRVRHRLSRTGNRQLNASIHRIAVTQKRCHEPAKIYLERRMANGNTKTEALRALKRKLSDVVYRALLADATSSADVVVGEAA

SEQ ID NO: 338955 - protein, 421 aa, unidentified
MRGLRAKRVKTVKEGTLIATVDIGATTNTGYCTTADGRDIKVFKFGNTKEGFEKFWHMIVATQNRFKCNEVIFGYESTGPYAEPLVHYLMGKPVRIVQVNPLHTKRLKEVNDNSPGKTDDKDPKVIADIIRLGRALSIVVPEGDAAYLRRLNNARERHIGERTALLNQLQQLVFLIFPEFKIVVKQMMGKTVRFILKNYTAPDRIGALDKKVFGEEMRKRSMGRLGIKDAELLINAAQQTVGIKEGVAGIVLDIKHIVVQLDVVDSFTAEIGAEMALTLGRIPCSARLLSIKGLGVVSVAGLIGEVGDFSKFRTQSEIIKLAGLDLYEISSGKRKGEKRISKRGRSLIRKILYFAALRMIRKNGIMYDYYERLTGRGMLKMRALVAVMRKLLGIIHAIVRDDRDYVGEYGAPKRRVIKKAA

SEQ ID NO: 338956 - protein, 356 aa, unidentified
MSQKLDTSPAVIGIDIGKNSFHIVGQNQRGAIVLRQKWSRGQLGARLANLPPCRIGMEACVGAHHLSRTLQALGHDARLMPAKYVRPYSKGQKNDYRDAEAIAEAVQRPTMKFVATKTADQLDLQALHRVRERFVGQRTGIINQIRAFMLERGIAVRQGLRFLRAELPGILATRSDALSPRMLRILEDLSADWRRLDARIEGLSSEIEALARQDKGCERLMTVPGIGPIISSAMVAAIGTGDAFSKGRDFGAWLGLVPKQLSTGDRTILGSISKRGNRYLRSLFVQAAWVVLVKIGPKHWDRYGLKSWIEAARKRLHHNVLAIALANKLARIAWAVLQKGRAFECVKTNEAAYRPA

SEQ ID NO: 338957 - protein, 428 aa, unidentified
MKIEDTIRREQFCQIKSEIRGSDQHLVVGIDVAKDKHHAFMGSATGKSLLRKLVFENNLQGFRKLQERSEAIGIQNALSKIVFGMEPTGTYHKPLGAYLIGCGHHVVLVTGKAVKNNRELLDGRWDKNDIKDPANVADLICQGKCLYYDYPSASINQLRELLSLRRRLKKEEHSLRMRIRNNLLAQYFPELDRFYSACETESLAIVRWFLDPAMIACMEFDEFFSLVTRTKRGIAQKLRLEKIHRLAVESVGCPMGPAVEFEAELLVKKLDQVRQQLKKTAELMEDFCMEFSEYSWLLTIPGFGPYIAARVLASISNPWRFDSSNQVIKLAGYDLGANRSGKTSNEAVPVISKRGNSELRYALYQAAHVASTRNPEFIRYFTRMLRGRERERGIKTKMKVKLAAKMLKIAWTLMKKNQGFDPDYLITE

SEQ ID NO: 338958 - protein, 338 aa, unidentified
MYYTGIDLHKFSSYLTTVDSSGAIVKQENLKNVAHNFIQYFSSIPGDHQTTVESTMTWYWLNDLLSSIKIPLVLAHAKYVKAIAYAKVKTDKVDSHTLAQLLRMNFIPVAYKISNDKRTLRDALRARLKIVQRHTSVTNSMHLLLAKYNYDSPTQLTGIPKFQYKQLSEVETLLDEQILDLEKQIYPFLIPNDDIQRLLWIPGIGKMNAFTILLEVDDINRFPDIKNFFSYSRLVPSARNSGGKSKQRSSKDGNKYLKVAFSDAAVHAVQYYPVIRKYHNSLLRKKNNQIAKTIIAKEIASIVYYVLKHKTNYNNIFKGKELEHTKSLQWPRITSPYA

SEQ ID NO: 338959 - protein, 388 aa, unidentified
MPQTPNDLSRSLTALEQTATLVAVVEMSQASWLVAGMIPGLERQPLKKIAPNEAALLSLLQRWQEEAIKICQTIRRITVAYEAGRDGFWLARWLCSRGIEAHVIHPTSVAVSREHKRAKTDRLDTAMLIRVFLGWLRGERGHCGMVAVPTLEEEDAKRPSRERENLVGERTRIINRMKSALVRLGIRGFKPELRRAPQHLEKLRTPENVPIPLRTLEELRRDMARLAMVRAQIEAIEQIRLQRLEQAPQDVAHAMVRMLANIIGVGVETADMLVREILAKELRDRRALARYAGLTGSPNESGSKRREKGLAKSGNARVRRGLIQLAWRFLRFQKDSALAQWYRTRTEGAKGARKTSLIVALARKLLIALWRLVTIGEVPQGIVLRQAA

SEQ ID NO: 338960 - protein, 349 aa, unidentified
MKIIGCDLHARQQSIAMVDTETGEITEKTLSHEGNAMREFYAALEPPVVVGIEATGAMQWFLELLEELGVECRVGHPAKIRAAETRKQKHDRRDARLLLDLLLMKDRFPEIWMPSTEQRDLRTLLRDRHQWVRMRARLQHSLQAMALNHALRRGPALWSAAGQNALQALPLPPYSSQRRTELLRLYVALQKRIQALDKEVEVQARQRPQARRLLTHPGVGAVTALATEVFLGDPNRFDTGNQVASYIGMIPCEHSSGKRQRLGKLSKEGNSLLRYLWTEATMHAVGKDPELKRFYRRKLIQKGMGKARIAAARKLGIRLWIMMRDQIDYEEFCRRGRLRQEGESPCGDA

SEQ ID NO: 338961 - protein, 357 aa, unidentified
MKNSNNISFDNSHFFVGVDTHLKNWKVTVRFNSIELKTFSMNPAPLELVKYLKKNYPGGIYHIVYEAGFCGFWAFRDFRKLDIDCIIVNPADVPTSNKEKVNKNDHIDSRKLARELENGSLKSIYVPDIFHEELRHLMRLRYRIIQNQTRTKNRIKALLHTQGINIPIHFTGNSRWSASFIKWLQNINLNTPAGQFTLENLILQLQQLRENNKNILSQLRLQAKQNNIAPVINALLSVPGVGFITAMTLYTEIIDINRFSNQNQLAAFVGLVPSIRSSDDNIYNNGISFRKNKFLRPIMIEAAWTAIKSDPALTLKYKELTNRMKPKLAIIKIAKKLLKRIRHVWIYQEDYLYSLVA

SEQ ID NO: 338962 - protein, 368 aa, unidentified
MSEVTTYVGMDAHKKDLFLARLIGDERTPVTWHVPNEPQAIRRVVRTLEREAPGPVVICYEAGPCGYALHRQMTTPRVRCQVIAPALIPRKPGDRVKTDRRDARKLAELLRAGLLTEVQPPTVAEEAVRDLCRAREDAREDLQRCQHRLSKWFLRRSLHFSGRHWTRAHRRWIDSHAWSQAAEQMVVDEYVLALDQAEGRLNALDVRLHEMAASEPYREPVSWLRCFRGIDTVTAIMLLAELHDFRRFQAPRALMAYVGLVPSEDSSGERHRRGRITRAGNALVRRLLVEAAWHYQHRAGIGRALAQRRAGQPPQVIAIADNAQHRLCRRFRQLAERHKPGSKIAVAIARELAGFLWAVLQPRPIAAS

SEQ ID NO: 338963 - protein, 423 aa, unidentified
MEVIHPRCGGLDVHKETVVACVRLASGDKVTREVRTFETTTSGLRLLLAWLTELGCTHVAMEATGVYWKPVWNILSDGDFELVLANAAHIKNVPGRKTDVSDAVWIADLLAHGLIRSSFVPEQEIQELRELLRTRKQLGRQQSSHIKRLQKTLESANVKLDSVITDIVGKSGRAMIQALIAGETDPVKLAALADRRIRASAQELREALRGRVTDHHRFLLHLHLQHIEFADAAIQDIDRNVTALITRMDQEVEAGQASFQSLISLLITIPGIDVLAAWIVLSEIGRDMSRFPTAGHLLSWAGLCPRNDESAGKRRSTRLRKGDRWLKTLLVQCAWAARRKKGSYFNAQFYRLTSRRGPKKAACAVAASLLTTIYHMLKDGTQFADLGADHFDRRSKEVRAKRLVVQLAKLGFDARLTPLAQAA

SEQ ID NO: 338964 - protein, 416 aa, unidentified
MTFKVVRFICGGMDVHKNLIVATIGTTDRQTLITEYIQQSFSTFYSDLIRLKEWFISHDCYDVCMESTGKYWIPIYNVLETELNICLTHPKYVKAIKGKKTEKRDSKWICDLYKCDLVKHSFIPKKEIREMREIARYRCKLVYMRSSERNRYQNCLTVSNISLASAVSDPFGKTATNIMKELMQSEVIEDDKILKLIHKNCKDKDKILDSLQGYHIESDQRFKMDTVMNHIEYLDKQIQACEAELIKRAYPLRDYFQHITHIKGISALSAILIVSEIGTDMNQFESDKQLVNWAGLSPANNESANKKKSVRISKAGQYLKPLLVQCALSSIKDKNSYFGIKYCRIKKRRGHKKAIIAIARMMLVCIYHMIITGEEFNPCDYESLTNPKPKKEPIMTVESALQFLKDSNFDFSSIQL

SEQ ID NO: 338965 - protein, 402 aa, unidentified
MNCVGIDVSKGKSMIAVMRPFGEVVVSPFEVRHTANELSELAGLLKSLDGETRVVMESTGNYHAPVAWLLHDAGLYVSVVNAMLVHDYGNNSLRRAKTDKKDAVKLANYGLDHWLTLPRYIPEEDTRLMLKICYRQYQQYSKVQTMLKNNLISLLDTTFPDANRLFTSPPRADGSEKWVDFVATFWHCECVCGRAEKAFTTQYQKWCRKHGYNFSEDKALDIYASACRHFGVIPKTDTAKLLVEQAISQLQTTSSALAALKQEMQSLAASLPEYPVVMGMFGVGPTLGPQLLAEIGDVRRFHSKKALVAFAGIDAPPYQSGQIDVRSRSISKRGSASLRRTLFLVMSVILQCAPIDEPVYQFMDKKRSEGKPYRVYMMASANKFLRIYYASVKAYLESLEHD

SEQ ID NO: 338966 - protein, 418 aa, unidentified
MSRVDSNAVLSVVHHHCCGLDIHKDKVSAALITTHEDGMVEESIYEFGTFTEDLYRLKDWVLEHGCHVVAMESTGVYWRPVHNVLEDSCQVILVNARHVKHLPGRKTDVSDSRWLAGLLRHGLLKGSFIPERHVRQWRDLSRLRKTFVESLADYKRRVHKLLECANIKIDSVASDLFGVTGRNLMDLLVSGEEITLEAVLRCTRGRLKGKEDELFKSIKGFFTEHHRFQLESIRTLIEGVEAQIRRVHERLSSLLSDRREKIHRLMEIPGINDVSAHALLSEIGDTLDQFETAASLALWAGLCPGNNESAGKRHSGRSPVKGGHLKTIMIEVAWGAIKKKGSYYREKYYGLRARKGAKKAIVAVAHRILKAVFHVLKFDRPYQELGEAYLIQLNNKARLHSLHKQAAKLGYTLVPAEV

SEQ ID NO: 338967 - protein, 276 aa, unidentified
MSQRTIPAIARLGIDIGKSTFHAVGLDALGKPVFRSRFTRERLLAFLAHAAPMIVGMEACPGSNWLARKATSYGHQARIVPGQFVEPFVKSNKTDLVDAEAIAEAISRPTMRFAPLKTQAQLDLQALHRVRQRLVSHKTATINQTRAFLLEYGLTIGVGAAHFVRDMPSILSDEENGLTPSMRHLIEELWQEYRSIEARLLQLRREIEAIASADDCAARLTSVPGIGQLTATAITAFVGTGLQFRSGRHLAAWVGLVPREFSTGGKQRLLGISKSV

SEQ ID NO: 338968 - protein, 350 aa, unidentified
MLYLGLDVHSKWMMVKGFNPGTGEWIEIKKVWNNLESFEDAFEDLDGPLYGVLESGTNSWAVFRMLEPYFEQLIVVDPATVWGRTLRRGAKTDRRDASKLAMKLYRGELEPLYVPDPNTQDLRSLTRGKINASRHVTKLINEIGSILRAWGITFECSLLSKNGQKIIEESRAKLPEHSQKVLDRWIEMLKLAQETEDELEKAVAIEAARDETCRILTTIPGVGPLTALVIRAEVGDIGRFGSADAFICYCGLSPTVSQSAESVYYGKLNKACNRYLKYVFVLRAQGMSRSKGDNPLRQTYWRIALKGKNHAKTAVARQFARVAFSMMKKKEPWDASKIADRRTLSAARAA

SEQ ID NO: 338969 - protein, 414 aa, unidentified
MDVVHYRCAGLDVSKRDAKVCVRVQPPTRAKASSTVTTWGAMTNDILALREHLIDQGVTLVVMEATSSYWKPFYYVLEDGPFEVMLVNPRHVKNLPGRKTDVSDAAWLAQLGAHGLVRGSFVPPEPIRQLRDLTRDRSAIVHERSREIQRLEKFLEDAGIKLSSVATDITGVSGRAMLEALVAGERDSDVLADLAKRRLRSKIPQLTQALNGRFNDHHAFLVKVHLDLIDQFTRTIDDVTVQIEVMMEPFRSARELMITIPGISTTVADVIIAETGADMSRFPTAGHLASWAGTCPGSNESAGRVKSTHTRPGNPYLKGALGIAALSAARSNGTYFSAKYRRIASRRGPIKAVVAIEHAMLVDIWNMLATGETYSDPGGDYFTKRRPERAKQRALDQLRDLGYSVTLELDHAIA

SEQ ID NO: 338970 - protein, 343 aa, unidentified
MNSTTIAVDVAKAVFEVAVSEHAGQVRERHRFSRERFRRYLGEQPPATILMEACGSAHYWGREAQTRGHRVVLLPPHAVRPYVVRNKTDRTDAKALLEATRNDEVRPVPVKSETQQALAALHRLRSTWLATRTARINTVRGLLRKFGAVIPIGARHGVPALGLLEAADGGVPGLLRPALAEAAREIRELEGRIRTVEHQLEAVAEQTPVVSRLCSIPGVGLLTATALVAAVGDVQRFPSGRHFASYLGLTPRERSTGQRRQLGAISKRGDAYLRMLLIHGARAVLCHAKTKTAPAPDRLRAWALHLERFRGHNKAAVALANKLARIAWAVWKYDTDFAAAPAA

SEQ ID NO: 338971 - protein, 342 aa, unidentified
MGKTIPVCCGVDVHKKFLIATILTGDYLIPQFKQKHFGTSYRNLLAFRQWLLENDCKDVCMESTGKYWVPVWNVLEGFVRVVIANPKWVSAVKGNKDDKKDSKWIGNLFRMGLVPASYIPGKDIRILREFTRYRSKLVSMRSSEKCRFQNAFTVCNLTLDAVVSDMFGKSATDIENYLLNTDSVDPAHCVSLLQRSLKKKADAVVEAVEGFNMTLEQKERVRIIQGHFADIDKRIGQIDEIVSHLVAEYESQISLLCTVPGIDRRLAITILSEIGTDMSEFGSSRKLCAWAGLAPGSNQSAGKKKSVKITRAGVYLKPALVEAAHAAVKSTEKQPYFSMNAL

SEQ ID NO: 338972 - protein, 341 aa, unidentified
MEEYIGLDVSMKETSVSIRRAGERIWRGKCASDPRTIAELIRKRAPAVKRVVFETGPLSIWFYHSLRTEGLPAICIDARHAKAALDMATNKTDANDADGLAQLAEVGFFRDVRVKGFDSMLTRTLVAARTRLVRITTELSNQIRGVMKTFGLLVPAGKGSTFEKNVRSLLADQDGLASIVLPMLEAWRGIRIRAAELGRQLVRDARQSQACRILMSIPGIGAITATAFSTAIERPDNFKKSRSVGAWIGLTTRRYQSGEVDYDGHISRRGDCHLRGLLYEAAAVILTRSSTDSTLRTWGRKLRERIGFKRAAVAVARKLAVIMHTMLTSGELFNPNAGAAA

SEQ ID NO: 338973 - protein, 345 aa, unidentified
MSNVPVFVGLDYHQDSIQVCVVDQQGEVMLNRSTGNDCQEVSRLVAPLGRVEHVGIEACCGAADFGQKLAEQSGWKVSLGHPGYIAKLKSSPDKSDYSDGRLLADLTRVGYLPRVWLAPQNIRELRQLVNHRQRLADRRRALKLQVGAILREQRVKIGSDRGGRWSKTWVSSVRDNPQLSKHVRWIANDLLDDMTYTDRKIAKTEARLRQATRGDEVVKRLMDQEGVGEVTAWTFRAYIGDFSRFKTAKQLSRYCGLSPCNASSGRKVADAGLIDGCNKLLRMTVVQAAHRLMRTSDRWNKLAASMRSRGKHACVIAGAVGNRWLRKLHHIMRGPAIKQEATSGK

SEQ ID NO: 338974 - protein, 363 aa, unidentified
MKIMTGIDLHSNNAVCGLVDMEGRRILHKKLPCNLAKIVQTLAPYKEKIDTIAVESTFNWYWLVDGLQDHGYKVVLANPAKMEQYDGLKHADDTSDVFFMTEMLRLGILPCGSIYDRKTRPVRDLLRRRMGLVHKRSSLYISFKSLYTRMTGENMSLARLKTLKPEEAAKLFKHPCDQLIAREMIELIERLIQSISLIEKTVLETASEGSYYHKLQSIPGIGKILGLTITMETGDVGRFPDAGNFASYGRCVKSQRFSNNKKKGKNNDKCGNKFLAWAFVEAANFARRFDPQCRRFYDRKKAQVNNILATKALACKLAKAAWHVMNSGQDFDPSLAFGSGKKENTLAEPSVEPGNGSGEKPLD

SEQ ID NO: 338975 - protein, 417 aa, unidentified
MSRTLAEKLAHVKPGTLFVGVDLGLDRNVAVVITDRAELLARFSFPHDQDGYAYFRDRLGRLQQAQPTSGVLVGMEPTNHFWKLLATELEQHQISYRLVNAYTVKKHREGDQLDRSKDDVRDGFTIADLLRTGKYTETRLLQGQYAELRNYATQCERLRREISRHMNLLWAAVGQLFPELSRVFSDLGSMTALAMIRNHAAASVIRALPREVFIARVRADFVGQRLSVSKLRQAHALAGRSVGVQQGVDALQLTVRLQVEALALLQGQWHQVRAAMAGTFRAMPEASYMLSVPGLGVMSAATILAEIGDPSHYRRVGQWIKLAGTQPVPNTSGRKSYSQTPMSHKGRPGLRTALFFAVLHLVQKSDAFAREYARLQQRDKNPLTKMQALGVLMNKLLRILWALVRQKVIYELAPSEA

SEQ ID NO: 338976 - protein, 315 aa, unidentified
MNAGAGVWVGIDISKAHVDVAVFGGTQWREASDAGGLARLTNRLIELHTTLAVLEASGGYEAPVAAALAAAGVPLAIVNPRQVRRFAQALGVLAKTDRLDARVLAHFGALVQPEPRPLADAAQVVLLELVQRRRQLVDMLVAEKQRRRTASGRVGQQIQEHVTWLERRLDEIDRELRDVLRASPVWRDKDDLLQGVPGVGPALSATLLAELPELGTLNRRQIAALVGVAPLARDSGTLHGRRTCWAGRASVRSVLYMATLAATRFNPTIRAIYQRLRTARKPKMVALVACMRKLLVTLNAMLAHRTPWRMETLTP

SEQ ID NO: 338977 - protein, 311 aa, unidentified
MLSQGVTFEQVVSRGCGLDVHKETVVATIKGEGIKETTRTFQTFTSSLKDLQGWLKSVDVTHVAMESTGIYWKPVYSVLEESFEILLVNARHIKNVPGHKTDKKDSAWIAKLLLSGLLKGSFIPPAEIRELRELFRYRRKLSGQRSSECNRMHKVLEECNVKLSSVISDIQGVSGTKIINSLIDGEENWDVLSKFCHGKLKASRSDIKEALTGKITDHHRFMLKLIREGMQSMDRFIEQVDQRIEEKSIFCKQQIEMLMSIPGVSKLTAEGIIAEIGTDMNAFPNEHHLASWGGVSPGNNESAGKKKVPEQ

SEQ ID NO: 338978 - protein, 339 aa, unidentified
MKLYSGIDLHSSNSYLAIVDATGKRVFKEKSPNDMATILRTFEPYRKRLAGIVVESTYNWYWLVDGLMAEGYAVHLANPSAIQKYTGLKHADDKHDAFWLAEMLRLDILPTGYIYPKDERPIRDLLRKRGHLVSLRSSLLISLQNIITRNCGMKMKTNDIRCLRKNRVHPLLADNEDLALAGQVSKDSIDFLTRQIRTIETFIEKKLELTDAYKNLLTMPGIGKILGLTVMLETGPIERFEKVGNYASYCRAVSSQWTSNGKSKGQGNKKNGNKYLSWAFSEAAEFARRNDDKARAYYNRKLRKSNFMVAHAALAHKLARAAYYIMRDQAVFIPEKIFT

SEQ ID NO: 338979 - protein, 320 aa, unidentified
MTYIGIDVSKDSFVAAYPAKSGYTTKTFKNTSNGVHQFIQSLPAECHCVMEATGNYSMLLLYLLQTANITVSMENPQKIKHFARAMLSTTKTDDIDAKLIAMYGEKMEPAPYKIPSESIMLLKQKRTVLRQLKKQLTMLLNLQHSLSVLPKQDPTAKVATEKTIKFLRKQISKLEEEITHLSNKEFKRQMDLLTSIKGIGKTLASALIVATGGFAYFSNSKQISRFLGLCPTYQQSGTSVNFKGHINRNGDTYLRSQLYIAAISSIKFNAACKETFERLKAKGKSGKVAVIAVANKLIRQAFAVVTNNRPYVDGYVSALS

SEQ ID NO: 338980 - protein, 431 aa, unidentified
MAMSLVADHYGEVVTAPFEFDLTESGVANLIEAVAQAERSRSAVVVRVGVEAAGHYHRTVVARLRRAGLEVVELNPGAVKQARSQQLLRALKSDARDLGAMAELLTRGAGRPPEERDQALLTQVAWTAHRRRKVKARTALTNQVLAQLDLIFPGLQECFTAGVLSTKAGRVLVRDLVEPSRIKRLGDEGVRRFVARRGVQMSRPKAASITAAARNALSLSEEELVARTAVFSADIVLFDYLDTMIAEADQQLSEVLGATPAAVLTSLPGISVIRASNYGAEIGDPWRFRSAEAAYRFSGLVPASYESAKKARPGQHISKEGSVELREAILDLGKGLAQFDPDFAEYKRRLVSEGKKRSVAAVAVGHRAHRLAFSMLRSGHPYDRDQWARSVATGRSVMAKAPRETHQNVTCPSPVLTFTEDLIGHKHALLR

SEQ ID NO: 338981 - protein, 417 aa, unidentified
MTEDVHWLVGIDWASQKHQVCLLDLDGRVVGEREFDHEGTGLSQLCNWLIEQTTALPGQIAVAIETSHGPIVEMLLERGFQVYSINPKQLDRFRDRFTVAGAKDDSRDAHVLADALRTDRRAFRRLSVENPLLIELREWSRMLEDLKQERNRLSNRMRAQLWRYYPQALEIADDLAANWFLDLWQQVPTPAKAARVKQATIETVLKANRIRRFDAAEVLRVLRQKPLWVAPGTTEAACAHIRTMAARIRLVNQQIAEANRQLDELCDKLEAEADNAPGQKCEQRDVTILRSCPGLGRINIATLLAEAPEPLRRRDYHALRALCGAAPVTRRSGKQHIVVRRFACNKRLQNAVYHWARVATQHDPISQRRYAALRGRGHSHGRALRGVADRLLSVMCTLLQQQMQFDPHYASSQMATA

SEQ ID NO: 338982 - protein, 400 aa, unidentified
MRVVFGIDVSKVSSEVAILVNGEKVHNYTMSNDAIGFARLLGDLRTVHKPEIIFEATGVYSRRLQAFLDEHGYAYTRLNPLEAKKQLDSLRVRKTDQIDAEKLAQSQFVLNRKPTYVQEEVYQNLRDLSRFYQNLTEDIVRAKNRLHKVLQVTFPELENILSTPSGEQYWNLVIAFPCKDCVLELSKDKLSESIRQSTSKRISDKRVAYLAEKLTALANQSYCAVKKTSPILEEVRYYAKELLRLYEQRQAVLDEMVELAQPLPEYDILLSIPGIAETTATSIIGELGDIRRFQSANQINAFIGIDLRHYESGNFLAKEHITKRGNPYARKILFKCIHNIASASHTNPCHIADFYEKRKRQSQMTSTKSHTIASIHRLIRTMYYLIMHNKLYDYASTQNR

SEQ ID NO: 338983 - protein, 338 aa, unidentified
MQKFSGIDLHSDNSMVVVSDEEDRILYQRRLPNDLTRIVQALVPYQKELIGVVVEATYNWYWLVDGLMDAGYRVHLANTAAIKKYEGLKYSGDAADAAYLAHLLRLGLLPEGYIYPRETRAERDLARKRMQLVQYRTAQILAIENILARQTGGRLRSNEIKQLTGERVEALGLSADVTLALQANVAVMHTLQSQITVLEERLRERVRLHEDYAVLMTVPGIGQTLATTIMLETGSIARFAKVGDFSSYCRCVDSLRESNSKKKGEGNAKNGNQYLAWAFVEAAQFARRYCPQAKRFYERKKRQRNGVVATKALAHKLARACYHMLREHKPFDLQRCFA

SEQ ID NO: 338984 - protein, 406 aa, unidentified
MNPPVTRPTRFVGLDVHKHYLVATGVDGDGNQVYGPRRVELNRLAAWMDHDLCPTDALVLEMTTNTWQLHDELLPHVHSVTVVHPPHVALIVRAQVMTDKIAALTLARLLAKGLLVGIWVPPEPVRQLRALLAQRTKMTRLATQAKNRLHAALHRHHLLPPPGDLFAAQRRDWWLALPLCAAELATMQCDLDSLAFAQQQIDKLEVTLTLLAGQDQRMPLLIQLPGISLLTALVILAAIGSILRFPSAKKLVGYSGLGARIHDSGQTTRTGKITKCGRKDLRAAMVEAAQSAANTHPRWQAELARLEPRLGRNKAIVAIARKLLVSVWHVLTHQTADRHADPTRVARKLLQHAYRLGSANRPKGQAPAQYVRLHLDRLSLGADLTAVPWGQKKKPIPLPPKQPVPL

SEQ ID NO: 338985 - protein, 405 aa, unidentified
MSHVIAFDVSMGKSFMVIYNPLKQCVFEGEINHSRLDLDNVKVQIDQLIEGYGVPPEIVFEATGVYSKPLERFMNENDFAYCLLNPLEAKIQCDSLRIHKTDRSDAHQLALTHFNSSRRAQAPSNSIFNQLKSLSRFYSELDDELSVIRNRLHKVLQETFPELETLFTSKSDLFLNIAQLFPHPDYVVCLSKTVIKNRIINNTNKRISLVNAEKKAIKLLEAANHSYPSVSSSDVLCDQVKVYASRYQELLNQKDHCIMKMVQLAKKRKEYSILTSIPGIGPNSAVRLMAEIGDILRFSNNKQLNAYAGIDIRRFQSGKTFYKDKSNKRGNKHLRKLLFIIIQNMIKMRRFGQNHFVDYYDKLKTQPYNKRHKVASIACVNKLLKNIFFLVTHEMNYDYRLATKS

SEQ ID NO: 338986 - protein, 340 aa, unidentified
MNISVIGLDLAKSIFHLVGLDRHGKQGLKKKLRRTQMLPYFANLKPCTVAMEACASSHYWARELRKLGHQVKLLPAQHVKPYVRGNKNDYNDALGIAEASRVPQMREVAVKSIEQQSIQALHRLRRSAVGDRTALCNQVRGLLAEFGITLNQGVATLRKAIPCLLEDAENGLHALFRDALSLKYEQLCQLDELVKNLSDTIKKEANEHHEMKLLQSIPGYGPILSSTFYSVIGDGKGFRKGRDASASIGVVPRQHSTGGKNVLLGISKKGDKYLRSLMVHGARSLIKHAHKKEDALSVWVTALIERRGKNKATVALANKLTRIGWAVVRTGKPYKENYAV

SEQ ID NO: 338987 - protein, 311 aa, unidentified
MTETIGIDVSKSVFDVAAFSGDSLGRYDYTSAGMRQAVRAMRRLKPERIVMEATGGYEARLARYLHEHGLPVAVVNPRRVRDFARATGRMAKTDKIDAAIIARFAGMLDPRPTPPISPEGLRRKALTARRRQLMEMRTAEKNRMDHADDRLIAGSLKAVVKTLDKEIAKVETALEEMIEADETLRDKTARLSSVPGIGPLTARTLVAELPELGEYNRRQIAALLGVAPINRDSGVFKGKRMTGGGRRELRTQLYMPTLVAIQHNPVIRRYYQRLIQTGKPKMTAVVASMRKLLVVMNTMMKNNDVWNPKFA

SEQ ID NO: 338988 - protein, 352 aa, unidentified
MLRPLLFDLAKDVFELAFADANHRVVERKRLTRNAFARVLENREPLHVVVEACGSAHYWGRRFERLGHRVTLLPAHQVRPYVLRRKTDRTDADGLLEAMRCSQNRAVPIKTPEQQGVQGLHRIREHHKAQRTAAINLIRGLLREFGITIPAGADKVRPAVLTALEDGENELPMALRDGLAEMLDQVTHAEAAMTAIEAHLNDFLRRDARSQRLQQAGGVGLITATAMSASVGDLNRFASGRHLPSALGVTPREHSSGNQRRLGRITKRGDVYLRTLLIHGARSMLVTAKAARKKGASLDRTQQWALDLADRPGHNKAAVALANKTARRLWAAEHHGSRFDPNHQSSRVVTTH

SEQ ID NO: 338989 - protein, 374 aa, unidentified
MTITASESPTTVSEVILGIDTHLEFHVAVALDQLGRRLGELTVPTTMKGYERLLRWAEDFGPVCCAGVEGTGSYGAGLARRLKAAGISVMEVERPKRRHLRRNGKSDPIDAEAAARVVMADDTAGEPKSGDGQVEMIRTLRSVRQSAVKARTQAANQLQALLVTAPESLRHRLRELTTRDLVDTCGRFRPGSEPDEVHTATKFSLRSVARRYQQLSEEIAELDEQLDRLVAKAAPELTPLPGIGTDHAATLLTVAGDNPQRLKSEASFASLCGVSPIEASSGKIVRHRLNRGGDRDANRSLHLICVVRMRHDRRTREYVARRTAEGKSKREIMRCLKRYIAREIYHLLAPMAAASPPTAPGSQAAYPRKLAAQP

SEQ ID NO: 338990 - protein, 434 aa, unidentified
MRIALGLDLADKKCAAYAVPVGKAKKAQREFLDGFNKDFRRVPTTKEDLQRMVDVLKDESDGIHVLIENSTITHKVYWLLVGMGCEVLVAQSADLLRITESVTKNDDNDAMELAAYMRRRLNGEDEFRTVVMTPPEIMAKKMFIRAIYVDKTYLSECKKRLRFRLKVMGADLRREYKDISCERSLTQLRETGDPYLCYEVAVIRATKSRIQDGERYISTLFKDDPYFDLLMTIPGFGLEISAYISTIIIDIDRFDDKKQLEAYSGLVPRQRSSADSDPNCRTTHHGDEWAREFLGYAVKAHVMWAKDSVVTIMYNRLRARGMPYKKVITACSRKMVDVVWSVLKNGRSFISDQNVLRQARGAAAEIERNRSSTRNTRRPLETTIACTVSGKHRASGDCWNPNIRPMVWTRKMSHTGYTSTGTENSPSMWPGIKS

SEQ ID NO: 338991 - protein, 354 aa, unidentified
MTEILKSMIAAIGIDIGKSSFHVVGLDGRGAVALRQKWSRGQLEARLANMPACLIGMEACVGAHHLSRRLRLLGHDARLMPAKYVRAYSKGQKNDFRDAEAIAEAVQRPTMKFVATKTADQLDLQALHRVRERLVSQRTGVINQIRAFLLERGIAVRQGRHFLRAELPGILATGCEVLSGRMVHLIADLAGDWRRLDERIEGLSGEIAALARQDAGCERLMSVPGIGPIISSAMVAAIGAGDTFTKGRDFAAWLGLVPKQFSTGDRTVLGKISKRGNRYLRALFVQAAWVVLVRSKNWERYGLKPWIEAAKRRLHRNVLAVALANKLARIAWSVLAHGRIFAAGKVAEAATQPA

SEQ ID NO: 338992 - protein, 340 aa, unidentified
MQVSTIGLDLAKRVFQVHGVDAAGRVIIRRQLRRGQVIDFFEKLPPCLVGMEACATAHHWARELMARGHEVRLMPPSYVKAYVKRSKNDAADAAAICEAVTRPSMRFVPVKGVEQQAALMLHRTRELLVRQRTQLINAMRAHLAELGIVAAQGRDGVKELIGMASSDQLPQAVRGSLLALIMQLEAAHQQIVGIERRLQAQHRTSESSRRLETIPGIGVIGATAIAATVTDPTVFKSGREFAAWIGLVPRQNSTGGKQRLGSISKQGDRYLRKLLIVGAMAVIQHARRQPERHPWLIQLLARRPTKLAAVALANKMARIAWAMLVRGEDYQAPRRLAAAA

SEQ ID NO: 338993 - protein, 395 aa, unidentified
MEFLKYGLGIDMAMEKFDACISIIDKLQHVMIRAQCSFNNNKKGFETFILWVSKNTKLAIPAVYLMEATGIYYEQLAWFLHNKNCSVSVVLPNKAKKYKEALGLKSKNDRIDAKGLAQMACEQSNTSWKPLTSNIYLLRLITRQMQSISEQSTVFKNQLHALQYGMYRDKAIEKMHVRQLDLLQKNKKSLQLRVEQIVEKDEILKRKFKHIGKIKGLGLQNLAVIVAETNGFTAFENVAQLVSYAGYDVVENQSGKRSGKTKISKKGNSHIRRCLHFPAFNMITYEVAPFKNLYERVYEKSKIKMKAYTAVQKKLLEFIYILWKKDEAFDPNYQDKTSGDVEPAPSFASVPQEPSLTCGDQEEKTKPVKQKITPAITRVTQDKHPSKYRRMPSFA

SEQ ID NO: 338994 - protein, 306 aa, unidentified
MLDQTAHNSVPTVYAAIELSKKSWVVAIVQPAKGQPSIYRIKGGAFSDLVMRLRTATPGGERLLVCYEPGYDGFWLARSLKTEKIDCRVLDPASLQVNRRARRVKTDRIDVLMLVRALIAVDRGDRHVCSIVRVPTVEEEDARRSHRERQRLIRERTAHINRIKGLLFGQGIRGVEPRLRRSRIDFSDLRTGEGLPLPARLRAELEREYARLDLVETQLRATETERDTADAQDPSIEYKRNMLIQLRGVGPASAAILTREIFGRRFANRRQLGSYLGLTPSAYDSGSTTRCQGISKAGNSFARRAL

SEQ ID NO: 338995 - protein, 430 aa, unidentified
MSQCHQTFGSWTAALHEMAAWLKSCRIDTVAIQATGVYWVVLCDVLEAAGLKVWVVNAQGTKNLPGRKSDVQECEWLRKLHTYGLLRNSYRPPEEIRGLRDLWRLRERLVGDAGRAVQQMQKALTGMNLQLTNALTDISGVSGMAIIRAIVGGERDPWKLAKLRQPGVRASEAEIAENLRGTWREELLFELRQVVAHYDFLGKQVVELDQLLEKRMAAMPSREGTPKAKPLAEQEEAPKGKRRGRKPKTKVKPAPKNAPAFDIGAELTRLLGVDLRTIDGVNIHIAQTVYTEVGPDLSAFPTEGNFTSWLGLTPMRSVSGGKVIKHEKKRVKNRLADALRMGASTLERSQSYLGARFRYLKARLDGRRAVKAMARYLACLIYRLMTKGQAWVDRGEAYFEQKKTERELRTLQSRAQKMGLQLVPLAAVNA

SEQ ID NO: 338996 - protein, 316 aa, unidentified
MSESTSFVGIDVSKDALDVHVLPAGESWRVANDEAGCASLAQRLEPLAGSALVVMEATNVFWRLAATSLAGAGLGVAVVNPRQVRDFAKAMGTLAKTDALDAKVLALFAQRIQPPVRALPSPQAQVAAELLSRRAQLMGMRVAEQNRLGCAQAKKVRKDIEATIAFLEKRLHALDQEIDTWLQSTPIDQSRVDVLQSFTGIGQNSARSLIITLPELGQLTSKQVAALSGLAPIARDSGTTRGQRHIGGGRAAVRAALYMPALTAIRCNPLIRAFYQRLVQAGKHHYVAITACMRKILVILNAMLRSNQPWKAPQNA

SEQ ID NO: 338997 - protein, 430 aa, unidentified
MKSNTQNAKIEAITEKTLVLGIDVGSEMHYARAFDYRGIEYSKKPFKFSNTEAGFVTFKEWILDLKERHEKDKVVPGMEPTGHYWFNLGKFLQDNEMKPVLVNPHHVKKSKELDDNNPTKNDRKDPKVIAGLVREGRYMIPYLPDGVYADLRTASNIRFQLQAELTRIQNRISRWFNIYFPEYKTVYGKPDAKSGMLILKAAPLPEDILTLGIDGVNQIWRDAKLRAVGKARAKTLIEAAEHSVGSKEGAVSARMEIRMLLEDYESRNIRLQEVMTLIEGLVKQIPMAEKLLKIKGVGIKTVSGFLAEVGDISRFNTPKELQKLAGLALVESSSGKHKGETTISRRGRKRLRYLLFEVAMSLVAKNPEFRELHNYYTTRRLNPLKKMQSLMAIAAKLIRVFYAMLTKGVDYDPKKMVSDIKRPAVYLQAA

SEQ ID NO: 338998 - protein, 343 aa, unidentified
MDHFAGLDVSVKETSVCIVDDTGKLVREVKVTSEPEALLAVLKNPAYHFKRIGLEAGPLSQWLFGALAEAELPVVCVETRHMQAVLKAQINKTDRNDARGIAQMMRVGLYRPVHVKTLRSQKLRMLLTHRKLLQSKAIAIENDLRGTLRNFGLKVGMVGKVKFEARIKELVENFPDLAELVEPLLIVRRVLREQIVILHRRLLAIVRDDEVCRRLMTVPGVGPVVALTYRATVDVPARFRKSKAVGAVFGLTCSKYQSGEIDWSGRISRCGDEMMRVMLYEAAQSMLRSKKWSWLKAWAMQIARRRGIKKAIVALARRLAVIMHRIWVDGTEFRWTREQAVAT

SEQ ID NO: 338999 - protein, 370 aa, unidentified
MAKRNMFVGMDVHKESIDVSIAEEGRDGEVRHYGVIPGDLEAVAKVVRALRVPNRQLRFVYEAGPCGFGIHRYLTAQGEDCVVVNPSSMPKRSGDRIKTDRRDGDALARLHRAGELTAIYIPTADDEALRDLVRAREDAVGLSTQAKHRLKAFLLRQGRRYPGRAGWTRPYRRWLADLSFPLAPQHIALQEYRDTIDETERRVDRLTDQLRQQTPAWRWAPVVDALQALRGVSFVTAVGLVVEVGDIRRFDHPRQLMAFLGLVPSEYSSGPSVRRGGITKAGNPHARRLLAEAAWAYQGVPRIGRQMLYRQEALPKVICDIAWKAQLRLTSRFRKLAARGKAKPKVATAIARELTGFIWAIAREVPAPPA

SEQ ID NO: 339000 - protein, 408 aa, unidentified
MKTLHRRCAGLDVHKKEVVACLRLAIRGKATYEVRRFPTTTRSLLELACWLEQTGCTHVAMEATGVYWKPVWHILEGRFQQILANAAHIKGVPGRKSDMNDATWIADLLAHGLIRASFVPPQPIQELRDLTRTRKQLTREIVQHTQRIQAVLEEANIKLSSVITDILGISGRRILQAIVAGETDPMKLAELGGPRLAATKSQLTDALHGRVRPHHQILIDQHLKTIRQLEGTIAAFDERIEAALEPFRDAIERLKEVPGLSETSTQILLAEIGTDMRQFPTARHLLSWAGLTPRLDESAGKRRSTRVRKGAPWLKPVLVQSAWAASRKKNSYFEAQFLRLKARRGPKKAAVAVAASILTTAYHMLADGTCYQDLGADHFARRNPVRTAAKLANRIRSLGFQVEIRPAA

SEQ ID NO: 339001 - protein, 366 aa, unidentified
MAITHVALDDSKRVIVAGILRADATQPELREIPNEPRQVRRLFERLLREAPVRACYEAGVSGYDLYRQLTALGVDCAVIAPALTPRKPGERVKTDRRDAAKLVRLFRAGELTAIHVPTEAEEGVHDLTRCRDDVRADIIRWRHRVLKLLARHGRVYQAAKNWSQAHWTWIRAQRFDDVALARTLEASLEALEQALRRRADLDRAIEGLASEPRYRDAVGALRCFRGINTLSAMILVAEIVDFERFRRPRALMAYLGLVPSEYSSGDRHRRGALTKAGNTHARRVLVEAAWHYRHRPALGDRLARHTSDQPPAVVAEAWRAQQRLHRRYRHLVGHGKRPTVAVAAVARELAGFIWAAMTQAPRVLAA

SEQ ID NO: 339002 - protein, 357 aa, unidentified
MDVILERCAGLDVHQATVTACLRLPGPGRTRTQVVQTFGTTTPALLALRDWLAAHEVTHVAMESTGVYWKPVYYVLEAGFTLLLVNAAHMANVPGRKTDVADCVWIAQLQECGLLRGSFVPPPAIRELRDLTWYRKALLQDRTWEANRLHKILQDAGIKLATVATDILGVSGRAMLTALVVGTTDAAVLADLARGKLRSKLPALRQALTGRFRGHHALVTQLLAHLDYLDETIAALSDEIGGQLVPFVPEVTRLQTIPGVKRRTVENLLAENGADMTSFPTAGHLTSWAGLCPGNNESAGKRRRGRTRKGDRWLKITLLEAALAVIRVKGSTLGARYRRICRHRGTRSPSSPWRVPS

SEQ ID NO: 339003 - protein, 403 aa, unidentified
MKKEDMDYAVYCGIDIGKTQHHVIMLDPISEQRLLSRPIEQDERKIESVLAEACSFGKALVIVDQPGSIGRLVVAVAHKMGVDVAQLAPRKFKKAADTYGEVKTDAFDSYVITDTARSMPRMIELVKADTEEAAELKVLCSFRADIVKERTACYNRLHDCLTKVSPPLEALFSQDALHGDLALALLAHYGGPLGLKRAGKARVSRWASGLKRQKNRGPAKVEEVFEALSEMTLVLPATPVIEEMIKHLAARAIELKALAEELSGRIEVRAVFHPEVMLLFSMPGMSLVNAATIFSEIGDIDSFMDADHLASYAGVAPVKRESGTSVKGSKKPKGGNRRLKAALVKYAWAACLNDPVSKAYYDKKRSENKKHFKALLALSRRRIEVIYAMLKTGTYYQSLSKAA

SEQ ID NO: 339004 - protein, 393 aa, unidentified
MMGWTPPVLCAASSCQAESWVWRQHNERKESDMHPTTAAIDLAKNVFQLAIADCDHRVLEQHRLTRSQFMRFFENRNVQRIIMEACGSAHHWARTFNAHGIEVILLPPQYVRAYVRRNKTDAADAKALLEAARDCDLRPVRVKSVEQQALQALHRTRSLWMATRTARINALRGFCREFGLHIPVGARTGVEAISRAVADDQSALPELLRPTLRLLLDEIRVLETRIAQTERSLAEAAANSSACKLLMTIPGIGLLSSTAISAATCGSVAHFTSARHFASWFGITPKENSSGETRRLGRISKRGDKYLRMLLTHGARSVLRAAASAQRQGRTLTGIRQWVIALQARSHHNKATCALANKIARICYAVLRDQTPFGQPAPRLNTKAQRQTFSVAQ

SEQ ID NO: 339005 - protein, 368 aa, unidentified
MKQQTSATTETHLKGRTITDFSGKTIYVGIDIHKKDWQVALYFEGIVLGNYRITGTSKNVIELLTKRYPGATFMCVYESCAWGFNLQRQLTAAGISCIVVHAGDVPGSNKEKVNKTDKVDALKLARHYAGGLLKGIHVPGEELQKDRNLMRFKKKLTGDLNRSKNRLKSLLKYQGIDIPEKLDTPNWSKNFMNWVEEQAQKDELLKDVLLLMLEEVKLLRQLLLKTEKKLRELSSSAKYDDEAKLLISTPGVGRTTAMLFLLEIGDIERFKTFDQLNNFVGFYPGSKSSGEKQQDTGISNRKHKQLRTALVEAAWLAIRKDPALLEAYQQLVKRMKGNEAITRIARKLLRRMRTVLVSKVKYEIGVVA

SEQ ID NO: 339006 - protein, 400 aa, unidentified
MLSIGIDVSKGKSTVCGMKPGGEIVYTPFEIQHTREGMSELLSLLRGSGEEVRVVLESTGSYHCPVVAALLENGIFVSVVNSLRMKRFCSQSIRRVKTDQIDAMQIALYGLAYWQELQPTRLPENTYRELQLLARQYYQMTSILIKAKVDFNALCDQVLPGMQELMSDHAGRHKLSDFVLRYHHTAHILEMGETRFRKDYCKWAEKKGYRNRERMAALIFATAQNGIPVLPNAPSTQIVITEAIRVLHTVEASRDAILTQMQALAKTLPEYSLVREMPCIGDTLAPRLIAEIGDVRRFHSKRALIAYAGIDAPPYQSGKFCANNRHISKRGNRYLRKTGYEVMQSYVMHKPANDPIFTFIEKKRGEGKSGKLAMVAGLNKFLRVYYGKVTELYRSLPAIE

SEQ ID NO: 339007 - protein, 412 aa, unidentified
MNCTQNYKIDQVTEQTLVVGIDIAKRTHYACFVDDRGRVLRKSFPIFQSKEGFRQLYEAIQGAMQAFGKSEVIVAVEPTGHYWLNLAYFLEEHGLPLVMVNPAHVCRSKELDDNLPTKHDAKDALVIARLAKDGRFLVPRLLHEIEADLRVGSTLKEKLRKEQTAVKNAIVRWTDRYFPEFWTVFRDLGKTALSVLEWTPLPADMAGRTAEELIEVYRQSEGLKCPQKAKIQALINAAKDSIGVTEGTTMARFEIAALDAELKALVQTTMEYQWLKTVDRLGDATIIDLLAEIGSFAHYRDPRQLVKLAGLTLKEHSSGQRKGQKHISKRGRKRLRSVLFRAMIPLIRHNEAFRELHEYYTTRSVNPLTGKQSIVALCRKLLNVLFAICTKKQAFDAERMKQDVLSQVQRAA

SEQ ID NO: 339008 - protein, 304 aa, unidentified
MAKAQLDIALRPSGERWAVANDASGVAPLVDRVQTLHPTLIVLEATGGLERAVTSALAAAGLPVVVVHPRQARDFARATGQLAKTDALDARALAHFADVIRPTPRPLPDAQTQELRALLGRRQPLIVMRTAEQNRLAGTSERLTKDIVAHMTWLNADIATLDNDLETTLRASPLWRENDDLLQSAPGIGPVCARTFLLELPELGTLTRQQIAALVGVAPLNCDSGTMRGRRTIWGGRAHVRTVLYMGTLVATRHNPRIKVFYERLLAAGKVKKVALTACMHKFLTILNAMLKQRTPWQPQEVQS

SEQ ID NO: 339009 - protein, 326 aa, unidentified
MTTTPQAEPHARVFVGIDVAKTQVSVAVHPTGETWTAETTTRALRALAQRLARLTPTLVVLEATGGYEVPVVGALSEAEVPVSLVQPGRVRHFAQAAGLLAKTDRLDARLLARYAAHLEPALYVLPDEVQRGLMLLVARRRQLEEMLVAEHQRLEQQNFFPRSPVRAEIAETVAYLERARGDTDRQLHAYLAQHPRWDDAHALLRSAPGVGFVTAVTLLAYVPELGQLSRQAIAALVGVAPMACESGQWRGGRHIRGGRAAVRRVLYMAALTAARMNPVLRAHYQQLRARGKAPKVALTACMRRLLGILNAMVRTHQHWQTPLPQP

SEQ ID NO: 339010 - protein, 369 aa, unidentified
MNHLVKYVGLDVHKDTIAIAVAEADKRDEVREHGEIANTPAALKKLLGKLGGPGVELQICYEAGPCGYGIQRQVTAAGHNCAVVAPSLIPRRPGDRIKTDRRDAAMLARLHRAGELTAVWVPDIAHEAMRDLVRARLAAVRSLRQARQQLSGFLLRHGHHYNRAAWTQMHRRWLSGLSFAEEAHHIVLEDYIATVDAAQDRRERLTIQIEKRLADWTLGPVVQALQALRGMALVAAATVVAELGDISRFSKAEQFMSYLGLVPSEHSSGNRRRQGGITKAGNGAARRMLIEAAWSYRFPARISREQLLRQELLTGPIRAIAWKAQERLCFQYRKLSRAGKPITTVTTAIARQLAGFVWAIAHEVCTPTA

SEQ ID NO: 339011 - protein, 312 aa, unidentified
MVEHCYGGIDVSKDRLDVQVLPQGRCFSVANTSAGWSQLVDRLRGLSIAALGIEPSGGYERGVIRALLAAGLSVRRINPNKLRQFARARGVLAKNDRLDARLIAEYVAIMPTRVVHRDPAAEQLAAVVTIRRQLSDEHVAVENQTAHIEDAMLRRLNKRRLARLEADILLLDKRMAEIVASNANLARRYDLLTSMRGVGPTLAFTLIALLPELGQMSRKQIAALVGLAPYDFDSGKLKGHRCIYGGRVPVRNVLYMAALSAARYNPALKTFHNRLAAANKKPKVVIVAVMRKMITILNAMLRDNVAWQPKTA

SEQ ID NO: 339012 - protein, 377 aa, unidentified
MTRSDRLVTGGVDAHADTHDAAALDGRGRLLGTSSFSTDSTGQQALLAWLEQFGELAVVGVESTGSYAAGLVRYLRVRGVEIVEVNRPHAHARRRRGKSDPIDAEMAARQALSGDATAIPKLTTGIVESIRQLRVARDSGVKARSAALCQLADLVVTAPDGLRDQLSQPKTTRGKASLCAHLRPRATRLAEPGESAKFALRSLARRIQVLDEEIAALDKQLDTLVATAAPRTIQLLGISTGHAGQLLVTAGQNIDRLGNDGAFAALCGASPIPVSSGRRNRHRLNPGGDRDANRTLHMIAVVRLRYCQRTRAYAQRRITEGKTKPEIIRCLKRYIARETYRSLCADLANLTQPPPRPAPAITIHCGAGPTGLTQRRT

SEQ ID NO: 339013 - protein, 409 aa, unidentified
MDQLIERCCGLDVHRDTVAACVRVPGPNGKQRHEVRTFGTTAVELLALRDWLEAHGVTHVAMESTGVYWKPVFYVLEEVFTCLLVNAAHIKQVPGRKTDVKDCMWIAQCLEHGLLRGSFVPPAAIREIRDLTRHRKVLIQERTRAANRVHKLLEDAGIKLASVATNILGVSGRAMLEALVHGTTDAEVLADLARGKLRKKLPALRQALAGRFRPHHAFLVSQLLAHVDYLDEAIATVSEEVEGRLAPFAAQLTQLDTIPGINKRTAEVIIAELGVDMSCFPSDRHLASWAGICPGNNESAGKHKSGKTRKGNRWLRMTLIEAAAAATRTKDSALQARYRRVMRHRGHKKAVVAVAHAMLRAVYHLLAEGTTYREPGADYYDRRHTHRVTRRAIQLLERQGYRVVLEPAA

SEQ ID NO: 339014 - protein, 319 aa, unidentified
MDMVSQEQIIGIDVSRDCLDVHCLPDGSRLRIANTAQGHEQLAEIAHDRRALVCFEATGGQEWRLWAALDAAGIEARQLPPAQIKAFATSRGTRAKTDRIDAELIARFMAFRPDAGRTLPAQKLRLLRALTGKRGQLVETRKRLLLQIKARQKQGLGEQFKKMDDALHLLLDAQISELENKIERLVAADEALAETARILRSVPGIGPVASTMLIAEMPELGQISGAQAAALTGLAPIARDSGALRGKRAIGGGRHLLRHVMFQAALVASHHNPVLKPFADRLRAAGKPHKVVITAVARKLVTIVNALCKSRQNWTVPAT

SEQ ID NO: 339015 - protein, 334 aa, unidentified
MDSVKYIGMDVHKEAISIAVLNSSGKLVMECTIKTKASTILDFLKGLRGSLHVTFEEGTWAAWLYDLIKPHVTELVVCNPRRNALLKEGSKSDRIDARKLAELLRSNMVRSVYHGENGVRTLRELARSYLTISTDLIRVMTRVKAIYRSWGIPCRGKQVYAERYRAEWLGKIQEAGVRRRAEFYYQQFDALRALRQEVRRQLLGEAQKHDAWKLLRAIPFIGPIRAALLIALIQTPHRFRTKRQLWTYSGFGIETHSSAEQRFVQGELQRAKKPASVRGLNRNHNHDLKNLFKSAARVWATSPPWNHGWHLATVLLCWSQNGLASSCRGDENRW

SEQ ID NO: 339016 - protein, 332 aa, unidentified
MYLGIDIHKRYAQVAVMNDAGEIAEEVRVENANFDDLAQRYAGTQAALEATSNYYHINDTLSEHLDVTVTHLQKLKQIANSDKKTDRVDARELARMVRLNSVPECYVPTDAIREARALVRGRQTLIENRTKYANKIHGLLSDHGITKDVKPLNVVGREFLQGLSLPALWDTLLESSLKIIETLSEEIREFDAEIEEYAGSLKETQLLMTIPGVSYYTALTIYAELGEMGRFDGDKEVVNYVGLNPVIRESGDSRIDGSISKWGSSRVRWLLVQAAHTAVHTSNDKYLIRFYKRLASRKNSQKAIVATTRKMLVSIYHMLDRGEVYDPPGVSA

SEQ ID NO: 339017 - protein, 477 aa, unidentified
MAAKQEATSQVKPNRKQRRDQQRRIWTADPGLEVVHHDAAGIDVGNSEHYVAIAPEKSAEPVRKFGCFTGDLREVVLFLKAHGVRSVAMQSTGVYWIPLYDVLEEEGFEVYLVNARDTKNLPGRKSDVQESQWLLKLHTHGLLRNSFRPVSEIRVLRTYWRQRGDHVHTASECVQRMQKALTQMNLQLANVISDIMGWTGQKILRAILAGERDAEKLAEMRNWRIQASQEEIVASLTGNWRPELLFTLKQEMERYDFCQRQIAECDHEIKQHLDTLPARHRETDPAVQPVAPPKKNKKVQGNSPQFALDKELQRITGVDFTRIDGINVMTAQTIISEVGLDMSRWKTEAHFASWLGLCPHNASSGGKVLRRGTRKVVNRAATAFRIAGSTLRRSNSYLGAQFRRFRSKLGAPKAITAMAHKLAVLFYRMLRFGQEYVDRGRHFYEEKYRQQQISLLNRKATQLGFSVIPATNRPASI

SEQ ID NO: 339018 - protein, 330 aa, unidentified
MKQYTHFFGVDISKRTIDVTLAKEAEVIHRKFSNDLTGMDELMHWLAELNLNFDLVLFCMEATGLYCFPLTQFLAKNSIDIWIEHATQIKKASSLDRGKNDKVDSKRIAIYATKNLDRLRLWKPASHTLEKIRHLASLRERLVETRKRLLTPIQEFEEMGNIEMAKLLTKTIKSSLTALEKDLRNVEVKIISIVNEDENLKQLYKLITSVVGIGFVTAVNLIIHTHGFTVLKNVRKLACYCGVAPFEYSSGSSIRGKTKVHFMANKKLKCNLHMASLSAVRLDPDLKAYYDRKVLEGKNKMSVLNAVKNKLLARVVAVVNKKEEYVKRTA

SEQ ID NO: 339019 - protein, 416 aa, unidentified
MRRVIGLDIHRTFAEAVAWDDGRLIRLGRLDMTRTALEGFGKSLRPSDEVVVEATGNAMAVVRVLSPFVARVIVANPLQVKAIAHAHVKTDKIDAGVLASLHAAGFLPEVWTPDPETERLRRLVARRNQVVRHRTRIKNEVHSILHAHLIPRCPHADLFNRRGRDWLSRQPLPVDEKATIDRHVRELDRLAEDLDVLDREVAQGAIGNPSIERLITITGVNLTVAAGLVAAIGDIRRFTSPQKLVSYVGLNPRVRQSGLGLAQHGRISKVGRSHARAMLVEAAWAAAKAPDRFTRSSSAFGLGVATRSPPWRWLASWPSCAGTFSRRKRTISGRAPRWWPSRSGAWSSRPVSRPGGGINAVRPMPTTSRHSEIGRCSSRPRPSGLTSTSSANGGREDQARECASASIRPGTNDQAA

SEQ ID NO: 339020 - protein, 398 aa, unidentified
MRITTKCQELDLPATQEHQATLYASLELSRSTWLITSLSPCSSKMSKHTIAGGNGPALLALLERLRAKASQLTGRPVNVVVIQEAGLDGFWVHRLLGADGIESYVVDPASIAVPRRRRRAKTDAIDGETMLRTLLAWKRGEPRVCSMVVPPTPGQEDRRRASRERVILLQERVRHVNRIKGLLAGQGVTHYDPLHKDRRTQLDVLQTGDGRPLPAHLKAELLRELTRIELVMQQIDAVEIERDAAATSELEGQQSPVALLGQLKAIGPQIGAVLYHEGLYRSFANRREVAAYAGLAPTPWRSGTIEREQGISKAGNPRLRHLMIELAWLWVRHQPDSALSGWFRSRVGNERGRMRRIAIVALERDMFKLSLHRPSPPPGHPCDYNSVGGRVGERAGAG

SEQ ID NO: 339021 - protein, 451 aa, unidentified
MSSTSTPSAHREPFVSVNPNAAGLDIGSAEIWVCVPADRAPQPVRKFGTFTPDLQALADWLQACDIETVAMESTGVYWIPIYELLEARGFQVYLVNARHIKNVPGRKTDEKDCAWIQRLHTYGLLSASFRPEAEMCALRAYLRHRANLVDYRAAHIQHMQKALQQMNVQLTQVLSDITGETGLAIIRAIVAGERDPVKLVQMRNPRCAHSQDEIAKALTGHYRPEHVFALQQALALYDFYTAQIQECDAEIERHYPVFKPVVDVEQNPLPPTRKKNTHSKNAPSFDVRTQLYRLTGVDLTAIDGLNEVTAQIIISEIGTDMSKWRTEKHFCSWLHLAPHNDITGGKVIRSRTLKGKNRAAQAFRLAAQAVGRTDTGLGAFYRRKRAKFGPEAAIVATAHKLARITYHLLKYREPYQEMGREEYERQVGERELAQLTRKAAKLGFTLTPQAA

SEQ ID NO: 339022 - protein, 417 aa, unidentified
MRTITMQPFAAFVGIDWADTKHDVCIQSANSSRREFAVIPHKVEEIDEWAKSLHRRFSGPIAIAVELSKGPIVYALQKYDYFVIFPVNPSTLAKYREAFQPSRAKDDPTDAELALDLILRHPERFEPLQPQSVEIRELAELVEQRRRLVSDRVRLTNRLRSTLKLYYPQTLEWFNRIDTRLFCGFIERWPTLMQVKRARTTTLTTFFRAGNTRNPALLATRLASIRSSQHLTLDEAVIAPNKLRVLMLVGMLRVILDAIKSYDQTIAELAPEHDDYHLFSSLPGAGPSLAPRLLVAFGEQRSRFKNAAELQKYSGIAPVTERSGNKHWVHWRWRCPNFVRQTFVEWAAQTINKSYWAGEYYYQQRKKGSAHQSALRALAFKWIRILYRCWQTRTPYDEATYLKALERRGSPLVAKAV

SEQ ID NO: 339023 - protein, 318 aa, unidentified
MSSPANTPLGFIGCDVGKAAIVVTDSRDGRTRSIANQAADLAAFAAGLDATCFVVCEATGGHEAGLLAALVSAAIPAHRADARKVKAFIRSWGTLGKTDAIDARALASYARDRHASLARWQTRDVCRDQLQALTLTRKDMIDTRVAYTNRLAAPGPGHTKVYIQALLDGVDGQIAAIDAAIAALVRDTAPLQQAVKTLTGICGVGFVTAAALLALMPELGSADRSQIAALGGLAPHPNQSGFTDGYRRTRGGRPEVRKVLFMAAMSAVRYHNTLRPFYERLLAAGKKKMVALVAVMRKLLVNCNAVLRDAAKPAAWPV

SEQ ID NO: 339024 - protein, 316 aa, unidentified
MNMKTNQNINVGVDTGKYQLDIYIRPLDIYFTVENNEKGIKEAVKTIMKYSPNRIVIEATGRLEMPFILACAKANLPFTIANPVHIKRFAGALGQRAKTDKLDAQLIAHYSEAIQPKLSRLKPDTMQAMSDLVTRRNQLLNMQTMEKNRLQIMPKELAMTIKPVLTLFKNQIVKIEDKIVKLIESCPEYQAKNMILQSMKGIGKIAAASLISNLPELGYINSKQASALIGVAPINRDSGRYKGQRKIQGGRPQVRTVLYMAMMSAMQSNPVFKATYQRLLAAGKPKKVAIIACIRKMIVILNSMLRDGVMWEAPKV

SEQ ID NO: 339025 - protein, 391 aa, unidentified
MIYAGIDVAKDKHDCFITNSDGEVLFKAFTIPNNRDGFDEFYQKIKSVTNDLTKVKVGLEATGHYSYNILGYLLDKGLTTFVINPLHTNLFRKSLSLRKTKTDKVDAHTIATMLMSDVNLKSYSDTSYHNEELKSLTRYRFDKVKERAKLKSSISRLVTILFPELEKLVPTLHMASVYALLAEFPSATDIASAHLTRLANLLATTSKGHYGKDTAMLFREAARSSIGSNMPAKSLELKHTLRLIQELDSEINDIETEIKIIMDEINSPILSIPGINYRMGAMIIAEVGDFSRFDSPDKILAYAGLSPSTYQSGQLDSSYSHMEKRGSRYLRFALFNATKYVCHWDPTFSAYLAKKRSEGKHYNVAISHATKKLVRVIYQLEKTGNTYIKAT

SEQ ID NO: 339026 - protein, 350 aa, unidentified
MTMVGGLDVHRQQITVDYVDDDGLVHWSQIRPATRKSLRSWLAEHCPDGHGEFALEGCTGWRYVCEELAAAGIGVHLGDAAEIAVLRGPKKRAETDRADARLLRTLLLQGRFPESWVPQAHVTEIRTLGRLYCTLMDERRAWQQRIHAQLFHQGCPPIRALLTQSGREALAAAELSAVGRQYVETALRRIDELTVESDPLRTQLVNFAKRQRGCQVLQYHYGIGWLCAAIMWAEIGDARRFSSSDQLVRFAGLDVTVYSSDTKRSPGHLSRQGSPQLRWAAFEAAKCASRRSSPDYRYYCTLAAKRDGHNGKNPTLAVERKILRRSYHALRALGDAALAPPVPERQEVAA

SEQ ID NO: 339027 - protein, 388 aa, unidentified
MEVRLVDTASTAQDDAGACCLIAIELSKTSWVVGVRAPLSGRTSQYRLMGGDWKGLLELIERVRRQVGRELNRSVEMISCYEAGYDGFWLHRLLTAAGVHNHVLDPASLLVNRRARRAKTDRIDVERMLRALSRFLRGERDACSVVRVPSVEQEDARRLHRERHRLIQERVQHVNRIKGLCATQGIYDYEPVRSDRKAQLAGLRTGDGRALPARLEAEIARELQRLELVLEMIAGLEAERDAIVKAAAPQPLNADKIKALVRLKSIGMEFATCLVGEVMYRSFANRRQLGSYVGLTPSPYSSGSTDRDQGISKAGNPKARSTMIELSWMWLRHQPDSALSIWFRKRVGDLKGRPRRIAIVAFARKLLVALWRYLETGLVPAGAVFKTR

SEQ ID NO: 339028 - protein, 406 aa, unidentified
MRLFVGDDWAEDHHDVELMDAAGQVLARRRLPGGVAGMARLHELTGQQLGEAGEDAEVVIGIETDRGPWVAALVAAGYTVYAVNPLQASRFRERLGVSGAKSDPGDSHMLADMVRTDSHQLRAVAADSAEAGGIKVVARTHKTLIWERTRQVQRLRHQLREYLPAALEAFEDLAAPDALELPGKAPDPARAARLTRAQVSAALKRARRRAIADQTTQIIAALRSQQLARPAALTAAYAVTVRALAAVITTLNEQVKALESQVEAHFGQHPDAEIYLSQPGLGRILGARVPGEPGDDPHRYPGGRARKNYAATSPLTRASGKKKTVTARFIHNDRLIDALMAQAFSALNVSPGARALYDDLRARGIEHNDALRRVANRLAGILHGCLKTRTLYDEATAWSHRQNLAA

SEQ ID NO: 339029 - protein, 468 aa, unidentified
MGHKRSRRRQPSGKRAKRPSLLKRINHNAAGIDCGSETHYVAVPPERDPEPVRSFKTFTGDLHRLADWLEDCKIKTVAMESTGVYWIPIFEILEERGMEVVLVNALHIKNVPGRKTDVLDCQWIQELHSVGLLRGSFRPAAEIASLRAYLRHREKLVQSAASHIQRMQKALVQMNLQLHNVISDITGVTGMRILRDIVAGVTDPMALAAHRDYRCRASHDDIAASLTGNYRAEHLFVLRQHLELFDTFQRQIQACDSEIESLLHKLAASQRKPKTPVPSPRCKLRFYDNEPRFEIRDPLYRLAGADLTQIDSIGPFTALKLIAEIGTDMSRWPTYKHFTSWLTLAPKNKITGGRLISSRTQPSANRAATVLRMCAMVVGRTSTALGAYYRRIAYRIGKPKAITATARKLAILVYRTLKGELDYADPGASAYDEQHRQRTLRNVRNRAKTLGFGLVNLETGELIHGTVS

SEQ ID NO: 339030 - protein, 334 aa, unidentified
MSIVSTVGIDLAKNVFSVHGVDASGVVMIRRTVVRTKLAQLIAQLPPCLIGMEACSGAHEWARRFAAFGHSVKLMAPKFVTPYRKGGKNDGNDAEAICEAVARPNMRFVPIKSIEQQSDLTLHRVRQGFVEERTAMLNRIRGLLAEFGHVLPLRAAEVRRRVPPLLETLPTRVASCVRDLLEHALRLEAKALEYEREIRAHVRTNALAQRAQTRLGIGPITASALVATVGNAHDFKNGRQFAAWLGLVPRQYSTGGKTRLGHITKRGDPYLRTLLVMGARAVLQGALRLNDPLSRWALALQQRRGYHWACIAIAAKNARIAWALLAKDAVIAAA

SEQ ID NO: 339031 - protein, 344 aa, unidentified
MTYFTALDVSLRFVSICIVDDTGEVRYEAKVPAEVHRIVGCLRKFSDQIETVGFEAGALTQYLTYGLQAAGFEVVCLEARQVNAALAAMRNKTDRNDARGIAQILRTGWYSRVHVKSLESHQIRALLASRKAILKKCVDLENELRGLLRVFGIRLAPKVPHGAYDAVVRKQVEPEPLLARALLPLLEARQVLYRTYLKLDNEVKAIVRHDRICQQFMSVPGVGAITALTFKAAVDDPHRFRRSRTVAAHFGLTPRRYQSGEIDNPGRISKAGDPEARCALYVAAHSLLSRSATWSSLKAWGVRLAKTRGHRRAVIAVARKLAVILHRMWIDGTEFRWSAEPVQA

SEQ ID NO: 339032 - protein, 390 aa, unidentified
MYLIGIDISKFKHDCFIATETGQVVKSSFSFDNNQEGFNQLLTVLLSLDHSQQIRIGLEATGHYGTNLKLFLHEHNFSFMEFNPILSDRFRQVSSLRKTKNDKIDAKLISQMLLSFEYKPNSLLSYHISKLKSLTRFRKKLVKDCTIYKERLINILDLVFPEYSNYFTQVWGKVSLYILKNYPTIQDIANINVESVLPIIKALSRGHYSMPKLIKLIEAAKVSIGCKNDSHTLELKLTINLIEQMNYAIENVENEITIIMNKYNFKTATIPGIGIISAASIVSEFNDFSNFNSSNQLLSFAGLEPSIYESGTQTTYGHLVKRGSSYLRETLMNVAPFVMNYNNVFYQYYLKKRNEGKHHRVALTHLVKKLLRVIYYLETNAVPFDSSKLK

SEQ ID NO: 339033 - protein, 348 aa, unidentified
MWAIGADVHKRSTTFYALDDDGEPVDGFNRLFRSVRSNEEGYLEVRRYLDGKEYAILMENSTKTHDVVWTMEGLGMEVLVAHSPDLRKITKSDKKTDENDARDLAMYLLARLSGADQFNLSYMCSKEDMMARQLCRAAKREMVDRGKIKRRMRSHALLYGIDIDRLDPVTASGRRRLSELGDPVLDNLVRSMEDNLSRQKALEERLASMFSGNRTFEKIDAIPYFGLITSAYLTSYIGDISRFRDSKAFVASLGLAPRERNSGEKTSHCGITKKGDPHARWLLIQATIGHVRGCEDSPVTRFFNRKNGGSLSERGAAELAPVMNRQAIVAAAAKMATIIYTLVVKDRD

SEQ ID NO: 339034 - protein, 427 aa, unidentified
MKSDVIRYKEFCQFKSEIRASKEHLIIGIDIAKDNHHAFFGTARGKTLLKRLIFNNNMNGFKKLIDQVKELQIQYNLSKTVFGMEPTGNYHKPLAAWLIINEHFPVFVSGKAVKDNRELLDGRWDKNDDKDSANIADLISQGKCLFYENPEESIIELRNLLSLRKRLKKEEHSLRMRIRNGLLARYFPEMDRHWGKSIEENLAIVKWCLDPKKISKMDFMDFVKRVTTTDRGKIQLNRLRKIYDAAADSIGMPVDISVEFEAKMLVDHLKRIRERIKDTMRKIQTVAKEHKSYTILQTIPGFGPFIAALVIAVIGNPFRFNSYKQVIRLSGYDLNAKRSGKTSSSAVPVISKKGDSDLRYGLYQASLVGTYHNHQFRRLFNKVLKGRERERGIKTKMRVKIATKMLVIAWTLMKKGEPFNPDFLVTD

SEQ ID NO: 339035 - protein, 373 aa, unidentified
MSKIRFIGLDVHADTIAVAVAEPGGEVRSVGTIRNRAEDLRKAMGRLGSPGQIRVCYEAGPTGYAVYWRLAALGIHCDVIAPSLIPVKAGDRVKTDRRDAEKLARCYRAGDLTPIWVPTPEHEALRDLVRTREDAKQDQLRARHRLSKFLCRHGMRPPETIKKAWTAKYMDWIKREVNFDQPALTATLTDYVHEVEHAAERIVRLEKSITDAIAQSPAEMRAVIESLPALRGVAQMTAVTIVSELGNLSRFSSPRQLMSYSGLVPSEHSSGGKTQRGSITKTGNAHLRRVIVEAAWAYQHKPWVGGYLAKRQQGLDQEITDIAWKAQWRLCTRYKKLAGRGKNKTQIVAAIGRELLGFIWAIAVKAEDRTCTA

SEQ ID NO: 339036 - protein, 343 aa, unidentified
MSKISTIGLDLAKNVFQVHGVDASGAVVVRRQLKRAAVEKFFAQLPPCLVGMEACGSAHHWARVIGRYGHEVRMMPPGYVKPYVKRNKNDGRDAEGVCEAVTRPTMRFVPVKSIAQQATLAVHSARALLVRQRTMVANALRAALSELGIVAAQGYEGLCELMARLEEPSQEVPEIMRGALLMLAKHWQALNADERVLERQIAKAARCDRDAKRLMDVPSVGPIIASTVLAKVPDARVFRSGRDFAAWIGITGKDHGTGGKHRPGRISKQGDRMLRALLISGASAHLRQQKARGVTDPWLRDLLARRPYKVAMVAFAAKTARIIWAMLVKGEPYRDRASAPAAA

SEQ ID NO: 339037 - protein, 329 aa, unidentified
MDKRVWVGVDIGKSVFSAAIARSDTSMDAVANLPSKSFAFSKSGMADFVSWVRSCVAEGVVAGICIESTGRLGWQWMKALDEDAWPVAMVNPSRTRAFGESLGIRDKTDALDACVLAVYGTVMNPGPTSPPSPRMLELRECNRLFSSLSRDKQSYENRLLDGPVSAIVRRELKRTIKGLERRMQSLQKHMDELIAQDAPLKNDVECITSIIGVGDRTAYVLLAELGDLRTYRRNELVSFAGLYPRKHESGSSVYRKPRMVKRGGAPVRKALYLCAMSARTHNPQMRRLYERHVQNGLSPMAALGILMRKLLLLARSLLIHQTKYDPKYA

SEQ ID NO: 339038 - protein, 377 aa, unidentified
MTAATRPEISVSEPKVYVAFELSAKQWKLAMTSGFGVVPWLRTVTSGDLPAVARAIAQARRRFALPPAAAAVSCYEAGRDGFWIHRALTAQGITNRVVDSASIEVNRRARRAKTDRLDALKLVTMLVRVCQGECGVWREVRVPSVAEEAARQVSRERTALTQEQTRLTNQLRSWLATWGCALPGRRDDGWWTAVRDWAGAPLPAAVQGRLARTHARWLTLEAQIETMDVQQLAATAAAAPESALGRLVRVKGVATTSASVLLDEGLVWRAFRNRREIGGILGFAPTPYQSGDRSHEQGISRAGNHRLQAVSVQLAWQWVRWQPDSPITQWFQSRFAAGSGRLRRIGIVAVARRLLIALWRYATTGVVPTGAVLKVMA

SEQ ID NO: 339039 - protein, 339 aa, unidentified
MVNLAIYVGLDYHQDSIRVCVLNAEERVLVNRDCANDPLAVWDLVAQFGYPAACALEACCGAADFADKLHEVSGWQVKLAHAGYVRKLKRGPDKSDHDDAYLLADLLRVNYLPEVWLAPSNVRQLRRLVRYRQQLKRTRTEIKQQIRGLLSEERLLAAPANPWTKAWLQWLRTTDGLLPESRWVINRQLARLEELIAEIASVDERIEAVTAEDTVTAKLREQPGVGLITAATLRAEIGSFQRFATGKQLARFCAVTPCNASSGKRQADAGIVKSGNRELRTILLETAHRLARWNDRWRTLLERLKRTKPATVAIVAVANRWLRWLYHQMVPRPALELCG

SEQ ID NO: 339040 - protein, 346 aa, unidentified
MLYAGLDLSRKRLDFHLLDADGATVEAGAAPPDGDGLRGLTQRLERHGAPIRAAIESMNGARFVHDRLELAGWQVEIADAQKVKGLAPLACKTDRIDAWVLAELARCDLVPAIWLPDPRVRAERERARWRLHLVRHRSSLKQRVHAVLLTHGKPCPVSDLFGMRGRQLLARLGLPEPWQATIDASLRLIDELDREITDCERELRRLGADHRYVPLLCTVPGISWVLAYTIAAEIGDIDRFPTPRKLAGYSGLCPRVYQSGERDLRGPLSKQGPRYLRWALVEAATHACTAPAYRDRYQKTKARIGKQRGAKVAQVDLARRLSEAIWHMLTRGERFAPKGANDPLAA

SEQ ID NO: 339041 - protein, 326 aa, unidentified
MKSIGIDVSKEKLDVAFYDGECRWHETYENTKVGIRKMGRRFDGSDIRVTMEATGTYYIRTAEMLKDMGYDVRVENPLSIKRYAEMKLKRNKTDKVDSFLIAQYGYYEEGREFKKEDLKRRAIRLKLRAVDQLHSDVNKNISRIEALNQYPEGAEEVKKTFNKINDMLEKQIEKLVNEIAEIINTDPDYKDLSERLQEIPGIGPRISSMLIAFFGTFEEFETSKQVSSFIGIAPTIRESGRSVRGNGRISKMGNSYIRKLLTMGARTAVKCNKSCKELNERLVAKNKPYRLRLVAGGHKLLRQSFAVAKYNVRFDQNYVNKFSIAS

SEQ ID NO: 339042 - protein, 321 aa, unidentified
MQSQNPVVYAGVDVAKATLQLHLQGQQSEFSNTPKGLLQLLAQLQTVPSVQVVCEATGGYERAMVKALQQEQIPVSVTNPARVRAAAQAQGQRAKTDRIDAQGLTDYGQRYQPEPTPPTSATQDQLVALTQWLKQLIHGRALAKTQAEHHQDAFVRRQHAKLMTHLQSQIEAVEKQIEALLEQDAALQQRVNCLDEIQGVGPRTAWMVLAHMPELGRLNRQEVAALAGLAPWTRESGTMKGMRCIGGGRPEVRLALYMAALSAARCNPVLRTLYKRLRAKGKLPKVALTAVMRRLLTYMNHCIKALPSETAGARTQELKAA

SEQ ID NO: 339043 - protein, 458 aa, unidentified
MTPRQDHLPHPQRRSRCVRLHVTNPDAAGIDVGADAHWVAVPVERDPEPVRRFGTCTADLEALADWLQACGVTTVALESTGVYWIPLYELLQARGFQVLLVDARQVARAPGRPKTDVKDCQWIQRLHSYGLLSAAFRPAEQVVVLRAYLRQRDMLVTYAGQHIQHMQKALEQLNVKLTEVVSDITGVTGMAIIKAILGGARDPVGLAKLRDPRCKESEATIARALQGTWREEHLFALRQAVTLYEFYHQQIGVCDQAIEAHLRTFADQSGGQPLPYRPRRRKREANEPRFDARARLYAACGVDLTAIEGIDETTALVLLSEIGTDMSRWPSLKHFASWLGLCPQHKISGGKILSRRVRRGSSRAKRALRLAARSLHHSKSALGAFFRRLKARQGTPSAITAAAHKLARLVYTLLKHGTDYVAQEMAAYEVRYRERKVQSISRQAQALGFVLAPAVAGE

SEQ ID NO: 339044 - protein, 372 aa, unidentified
MEITTKPQPSADIEHATLFVALELSKAKWLVALYAPDREKISEYTIDGGDAPALLALIEKRCAQAHKKLGQPMRVMSCYEAGYDGFWLHRFLVSKDIDNRVLDAASILVSRRGRRAKTDRLDVAGLLRSLMALARVVHVPSVEDEDRRRLSRERRRLIAERVAHVNRIKGLLMLHGVRDFVPTRRNWPQQLSTLECAEGSKLPARIRTEITRECHRLHMVIEMIKQVEAEQAELTEQVPGPAKALMQLKGLGPAISAILSQEVFFRDFANRREIASYLGLAPSPWKSGGIDRDQGISKAGNRHARQAAVELAWLWLRHQPGSALTQWFKVRVGDMRGRIRRITIVALARKLIIALWRYLKHGLVPEGAILKA

SEQ ID NO: 339045 - protein, 363 aa, unidentified
MEGMFYVGVDLHKTQFTICILISGAVLEEGTKFEMNKNGYQAFISLMRGLSSSDTYDDIILAIESTANSRFFRDMMIGCGFKVVVVNTLRFKVVNLSTKKTDKNDARTLAEFLSKDILPVSHLCSAESESLRRILKSRNLMVQDMVALKNQAHAVLLAYGHITKTAQFQSKRERNKILEKLPTEIARTVGIIFETINVVENQKKVLEGKLRTLTSKDPTVNLLMTIPGIGIVNACTIRAYIDDIDRFESYKHFSAYCGLVPWVQTSNESIYYGRITKRGPQELRTALVQCVVAMVRMEDKTSNYKMMRQYHELKNDKSSGKAIIATARKLSRIIYIMLKTNTPFDSRKLTDSTEKPSYRMSES

SEQ ID NO: 339046 - protein, 358 aa, unidentified
MRPYTLGIDLHKRSSVWVLLDGEGTEIWKDSVPCHPDHITKILKWIPAAGTEIQAALEPTCGWRWVTALLESAGIEVHPANVSKVRLIAESTQKHDLGDARALANLLRLGYLPESYRVSDSTYGLRLILRHRTYLVRMRTSAKNRLHGMATIHGLHLIARSNPLSKAGKAGIMEGDNALMKELHTLIEELDRRVAECDVQCEEIAKGEPLVPILRSMPGVGVVTALTVIAEVGDFTRFASAKHIASFSGLIPRQRSSGESVRFGRITNQGSRTLRMIMVEAAFRIRPTNAPELYAFVARLAPVCGKKRARIALARKMLGILWHMAKTNTPYDKSKIIVNFSRIANVSHIDTYRGALTP

SEQ ID NO: 339047 - protein, 338 aa, unidentified
MKLYAGIDLHSTSNYLGISDENDKRVFKKKLPNDLNTILQVLEPFKENLSGIAVESTFNWYWLVDGLMGNGYKMHLANPSAFQQYKGLKHTDDKWDSFWLTHMLRLGILPEGYIYPKEDRPIRDLLRRRIMLVQHRTAHLLSLQSMISRNIGIHISGDKIKKLKEADAKELFDDPYLVMAAQNSISVMGFLKERIMVIEKAVTSKIKVRDEFKALQTIPGVGKILALTIMLEVGDISRFPEVGDYSSYCRCVISVRFSNEKKKGKGNKKNGNKFLAWAYIETANFARRYCTYAHKFYQRKEAKTNGLVAIKALSNKMARASYYIMRDQVEYDPGKLFG

SEQ ID NO: 339048 - protein, 355 aa, unidentified
MTSTKYIGMDVHKESTSIAVRNASGKIVMECVIETKTSMILQFFDGLRGDLQVTFEEGTSAAWLYDLLKPHVTKLLVCDPRKNASMREGNQSDKIDARRLAELLRLNHLSPVYHGEHGLRSLKELVRSYLTITKDHGRVMSRVKAIYRSWAIPCTGKQVYAPRHRAEWLEKIGEPGVRRRAEFYYQQLDALRSVRQEVRRELLVEGKKHQAWKRLCQIPSIGPIRSAVLLGILQTPHRFRTKRQLWTYSGFGIETQSSADHRSVDGQLQRVKKQSSIHGLNRNCNHDLKNLFKSAAIVASSKPGPFQEFYTTLLTKGIRPEMARLTLARKIATIVLIVWKRGACFDAEHLKPQTA

SEQ ID NO: 339049 - protein, 361 aa, unidentified
MLTKVTTIKNDFSGQDFFVGLDVHKKSWKVNVRSLQLEVASFSQEPDIVNLNKTLRNKFPEGKFYSAYEAGFCGTRIHKDLVGIGINNIIIHPGDLPQTDKQKKNKTDLHDSRAIACYLEKKMLRPIYVMPTEQEELRSLFRCRQSKVVDVVRSNLKLKSFLDYFNIPLPDEFKQATYVSGRYISYLKSITITTSSGTLALQQYVDDLIYQRNQKLELTRKLRKIITEKHSEAYNNLVTVPGIGGVIAMALIAEIGDFTRFKNPDQYASYLGLVPSEHSSGMRIMVNGIQPRCNKHLRPLLIEAAWACIRNSPSMLLYYKKHFDKNNKKAIIKVARKLALTAKAVVVKNQPFKENYNYIKA

SEQ ID NO: 339050 - protein, 356 aa, unidentified
MDRELYIGVDVSKKTLDLAYYDGETIDWKNAHIKVSNDDAGFKKIDSWVAKVGKDFDTFLFCMEYTGLYNQNFRLWLESKEYIYGMVEPRKMHHFEPDLDDDQRSLDRIKTDELDSFRIAIYCEQNHKKILRNPSKLPSPVYFKLKRLLVERKQNTKQSTLYKQQLHDICAYDTDLSVERKKLLLTNMQENQKAIDKEIDSYMNEDASISKNYDLLTSIPGIGRIIALETIVLTENFTAISNPRKYACYIGIAPFKKESGTSVRKRTAVSKKGFSEAKSDLSIAALSAITYNPAIRGYWIRKKKEKCGGIVLNAIKFKLVLRMFAVIKRGTPYVETDAYKNREYSTSELKLFPDQN

SEQ ID NO: 339051 - protein, 413 aa, unidentified
MQVLYDRCCGLDVHKKTVVACVMVTSSDGQVHKQVRTFGTTTMDLLTLADWLASFQVSHVAMESTGIFWRPIFNLLEEGPTIILVNAQHMRAVPGRKTDIRDSEWLADLLRHGLLKASFIPAKVTRDLRDLVRYRKTLVQERAQEVNRLQKVLETANVKLSSVVSDVLGKSGRRMVVAMIEGVSDAEALADLARGSLRQKLPQLQEALQGQVGPHHRVLLRQIFAHILFLEDTIQQLQQEIEQQLCLFEEAFHLLLSIPGIQMIAAAAILGEIGCDMSCFPSAKHLASWAGVCPGNKQSGGKRLSGQTTKGNTRLRALLIEVVWNISRMKDNYLSAQYHRLARRLGKKKAAMAVAHSLLVIIYHVLRDKQPYSDLGADYFDSLDKERLTRQSIRRLEALGYAVSLTPKQEVVA

SEQ ID NO: 339052 - protein, 346 aa, unidentified
MRFYDQQHEYYCGVDLHTRKMYLCLLDREGNKRLHRNFQAKPDGFLRAIKPFREDLVVGVECMFTWYWLADLCLDEGIDFVLGHALYMKAIHGGKNKNDRIDSEKIARLMRGGTFPLSYVYPREMRATRDLLRRRTFLMRRRSELLTHVQLVNHQYNLDPFEKRLQYAANRDVLERFTEVSARHNVEADLEMIGHYDTLLQRLELNVLRQAKVHDPQAQFLLQTIPGVGKILSHVLLYEIHTINRFASVGHFLSYARLITPQHTSDGKRTGGGGAKIGNAHLKWAFSEAVPLMLRECPEAKQFVERKEKKHGKSRAMTMLARKIGRVVYQMLKRKEAFDKVKFFAN

SEQ ID NO: 339053 - protein, 336 aa, unidentified
MVQIYGIDLGMSSFDVSFLSESGSVRHLSGVKNTVHGISKFLLSLPSSAVLCAEHTGVYGDLLLRLCTLNRTCLCFVPGYQIKHSLGLQRGKSDPLDACRIREYAERFYDLLRPCFYPGEEMSELQELYRTRSLLVESRKRLDTLNIGDNCKSSVSLAAGHARRAVLAELNTQISGLDHEIEALIQNSSEFSRNYQILTSIVGVGPVTSCELIIKTENFRKLDTAKKCAAYAGIAPYPKESGKMKCGHKISPMGDKQLKTLLFLCARSAKEHNKEIRLYFLKKHKVEKKHFFVAMNNIANKLLRLIYSLIHKQQTYDRDYIQRDPRCVVISDTHKC

SEQ ID NO: 339054 - protein, 406 aa, unidentified
MICIGIDIAKRSHVASAVDEDGGTVVESFKFNNTASGFAKMLKRLRKADATPENSLVGMEATGRYWVALFDFLSSHGYEAAVINPVQTDAFRDVWTVRKVKTDALDAAMIADLVRYKRYSPSALGDEATEELRNLARYRMSLVERSTALKNRATAILDRTFPELAGLFSNAYCPTRRELLQHCATPDQVLGTDVGTLERILREASRGRCGRAKAERLKALAKESVGVGFGSKTLAFEARLLMEELDFVQDQVKEVERELARLLERTQGKWLVTIPGIDVALASVIAGEIGDPNAFDDPHRLMGYAGMDPTRSESGETVRSDGRMSKRGPGALRWAFMQAADCARKNDPYFGDYYDRKRGVDGKHHYVALSGVARKLMGVALAVMKEGRPYEPAPPRNHRPGHLKEA

SEQ ID NO: 339055 - protein, 284 aa, unidentified
MSKHSVPAGDIAGLLKRFTQLNEKARARTGRDSPIIVIQEAGLDGFWIHRVLQSEGIESHVVDPASILTSRRGRRVKTDRIDGETLVRTLMAFKRGEPRVCSMARAPTPQEEDRRRVCRERRTLVGERVRHVNRIKGLLFAQGVFGYEPLRMGRRERLEELRTGDGRPLPVHLKAQIIRELDRLEVVLAQLKTVEAERDALLKPATDEAASPPAMLARLKGIGPQTAAVLWSEGLFRRFDNRRQVAAYAGLAPTPWQSGSIDHEQGVSKAGNPRLRTTMVELVI

SEQ ID NO: 339056 - protein, 376 aa, unidentified
MSNSIKYVGLDVSKSKIAVAVAEEGRQEARYWGTIVHTKEAVARLMQQLRTTEEITLNVCYEAGPTGYVLYRWLLEMDIHCTVVAPSLIPKRAGDRVKTDKRDALRLAQLFRAGELTPVYVPTPEDEALRDLVRAREDAKEDLNRHKQRLGKFLLRHQLTNAKGAKPGTFAYEEWLDTLRFSNECHRLTFEEYRQSIWETKERIKRYEQEIEKQAEISTQAPLIQAFQALRGVALITAATLSSEIANIARFPRPTSFMSYCGLVASEFSTGDSRRQGRITKAGNAHLRRVLVEAAWSYRHSPAIRRKLRDRIAGLPSEIQAIAWAAQHRLHKKYKSLMGKGKHKGCVTVAIARELAGFVWAIAKETERLQLQKAAG

SEQ ID NO: 339057 - protein, 313 aa, unidentified
MFALGFDVAKDHHDVALTNKSGQLKQRWQIANTSKAISELLTTIHLAHPKLTVGCEATGSYQQALLQICLKFGIPCRLLNPLTTKQYTKSTIRGRKTDRDDALSIARLVLRGEGNLVSAASLSPARNYVRLATKVQQHIHALRLEQKYLSELTGTPAEDGFSLSIVALEQLTADLRRQATRHIDPAIYQLLTSLVGIGPAIAVSLSAEIGDIHRFLGPKQLVAYAGLDPRVRQSGTVLNRNTRLTKRGSAELRHSLFLAANIARQHDPQLKAYYQKKRAEGRTYTEATVATARKVCYRVFAVLNRGTPYVKSA

SEQ ID NO: 339058 - protein, 347 aa, unidentified
MAKSITDLSSVTTIGLDLAKHVFQVHGVDAAGRVIVARALRRRDVLAFFAQVPKCLVGIEACGSAHHWARELMALGHDARLMPPAYVKPYVRRQKNDAADAAGICEAVTRPSMRFVGVRTLENQAALMHHKARDMLVSQRTQLINALRGHLAEIGVIAAQGLKNARELADLIMAEGNETLPACVRGALAPLVRQLHALDEEIAHSDRTIAMMARTDAMARRLMSIPGFGPVTASAMAASVQDISSFSGPREFAAFLGLTPRQSSSGGKERLGRVSKMGNRYLRKLLVVGAHAVLYHRKPHEDALRSWAKKLMQTKPFKLVAVALANKLARIAFAIMRGETIYSAAPA

SEQ ID NO: 339059 - protein, 386 aa, unidentified
MQTLNDLSRSLIALEPASTLIAVIEMSLSSWLVAGIVPGIERQPLKKLAVDESALLRLLHRWREEAEKAGCRIERIVVAFEAGRDGFWLARWLKARSIEAHVIHAASVAVSREHRRAKTDRLDAELLKRAFLGWLRGERNHCKVVAIPTLKDEDAKRPSRERESLVGEQSRIVNRMKAALIRLGIRGFNPKLKRAAGRLDSLRTPEGEPIPPNTLAELRRDMERRRLISNQIRQIEEARLKHFEQAPNDGPHAMVRLLARVIGVGIETADMLVHEVLSRNMHDRRAIARYAGLTGSPDESGRKRREKGLARSGNGRVRRGMVQLAWRFLTYQKESALAQWYRARTENARGARKPMIVALARKLLIALWRFVWQGVVPDGIVLRPAQ

SEQ ID NO: 339060 - protein, 455 aa, unidentified
MSTRRKKSMPGRLSPAHTIDANAAGIDIGATEIYIAVPPDRDAQPVRKFTTFTEDLMGAADWLVRCGIETVAMESTGVYWIPLFQILEARGLKVCLVNARYVKNVPGRKSDVCDCQWLQHLHAVGLLRPSFRPSNQVCAVRSLLRHRDSLVQLSAVHLQHMQKALDQMNLQLHHVISDLGGKTGMAIVDAILAGERDPRTLAKLRDPRTHATEQTIAKSLVGDYRREHLFTLRQSLTAYRQHAELIAACDREIEQLLQEFSSGGGLGAEVVPAQKLSRKPRHNEMAFDLRGHLHRIFGVDLTAIPGIKTLTAHTLFAEVGRDLSAFRSAAAFASWMGLCPDNRVSGGKILRATTRSVNNRAATALRLAAQTLSRSSSWLGQSYRRMKAKLGAPKAITAIAHKLARIVYHLLTTGQAYDESVFAQQEAQNKQRNENRLRHQARRLGFELTMIPAEV

SEQ ID NO: 339061 - protein, 404 aa, unidentified
MLEVAWVGVDVGKAHHWVVAADPQGRVVLSRKVANDQQEIARVVAEVGKLAGRLVWTVDLTTAEAALLLAVLFSGGQTVRYLSGRAVNQAAASYRGEGKTDARDAHVIADQARMRRDLPVLRPGEDLVAELRLLTSQRADVVGDRTRTLNRLRQHLTAVCPALERVAEPASQGGWLVLLARYQRPAAIRRAGVRRLSALLAAQGVRAGTAQQLAEAAVAAARTQSLRLAGEEVAAELVAALAQQATDLGVRIATLDRQIAKRFGRHRLAKVICSMPGFGFRLGAELLVAIGDLDQVDSADQLAAYAGLAPVANDSGKRTGRRRRPVRYNRALRRAMYLAALVAIRCDPAARAYYQRKRAEGKRPIQATICLARRRTNVLWALLRDDRTWQPEPPVKPHHEPQAA

SEQ ID NO: 339062 - protein, 421 aa, unidentified
MKFKAQDKQNQLIENITANHLVVGVDIAQETHVARAVNFRGIALGNPLEFSNDEVGFRSLDRWIRDLLASYKLSQIIVGMEPTGHYWLALAHWLKDTEIEAVLVNPHLVKKNKENRDNTRSKSDKKDALVIADMVKNGYYSPVRFHSAEYEELRVLMANRETVVKRLVSAVNQIHRWVDIVFPELRQVFKILTCKGALETLRLFPLPADLSKLEPNDVIAGWKKSMKRHSGVRRAKLLIDLAKKSVGSTQATYAYKLHLEHLLEEYDLANTQLQRIEAEAKAVLERIPYASKILAITGISAIALAGVLGESGDLSGYIHGNTLLRHAGLNLTEASSGKWKGQMTLSKRGRPRLRHFLYLITMCMVMTNKEFKALHQHNVQVKKLKKMKSIMKLCGKLARLLVGLARSEEAYNPVKVFALAA

SEQ ID NO: 339063 - protein, 338 aa, unidentified
MELYGGIDLHSNNSVFAISNEEGAIVSRKKLPNEPEVILNYLRPFKAKLAGLVVESTFNWYWLVDMLIDNNYCVHLANTTAIQQYSGLKHADDNSDAAWLAEMLRLDILPTGYIYPKDERALRDLMRKRMQLVQQSTKNLLSIQGAYMRHLSYKLSNNKIKQLTPLKIQQDFESDNIVLATQTNLSVMSCLKAQINTIEHAIVKQTKLRTEFQELTNIDGIGMILALTIMLETGSIDRFEKVGNYASYCRCVSGARFSNGKKKGSTNSKNGNKYLTWAFVEAANFAIRYNSTVKSYYQKKLAQTNKTVAIKTVAHKLSRACFYVLRDQVPFEVRRAFA

SEQ ID NO: 339064 - protein, 443 aa, unidentified
MDQGHAEVVELEVGVEHVDRVAAIDIAKASAMVCTRLPHGSVAGRRVQRTWPVKATTAAIVELAGQLVDEGVQLVVMEATGVFWKPFFFLAEAQGLTCWLVNARDVKNVPGRPKTDKLDAIWLAKLAERGMLRPSFVPPAGQRELRDLTRLRKVLTEERSRHRTRIQDVLEDACIKVSDKTEGASDLFGVSGRAMLDALVAGTRDPKTLADLARGTMRRKIPALEQALTGRFNDHHGRQIGVLLRLHDSLTGEIGQLTAQIEAKIAELDPTPPPDEDHPGRRPLLDRLDEIPGIGREAAATILGEIGFDMTAFPTEGHLASWAKLTPRTIQSGAKNTHGPSGKGNRWLKGTLGNAAVNTGRTKTFLGARYRRIIKHAPKKKAVVAISRNILEICWHLIGDPDARFTDLGPNWHDRHTNTARKTRQHIHELEHLGYTVTLTPAA

SEQ ID NO: 339065 - protein, 370 aa, unidentified
MKPITSYVGLDVHKSTISVAVAEEGRRGEVRHHGAVENRADVMIKLVERLGRRGERLQFCYEAGPCGYGLHRLLSGRGHDCVVVAPSLIPKKPGDRVKTNRRDAAMLARMHRAGELTAVWVPDAAHEAMRDLVRARATAARVLTKARQHLTGFLLRHGKVYAGPRAWTVAYRRWLTTVRFDHPAQQIVLQDYIHAMEDAEKRIARLVEQIEQLLEHWSMAPVVKAIQAMRGVAFINAVTIVAEIGDFARFSNPRQLMAYVGLVPSEHSSGDSVRRGGITKAGNSQARRALIEGAWTYRMQARISRKLHDRIEELPQGIRDTAWKAQVRLCARYRRLVAKGKPTVVVTTAIAREMIGFIWAIARQVQVQTA

SEQ ID NO: 339066 - protein, 425 aa, unidentified
MTHPYGNTGEKVLVAIDIAKKRNAVLIQLRDESRKKFMVANKLSDYQEFSAYLKNLRFPCVIGLEATGNYHRPLAYYLIQQGFEMKLVSSVAAARTREAMYNSWDKNDPKDAQVILHLLKTGLTQTYHDPLLHRINDIQELSKTYYQVSLRKTRIQHSIMTHYLPLYFPEVQKYYYTSRAQWFSSLLLRFPSPSSVLKYSREEFIEAARDVAGRKVNKAAWLTDFYETAASSIGLPVEEDSESMVMFRLVLQEHQHLCRLRRSIEERAELYLKDNADYNRLRTIPGVGPVIALTILAEAGDLRRFSHYKKFLKYCGLNLSTQQSGNFRGISKLSKHGNARLRCVFWLAGTSAIRMRENTFRKKYENYIKTDPNNPDLKRKAYTAIAAKMARVAYALVKTERDYRCFFESSIPSGKIPSVGPLRHS

SEQ ID NO: 339067 - protein, 353 aa, unidentified
MEAIYHIGLDQHKKFSQVAVTDWNGAVKENSRVDNTVESIKKFFQEIPKTAIITMEATGDWYWLYDVLEELGFKVKLAHPRKVRLIAEAAVKTDKIDCETLAQLERTNYLPESYVPTKEVRELRELMRHRCSLVGLKTSLKNKVHALLAKRGIRHEFLTDIFGKAGREFLEQVEVPAIYRLKLDAYLKLIDQLQQEAKALEKIIKQKAIKEDKYAQLLLTIPGISYISAMFLSAEIADINRFKNYKKICSYAGLASSTDQSADKMRHGHIIKESNRYIRTVLVEAVYKAIKQDPHLSHKYNRLAKRRGINKAKIAIARKMLVSIYFMLKENKPYRIRDIEGNKSKNYLKLKLE

SEQ ID NO: 339068 - protein, 418 aa, unidentified
MSLLNSLFVGIDVSKNSNQVYAMNFDEKKLLSFSSPNDTEGASKIENKLLECLVKNNYENIVIVLESTGMYSFHIATYLSSSEALLKYNVLVYCIDPKTSCNYRKSFSEMDKTDPKDAYILADMARAGKVNKLNPVKGPQKLAMQRLTRHRRHISEQIVREKLYVLNNIFLKFSAFDRKYDGIQPFSDPFSATAQEILLEYKSPEEIINTPIEDLTSFISTASKNRFADSKKIAEILTKCARMSYRLDKTAYEPINTAIASSLAILRCLENEIKHIDKEIANLTKGYNSDEYTCLISIPGIGPVFAAGILSEIGSIKQFDNEEALAKYAGLTWRRHQSAEAEYEDTPMTKTGNSYLRYYLCEAAAMAVLHNPVYKEYYQKKFIEVKTHQHTRAIALTARKLVRLIYGLLSKNQLYKNQ

SEQ ID NO: 339069 - protein, 397 aa, unidentified
MYIVGIDIAKRKHEAAVIDGEGAVIIKPFSFTNNCSGHNRLLAMLAKAKLPLDEVSFAMEATGHYWLALFTRLQKEGFRVQVINPVQTNSIRSFYIRQAKTDPRDALLIAEVIRFGHFSESTLHPENIYELRELCRGRHAIVSMQADVKRKVVALLDQVFPEYETAFTNMFSDTSMAILQTCPTPKELSGMPLEELCHLIEVSSHKRFRMAKARELQELARNSFGFAMAGDVFSTMIRLYAKHLDFLKQQVREMDRKIAEIMETLDTPITTITGIGPTLGAYILSEIGDISRFSSAAKLAAYAGIDPTMRQSGEYNGVRNRMSKRGSPYLRHAIWLAASSAVLHDPALKLYFQKKRDEGKPYMASVGHACRKMVSIIYAVMRDNKAYTPCIPNEISA

SEQ ID NO: 339070 - protein, 350 aa, unidentified
MSTVRIAVDLAKNVFEIAVSVHAGQVRERHRLSRPQFERFWSTRAPCRVILEACSSAHFWARYLISRGFDVVLLPPHYVRPYRRRSKTDRSDCDALLEADRCAGIHPVAIKSPDQQALVALHRVRSQWLRSRTARINAMRGLLREFGVTAPAGAQRFMNELHPLLCARQASLPPQIRGAVVSLWEEVRDLEERIDCLEAELQAVASQEPAVQALLKIPGIGPLTATALFATVADIHAFRNGRQLACWLGLTPREFSSGGRRRLGRISKQGDPYVRMLLIHGARAALNAARRAKAAEKPLTHLQAWALERARDAHANKAAVALANKLARIAWAVWYHEREFTGNHVVRLAA

SEQ ID NO: 339071 - protein, 344 aa, unidentified
MTSMHFIGLDIHKKTISYCVKDVSGTVLSEGTIAATRAQLDDWVKTLPAPWTVAMEATMFTGWIYDHLLPHAAAVKVAHPLMLRAIAAAKKKNDRIDASKICDCLRCDFLPECHMVSAEVRERRRTLRYRKLLVRQNVQLRNKVSQMLMESGVVYNKQKLHKVGYFKELMETNPDISRELKPLLAICRETIVRIGKTESALIRSLRRDPLLHARVERLMTIPAVGPITALTWVLEVDDVARFHSVKQAVSYCGLCGAERSSAETIKRMPISKQRNKHLQSVLIEAAKLAPRLSPELALVYDTEKQKGHANRASIAVARKLVAYLLAVDRSGREFVVAGERRAAA

SEQ ID NO: 339072 - protein, 332 aa, unidentified
MRLLAIDLGKQSFHIHGITDEGEVISKKVSRSKLEAIVLELAPESLAMEACASAHHWGRRFEAKGYRVRLIHPRFVKPFVKGSKNDAVDAEAIHEAALRPTMRFVPVKTIEQQDLQMLHRTRDRLITQRTGLINHIRGLLGEYGVVIPDGAFRFRKNIRSAVEDAPLSELASDNFNALIAEFQVLDARITAIDRKLAAICRKDERCKRLSTLPGVGPVVATALIAAIDDGRHFASGRALAAWIGLVPRQYTTGGKPRLGGIGKRGNHYLRRQLIHGARSALIRVANRNDLRSKCAKDLLARAGHNKTLVALANKTARIAWAILRNGENYKAA

SEQ ID NO: 339073 - protein, 409 aa, unidentified
MRLLVGDDWAEDHHDVEVLDAAGRRLARARLPEGVAGIARLHAIIGELAGQDVEDEHVEVLVGIETDRGPWVAALVAAGYQVFAVNPLQAARYRERHTVSGAKSDTGDAHVLADMVRTDAHQLRPVAGDSAQAEAVKVVARTHKTLIWERTRHTQRLRHALREYFPAAVQAFEDLDAPDALELLAKAPDPASAARLTRAQIRAALKRARRRDIGAKTERIWAVLHAEHLGQPEVVTGAYAASVRSLVAVLRVLDQQIATLQRQVVAHFGRHPDAEILASQPGLGQILGARVLAEFGDDPTRYATAKARKNYAGTSPITRRSGKTKLVAARYIHNDRLIDALMTQAFAALSASPGARAYYDQLRARGAGHNAALRQLANRLVGILHGCLKTHTRYDEATAWSHHSKTLAA

SEQ ID NO: 339074 - protein, 415 aa, unidentified
MKDNSSASPCRYIALDIHKHYSVVAGVNRDGEEILASRRVEHLDLEAWLPQHLQATDRVVIESTTNAWHVYDLLEPLVAEVLVANPIKVKQIACARVKTDKKDTLILARLLAANLVPTVWVPPKHVRELRQLISQRRRLVGMHTQVVNRMHSVSHRHHLGHPRGKRFQEKDMGWRENLGKMERFQLDLDLETKEYLKGQIDRLTKELGNMSVEEPWASQMMYLMQIPGFGVVTGMTVLAGIGDIARFENPKALASYAGLVPGVEQSGVKLRGKRITKEGRRELRWALVEVAQRAVKADPHWRRLFDELERRMHRNQAIVAIARHLLTVVWTVMSQGTSYRHYSDERIAYKYYTWSWQLDETQRKGLTRPQFVRYYLMRLGVGADLQRVALDPKHPHRLASQAEILELMPDLQPPG

SEQ ID NO: 339075 - protein, 355 aa, unidentified
MIVAIESHQGALYMQISTIGLDIAKNVFQVHGIDAAEKVVVRKRLRRRQVLEFFKALPRCLIGMEACATAHYWARELTKLGHEVRLMPAKDVKAYVKRNKNDAADAEAICEAVRRPTMRFVRIKSAEQQGQLMQHRTRDVLIRQRTQIINALRAHLAELGLVAAQGNAGVNELRAIVTDEQDTRLPIDARASVIVLAAQLEALESVIGAIEKRIKMQHRSSEASQRVEAIPGIGVIGASAIVATVADPTIFRSGRDFAAWIGLVPRQDSTGGKQKLGPISKQGDRYLRRILVVGAIAVLRRAQENPGKYPWLTQLLARRPFKVVAVALANKMARMAWALLAHGGTYRAPELAETA

SEQ ID NO: 339076 - protein, 348 aa, unidentified
MEYIGIDVHKRESQVCILREGGELVLEQRIRTERQRFAAVLGTRPRARLVLEASTESEWVAQCLEALGHEVIVADPNFAPMYATRHRRMKTDRRDARTLAEACRLGAYRPAHRTSAAQREERAHLAVRDALVRTRVRYLSLMRAILRREGISIPSGSAERFLSRLAQVQLPPALQTVLAPLVALVEPLNAAIAAADARVAARVTAHPVARRLCTVPGVGPITASVFVATLDDVGRFPRAGCVAAYLGLVPSERSSGERQRRGALTKLGNTRARWVLVQAAWAVWRDTRPASAPLRAWAQRIAARRSKRVATVALARRLTGILYALWRDGTLYDAKRVARPRPTPAVAA

SEQ ID NO: 339077 - protein, 316 aa, unidentified
MNTKTNQSINVGVDTGKFQLDIYIRPLDIYFTVSNDEKGIKEAITTIKKYAPERIVIEATGRLEMPFIMACAKANLPFVIANPIHIKRFAGAIGQRAKTDKLDAQLIAHYGEAIKPKLSALKPDTMQTMSDLVARRNQLLVMQTMEKNRLQILPKELVMTIKPILTAFKNQIDKIEKKIVVLIESCPDYQAKNTILQSMKGIGKIAAASIISNLPELGYLNNKQASALVGVAPMNRESGRFKGLRKIQGGRHQVRTVLYMAMMSAIQSNPVFKAAYQRLVAAGKPKKVAIIACIRKMVVILNSMLRDGVMWEAPKA

SEQ ID NO: 339078 - protein, 343 aa, unidentified
MDLYIGLDVSLASTAICVVSSHGKVIKETTSPSEPEELERALRSLSGTVVGVGLEAGPLSQWLYRHLIEAGFETVLMETRQVKGALKAMPIKTDRRDAEGIARLLQMGWFRPVHCKSMSAQEMRALLSSRKAIVQAITNLELSIRGVLRNFGLKMGRVAKGRLGARVRELADGNAMLEAAATPILTAREALRIELAGLEKLLRDHAKSDPVCRQFMTMPGVGPIVALTVKSAIDDPDRFRSSKDVGPWAGLTPRREQSGERDIIGTISRAGDAGLRTVLYQAAMVMLNKGRPSRLTAWAWNVAKRRGKKRATIALARRIGVILHRMWRDGTEFYFTRAKAVAA

SEQ ID NO: 339079 - protein, 493 aa, unidentified
MSQRNKKPRKSQVSIDSMPKHLRHININAAGIDIGSDRHLVAVPEGRDKVSVRQFGAFTSDLHDMADWLERCGVTTVAMESTGVYWIPVFEILEQRGFEVKLVDARHVKNVSGRKSDVLDCQWLQQLHTYGLLRGAFRPPDEICVLRSYMRQREMLTQASSMHIQHMQKALQQMNLLLHNVVSDITGVTGMKIIQAIIAGERDPNVLAENRQENCRSTKETIAKSLVGNFRDDHMFALKQAVDLYEIYQAKIVECEEAIVKHLATQPDVTDQEPPSGGKPVPARQRMRAGVDVRERLFKLTGVDLFAVPGLGADTLLTLTGEIGVDMMPWKTVKHFTSWLGLCPGTKLSGGKTLSSRTKRNANRAAQAFRMAAATQARSQTALGAFYRRIRSRSGGIQAVTATAHKIARIYYSMLTKGTAYVETGQQAYEQMYKERRINALKKQAHSLGYQLLPAQRSAKALRQYPASWRFTALPAARNSLAESLAGRFEERQ

SEQ ID NO: 339080 - protein, 411 aa, unidentified
MEVQYEVCCGLDVHKKSVAACVRRSGPKGRVSEVRTIGTTTRALLELSNWLTEAGCTHVAMESTGVYWRPVHNLLEGKFELLLVNARHVKAVPGRKTDVKDCEWLAQLLEHGLLRGSFVPTAPIRELRELTRYRRQLVQEHSRQVNRVQKVLETANIKLGDVATDVLGISGRDMLEALIAGERDPEKLADLARGRLRHKHDALCEALLGRVTQHHAFMLRGLLDHIAFLERQIETFDRCIEEKTRPFAAALSRLDGIAGVGLRSAQQILAELGPDMSRFPTAAHAASWTGICPGNHQSAGKRLSGRTRKGNRWLRATLVECARGAVRKRANYLAAQYRHIARRRGDKRAIVAVAHTILVAAWHLLQHEIEYQDLGPDHFDQLNRDRLARYHQRRLSELGFKVMLITSEEAA

SEQ ID NO: 339081 - protein, 362 aa, unidentified
MFRPHTLYIRIRIVRKVSEPAFAMKDQDVTDVIRRKQQTAMRYIGIDVSKATFVVAYSSDKGGEIRTFNNTTTGIKQFIGALPKDGSIHCVMEATGNYSALLLYMLNVAGITVSMENPLKVKNFAKAMLSTVKTDKSDARLITLYGEKMNPRPFKVQGEAILRLRQKRTVIRQLTKQITAMSNLRGSLACLPVPDKGATHTVDETIKFLEKKRDRLQSELTDLVEVEFSRQLALLTTIKGIGITLATALIITTGGFTYFQNAKQVSRYLGICPTYEQSGTSVNIRGHINRNGDAYTRGLLYVAAWTASRFNTKCGETYTRLRQNGKPGKLAMIAVANKLVRQAFAVVTHDKEYVDGFVSNRP

SEQ ID NO: 339082 - protein, 309 aa, unidentified
MKEQLVYLGVDIAKSYLDAAVGNEKRRFSNDAIGHRELIKWVKQLKAPVQVICEPSGGYERALVQGLARARVKISLVQANRVRQFARAAGILAKTDRIDAELLCEFGKVMRPQIVTAAKLEQEHLRELESQRRHLTHLLVMELNRGARLSDASVQRLNRNLINQIKKQIEQLDLLIKGHIDQSPELSAKAAKLTSISGVGARTAALLLAQLPELGELNRREIAALVGVAPFNRDSGRMRGKRAIYGGRKPVRHGLYMAALVAAHHNPILRNFYLRLRAAGKPAKLALTATMRKLLIVLNSALKTDPSYA

SEQ ID NO: 339083 - protein, 343 aa, unidentified
MLTSNIIAIDLAKNIFQVCHISVDGELLSNKAYSRQKLKELLAKAKPSIVAMEGCCGCHYWGRYAEQFHHKIRIINPRKVKGYVEGHKTDRNDALAIANAAMQVGLKFSPPKSIEQQSMHSLESSRKLLSRTIVAIGLHLRGTILDYGIANPKGEKGLKASVLSVLDRESDIPANLVNTISVLWEQYKRLKKELLSLEKEKNALTTQIEPCNRLMKIEGVGVTTAAMLYVTLGNCKQFKNGRQASAFVGLTPKQHSSGGKVIMMGIDKCGGVKDLRSLLYLGAMSLIGRLPEVPQTRKQAWLINAVNRLGFKKACIALANKTVRTAWAMLRYETEYKPAPLLV

SEQ ID NO: 339084 - protein, 275 aa, unidentified
MEHELHYIGIDTAKEKLDVDVLRPDGRHRTKKFANTTKGHDELVSWLKGHKIDHAHICIEATGTYMEPVAECLYDAGYIVSVINPALGKAFAQSEGLRNKTDTVDARMLAEFCRQKRPAAWEAPHPLERALRALVVRHQALTDMHTQELNRTETAREVQRPSIDAHLLWLEAELKRLEKQIKDLTDDDPDMKHRRKLLESIPGIGEKTSAVLLAYIGLKDRFAHARQFAAFAGLTPRRYESGSSVRGASRMSKAGHVSLRRALYMPAMVATSKYE

SEQ ID NO: 339085 - protein, 533 aa, unidentified
MIQIPASIERCAGIDVGKKEVAVAIMTGPADQEGELQTRAYGTTVPELEKLREWLVENQCATVAMESTGSYWIPIKNILETSVKIVLICARKQKPQRGDKTDFRDAKNLAHLHRHGLLKGSFLPSRPVVELRDLTRRRKKLLGNLGAEKNRIQKVLEVANVKVGNIMSDVFGVSGQAMVSVLVAGQKISIEQIADLSKGRLRQRIPELREALDRHQMNDHHRWLIQQCVEHAVLLDRQLEELEAKIEKNLEPYREQYELLKTIPGIKEMTAASILAEVGPDMSPFETAKKLSAWAGISPGNNRSAGKQKSSRIQKGNKFLMAALIQASWGAVRKRESIFQRKFHRWVKRMGEAKANVAIAHSLLTVVYAVLKQNRPYQEPDPQQMHALEKAKLVRHHASRLQKLGADETLVTQLLAQLNSTPAASVPPTPSNAAPASEAAPARIRKRCPAKVRRGALGVRARQTRSQEYTVLAEKKDSPPLATPPPKRKRSPTSNPKRKQPSKADHNLAGLTPSGPPQMEIGGPRDTTGLDKT

SEQ ID NO: 339086 - protein, 320 aa, unidentified
MMAQNNLVVVGIDVAKDKVDACIRPSSARQTFPNSSIGQRQLAAWLRRHKVGKAVMEASGGYERHWAKVLRQLGVEVRIVDPKRVRSFARSAGRLAKNDKIDAAMIAWFAETFDQAPSQAYDAAREELVQMVNARQGLLDLQTTLQNRDEHSEVSAVQKMHARLLKRVAGEVLRLEAAIAALIKMTKRFAELAEIIASVPGLGDITWAGLIAVMPELGQVTNKVAAALLGVAPYDDDSGKRRGERQIKGGRRRMRNLFYMACLGAATRHNPVLKAFYRRLIANGKPPKVALVACMRKLIVILNIMIARRQKWDASLYLAS

SEQ ID NO: 339087 - protein, 340 aa, unidentified
MSLVLQPLLPFPDSCQGMSPHQQGRGTKMTEHCYGGIDVSKDRLDVMVLPDRKSFSVDNNAAGYSELVKRLRGLSIAAIGIEPSGGYERAVIRALLAADLSVRRINPNKLRQFGRARGVLAKNDRLDARLIAEYVAIMPTRVVQRDPATEQLAEVVTMRRQLCDEHVAVENQTAHLEDAMLQRLNKRRLARLEADILLLDRRMAQIVASNANLTRRYELLTSMQGVGPTLAFTLIALLPELGQISRKQIAALVGLAPYDFDSGRLKGHRCIYGGRLPVRNVLYMAALSACRYNPALKVFHRRLAATNKKPKVIIVAVMRKMITTLNAMLRDNVAWQPKSA

SEQ ID NO: 339088 - protein, 427 aa, unidentified
MSTPQPFAAWVGIDWADEQHAVCLLAEGSPRAEHRQVAQQAEALDAWAAELHQRFDGRPLAVCLEQSRGALIYALMKYKFLVLFPLNPKQLAKYRQAFSPSGAKDDPQDAELLCRFVREHHGQLRAWRADDACTRQLRLLCEDRRRWVAQRTALGNQLLQRLKETFPWALKFQGREVHGQAFLRWLAKFPTHSELRRASPKQLERYLPKRRRVPDDPDTFAPWVAEIRAALPLVTDEAVLAAARLAIVSLVRGLEQLNAIIAQYDQQIAQVMAQHPDAALFHSLPGAGAALAPRLAAALGTDRGRFRSAADLQQFSGIAPITVRSGKSCQVRRRRACPHFLRQTFHEFARCSLMASPWAAAYCRMLRAKGHAFHAAVRSLAYKWLRIIFRCWQDRKPYDEQRYLNQLQQKSSPLLAYLPPNPSLTEP

SEQ ID NO: 339089 - protein, 413 aa, unidentified
MSVTDEPGSRRPTAGVDWATADHAVAIVDPDGEQTGRFPVIHDAAGLRTLVRKLLAAGVAEVGIERPDGPVVDALRAAGLVVYVIPPGQLKNLRSRYGSAGNKDDRFDAYVLADVVRTDRRRLRPLLIDQPVTTALRQTVRARRDLVAHRVAVANQLRAHLQICFPGAVGLFADIDSDISLRFLERFPTQDRADWLSPKRWAAWLASVGYSGRTLPETLHTRLRDAPRGATGTTADTAAAVTAAFVAVLRTITVQIEALAARIAEQLDLHPDAAIFTSLPRSGRVRAARLLAEIGDARGRFPTADSLACLAGVAPSTRQSGKVEVVSFRWGADKQLRDAICDFAGDSRHANPWAADLYTRARARGHDHPHAVRVLARAWVDIIWACWTTNTPYDPAKHRALQRILNQDQPTAA

SEQ ID NO: 339090 - protein, 430 aa, unidentified
MNMTSKSAQFAALIGIDWASQRHALCLYDCATAKRESSILEHTPEAIAQWARGLQERFKGKKIALCLEQSKGPLIYALLEYPFFVLYPINPATAARYRMAFKTSRAKDDPSDAQVCLDLVLHHREKLNPWLPNDAPTRELSCLLQHRRAAVDLRTLLTNMLRDAHALKSYYPQALELAGQDLFAPLGCQFLLKWPSLQELHKARKESVRKFYYAHNCRRMDVIEKRLDAIAQMTPLCRDRALLEPAMVQVRMLARQLLQLGGALKEYDSKIEQLFAQHSDALIWESFPGAGPTLAPRLACAFGTQRSRYQSAVAIQQYSGTAPVTEKSGKNQHWVHRRWARPHFTHQSFFEYASQSVLHCQWAKLYLKEQMARGKAYPTAIRALAFKWQRIMFVCWRDRVPYDETIYLQSLQHRGPHLASKLNQHPPKAA

SEQ ID NO: 339091 - protein, 407 aa, unidentified
MARTLYVGIDLGKGFHQVAVVDERKERLGEPFRIGRGRSGIELMLKRLGLWGAKPEDLVVTIEATGGYWNELVWALVNRGCRVYLAQPKKAHDLRKFYADHTKTDITDSEALARMPLVDEGLRPVWVAPPAEQMLLRLCRLRWKYRCRIADLKRRLSTLSEMVMPGIDGVMPVRYSKSARLFLRRYLAPSRARRLGRRRLVELLTKSAWGKFSERKAEDLWACIENAPDLGWQVDDLLLEVNVQLDELEMLERQVERLDERIAELYSEVDPEQRLMKIGGLGEFLAAAITASLGTDVRRRFPNTKHVVSFAGLAPRVKSSAGHTKPGLGITKRGNPFLRAWAYLGASCARQYDPELEAYYHRMRDRGKHYNLVTCATAARLLERCYEALSQGGVVEMESQEHEVRAG

SEQ ID NO: 339092 - protein, 403 aa, unidentified
MNAVGIDVSKGKSMVAIMRPFGEIVVSPFEIKHTSSDINSLIELIHSVDGESRIVMEHTGRYYEALAHELSAANLFVSAINPKLIKDFDNDSLRKVKSDKADSVKIARYALDKWQNLKQYSVMDELRIQLKTMNRQFGFYMKHKTAMKNNLIGILDQTYPGLNAYFDSPARSDGSQKWVDFAATYWHVDCVRKMSLYAFTCHCQKWCKRKKYNFSQSKAEEIYGKAKELVPVLPKDEITKLIIKQAVEQLNNASATVEELRALMNETASKLPEYSIVMNMKGVGPSLGPQLMAEIGDVSRFTHKGAITAFAGVDPGVNESGTYEQRSVPTSKRGSSNLRKTLFQVMDVLIKTMPQDDPVYQFLDKKRAQGKPYYVYMTAGANKFLRIYYGRVKEYLATLPESN

SEQ ID NO: 339093 - protein, 442 aa, unidentified
MKKSSRMSIVHPHAAGVDIGAEFHVVAVPPDADAEPVRTFQSFTGDLHRMSDWLKTCHITTVAMESTGIYWLPAFEILEAAGFNVILVNARDAKNVPGRKTDVNDAQWLQKLHSFGLLRASFRPEHDISVLRSYLRQRERLTEYRAAHIQHMQKALMQMNVQLHHAVSDITGVTGLSIVRAIVSGERDPSILIQYRDVRCKKTPEVLQQALTGNWQPEHLFELEQSVAFFDFYQEKICECDDQIETSLLQLSTEIKEPEGVLPPARHRTKQPNQLSFDVRPLLWKITGADLTQIHGFGPYLALKFVAECGTDMSRWPDASHFTSWLCLSPGNKISGGKVLSSKTRRSSSRIAAAATTIGRSDTALGAFYRRLSSRIGKAKAVTATARKLAILFYNALKYGQKYVDPGADYYEERYRSRVLDGLKRRAKSLGYSLQQDPELCV

SEQ ID NO: 339094 - protein, 412 aa, unidentified
MEVLYPCCCGLDVHKKSITACVLWAEAKGAVRKEKRRFGTFTVELLSLADWLRACGVTHVALESTGVYWKPVWNILEGQFEIVLVNAQHIKAVPGRKTDQKDSEWIADLLQHGLLRGSFVPPRGTRELRDLTRYRVSLTEECNRIANRIQKVLEDANIKLASVATDALGASGRAMIQAIIDGEQNSGLLADMAKGLLRNKISELQLALAGRIPTHHRFMLAQLMDDLRHAELKIERVEEEIKRHTFPFGDDVARLCTIPGVDRVTAWGLLAELGQNMDQFPSAGHAASWAGLCPGNFESAGKRLSGKTRKGSAFLRRCLANAAWAVSTKKSSYLSALFRRIAARRGSKRAILAVAHAMLVIAYYLLKRKEEYKELGVNYFDQLNAEGLRRSLVRRLERLGHQVTLQPRTVTA

SEQ ID NO: 339095 - protein, 384 aa, unidentified
MMIYYIGIDISKYKHDFCIISNTGEVIVENLFFENNKKGFQELLEKLKPYNKSDVHIAFEATGHYSKNLELFLIDQGYSFMKMNPLVIHQFLKARSLRRTKTDKADSLAIANYLMSVPYKPNSDLLYNIFTLKSLCRAREQLIKERSKYQVLLTNQLDLTFPELKQLLNNRISATLLFILEKYTNTNHISLMRDYDSIKNISRGKFSYAKFAKLKELAKNSIGHHDENNDLLISTYVSIIKTLNDKIDPIEKQISTIIKELNPRMLTIPGLGEISAATILAEYGDINNFSSPNKMLAFAGLEPSIIQSGTIENNGKMVKHGSGHLRYSIMNAAMIILRYSPTFYDYYLKKRSEGKCHRVALSHVCKKLLRVIFEGFWRGINSNL

SEQ ID NO: 339096 - protein, 514 aa, unidentified
MSEGTALPPFSRLSPRLLFKHSAWHIRHIPLTQNFHPQPLAPARKADWVHAHCARFRSPYAAQDKPFTSGSTNPDRKGCDILLKINYMSTLFVGIDVSSKTNAVYAMDFEENKYISSSFGNNQPGADQLVNMIAECMQKHKNLDTVLIVLESTSVYSVHISNFLSTSEVLMPYKPYVFCVNPKTTANYRKSYIGMEKTDPTDAYLIADFGRVGRTKKLEPWRGGQFIALKRLTRHRTHLSECIAREKTYMVSNLYLKFSELQLLEGDDKPFGNLYGATSSAVLTEFLSPQEIIDMPEEDLLTFLAGKSRNRISDLSKTSELLRKAARDSYRLDKCMYEPLNVSLASSFNCIHAYQKEIRLIEQAIEKCINGMNPNALIILQSIPGIGPVWASGILSEIGDITAFHSSDALAKYAGLYWPKGDSGDFVSEDNQMSKAGNPYLRYYLGEAANSVRKHIPGYADFYARKYAEVTKHQHKRALALTSRKLVRLVFGLLVKNQLYTGEKLDTEYNIKSN

SEQ ID NO: 339097 - protein, 348 aa, unidentified
MLADQLDYVVGVDPHRDSHALAVVQVVSGVVVFEATVVASSDGYAQALKLADQHAPGRRAFAVEGTGSFGAGLTRFLTVRGERVLEVGRLRRERRSGGKTDALDAVRAARNVLTSERPATPRAGGERQALQALVAAREGAVNAKRAGLCQLRDLLITTPEPLRSELRPLTRARLLQRLAATRPDGRRDPELRGSMLALRSIARRVLQLTAEERELAREIETITRRLAPQLLDQPGVGPHAAAQLVLSWSHRGRIGSEAAFARLAGAAPIPASSGQTVRYRLDRSGDRKLNRALHMILVTRKRSHPATITYIERRLQEGKTRREANRCLKRYLARSLYRLLEHGAPLAT

SEQ ID NO: 339098 - protein, 368 aa, unidentified
MVVQLIVFDGQTNWHLTNDRRPYMNTIKVTQSQAKGKSVCLSDFDHFLALDWSMKVMAIGHMRRRSKEPETFERPSDLKELKQYLATLKGRKILTIEETTTTQWLYVELIDHVDRIILCDPYHNRLLSNGPKTDKIDAGKLCLLLRAGLLKEVFHSLSGLYELRRLVSAYEDLVKAGVRVLNQKSSMEQGHFESGKHAPFILDHVAKSIELYQRSKEQYERKFSDLSRRNKLVKNLMEVSGIGIIGAVKIVAIVVDARRFARAGNYLSYCGLIQHEKISGGRSYGRRRPRFNHTLKAVYKLAAMSVISGNNNPIREYYDYLLAKGIAEHNARHAVARYIARLTYGMLKTGKRYQRYQWRNQAAGHQAA

SEQ ID NO: 339099 - protein, 358 aa, unidentified
MIAMKYYTSTTQFNCGIDLHARQMYVCLMDQNGHKLVHTNIRNNDFDYFLKLIEPYRHSLTVCAECMFGWYWLADACQAAGLPFVLAHALYLKAIHGGKNKNDRLDSEKLAHLLRTNLIPPAYVYPTDKRPLRALLRQRAYYVWSRADLLARIQSQQLAHNRPPIRQTRPNRAPWEAQLLAHEDHPLRQLALQNDLAMIRHYDTQITALEEALHRQTRQTAPRDYALLQTVPGIGEHLGLTILHEIGDIERFPTVKDFVSYCRLVKGTVASAGKIKGLRGAKLGNPYLRWAFGEAAVIAKRDHATIGPLAQRLEARMNGNKFKANTVLAIKLARAVYFMLRQHTVFDPDRLVAALARH

SEQ ID NO: 339100 - protein, 360 aa, unidentified
MAKARSLVGLDVHATKIVAAVLDVETGELQYFTLGGDVAEAAGLCAGLPRPVTAAYEAGPTGYGLARELARRDVGCVVAAPSKIPRASGDRVKTDRRDAELLVRLLLAGKLHPVRVPGPEEEALRDLVRAREAVRVDLMRARHRLSKLLLRHGIRFDDGSAWTSRHRAWLAGVTLPYAAAQATLLDASGAIDALAHRRDGLQREIVAMLPGSPWAVQVGRLRCLRGIDTLTAVGLCAEIGDFERFAHAEQLMSYLGLVPCESTTGQQRRLGSITKTGSGHARRLLVEAAWHYRKRPVVGKALAERQDGQRAEAVAIAWSAQRRLHRTWTRLEARAKRRTIIAVAAARELTGFCWAIARIE

SEQ ID NO: 339101 - protein, 331 aa, unidentified
MKILETIGVDVSKKIIDVWLHTKGLHKVFENNQKGFNQMIKWLNKNTNIAKESILFALEHTGLYSYNLSVFLAENEFNYVVLPGLEIKKSMGITRGKNDKIDAKRIALYAFEKRDRLKLDTQSPKNIIALKRLLSLRERIVKQRAGYKASLKELSEILSKSENKLLIKTQKNIINSLTKEVNTIEKEIEKIILEDGELKKQYELIITIKGVGKQTALYMIVFTEGFKKFDCWRKFASYCGIAPFTNSSGSSIRGRTKISNLANKKIKSLLDLCAKSSIQFNEEMKAYYNKRITQGKNKMSTINVIRNKILARIFAVINRQSPYVNLMKYAA

SEQ ID NO: 339102 - protein, 415 aa, unidentified
MALKIVYKICCGIDVHKTFVVACIASTDSNGVTIYEHHRFSTYTKGLKDLLQWLLKHNCKDVCMESTGKYWIPVYNVLENDCSIVLAHPKYVKAIRGKKTDKKDAKWIADLFKHDLVAGSFMPPADIRQLRDLMRYRFKLTCFMSSEKNRLQNCLTVSNIQLGNVVSDTFGKSAQAILDKLLENPADTSFDLEPLVYKSLKKKLPELRDAIDGYITPEQAGKLKVIKAHYENLESRKAELEELILALAAPYQQELAILQTAPGIRSDFTAIGIISEIGTNMEAFPSAKHLCSWAGLTPTNNESAGKKKSVRVSKAGCYIKPLLVQCANAVITSKKHPEIRNRYLRLKKRRGHKKAIIAIARMLLTALYHMLKNGENYNAELYRKSDLPSVDREITVEQAIIIARKQGYKIKSATA

SEQ ID NO: 339103 - protein, 337 aa, unidentified
MTIIRIGLDTAKHVFQVHGVDENEQPVLRRQVRRSEMEKFFGKLAPMRIGLEACGASHHWARVLRGLGHAVVLLPPQYIKPYVKRGKNDAIDAAAICEAMSRPGMRFVPIKSAEQQGALMLLKVRDLLVKQRTMLINAIRGHAAEFGLTAAKGPIKVAELLQRAHAEAAGVPALAREMLSLLSGQLDALEAKLQALETRLIALHKQNPVSQCLATQPGIGPIGAISFSLKVSDPKGFRSGRHFAAWLGLTPKENSTGGRHRQGRISRQGDEGLRKLLVLGATAVIRFATAGRASPWLINLLARRPKKLAAVALANKMARTLWAMMVSGEIYRRPQHA

SEQ ID NO: 339104 - protein, 310 aa, unidentified
MAQPVFAGIDVSKARLDVALGDEFFSIDHTEENISVLVDKFKTASPQLIVLEATGGLEGPLVAYLAEADLPVVVVNPRQTRDFAKATGQLAKTDKIDAKTLSRFAEAIKPQQRPVKDAERRQISDQVTRRRQIVAMISQEKNRLSRASVQVRKDIEHHIDYLKERLEISNKDIDKLIKSSSLYQETAELLSSVPGVGPVTIASFIAFCPELGNLNRQQIAKLVGIAPLNWDSGPRTGARHVWGGRKTVRNQLYMATVSAIRCNYRIREFYLRLIAAGKKPKVAITACMRKLLTILNAMVRQRKTWQFSMV

SEQ ID NO: 339105 - protein, 450 aa, unidentified
MRRPQVIDDEDHERVHERVAAIDVAKDSGMVCTRTPHPSRPGARRSTVWTVKARKNAIGALGRQLVRDGIEVVTLESTSDYWRIWFFVLEMCGLAVQLVNAAQAKNLPGRPKTDKLDAQWLARLTEMGLLRASFVPPKPIRDLRDYTRARTRLVQERTRCFQRLEKLLEGALVKVSSVASKLTTLSAQDMIKAMIAGQRDPKTLAGLARGKMKAKHDDLVEALDGMFDDHHGELAGLLLEQIAFLDDRIAALSARAAGLAAAMPAAWGINADGTTGPDAGAGPDAPALNAVARLAQIPGIREDQARTIIAEVGLDMSRFPTAAHLVSWAGLCPSARQSGPRTRAGKKGQGNAYLRGALGQAAIGAAGTDTFLGERFNRIARRRGKAKAQVAVARSILVIIWHLLSDPAARFTDLGYGYYQARTDKDKKIKNHIRQIEALLGHPITITKAA

SEQ ID NO: 339106 - protein, 451 aa, unidentified
MNTKAYLGIDVSKGYADFLLLDQDKNVLEEPFQLDDNTSGWATLAQIIDGWLSKGVEDLYCAVESTGGYEDNWFRTLKKMTSSQRIKVARLNPKGVKSVSEAALKRTITDAVSAENIAVYLISFPEKVYYESPNHNEEFKEARQNLSFHKLLVKQHVQLSNQLEKLLYQHFSEMMIYCRNGMPNWLLRLLVKYPSAKQVKRAGEKMLSRIEGISRDKAIGILKKTRNSDQKVSELTKQVIIQTAKEILSKKELCKKQMDFLSDTYKDNEQIKLVNSITGIGVNSAIKIMLEIEDISRFNSAKQLCSYFGVHPVFKESGDGKWGGRMSKKGRSEVRATLFMCALSAIRHDDNLKNLYARFRAKGMNHYQAMGVIMHKMLRIVFGVLKNQQPYDTAIDTQNIENAKQKMEETKALEKKDKLEKRRKSERFKTKDTDAPISRIAAKKRKKQETS

SEQ ID NO: 339107 - protein, 338 aa, unidentified
MEQITTIGLDLAKNVFQVHGVDAAGKVSVRRRLGRADVVRFFAALPPCLVGMEACGTAHHWARELSRLGHTVRLMPPAYVKPYVKRGKTDAADAEAIAEAVTRPTMRFVAVKTVDQQSVLMLHKVRDLLVRQRTMLINALRGHLAELGIVAARGPGGVTAAITALHEAQDGLPDLARQVLHGLIDQMRVIGGEIAKAEKHIIAWHRASQASQRLARIPGIGPITASAIAAAVPDATLFRSGRQFAAWLGLTPRAHSSGGKQRLGGISKQGDGYIRRLLVVGATAVIRCARQDNASKTWAARLLERKPARLVSVALANKTARIAWAVLARKVSYTAPAR

SEQ ID NO: 339108 - protein, 317 aa, unidentified
MGKSITSVAGIDIGKAWLDIALHGSGEALRLPNGSEGYVALLAWLGERGVTRVGLEASGGYERDVCEALRAAGFEVALLQPRQVRAFAVYRLRRAKNDRLDAVLIAHCTAALDQVRAAPDPRMASFAEHLRLIEQIETDLVRFKARREAYREARLKRWLEQETARLERRLKAELALLAKGIAGHGDLAQRLTLIESVQGIGRRTALSLLVLMPELGQLSRSEIASLAGLAPFDRESGQHRGQRRIAGGRHRVRRSLYAAALPAALRWNDNLVALYKRIRQQGKCHKVALVACARKLLIFANAVVARGSPWVKPATQS

SEQ ID NO: 339109 - protein, 372 aa, unidentified
MTSIIYVGMDVHTTNYTLCCYSMEDDRFFAEVQVEPDAKNILKYLARIEKQQSRDCRIVCGYEAGCLGYSLYHQLHAHGIDCVILAPTTMMTKPGKRIKTDRRDARLISKCLAFHTYSPVYIPTEVDDAVKEYIRMRDDANSALARVKQQIIAFCIRHGKIHDGKSYWTNKHLEWLSSLDLGNKILSEVLQEYLIRYYQLREQVDMYDMRINELAQAEPYRQKVEKLGCFRGIAAHTALSFCVEVGDFRRFATAQQFASYLGLVPGECSSGDKQQYTGITKADNSHLRKLLVETAQVFGRSATKSGKSVALKERQAKCDSLTVAYADKENARLKKKYFKIAMRSRVNIAKTAVAREMACFIWGMMTDNISCA

SEQ ID NO: 339110 - protein, 425 aa, unidentified
MSAKKSDVDDLMVLYPCCAGLDVHKKTVVACIITTGAHGKVSRQVRTFATTTVHLLELSDWLAEHEVSHVAMESTGVYWRPIFNILEATCEVILVNAQHMKAIPGRKTDILDSQWIATLLRHGLLKASFIPPRPIRDLRDLVRYRKSLVYARNQEVNRRPLLLETANIKLGSVASDLLGKSGRDMLASLRQGVTDHSLLAELARGKLRGKLPELREALEGRVQAHHRLLLGHLLDHIAFLEQRVQTLEGELEPYLNPYQAEIALLVSIPGVAETTAATILGEIGADMSAFPSAKHLASWAGVAPGNRQSGGKRLKAHTTKGNARLRAALAEVVWAISQTKDNDLSAQYHRLVRRIGQAKAIVAVSHSVLVIIYHLLRDHKEYSDLGSTYFETLDQDRVRTRAVRQLQALGYTVTLQTSAQKEESA

SEQ ID NO: 339111 - protein, 437 aa, unidentified
MTPRDHLSPRLYGVRHSQGGHLLKTTTQKKGESIMFCLGIDVSKKSCRYLILNEEGQKVKSFSLDNTHEAFQNLLERLKALSIPKDHLLIGLEASGSFWENLYSHLKENGFSVVLLNPYHTNKFREALAKKAKTDDIDALVIAQLLRTGEYVQSQVAEELIQSLREITKLRYELLKERKNYQRQVFSLLSVIFPEYEKTALKNPFSGASLAILQKFPTAKDLAQIKPKQIEKIVRSIKGNNFDLKEIETLIKTAQNSIYSGRAKEARTTSLRILLRHIETLSSSIEELETKIQELLSPQEPNDPFPGENLLTIPGVGEKTVAAILSYLGADGSNFSTSTEAIGYVGYFPRIYQSGQTQRENKICKRGPKVLRWALYMAAVASLRHNPEMRNLYHKKISQGKTEKQALICVAKKLLQIMLAMLKSGEAYNPLRVYANC

SEQ ID NO: 339112 - protein, 459 aa, unidentified
MGEQTRGRRSPRTMPTIHAHAAGLDVGSTFHVVAVAPERADEPVRTLRSFTQDLRRLADWLHEVGVTTVAMESTGVYWIPVFEILEARGFEVLLVNARDVRNVPGRKTDVHDAQWLQQLHQFGLLRGSFRPQDRVVRLRALLRHREGLVAAAATYVQRMQKAMMQMNVQLHHVVTDITGVTGLKIIRDIVAGVHDPARLAAHRDAHCKQSLETIRQALIGNYRPEHLFALRQTLDLYDVLQAKIGECDVEIAHVLEQLTVDRAPPPTPLPKVRRATGKNDPRFDVRRVLYTLLGADLSQIHALGPYTILRMVSECGTDMTRWPTVKHFTSWLTLCPGSKISGGRVLSAKTRRSSNRGAVLLRIAAVNVGKTQSALGAFYRRLAARIGKAKAVTATARKLAVLFYNALRFGMTYIDPGVDYYEAKYRARVIDNLERRARQLGLQVVRPPPTADSRSFLGN

SEQ ID NO: 339113 - protein, 315 aa, unidentified
MAMRVTLEKQIIGVDVAKNELVIYHDQYDRLEAIPNTKVAITQWLKALASSCAIAIEATNVYHVLFADAAHEAGCDVYMVDGYQLSHYRKGVNIRAKTDAQDARLLARYLKNELDELRPWIPASPLYRQLLSLFRRRAALVQARTGLVQSWTNEPFLRTAFANQVNSMKRFEALVEKKIRDVLQEAGLMRQVNRCMKVEGIGFLTAARLVTSFQRGEFSGANAFIAFLGLDLRVSKSGQSDGPRRLTKRGDPEARRLLHNAAMSGSRTPAWKPFYEEQRKRGFSTTQALVMLSRKLARVVFALLKNQSEYQTKVA

SEQ ID NO: 339114 - protein, 323 aa, unidentified
MSSLFQLGIDVAKAKLDCALRLPEGKLRHKVVENSPSGFQALSTWLAKQGAGIVHACMEATGTYWEAVAEYLAAIEGFTVSVINPAQIKAFGASRMVRTKTDKADAKLIAEFCFERRPEPWQAPAPAEQILRALVLRLEALQAMRTQESNRLEVARPALKDSIAKHIEWIDGEIARIIQSIRDHIDNDPALHDKQRLLDSVPGLGERTIATLLAFYATPGRFGNARQAVAFAGLDPRQHESGSSVKGKPRMSRIGHAFLRKALYMPAMVTLYRTVWGQQFRRRLAAAGKPPMLIIGAMMRKLIHVAFGVLKSGKPFDPALHGA

SEQ ID NO: 339115 - protein, 354 aa, unidentified
MKRQYFIGLDTHSAFCEMAVVAGDGRLVRRGKCKTTIVALRDMIGKVPAPRHLVFEEGPLANWLYRNLAGCVETLTVAEPRRNRLIACEGDKDDPVDAEKLANLLRGGYVKSVHQTDTLDETLFKQLVAQYHRRVRRRVAAGQQVTAILKQHGVMARARAFAHAEDRAEVLQQLPEQRLLVEMVTASWQEYDALAAHEDLWRKRLVREAKKDNVIVRFTELPGISWVRAATLRAYLDTPWRFRSTKALWKYLGIGLERRHSGNGPEILMVPKQTNRLLKSTILGAARSAIAQGANPFADQHEGWLSRGVSAKMAKRNVARSLAATLWGLWKSGTVYHPEWVGANWAATRKVSMV

SEQ ID NO: 339116 - protein, 354 aa, unidentified
MVVLGVDVHKDTHTTVAVDEIGREIGQKTVPARDRGHAALVRWARAHHPVGRMWAIEDCRHVSTRLERALLSAGERVVRVPPKLMAGARAAARTRGKSDPIDALAIARAALREPDLPAAEHDRTSRELKLLVDHREDLVAERTRMQNRVRWHLHELDPDLDIPSRGLDRLRVLDRLLAWLGQHPPAPQSQMVARIAAELLADIRAVTVRVNALERELSRLVEQVAPQLQAVPGVAGLTAAKIIGEVANMSRFRSEACFAMHAGVAPIPASSGRTNRHRLARGGNRQLNAALHRIAVTQARLPDTPGRTYYQRRLEMGNTKMEALRALKRRLARVVFNLLHTTTSTTTGPQPVAA

SEQ ID NO: 339117 - protein, 387 aa, unidentified
METVADRAKPTAIRTDLRAIFVSLELSRSRWLITSLSPGNRDRMSKHSVQAGDIAGMLARFSELRHKTQARTGQSFPIVVIQEAGLDGFWIHRVLRKEEIESHVVDPASIATSRRRRRAKTDRIDGEALIRVLLAFKRGEPRVCMMVRAPTPAEEDRRRLCRERKVLTAERVQHVNRIKGLLFAQGVSEYEPLRRDRRDRLARLVTGDGRLLPNYLKAQIGRELDRLELLLEQIKAVEAERDSLLASTEANKSALPAMLLDLKGIGPEFAAILWSEGLCRHFDNRRQVAAYAGLAPTPWQSGSVDREQGISKAGNPRLRETMIQLAWLWRRHQPRSVLTLWFEERVRHNAGRLKKRTIVALARKLLVALWKYVSAGIVIEGAAIKTA

SEQ ID NO: 339118 - protein, 344 aa, unidentified
MNYYAALDVSLRSVHLCVIDDQGEIKAETKLSSEVTDIIAYLDALDLEVSIVGLEAGTLAQYLTYGLQSAGFEVVCMEARQVKAALSAMRNKTDKNDARGIAQLLRTGWYSQVHVKSMESHRVRALLSSRKAVLSKCIDLENEIRGLFKVFGIKLPPKLGHGSFDIAVRDVIETDTTLSHSLLPLLDARLVLYHCFRELDNRTRHMAHADSVCRRFMSAPGIGFITALTYKAGVDDPYRFKHSRTVGAHFGLTPRRFQSGEIDIDGHISRCGDQDVRCALYTAANALLTRSSKWSPLKAWGMKLAKTRGHRRAVIAVARKLAVILHRMWLDDVPFHWSTEVTRS

SEQ ID NO: 339119 - protein, 348 aa, unidentified
MTIVGTNPDAVVGGVDTHVDVHVAAAVNHVGGVLGVEAFSTTRAGYRQLLGWLRSQGELVLVGVEGTGSYGVGLARYLTRAGVDVVEVDRPNRQARHRKGKSDPVDAVAAARAALSGTATGSPKSRDGNVEAIRVLMIARRSAVDTRIETLNQLRHLVFTATPEIRAKFTGLTAISLANRASGLRPRAGDDQVRYTTLVTIRALGQRVQYLRAETKGLNRLLRPLIRESAPELLDMFGVGFDTAAKLLVAAGDNPERIRTEAAWSHLCGVAPIPASSGKIRRHRLNRGGNRQANSALYHIVITRMRHDQRTRDYVARRLAEGKTMGEVARILKRYAAREVFKHLPRPA

SEQ ID NO: 339120 - protein, 331 aa, unidentified
MFPVGIDVSKKTLDLCMLYDGIKGRIKTRNIQNNRHSVENILRWLRLQHCSPEDVHVVMEATGVYHERLATELHDAGFRVSLANPHRSREFARGMGIMTKTDKVDAYMLACYAFLKKPHRWEPPAPEIRYLGALLRRRDVLLGDALREENRLEKYLSTDTPADIISSCRRMAQLLREEVSNIERQIKAHIKASPALRRDYTLLTSIKSVGPQLGMHMLVVLRSHNFVSAEQAAAFLGVVPIEKRSGTSVRRRPRMSKIGPPQLRAKLYMSALCGKIYNKRMRNIYDEMCLRGKPKMVAIGALMRKLVHWCYGVLKTGTVFNDEDLKPVLST

SEQ ID NO: 339121 - protein, 407 aa, unidentified
MWFAGIDWADTHHDAVVITAAGQRIGAIRVAHNAAGLAKLVVFLRGIGDGDSVADPDRRACIVETSHGLLITALLEAGLPVYPVNPTTVERHRKPAGAKTDAIDAYLRARTGRSDLADLRRLTPDSPLVAELKALTRDQDTLIQSQTRLVNQLTACLKASYPVALELFGKLQQPTTLAFLRAFPTPEQAQAATAKQIARTLRVAGYAPADTKAAEIRQTLREPQLHAAMPLVRAKARLMLALVAQRRPLIDDIAAYDTEIDRLFRQHPASTAFMSLPRAGERLAPRLLAEWGDARGRYADAGSVQALAGTAPVAVQSGNYARVRKRSACIKPLRNVLYQFAWQSTLAEEWAAEYYQRKRQAGRSHPMAVRALANQWVRIIYALWTTRTTYDREVFHAAQQAHAPQAA

SEQ ID NO: 339122 - protein, 375 aa, unidentified
MATIARLGIDTSKSLFQLHGVDEREEAVLRKQVRRGQFLGFVAKLAPTKIGVEACGASHYWARQLQALGHEVVLLPPQHVKPYVGRNKNDKIDAAAICEAMSRPRVRERFVAVKSAEQSAAQMLLGTRDGLLHRRTQLSNTIRGHAAEFGLVTPKGLAHIKPLLERIAADDTVPALAKELFATLGEEFAELAPRIARLDKKLKAFQRSDELCRRLVEVPTIGPVIASSMVVKISNPAAFRSGRKCAAWLGLTPKDHSTAGKMRHGGITRAGDEGLRAALVSGATAYIQQVKRGRTRPSPWLAQLLKRKPEKLAAVALANKTARIAWKLMVSGERYDRARAEAREGLGATQHQGSTPSPSLHPHTADQGASTMTVA

SEQ ID NO: 339123 - protein, 345 aa, unidentified
MHKDESEHSHSAMKKQTPPEKMTATTYVGIDVAKATLQVHLNGHQIEFNNNSKGHAQLTKKLAQLTRPHVICEATGGYERPVVAAFHQAKILVSVLNPAQTLAAAKAQGIRAKSDCCDAEALTDYGQRYQPQPTVPVPPELREMTELALWLQQLIDHRAVAKTQAEHHDNAFVRQQHQELLAHYQGQIKAVEEEIKKRIQSQQEFQQRLDCLAEIHGVGFRTALMMLIRMPELGQINRGAAAALAGLAPWTRDSGTMKGKRGIGGGRAQVRPVLYMSALSASRCNPVLAPFYAALKKRNKPSKVALTAVMRKLVIYMNHKLKVLATTPPAQETKTPTKPKKDLAN

SEQ ID NO: 339124 - protein, 353 aa, unidentified
MKRPKDKLIAGLDLHSNNVMIGVVNQDGKRVAHRKLECDLKQVTGFLAPLKPQLQSMAVESTFNWYWLVDGLRGQGYSIDLANPAKIEQYSGIKHVDDKDDAFHLADLQRLNILPKAHVYDPELRPVRDLLRRRSSLVHQRTALLLSFKSLYVRTTGQALDLSDAKKMEPKEAPKLYQHPANQLIAQVQAEHIQGLDKSIRRIEQAVLGCAREIPMYEKLLTIPGIGRILGMTITMEVGDIKRFRTDGDFASYCRMVDARRLSNGKCKAANNQKCGNKYLSWAFVEASNFARRYDEHCRRWYDRKAARTSKVLATKALGCKLAKAAWHLMAKQCHYDEKRMFPELAAKPMNKS

SEQ ID NO: 339125 - protein, 316 aa, unidentified
MSDAYVGVDVSKAWLDVAVRPSGDVWKVSNDEAGFALLVEKLRPLGPKLIVMEATGGYQAPAAAALTVAGLVVAVVNPRQVRDFGRASGQLAKTDTLDAKVIARFAEVMKPEPRPLPDGDTEALRAVVTRRRQLVEMITAETNRLGTALAPVRRDIEEHIRWLRRRLKDVDDDLYTSLKKSPLWRVKEQILKSAPGIGRVSICTLVAHVPELGTLSGKKVSALVGVAPLNRDSGTFRGKRVIWGGRAEVRHVLYMATLAAIRRSPSMNACYERLKARGKPSKVAIVACMRKLLVRLNAMVRTGTPWMEDAPVTLEA

SEQ ID NO: 339126 - protein, 367 aa, unidentified
MFKVAIRSPGEKPWTRKTEILEYRTFYGVLQAMARELRRRGVTHVVMEASGACTEPVYYALCEQDFTEVAVINPAHAKALKGHKTDARDCARLAELFECGLLRGSYIPAPELKEVRDLTRYRMKTVQARTSEIQRLAKALESAGIKLGSVASSITGTSATAMIEALIDGERRGGVLADLALGRMRAAGKLADLSMALTGRFTEHHALLCRLHRDRIAGFDVAVAGLDERIAGKVTRWQREADLLTSVPGFGDVVAQAWLAEIGPAPHLHFATCEKLASWVTLCPGNNISARKRKHGRTGDAGTCIKPVLVQAAWSAIRVRGRLQALYSRLVRRFGGDKNPAAKKKAITAIAHTVLKIACQVLKSGTP

SEQ ID NO: 339127 - protein, 406 aa, unidentified
MELVPIFKRVIGLDVHQGQVTACAIIEEADGQVRIEQRQFGAFKKDRRALAQWCARLQPDEVVMESTGIYWKSPYTALEAAGIRAKVVNARHVKQVPGRKTDIGDAQWLAMLARAGLLRASFIPPAKLRELRLIARQRQKLVGQLASEKNRLHKVLTDGGIRLGVVVSDVHGQSARAMVKALIQGAAPHEVLPLASRRLKASREELFDALQGDLTDSHRFVLDELMRHIEEIEARIARFDARLLEGLKEERNSLLLLQTLPGVDLIGAAMLLVEIGADMSVFGHADRLASWVGICPGNDESAGKRKSGRTRKGNPYVRRLLCEFAHAASRTRCALQSKFQALVVRRGRKRAIIGLAHKMLRTIFFMLSRGQHYRDSAINYEALSVKRNAPRWIKALTRYGFLPALA

SEQ ID NO: 339128 - protein, 383 aa, unidentified
MRKKLRYLGLDVHAETICAAIAEPDGSVRELGIIRNRPEAVRKVLTKFGATEPLREQLRVCYEAGPTGYTLYWQLSALGIHCDVIAPSLIPTKAGDRVKTDRKDAVRLARAYRAGDLTAVWVPDAATEALRDLVRAREVTKQDQLRARHRVNKFLLRHDRQRPDGMTAWTLKHHQWLRQQRFELTALQIVYDEYLATLALFADRVARLERAITEAIRTLAPTQQALVGALATLRGVQLITAATIVSEVGTLRRFGTPRHLMGYTGLVPREHSSGSGIHRGAITKTGNAHLRRVLVEAAWAYRHRANVASGMLRARQVGQPPTVIAIATKAQHRLCPRYHRLAERGKPPLAVATVIARELLGFIWAIGQATEPPSQPLGAAMSE

SEQ ID NO: 339129 - protein, 315 aa, unidentified
MTGKSAEIFVGIDVSKTRLDISIGGGHEYWQVANEERGFMKLIERLRSLHPTLIVLEATGGLELPLVAEIASAGLPIAVVNPKRIRDFARSVGQLAKTDKLDARIIAQFAQMVRPGVRHLRTEEEEHLTALLTRRMQVIEMLTAEKNRSYSTRQVMKGVLQRHIEWLQDDLKKLDQTIAEFIQQSPLWSGKEKVLRSVPGIGPVTGATILANLPELGTLNRQKIAALVGVAPVNKDSGKKCGKRRVFGGRAVVRRTLYMAALSATKCNPKIKPFYEHLICRGKEKKVALTACMRKLLVILNVMVKNNEFWRRETA

SEQ ID NO: 339130 - protein, 432 aa, unidentified
MEFDQSMWDAQRRVLKIKSLKHGIIQDKRGNVMRAVFGIDVSKTSSEVAILVNGEKVHGYTILNDAFGFNRLLGDLKTVHNPEIIFEATGVYSRRLQAFLEEYGYAYTRLNPLEAKKQLDSLRVRKTDKIDAEKLAKSQLVHNRKPTYVQEEVYQHLRDLSRFYQNLTEDLVRAKNRLHKVLQITFPELENLLSTPTGEQYWNLVMAFPCKEFVLRLSQSDLCEIIRQSTSKRISEKRIAYLTDKLIKLAKQSFCAVKKNSPMLEEVRYYAQELLRLSERRQVVLNEMVTLAQPLPEYDILRSIPGIAETTATSIIGELGDIRRFQSSNQINAFIGIDLRHYESRNFLAKEHITKRGNPYARKILFKCIHNIASASHTNPCHIADFYEKRKRQSTIASTKPHTIASIHRLIRTMYYLITHNKLYDYSLTQNR

SEQ ID NO: 339131 - protein, 422 aa, unidentified
MHKQEESTYAAFIGIDWADKKHDICVQVAGAEKRERLVLEHRPGVIQAWAEQLRERFAGARVAVSVELSRGPIVSALLEHDFFVLFPVQPTTVANYRKAFSPSGAKDDPTDAEVILELLVRHRDKLKRLEPEGGEMRALRRLVEWRRDLVQDRTRLTNRITDALKAYFPQVLEWFRDKEAAIFADFLERWPTLAAAQRARRETLESFFHAGNVRKASSIEKRIQAIQAERSLHSDEAVTGPARLLVEALLPQLRVLTAGIARFEAEIARLAPRQPDYKLFDELPGAGPTLAPRLLVAFGERRDRFPTASSVQKSAGIAPVMERSGNKSWVHWRYSCSKFVRQTFVEWAAQTIPRSFWAKAFYESCRARGTRHQAALRALAFKWIRILHRCWVDRVPYDESRYLMALQKRGAPLLKHAAQNPV

SEQ ID NO: 339132 - protein, 317 aa, unidentified
MTTPIEAYVGIDVGKTWLDVALWGSDTVWRVPNDDEGVTKIMQRVTALEPQLIAVEATGGYEQLLVQSMLLNSLPVAVVNPTRVRALSKATGKLAKTDAIDARLIAEYAFKIQPAALAPQEANEIRLRALVSRREQLVEMRTAEQNRLGTIHNILQADIREHIEWMSVRIEELEAEINELVDSLPEWKAQVERLDSIPGVGVITAVTVLAEMPELGQLDRQKIAALAGLAPFNRDSGQKRGKRRIFGGRKGIRRVLYMACLSAKKYNPVIRSLFERLMKKGKLFKVAITACMRKMLTIMNAMTRDQLGWRAPVPIPV

SEQ ID NO: 339133 - protein, 312 aa, unidentified
MMTNDNIGIDISKDFLDAHRLSDGGSATFPNAPAGFRALAAWLGCHMPARVVFEATGPYHRSFERAFSGKLPLVKVNPLQARRFAQACGTRVKTDAVDARMLASFGNALSLEPDQPVDGEQFDLRELFSARGALIKDRTRLINRLKTQTLALVKRQTNARIDQLTRQLQALQTDINGRLQDCPSRARANSILRSIPGIGEVAASTILIEMPEIGTLRKKKAASLTGLAPMTQQSGKWRGKARIQGGRKPLRDALYMPALVATKHNQDMRDKYNAMINQGKPKKVALTAIMRKLIELANALVKADREWLPNNT

SEQ ID NO: 339134 - protein, 305 aa, unidentified
MISWVGIDISKSNLVVWVQPQNEGFDVSNTSEGFLELIRRLSRFDVGMILLEATGGYERNAMAALQGANFKVLRVNPRRARYFAVAIGKNAKTDAIDAAVLADFAEVLSASRSKVISPEREALRELVQQREHFVQQRDDNKRRLQQAQLPTVIVLIKDHIRYLQTQVKQLDKLINQSMRELDAEKAERLISVKGIGTVATASLLVYLPELGELDRREIAALAGIAPLNDDSGNHIGKRQIYGGRARVRRALYMSCWVVIRHQADFKARYDGLRERGKSAKVALIACMRVLLIRLNAMLRDGTEWR

SEQ ID NO: 339135 - protein, 389 aa, unidentified
MRSSHRFDTPVADSEHATMYVAFELGKAKWLAGIVSPGSAKLSRHVLPGGDTAAVWHHIARAHGRAVKRLGKPVCIVSCYEAGYDGFWLHRWLEAQGVESRVLDPASIEVNRRARRAKTDRLDLEQLMRVLIRHEGGERRVCSVVRPPSVEQEDTRRPWRERERLVKERTMHVNRIKGLLHGQGVRDLQPRARGFVEQLEGARSGDGHALAPHLVSEIEREHVRLTLVEQQIGAIEAQAEATRQAAVPNGVANKINQLIELKSLGPATSQTLVGEAFFRDFQNRRQVGAYFGLTGTPFDSGNSRHEQGISKAGNPRARTAAIELAWLWRRHQPRSALSRWFEARVGTQKGAIKRIAIVALARKLIVALWRFLEHGVVPEGAVLRSASRA

SEQ ID NO: 339136 - protein, 343 aa, unidentified
MQTVTTIGLDIAKSVFQVHGIDAEGKVILRRQLKRRYVMAFFQKLPPCLVGIEACASSHHWSRELQACGHTVRLMPPAYVKPYVKRHKNDAVDAEAICEAVTRANMRFVATKTPEQQSCLTLHRTRHLFIRQQTSVINAIRAHLAEFGIVAPVGRNGVEQLLGVAADSNDRRLPEVARACVVALGAQLRTLKVQILEFDRMIRAWHRSSEASRRLDDIPGVGPALATALVASVADPKMFRSGRDFSAWIGLVPKQNSSGGKDRLGNISKRGDRYLRSLFTTGALAVIRYAKIHGTKHRPWLTALLTRRPTKVAAIALANKIARMAWAMMAKGERYKEPAALAA

SEQ ID NO: 339137 - protein, 413 aa, unidentified
MQILYERCAGLDVHKKTVVACVLLTATTGKVSRQVRTFATTTANLLALADWLGSHGVTHVAMESTGVYWRPIFNVLEGSFEVILVNAQHMKAVPGHKTDIKDSEWIADLLRHGLLQASFIPPKPIRDLRDLVRYRKTLVQQRADEINRLQKVLETANIKLTSVASDVMGKSGRDMVEALLAGVSDADTLAELARGRLRAKLPQLREALEGRVDATHRLLLRHILDHITYLEGEVEKLFTEIATLLDPYERQLTVLTSIVGIGRTSAAAILGEIGTDMSRFPSHKHLASWAGVAPGNKQSGGKRHKAPTNKGNRHVRAILAECVWVISHTKENYLSAQYHRLARRIGKKRAIVAVSHSLLIIIYHLLRDDQEYHDLGPHFFETLDTTRQRDTAIRRLQALGYKVTVQEITEVSA

SEQ ID NO: 339138 - protein, 343 aa, unidentified
MKITRVGVDLAKKVFQVHGVDRAGRRVWKRQLKRSSWLSVLTETVEPGCEIGMEACGGAHHWARELKSRGFRVKLISPQFVKPYLKSLKNDVNDAEAICEAMARHHMRFVAVKTVEQQDIQAMHRVREGLMNHRKAKANQIRGLVAEYGLVAPRQMGPLRKAIPCWLEDAENGLRSAFRVLLHGLWEDLQNLDVRLKVLDKEIFALSENHADAKRLKQLRGIGPLIATAMVAQFGDGRHFKRGRQASASVGITPRHAGTGGKNHLFGITKKGNPYLRSILIHGARSVVSKAKHKDDRLSRWVTELARRKHPNVAAVALANKTVRIAWAMLRNGTDYDPDLAMA

SEQ ID NO: 339139 - protein, 320 aa, unidentified
MMAQNADVVAGIDVAKGKVDACIRTLSMRPAFPSTAEGRRRLLAWLRKHRVTKVVMEASGGYEREWAKVLRQAGIEVRIVDPKRVRNFALSAGRLAKNDAIDAEMIAWFAETFSQGPSQVYDADREELKALVQARLGLIDLRTRLGAQSEHAAHGLVQKAHARILKGLDTEIAKLEAEISAKVKSSPDLAQRVDLIKSVPGLGETSAANLVAGMPELGQVSDKIAAALVGVAPYDDDSGKRRGDRRIKAGRRWVRNAIYMPCVGAATLNNPVLKAFYRRLIAKGKEPKVAIIACMRKLIIILNTMLARRQKWDAKRYSLS

SEQ ID NO: 339140 - protein, 449 aa, unidentified
MPKKRAKSVNLPIMEPNAAGVDIGTTQIFVAAPPERDPDPGRCFQTFTVDLEKLADWLQQCQIQTVAMESTGVYWIPLFQILEKRKIEVRLVNAHHVKNVPGKKTDVEDCQWIQHLHACGLLRGSFRPADEICAIRSLWRHRDNLIELATIHLQHMQKALDQMNVQLHHVISDLAGATGLAIVDAILAGERDPAQLARLRDWRIRASEETIMKSLVGDYREEHVFTLRQSLESYRHYQDQIQKVDARVKQMIQTVPSKVAEGEKPPKERNPPKTPWRNEPPQLRDDLYRTFGVDLTQIPGINTLTAQMIFTEIGPDFSRFPTAAAFCSWLRLCPDPKISGGQVLSSRTRPTKNRAALALRMSAQGLHRSQSYLGDYFRRMRARMGTPKAMTAAAHKLARIVHYMVTTQREYDATVFQDQERRTQDRKRTKLYAKGKEFGLQLVPAEAVP

SEQ ID NO: 339141 - protein, 342 aa, unidentified
MDEIKRIGMDTSKHVFQLHGVNAAEQPVLRKRFTRKAMEEFFAKLSPCVIAIEACGASHHWARKLGSFGREVKLIAPQHVKPYVKRGKNDAADAEALCEAMSRPTMRYVPVKSLDQQAALMLITVRDRLIRTRTQLSNAIRGHASEFGITAAKGLAHIGPLLERISQDTALPDLAHRLFARLGAEYTEQETRLDEIDTELATLHKADERSRRLAKIPGVGPIGAVLLSMKAPAPEQFRSGRDFAAWLGLTPKDHSTGGKVRLGSITRAGDENLRSTLVLGATSLLQQVRKQRGKGVSPWLTELLKRKPPKLVAVALANKIARIAWKLMISGEKYAMREAQAI

SEQ ID NO: 339142 - protein, 324 aa, unidentified
MNVIGIDISKAKLDCAWLRENNKVKSKVFSNQIEGWKALISWAQKNTQEGTAQLHFVMEATGVYHENFASWLYDQGASVSIINPAYVKHYAQGIGVRTKNDKKDSVVLARYGVKESPLLWQPAPLEIRTLKALLVRLDAVEKDLLRENNRLEKSTFTETPTAVLKSIELTIEFLKKERKNLEKLIEEHLNKHDKLKADDALLKTIPGVGPVIAQRMIMIVGGHQFSSASQCAAYLGLIPVEKESGSSIKGRSRLAKNGNPTIRAKLYMAAISAKQYNPDIKAQYVRLTEKGKSKKSALGAAMRKLVQICFGVLKHQQPYQPQIG

SEQ ID NO: 339143 - protein, 351 aa, unidentified
MWIIGVDYHPSVQQIAFVNTDTGECGERRLSHSDGEAEKFYRELKAAGCKVRVGMEATGHARWFERLLAELGFELWVGDPRQIKAKRVRKQKTDRLDAALLLQLLLEDRFPRVWVPSAENRDLRQLLWHRHRLVQMRTRIMNQLQAVAMNEGVRRKKALWNKSGRARLESLPLAPWAARRRRDLLELLDRLNPTIEVLSAAVEQEAKQRPEVLRLMTHPGVGPITALAFVLIIDSAERFACGKQIASYVGLIPCEDSSSDRRRLGHITKQGNSLLRFLLVEAAQAVVRRDPDWRRRYTHLTMRRDKRIAKVAMARKLAVGLYWMMRKEWNYEQSKKFGSYAGESKYGHGVQ

SEQ ID NO: 339144 - protein, 423 aa, unidentified
MGQWGARGVVSLTDRTSIDGNTKVDKAQTAWAGIDVGKTHHWVCVLDAEGNKLSSMKVANDQTEITATIATVGALADRIVWAVDIIGAPSAMLLALLIQAGQSVRYASGRVVAAMSAAYSGEGKTDAKDAYVIAETARIRRDLTVIDPGTDLVRNLELLTGHRADLIADRVRMINRLRDVMTSVFPSLEREFDYSSCKGALVLLTGYASPERLRRVGETRLAGWLQRRRVRNYAAVAARAIAAARAQSVTLPGQEIAAAMIAELATNTLALDQRLTELDAQIAATLDEHPQAEIIQSMPGFGPILGATLLVAAGDLAAFPSAGHLAAAAGLVPVPNDSGRRTGNLHKPRRYNRPLRHVFYLSAQTSMMRDGPNRDYYLKKRDRGRTHTQAVIALARRRIDVLWALLRDERIYTAIPPTLAQAA

SEQ ID NO: 339145 - protein, 344 aa, unidentified
MENYAGIDVSLELSSVCVVDAHGKILKEAKVASEPDAFVEFFEKLGFAVKRIRLEAGPLSQWLHARLKRAGFETVLLETRHVKAALSAMTVKTDRKDARGIAQLIRMGWFRPVHAKSIGAQEIRALLVARKQLLGRLIDVELSIRLILRGFGLKVGPVTRKNFEARIRELVAGQATLERIATSMLSARSALKAEYGRLHKAVLAIVRDDAVCRRLMTVPGVGPLVAITYKSAIDDPHRIVKSKAAGALFGLTPKKYQSGEKDVTGGITLAGDEIVRTALYEAANVLLSRITRFSKLKRWGMDVAKRRGSKRAKVALARKLAVILHRIWVDGTTYRWAEAGSIAA

SEQ ID NO: 339146 - protein, 342 aa, unidentified
MTQFTFFVGVDIASVAFMACVGTAPWKLTLKPVKFDNEEDGFASFLNWLTNNNLPPEKTVVCMEATGVYSEGLAYFLFASGYTVAVEPPLNIQRKFPANASKTDELDCQYIAEYACRYVDKLAFWKPRADLLEKVKVLLTTRQHFSVQLTGHKNALIAVNRKKVTSELAQQVHQAMIQQINKHIKAIDQEIRRLIDDDPTFKQTFLLLMSVPGIGLQLAAHLLIHMQETLDPKVLAAFIGICPIKHESGTSVYSAPTSRHYGPPVMRKLLYLGACSVRTHKKQFQLYFFRKVAEGKHKKVVLNNIENKILKIACAVVRSQKPYIPNYVSVNPLVFQKTLTLS

SEQ ID NO: 339147 - protein, 314 aa, unidentified
MDAIFVGIDVSKDKLDVHVRPGGESFVVPRNAEGLDELIGRLKPLSATAIGVEATGGFEQVVAAALGGAGLPVVVVNPAQVRAFARSLGQRAKTDPIDAAVIAHFIEATRPQVRTLPDEQTALLAQLVTRRRQIIQMLVAERQREQHPLSRTMKKSLARLIKALEKELNALDEGIDEALRSSVVWQEKEHLLKSVPGVGDVTARTLLAEMPELGALDRRQIAALAGLAPYAQRSGKWRGKSFIAGGRSSVRAVLYMAAVTAARANPVLRVFYRQLVAKGKSKILAQIAVARKLLTILNAIIRDKKPWTPVQVSA

SEQ ID NO: 339148 - protein, 426 aa, unidentified
MTNSLFIGVDVSLQSNQICVLNFDQHKFFNLKFPNTPDGCEDAINRIKNIHDKFYFDKIVIVCEATGMYSFHLACYFSSHEYLNNFNTEVYQINAHDFAKYKDSFSDIEKTDPSDAYILADFARVGRTKALHPFRGSQYIALQRLTRQRYHISKNLVKEKLYVMNNIYLSFSGLIIADKKNKPFSNMFGATSCAIFDNFDSPDQIAETPVDNLLDLISKVGKNRTKNPNEKIDLLNKAIRSSYRLEQTAYNGINIAVASSLNTIKFLENQLKQVDKAILDTVSGLDSNAYNSLLSIRGIGKVYAAGILAEIGNINYFKHNSNLAKYAGLYWNRTQSGKFEKEDKKFSQHANKYLRYYLIEATASCVRMNFPFIKNFYDSKFKEVTKHQHKRALVLSARKLVRLIFGLLRKNQYYSPLDSNTQSLVN

SEQ ID NO: 339149 - protein, 343 aa, unidentified
MDYYAGIDVSLEQSSLCVVDATGKIVREAKVASEPEALVIFFQQLGMAVTRIGLEAGPLSQWLHAGLTKAGLETVLLETRQVKAALSAMIVKTDRKDARGIAQLLRMGWFRPVHCKSPPAQETRALLVGRKLLQGKLLDVELSIRGILRGFGLKVGAVSKGRFAARIRELIGGQPMLERVIEPMLRAREALHQEFHTLHRAMLGIVRHDGVCRRLMTVPGVGALVAITFTSAIDDPGRFRRSRAVGAHFGLTPKKYQSGETEVTGGISRVGDPLVRAALYEAARIMLTRTVRFSGLKRWALAVAKRRGMKRAKVALARKLATVLLRLWTDGSAFRFGQEAAAA

SEQ ID NO: 339150 - protein, 425 aa, unidentified
MSEKIVVGIDVSKAFSDICILSPNNDIIKRLKISNDINGMKSLIYVLEKVEDEYEDRAIIIMEATAHYHQILANFFRKHNYEVIVINPIQSGALKNINIRKIKSDKTDAYNIALLYRIKNYNETITHSDTVNSIKKLCRQHKELTDEIVEHINRLIAFLDISFPDFKKVFADLQGKTPLSLLEKYPTIQEVLSPENKQDIIQLIKENSHKSSSYAEAKYEKLFKAAEKSIEVCIVSLSSAVLIQTTVRVIFSLQEALKAIDDEIKRLSLLDEKFHKEIVLLQSIPGVGEYTACVVLSELGDISNFSKPKELVAFFGLDPGVSQSGTYNRKNNKISKRGSPHVRSILHMLAKSNVYPNRNREYLNPVMRAYFEKKIAEKPYKVVMCAIMRKMVQIIFAVLRNQKSFELRTPEEHQKLIREKSKLVA

SEQ ID NO: 339151 - protein, 360 aa, unidentified
MRQSNKNDFSGQNIYVGIDVHLKSWHVTVMTDYGFKRKHSQPPSAQALFEHLSRNYPGGTYRAIYESGFTGFSTYYALLPYGIDCVIAHAADIPTGQNESVMKSDAVDSEKLARTLREGSLRNTVHVPSRDILDHRGLVRYRKRLQDTLSGYKSRIKHLLYSNGVTIPESHSSSSSHWSKRFIRWMQEDVRLLSPTRRTLERQLEHIEALRREVLSITAEIRMLSRSERYEGKVALLRSVPGIGLVTAMTLAVELEDVGRFPSQRDFASYIGLVPTCRNSGEKARTGEITFRGNNRLRNMIVESSWVAIRMDRDLAAAFGRYSARMKPQNAIIRIARKLTNRIFAVLKSCKPYEYDKCCL

SEQ ID NO: 339152 - protein, 362 aa, unidentified
MKQFIGCDVHKRYSVFVSMDEAGKTSRAVRVTHGNGELEAYLSGLPAGTPVAVETTGHWYWLLDAIEKAGLEPHLAHALAAKRMMVGPNKTDQLDAKGLATLLLNGTLPEVWVPGGNVRDLRGLLRSRLALRRIGTALKNRISSALARYGLPQQFKGDLFGSGPAATKCREESIAALPPHSRFATEREWKLLQSVEEGVSALTAEMAGSIGKLGWVRRLRTLPGVGEILGPTIYLEIGQVERFPTPAHLAAYAGLVPRVISSGGHTRLGRTRRECNRFLKWAFVEAAEAVVAHQESMAARHVVRLYRRVKNNKPDRHNKAVVAVARHLAESAWHILERNQDYREPQPTPGMIQRFHTVGRPL

SEQ ID NO: 339153 - protein, 410 aa, unidentified
MELLHRRCCGLDVHKDTVVACLRLVSDGKVTTEVRTFQTTTADLLRLSEWLAVNGCTHVAMEATGIYWKPVWHILDDGEFELVLANAAHVKNVPGRKTDVNDAMWLAELLAHGLIRASFVPDAQTQEMRNLLRTRKQLVREQSSHVLRVQKTLEDANIKLDSVLSDVMGKSGRAMIEALIAGETNPAKLASLADRRVKASPEQLREALRGRVTKHHRFLLRLHLNQIDALDAAMATVDAQVEANLAPFRTAVELITSIPGIKTLSAHAIVAEIGIDMSRFPSAPHLISWACICPRNDESAGKRRSNRQRKGATWLKTTLVQCGWAAVKKKGSYLQAQFHRIKARRGPKKAIMAVVASILTAIYHMLKDGTMYQDLGCDHFKRQSTDQQKKRLVKRLADLGYTVELKPLTA

SEQ ID NO: 339154 - protein, 406 aa, unidentified
MMTPTRRRVTGGVDTHADTNVAAVLDTVTFRTLARATFPTTAVGHQTTLEWMRDQGALDAVGVESTGTYGAGLARHLVAAGVKVVEVNRPEKLDRYLDGKDDFIDAEAAARAVLSGRASAIPKSGDGPVEAIRSLETAHESAAHDRVEAINQFKSMMFRAPNSFRDVFSTKTFRHQLNAAVRFRTSYDDLVEQELRVALKMLAQRIRFLEAQIDDIEARLRPIIAKHFPALLGLHGVGPHSAAQLLMAAGDNADRLHSEAAFAKLCGACPQPASSGKTIRFRLDRGGSRNANRALYRIVIVRMRHDDNTKRYVARRLAEGKTKAEIIRCLKRFVAREVFAAIINPPDHVPTGADLRAARVAAGVTLTALAVSLSVAPTNISRLERGIDHHTTRVHQALETITAMTT

SEQ ID NO: 339155 - protein, 325 aa, unidentified
MSLSILGIDIAKATYQVTLLHDGKSYRGEFANRVKEFGRLANWLKKHGASQVHACMEATGRYGDELAHYLHDAGHIMSVVNPLRIKSYARSRLIRNKTDPLDADVIADFCQTCQPPAWVPTPPEMRELQEFFCQYDALQDAITQTKNRLQSGFQSPLVLKQLQAQLDLLTQQLEALKQLISDLIDRSPGLKQQRELLESIRGIGEITASRLISYDLLRFKDARALSAFAGVSPMQGLSGTSVHRKTKLSKIGDSDLRRALYLPAVAALRWNPVIQNLAKRLEARGKCKMSIIGAGMHKLLCLSYGVLKSGVPFDPTYSLKAQVAA

SEQ ID NO: 339156 - protein, 339 aa, unidentified
MKQVSTIGLDLAKTVFQVHGVDEQGEVLIRRALRRDRVVAFFAKLPACLIGMEACATAHHWARELRQLGHTVKLIPPAYAKAYVRRNKNDPADAAAICEAVSRPSMRFVPVKTEQQQAAAGIHKVREMLLKQRTMLMNHLRGMMAEFGIVVGEGPQHIPALLGVLADPQDERIPALLRDGLRLVADSLRGLEARLAVIDKQIVALGRDNATYRCLITAPGYGPILSSAMAAIVVDPTVFRSGRDFAASLGLVPRQDGTGGKVKLGPISKRGNGYLRRLLVNGATSVLGSKRAKHDPWLAKLLATKPRKLAAVALANKMARVGWALMVRQESFRSMPAAA

SEQ ID NO: 339157 - protein, 354 aa, unidentified
MIIIGADYHPGFQQIAFVDTDTGEFQERRLEHREEAERFYRDLAAQGATVRVGMEASGHARWFERLLGELQFELWIGDAAEIRTKRVRKQKTDRQDAELILRLLLEDRFPQVWVPNWENRDLRQLLWHRHRMVQARTRIMNQLQAVALNEGLRCKKRLWRDAGREQLESFALAPWATRRRRDLLELLDRLTPTIAELTQAIEQEVENCPEAQRLQTHPGVGALTALAFVLIIGRPDRFQCGKQIASYLGLVPLEESSGQRRRLGHITKQGNSLLRFLLVEAAQVTVRSDPEWRSKYFHLAMRRGRKIAKVAMARRLAVRLYWMWRKGWDYQQMTKFGSHAGQPGNRDGARLNTE

SEQ ID NO: 339158 - protein, 395 aa, unidentified
MYGPVCTVVWEGRSREAPPYPDRSDFVPWDGPAVLLPHWHRMLGGGAKDKEHAMSQISNAPVAVIGIDIGKNSFHVVGHDARGAIVLRQKWSRGQVEARLANMQPCLIGMEACVGAHHLSRKLASLGHDARLMPAKYVRPYSKGQKNDFNDAEAIAEAVQRPTMKFVATKTAEQLDLQALHRVRERLVSQRTGIINQIRAFMLERGIAVRQGIGFLRTELPTILATRTDALSPRMLRVIEELAGDWRRLDQRIDGLSGEIEALARQDQACSRLMTVPGIGPIISSAMVAAIGTGDVFSKGRDFGAWLGLVPKQISTGDRTILGKISRRGNRYLRVLFVQAAWVVLVRIKNWERYGLKSWIEAAKRRLHHNVLAIALANKLARIAWRCWLKDVPSS

SEQ ID NO: 339159 - protein, 416 aa, unidentified
MQIKNETLVVGIDIGKKFQFARAFDNRGLELGKLLRFENSAQGFANLDAWLQGIMQKHEMTEVIVGFEPTGHYWFNLGDHLVACGHKLAIVNPFHVKCARELDDNSPSKSDRKDPKTIAMLVKDGRYRDVYIPVGAYQELRELVCERERLQERLSALKNQIVRWQDIYFPEFTTVFKDWSKQAAWLVLRHLSTPQKVIDAGAQEILRTWREEMKRPSLKRAERLWLVASQSVGRKEGTMAAISSLQFVMTEYELITMRLEQLKEEMAECLSQIPNAYRLLSIKGMGVVAAAIIISEIGDISRFTDPRQLIKYAGLNLRENSSGKHKGKTTISKRGRRRLRLGLFQAMIPILATNAEFRALHKRNTTRSQNPLTKMQSLIALCGKLLRVTFALLTKGIAYDPEKLALETTTDTVRAA

SEQ ID NO: 339160 - protein, 314 aa, unidentified
MYDYIGIDVSKKVLNIFDGKKDFIFNNKENLSSFKKYLKKRYPDFSSLVILFEATGIYSYHLKAFCATHMIKAYIINPQASHHFAKSLGTRSKTDTTDARTLWAYHQLIVDKDIRIPKVDPIATTLSSYLVSYRLTLKQKLALTNHLEGVKDKTLYRLLKKEQERLCKLEHELLIRMDTYIKKYPKLNEDYQRLLGISGIGQKTAIGLLTLFQTYPDTNRNQITALIGLDPIQRQSGTSVHGRSRISKHGNQMMRKCLYMPTLVSIKYNQKIKAFYDRLVLKHKPKKVAVIAAMRKLLLIAHAIYKNKTVYVPG

SEQ ID NO: 339161 - protein, 379 aa, unidentified
MTQPKTRIPVHGVTDRVEIDAVAILISRIHPLLRSSRMKAYVGLDVSQRETSICIVDLRGDVVEEFTAPSNPQALGETLLDRGHRYVRVGLESCGIADWLYEGLAEKGLPIICIEARHAHGVLKARVNKTDRNDARGIAAIMHAGFYRAVHIKSAPSRKIRTLLATRRLLRLKIVDIENGIAGLLSTSGRTIARARGRRFYETQVFSLAESEPDLLGWLAPLLAARAALQTQFTLVDEAVKQLAGEDPICRRLMTAPGVGPLVAITYRVAIDIPTRFSRSRNVGAHLGLAPRTRQSGTLDLRGRISRCGDRQLRSALYLAATAVLNPRTGPSPLRAWGQSIAERRGRNKAKIAVARRLAVILHRMWVNGTDYDNGATVA

SEQ ID NO: 339162 - protein, 413 aa, unidentified
MLDTTTFVGLDVHARSIKAVSLDVMTGEARCATFGYDAGAVAELVRSVDPRARCVYESGVTGFDLQKRLSGLGVDCVVGAVSKMIKPSADRRRKNDRNDAEFLARMLSVGNVVEVWVPDDECEAARDLTRALEDARDDLSRAKQRLSKFLLRHGLAFDERTPTGRRKGNWTRAHWSWIESIRFAEGADNDVLAYYVDAVRRAAEEKARLEGLVEAEARKPRWRRRVDSLRCLKGVDTASAADLVFEAGEFSRFRNARSFAAWVGLTPSEHSSGESDRRGAITKAGNKHLRKTLVEAAWHYLTCSGRPKGLAKGQAPDRGARRHAAKGVRRLVERREALLARGVHGRTSPRRASSPAGYGRSASWPRRRRGGRSPAHKPVTPEAVRSEAVEANLRSLFCERPGRHTRAQTAGST

SEQ ID NO: 339163 - protein, 352 aa, unidentified
MYHVGVDVGDKCSSVAILNDDGKVFKQIEVKGGWNAMLSRVALLPRPMAICYEASCGYGYLHEKFSQLSDRVQVAHPGQLRLIFQAKKKHNRVDALKLAKLLYLDEVPRVHVPGVDVRSWRMMIEFRQKLMARRVSVKNQIRGMLKSQGITSGEVAGGKSLWTKKGIVWLNDVKLPELESLRREMMVEELKELAGKIKRVEDELAKVAARHPGVALLMTIPGVGIRTAETFVAYVDDVKRFDRLKQVGSYFGLVPCQDATGKVNRLGHITRDGPATMRKLLVEAAWQGVRRSPTIRSFFERIKRDDPDRGKIALVATGHWLVRVMASMLRSGECWRETPVPERAGSPERAGQ

SEQ ID NO: 339164 - protein, 416 aa, unidentified
MIHETAASESIWNDRLRVAAAWITLRFGEPQRRATCEREPVMTKIRFIGLDVHADTIMVAVAEPDGDVRSLGVIPNRAESVRKMMKKLGPAERLRVCYEAGPTGYVLYWQLIGLGIACEVVAPTLIPMKAGDRVKTDRRDATKLARCYRAGDLTAVWVPDAAHEALRDLVRAREAAKKDQLRARNRLSKFLLRHGHRPTIKMTPWSDRHLRWLRQVHCAEFAQEATRLDYLHEVDHAAERIVRLETAIDTAIQTAPPKMRAVIDALQALRGVARMAAVTIVAEVGELSRFARAPQLMGYAGMGPREDSSGGRTRRGGITKTGSAHLRRIAIESAWAYRHRPAIGAPLRRRQALLSETVKAIGWKAQLRLHTRYRRLLARGKCSQHVTTAVGRELLGFIWAIAVTTEREHDAAEQAA

SEQ ID NO: 339165 - protein, 362 aa, unidentified
MSDPTAKGEETKLTVGLDLGDRHIQVCLVDEAGEVIEEARLATRPQALRRRFCGADQLRIVLEAGTHSPWVSRLLAELGHEVIVANPRKLRLIYTNDSKSDRVDAEYLARVGRLDPTLLAPLRHRGAETQVDLALLRSRNALVRARTRLISHARGTTKSLGARLPACSSESFAAKAGACLPDELRPALDPVLAVIAGLDAQISALDARIAEMARQRYPETALLTQVPGVGTLTAMVYVLTLEDPQRFPKSRSVGSYLGLRPRQRDSGSAQPQLRITKAGDEHLRWLLVGAAHYILGPFGPDTDLRRWGLALAAQGGRAAKKRAAVAVARKLSVLLLRLWTTGEVYEPLRNARLHGELLAAPS

SEQ ID NO: 339166 - protein, 374 aa, unidentified
MSSDSVVLVGLDVHKDSIMVAYSVGLGDVENLGKISPRATDIDRLCKRMQSKASQVMFVYEAGPCGYGLHRQLTDKGHQCMVCAPSLIPRKPGERVKTDRRDAARLVRSLRAGDLSPVHVPSIEDEACRDLVRAWGAARQGLKQARQRLKAFLLVHDVRYTGRANWGPAHRHWISQYSFDLPWQQIAFEEHRRTIEDRLTQCARLETTLREAAPQWRFYPIVEALQALRGVQFTTAIGLMAELGDLSRFDHPRQLTAWLGLTPSEHSSGEKRQLGSITKAGNSYARRLLIEAAWSYRHPAKISPAIQKRHDGLPKDVVDRAWDAQLRLCKRYRKLTARGKHRNVAVVAIARELAAFIWDIARMTPVTAAVQEAA

SEQ ID NO: 339167 - protein, 426 aa, unidentified
MTYRIAGIDVHKRMLAVVIADVAVEGEYQFERRKVGTSPSEMCRLADWLVAEQVEEVVMESTAQYWRPVWATLEQRWRPKRLQEGAGARSGQLHLAQAQSNRGAAGRKKDFPDAERLVKRLAAQELRLSFVPDVEQRLWRTIMRRKHQLTRNRVQFQNRLECLLEEAHIKLSSLVSDLLGKSARRMLQAVAEGAASPEAIAALADRRLRATAQQLSDALGACRDIHPVYRQLLKMALEELKLIEEQIDKLDQEMARLLSAQQEVVQRLAEVPGLGADSAQQIIAEVGPAAAAFPSAKHLASWVGVCPGEEESAGVNYSHRSPKGNRQMKGLLNQAANAAVRTKGSIFEFVYRRLVPRLGHAQAIGAIAHRLCRLIWMILHQAIRYEERGPAVSRSKTERRATLMIRELRRLGYRIEPMGGQAGVSV

SEQ ID NO: 339168 - protein, 366 aa, unidentified
MKKQTSEVISRESLVNELNRVLNLGLDVHYRQVTVAMQEDGGRIKAAGKMSYGDFLNWVRKKLEEGWEINSCYEAGASGYWLHRELVKLGVKNLVVVPKAMGQGGKKQKTDKRDAGELCDSLDRYLRGQRKALSEVAVPTEEQEEKRALIRYHRQIMKDRGRCEARGKGLLCAQGIQVRGRWWQGDTWLTLISDPRLKDWMKEQLVGWRNKILSTDEEQSALRKRIAALAPALLPKGVGAYSAAVLHYELRGFEHFKNRRQVGSITGLCPGVHLSDGRGKEGSINRCGIGIVRWTLVEMVWRLMIWQPQYPPVRRLAAGFVKSKRAKKRLVVQAARRLAIDLWRLSTGQTTPEKLGLVMQSHSPAN

SEQ ID NO: 339169 - protein, 385 aa, unidentified
MSQLNDLSRSLTSLEQDNAIIAVIEMSQSSWLVAGIVPGIERHPLKKLEPNEGELLRLLMRWRAEATKMGCTITRIAVAYEAGRDGFWLARWLRAHDIETYVIHPTSVAVSREHRRAKTDRLDTGLLKRVFIGWLRGEPDHCHMVTIPTLAEEDAKRPNREREGLVRERTRIVNRMKSCLARFGVRSFKPTLRKAPERLATLVTPEGVPLPANTLLELRRDMARLRFIMDQIKEVEEARAQRLEQAPQEKSHAMVRLLARVIGVGIETADMLVHEILSRSLRDRRAVARYAGLTGAPDESGSRRQEKGLAKAGNARVRRGMIQLAWRFLLFQKDSALAQWYRTRTESAGKKRKTMIVALARKLLIALWRLVTIGEVPAGVVLRAA

SEQ ID NO: 339170 - protein, 352 aa, unidentified
MNITSAGADLAKNVITVCAQDCSGRTVERRDLRRDAFLAWLRRLPAGCIVGMEACSASHYWAREMVAIGLQPRIMAAEFVQPYRKSRAGKNDRNDAEAIAIAVRDANMRFVALKSVEQQARLSRHRMREGWKEERTALGNRMRGLLGEFGLVIPKSQAALGKALIEALHDAQVPEPVRELVRCTREHLELLGKRIAECDRAIGLACRGDPAAKRLQEMFGVGPTSADAAVATVGDARAFRNGRQFAAWVGLTPRQFSSGGKTRLGTITRRGDAYLRTLLVQGARSALKSALKCAPERASRLQQWIVQLNARVGYQKTLVAIANKNARVIWALLAREETYNPEAWKAYAPTKG

SEQ ID NO: 339171 - protein, 395 aa, unidentified
MLATNERPEAPTAIRIDLGAIFVSLELSRSKWLITSLSPGGGEKMSKHAVAADDIAGLLARFGELKRKAQARIGRCFPIIVVQEAGLDGFWIHRVLQAEGIESHVVDPASIATSRRRRRAKTDKIDGETLVRTLLAYKRGEPRVCAMLRVPTPEEEDRRRISRERKALTNERVRHVNRIKGLLFSQGVSGYQPLRRDRRTRLEELRTGDGRPLPTHLKAQVGRELDRLELLIGQIKAVEAERDAMLAAAPVGSAHFAGCEQPALPMLLALKGIGPEFAVVLWSEGLSRHFDNRRQVAAYAGLAPTPWQSGSVDHDQGVSKAGNPRLRTTLIQVAWLWLRHQPHSVLSLWFKQRVKQNDGRLKKKTLVALARKLLVALWKYVDAGVVIEGAVMKTP

SEQ ID NO: 339172 - protein, 329 aa, unidentified
MKKDWYVGIDVSKKWLDVAIFVENSELKGYSHTQVGNSKSGYKELLEWLKEHDVDASTCMYGMEHTGFYSDGLQHFLDKKGYKYTMLEPAVIKHYPIQPREKNDRLDAAKIADYLFRFKETIKFSRVPDKTMEELRNLHRERKFYVEDRVVYLNRKQVVGKEEAKRLDKIISLLDKQVESIEEKIRDIIRNDESLMESYLYLTSITGIAFVNAVNAIVITQNFTVFKTARDYASYIGVSPHTKKSGTTVRWKPKPYKHCDLTAKADISQAAKIAIVHDVELKRFFERKCNGKEDADTIRKAMNAVKFKLVLRMFAVVKQKHEYRQFTTI

SEQ ID NO: 339173 - protein, 441 aa, unidentified
MAMRKRDEEVVFPNAAGIDVGASSHWVAVPRQATEEPVREFGAMTDDLNAMADWLLGCGVGVVALESTGVYWIPIYEVLERRGLQVWLVDARQMKYVPGRKSDVQDCQWLQKLMSLGLLRAAWRPGDEVCVVRAVVRQREVLLTEQASWVQRMQKALVQMNIQLTEVLSDVMGMTGQAIIRDIVAGQRDAQALARHRSGRIKASAEEVRKALTGNWREEHLFVLTQALAMYDSLAQRIGECDAKTQALLAPLGRQDIDLGKAPKERSKQRAAFDIRQALANWAGVDLTRIDGLGVAAVMKILSEIGPDLSRFANVKHFCSWLGLCPGTKISGGKVLSANTKRSANRVRQALKMAAMSLSRSDSALGAFYRRLCGRMDKPRANTAVAHKLARMVYFMLTRGEAFVDKGQQHYEQQQRQRSIAALKRRAAALGFNITPSPATA

SEQ ID NO: 339174 - protein, 316 aa, unidentified
MEQRQSNTKIAGIDVGKLCLDVAVHGLEDMTRVENGPTGIAELIGWLRAREVGRVGLEASGGYERKARAALEKAGFEVVLHQPLEVRLFARLKRRRAKNDELDAQLIAAATAQVDVVRAAPDPELTELADHLTAYELVTDKAAELKTSLERAPKDVAATVRTALRALERAKAKLLEQVIARIKARPDLLARFRLLLSLPGIGPVVAATLVVRMPELGSMSRGQAAALIGVAPFDRDSGQWRGQRFIQGGRARPRRMLYLAALAARRCSPTLKAFADTLAARGKPKKLVIVAVMRKLIEAANLVLSRGQPWLKQPAI

SEQ ID NO: 339175 - protein, 364 aa, unidentified
MKEKEKHNTIGLDLGERRHRFCVLDEAGEVVEQGSLCNDRAALARLTQRYRGALVVMEAGTHSPWISRYLKKLGSEVIVSNPRKVRAIYQHERKSDQRDAQMLARLGRMDRALLYPVRHSSEQAQQDLLRIKLRDSLVRARVGLINSVRFSLKSLGYTVRNPSSERFHKVVWETLPEAVRQMISPSVQALAELSARIKVLEREINLLARTKYPQTLWLQQVPGVGALTALYFVLKIEDPQRFENVRDVGAYVGLCPRRDQSGGSDPQLRISKRGDAYLRRLLVSAAQYILGPFGPKSALRAYGLMLAADGSARAKKRAVVAVARKLAVLLLSLWKNRSHYEAFPHWQTIEDKRSGTIAIHRVEA

SEQ ID NO: 339176 - protein, 339 aa, unidentified
MKLYGGIDLHSSNNYLGIINKNDKRVFKKKLRNKPELILKTLKPYKKDLVGIVVESTFNWYWLVDLLMDEGYRVHLANPSAIKKYEGLKHSDDNHDAFWLAQMLRLGILPEGYIYPKEQRPVRDLLRKRGHLVKLRTSLILSLQGIISRNCGYTINVNKIKKTTKNEVSPVLLGQEDLELSGEVSKETIDFLTRKIRKIETYIKNKVKMKNTFKYLDTIPGVGKVLSLTIMLETGPVDRFPKVGNYASYCRKVPTGWISNGKKKGKGNKKNGNRYLAWAFSEASELARRYDKHARAYYNRKAAKDHFMVAHSALAHKLARAAYYVMKDCVPFDHKKAFA

SEQ ID NO: 339177 - protein, 360 aa, unidentified
MKKVSKQMRKMEVADKPEMTLGLDMGDRYSHYCLLNAGGDVVEEGRMQSTEAALRRHFEAEPPMRIALECGTHSPWVSRLLKALGHQVIVANARKIPAITGSESKNDRNDAEKLARFAAYDPKLLSPLEHRRPERQLDLNLIHARSTLVRARTMIVNALRGLVKSAGGRLPACSTEALPTRAPAAIPAALAAVATPLIEQIALLNAQIAGMDKQVEKLAAKYPEITLLRTVPGVGPIVAAAYVLTLDRPGAASNRSAGAFLGLRPAQSQSGDSDPQRRITKTGDRCLRSLLVQSAQYILGRFGPDSELRRWGLRLASTGGKRGKKRAVVAVARKLAVILHAMWRNGECFQAFPQPVAKAA

SEQ ID NO: 339178 - protein, 368 aa, unidentified
MENNSTVVGLDVHKENITIAVLRPGKDRPDPSVTVENQPSIIEKKVRELNRRHAPLEFVYEAGPGGFALYRQITQLGHPCAVIAPAWMPMKPGDRVKTDRKDAEKLSWYWRMRDLKEVRIPTPEEESVRDLLRVREDVLTNQLRARHRLMKFLLRQGRIYQGKKNWTQAHREWLRQQKFDLEYLTKTYQANFRILEEIDTHLADLDREVETLAQGVNYRTAVGYLKCLKGVNTLTAMTLLAESGDFRRFKNARSYMRYTGMVSWEDSSGKRVYRGGIIKAGNAHLRRVLVQGAWTYRLRSLGSPTLAKRRKGYPAEVIHLARKADERLHLKFQRMVDRNKRSQVAVVAIARELAGFVWAIGQMIPSAQ

SEQ ID NO: 339179 - protein, 383 aa, unidentified
MNSVRYVGLDVHRDTISAAVLSESGRMIQQSILATRAAAILDFIGGIRGTLHVTFEEGTHSAWLYDLLVQRVDRLVVCNPRKNALMKSGNKSDAIDARKLAELLRADLLSPVYHGEKSAMEVQHLARSYALLTEDTARVMARIKAVFRSQAIACAGKKLYGSKHRGEYLAQLGACALRRRAELLYEELEAVQKLRRQAKREMIVECRKYPETKLLCSVPFLGPVRAAVLIGRVQTPHRFRTKRQFWAYCGLALEMRDSGEYRVVDGQVERRKRPAQIRGLNWNHSHELKNLFKAAATTASFSNGVFREFYLGLLKGEEIPRLWRGGSSSLTFTGVHPRNSLREPTKAHAKEKPDGPIGESKPLRMGVQIPRIIHSQMPAAGAV

SEQ ID NO: 339180 - protein, 359 aa, unidentified
MQAQINKLDFNGKNIYVGIDVHKASWTVTIELEHITHKTFSQEPCAHTLGEYLRRNFPGGNYLSAYEAGFCGFSTHRLLKKEGIINIVVNPSDIPTTDKEKRQKEDKRDSRKIAHSLKDGDLKGVYIPKEETEELRSLLKTRADLVKEISRYKNRIKSLLFQYGIDIPANFIYGSTHFSNAYINWLKSIRFRTSVGDIALNSFVSTTVLLRQELLKMDREIRAVYRSPKYKMLVDLLISIPGIGGYTAIVFIAFIEDMTRFCTLDELCSYVGLIPSTNSSSDKEKVGKITNRSNKVLRGLIIESAWIAVRNDPALMMTYQTLCERMKPSKAIIRIAKKLLSRMRYVWTNNEKYEYAVVA

SEQ ID NO: 339181 - protein, 341 aa, unidentified
MRKRVLVVGIDISKDDFHACIKEKGPDGNVRIKGSSKFSNDGKGFKAFTAWVAKRETEGCTTTYVMEATGSYFENLAYELYNLGFSVCVELPNKIKHFSKSLNVKTKTDKVDASVIAQVGIERTLPAWLPLAPEYRSLRDLCRERLSLTQEKAKAKCQLHAMRHSHDKLACVIALKEEQIAFYEASIKKIEKAIKGIVNANSPLKKKIARIEKVNGLGFATIVTVLCETNGFMLFKSIRQVVSYSGLDVEMKESGKLVGKSRISKKGNARIRQCLFMPALSATQHNERIKDLYGRIVERNPDIKKKGIIAGMRKLLILIFVLWRKDEAYNPNYQWNAKDIG

SEQ ID NO: 339182 - protein, 400 aa, unidentified
MELVERAWAGIDAGKGHHHVVVIDGEGRRMLSRRVANDEPDLETLIAAIVDCATEVHWTIDLADGPAALVLALLLGRGQRVWYLPGVAVNRASDGYRGEGKTDAKDAAVIADQGRMRRDLRELRLDDPLIAELRMLTGHRADIAADRTRAINRLRIQLLGVSPALERALDFTNRGPLVLISHFQTPRQLAAAGQSEVYRCLRNQKVRHADRLAATAIRAAATQHTSVVSEATAAELIARLAQAVLDLDRQLAELDKQIFLRFEAHRQANVIASMVGIGALLGAEFLAATGGSLDGFASADHLAGYAGLAPAPRDSGRRSGNLHRPKRYNRQLQRVFYTSALISIQTSTASRAFYDRKRAEGKRHSQAVLALARRRVNVLWAMIRDHSLYDDRRSPSTLAA

SEQ ID NO: 339183 - protein, 309 aa, unidentified
MEHFVGIDVAKDRLDVHLRPSGETFAVARDGEGLAQLVDRLQTLAPQLVVMEATGGYETIVASAVVAARLPLAVVNPRQIRDFARATGKLAKTDRIDAAAIAHFAEAVRPPVRPIADAQARALGELVARRRQVIEMMVAERNRRRRVTQSRVRRAIDRHLELLQTELSELEHDIDGAIRKSPAWQADADLLASVPGVGKATLRTLIAELPELGRLDRRKIAALVGVAPINRDSGTMRGRRTIAGGRPTVRSALFMAALVASRANPIIASYYVKLRAAGKTGKQALTACMRKLIVILNAILRDRKPWQPA

SEQ ID NO: 339184 - protein, 375 aa, unidentified
MAYDFVIGVDVGKYFHHACVLDPQGRQVLSKRINQHEGSLRKLFGKFLTDNASVLVIVDQPNNIGRLTVAVAQDMGADVRYLPGLAMRQLSRIHVGNSKTDVRDAYVIAHAGLNLPDSLRSVDRVEEVFIQLKVLNGIDEDLARAYTRLINQMRSALVGTYPAFEHVLRGQMIHRKWILHLLAKYGDPTKIRRIGKTRLAAFARSHKARNPEPVIDAMLAAIHGQTVSIAGAEYAELGVAMSAKDALAKLEHRKEIEAQILMTVGDMSDFPDAAHLASYAGLSPRTNQSGTSIMSNSPNRAGNKKLKNALWQSSFASIRFHERSRQFYERKRKEGKRHNAAVVALARRRLNVLFAMMRNGELYRDIPTIQEAAAA

SEQ ID NO: 339185 - protein, 326 aa, unidentified
MSIWIGIDVSKNKLDCAWTLENKKNHIIVSNNKVGFNKMLKECPDDSKFVMEATGTYYLNCALFLNNNKYHVSVENPYRIKNHMRSDMNRAKNDKIDAISIAKFGIEKNPEPWFAISKDILKIQQLRASLSLIVKQIVALKNQIHAFSQSDFADKDTIRMVSQTICYLEKKKKILGDKMIKVAKANFKEEFNLIISIPGIGEITTASLLGCIMDFNRFPSSRHLISFLGLSPTNRQSGSSLNLKGKICKMGNSDMRSLLYVCSSVAIQYNEACRNMFFRQKERGKQGNVPMVCVMNKLVKQIYGVVKSKTPYSKEIALGSKRIALA

SEQ ID NO: 339186 - protein, 455 aa, unidentified
MVDEAIFILFVQEKKKSFLATMTLINFVAANQKYYAFNLLSVFIMVFWSVQYLLQHLLVQTQLSDQLLQPLILILQLPQTPQFRHARPGKFFLPVNGMDYLLPLRLTVRNVLTRRITMNIVFPGIDLAKNVFQLCGLNQAGKPVYTKRTGRKELLQTLANIPACLIGIEASTGAFYWQREFEKLGHKVKVISPQYVKPFVRGQKNDGNDAQAIAVALMQPTMQFVPPKSPEQQDIQALHRARQRIVNHRTATVCQIRGLLLDRGIPIGSAVSRARRAIPLILEDAENGLSSRMRRTIAELYDLFNDLERRIHFFDKEIETVFRQSEACQRIAKVKGIGPKTATAVAAAIGKGTEFKNGRHFAAWLGLVPRQHSSGDRQVLMNMTKKGDKHLRTLFIHGARAVVRVATNNNDGHMNQWVNQLKERRGFNKTTVAVANKNARIIWSMLRNDTGYQVV

SEQ ID NO: 339187 - protein, 338 aa, unidentified
MSVSLLSIDLAKNIFQLYGVDERGHPVLSRRVSRSKLLEVVVALPCCRIVMEACGGAHYWARRFSAMGHHVQIIAPRFVKPFVKSQKNDRNDAEAIVEAASRPTMRYVAVNSVEQQDIQSMHRVRSLLMRDRIAQINQIRGLLAEYGVVIAQTPLKIRTQLPAIIDDECNELTGLTRSMMRDMYERLVLLDKQIARYDELIHHVHRASPASQRLEKIRGVGPMIATAVIAAAGSASEFSNGRQFAAWRGLTPRQHSSGGKDRLFGITKRGNGYLRMLLVHGARSVVQQAIKHTDTLSRWILEVQARRGTNIAVVALANKIARTIWVLLARGVEYVSPI

SEQ ID NO: 339188 - protein, 389 aa, unidentified
MYSYFVGIDIAKNTHWASCLSSDGEIILEPFSFSNDNSGFQKFISKLESLDKTKILIGLESTAHYGENIISYLFNLDYNIGLINPIQTANLRRSNIRKTKNDKVDTKIIIKALTLGNYSLITSRDINNLKLKGLCRSRRNLVTMRSKAKIQLVSYLDQIFPELAQFFKGNLHLNVSYQLLKEYSSPKQISSLHLTKLSNILHDNSHGRYNKQDAIRLRELAKNSVGIDNPSLSLQIKHSILQIELYNEQIAEVEALYKQILDEMNTPILSIPGMSYNQAAVIIGCIGDINRFEHSCQLLAYAGLDPSVIQSGNFQARSTRMSKRGSGMLRYSLVYSAHNVVKNNKTFRDYYELKRSQGKSHYCALGHVAHKLVRIIFKMLKDNVAFNLD

SEQ ID NO: 339189 - protein, 352 aa, unidentified
MTRITTIGIDLAKKVFQVHGVDAEGKVVVARKLRRKEVLAFFAKLPPCLIGMEACGSAHYWGREITKLGHTVKLMPPKYVKAYVKRGKTDAGDAAAICEAVTRPSMSFVPVKGLEQQGLSMLHSARSQLIGQRTQLINAVRGHLSELGIIAARGLLGLAELAAIVRNESDQRLPAIARTALMILVVQIETISKELTKLDSMLRKENKASELGARLETIPSVGPVIGSAFRARVTDAALFKNGRHLSAWIGIVPENDSTGGKVKQKGLSKKGDRYLRSLLVNGAMAVVRQAQKRPDKYPWVTRLLGRVSNKQAAIAIANKTARIAWVVMVRGGIYEAGHRAAHYRAQACAVTG

SEQ ID NO: 339190 - protein, 415 aa, unidentified
MTIQKAIVPQRFFGLDVHKHYLIAVAVDADLNVVMPAQRVEFTRLDAWIRKHIGADDAAALEMTTNTWELYDELSPHAHSVTVAHPPHVALITRSQVMTDKIAASILARLLAKGLLVSVWVPPIEIRELRALVAQRSKMTRLATQAKNRLHALLQRHHLLPPCGDLFHVQHQAWWSSLPLGKLEKINMQSDLETLRFAEAQIARLGAMMSDIAAHNEDAVRLIHLPGLGVINALTVLAAIGRITRFAEAKYLVGYAGLGARVHDSGLTSRSGRITKSGRKDLRAAMVEAAQVAVNTHPHWKAELARLEPRLGRNKAIVAIARKLLVAVWYVLHEKATDRFAEPQFVARKLTQFAYKIGKDNRPADQSVMQFVRQHMDMLQLGADLRQVPWGTKKKPLPLPPSSLLSETMSGVPHT

SEQ ID NO: 339191 - protein, 345 aa, unidentified
MELHTIGIDLGKTVFHLVGLDLRGEVVVRKKFSRTQLLRFTANVHVGLIGMEACGGSHFLGRALREQRHEVRLIPAQYVKPYVKTNKSDYIDAEAIAEAVARPTMRFVPIKTDDQLDMQSLHRVRERWVMRRTAVINQIRGLLLERGITLRKGRHHVDAALPLILEDADANLSGAVRLLLTQLKLDLDQLSVRIDEADAVIQKTAQENEACRRLVAIPGIGPVTATALIAAIGNGGAFHKGREFAAWMGVVPREHSTGGQQKLFGISKRGNSYLRRLFVQGARAVLQQRTKQSSGLSAWLAQLTSRTHRNVAAVALANKLARIAWAVLAKNEQYRPSVVADVAAA

SEQ ID NO: 339192 - protein, 322 aa, unidentified
MQGKISPERSASEVYVGIDVCKAWLDIYVHPAGVKLRVANARDGVLRLKKQLAAYDVVGIVMEATGKLHRYAQRTLSAAGYAVAVVNPLRSRLFAAAIGTLAKTDAVDARLLAVLAESLRPAATPPAPVWLEELQELVRARQAAAAEAAALANRRGASQAAFLKAELMRRLKSLATHMARLDAEIARRIASQATLQRRYAILLSVPGIGPVAAVTLLVGLAELGACSGKQAAMLAGLAPIACDSGDTSGDRHIKGGRAHVRTAIYMAALTAARFNPDLKGFYDRLRAKGKFAKVALTAVMRKLVVLANTLLREDRLWQPVHA

SEQ ID NO: 339193 - protein, 356 aa, unidentified
MEYGAIDLHKRESQVRIITGDGEVLDRRILTTRDRLTVVFWGRPQTRILLEASTESEWVAQHLESLGHEVIVADPNYGAMYARRSRRIKTDRRDAAALADACRHGNYRPAHRRSARQRLVQSMLNVRRELTDSRTRAILLARAITRAAGFRIRSGRTETFLDRLGALELPAAMTATLLPLRSVIEVLDDELAAADEQFGTLAEEDPVAKRLMTLPSIGPITATAFMAALDDVARFDGAAQVTSYLGLVPREYSSGEHQHRGRIVRSAHPHVQSLLVQAAWRMGRSSDAKTAGLRGWADAITRRRGKKVAMVALARRLARILFAMWRDHTEYQAPRVRIIRRTAAAIVEGPAAAAGV

SEQ ID NO: 339194 - protein, 410 aa, unidentified
MEVLHPRCAGLDVHRDSVVACARLVRPGGVERHVETFGTTTSELERLARWLDGHAITHVAMEATGVYWKPVWAVLAETFEPVLANAAHVKNVPGRKTDVSDAMWLADLLAHGLIRSSFVPPLAIQALRDLTRTRKQLTREKASHVQRIDKLLQAANLKLGSVLSDIMGESGRAILDALAGGESDPERLAGLVRARLRASRADLVEALRGRLAAHQRLLLGLHLGQVDAIDAAIARIDAELGDRLEPFRDAVARLTSIPGVGALSAAVIVAEIGLDMGRFPTAAHLISWAGLCPRHDESAGKRRSTRLRPGDPWLKTLLVQVAWCATRAKDTYLRALFGRLRARRGPRKAIVAVAASILTAIYWMLRRGVAYQDLGADHFERRDRARLAARLTRKLRELGFDVTLAEPAPA

SEQ ID NO: 339195 - protein, 353 aa, unidentified
MMVIGVDPHKQSHTAVAADELGRKKAQRTVRARREGHRELIGWAREIAPAGRLWAVEDVRHVAGGLIRELLAAGEQVVFVPPKLMAGERRGGRERGKSDPIDALAIARLALREDADLPAARLDEQVLEVRRLTDYRDDLVAERTRVVNRLRWMVHDLAPELAPAPRSLGSGRARAKLETGLRALPGGAGRAVALSQLARITALSAEITDLQQHLAALVAVLVPELLAIPGVAVITAAKIVGETGDIRRFRSPAAYARHNGTAPVPASSGTGHDGPHRLNRGGNRQLNAALHRTALVQARCHPRAAALLERRGQDKHETRKASLRVLKRHLSDVIYRALNADAWRLDQPAPHAA

SEQ ID NO: 339196 - protein, 409 aa, unidentified
MDQLIERCGGLDVHRDTVAACVRVPGPNGKRQQEVRTFGTTAAELLALRDWLEAHGVTHVAMESTGVYWKPVFYVLEDAFTCLLVNATHIKQVPGRKTDVNDCVWIAQCLECGLLRGSFVPPAPIRELRDLTRHRRVLTQERTRAANRLHKLLQDAGIKLASVATDILGVSGRAMLEALVHGTTDPAVLADLARGKLRKKLPALRQVLAGRFRPHHAFLVGQLLAHVDYLEEAISLVSEEVEARLAPFAEPLTNLDTVPGINKRTAEVIIAELGVDMSFFPSDRHLASWAALCPGNNESAGKHKSGKTRKGNRWLRTALVEAARGAVNTQDSALRARYRRVMRHRGHNKAVVAVAHAMLRAIYHLLAEGTTYRELGADYYDRRHQQRVTRRAIQLLERQGYRVALETAA

SEQ ID NO: 339197 - protein, 366 aa, unidentified
MDDATTAQEATVTVGLDLGDRYCQVCVLDETGEIVEEARVTTRPESLRRRFAGGDPMRIVLEAGTHSPWVSRLLGELGHEVIVANPRKLRLIYENDSKSDRVDAEYLARVGRLDPALLSPLTHRGAETQVDLALVRSRTALVRARTRLVSHARGTCKSLGGRLPGCGADAFTEKAGPVVPEELKAALGPVLAVIRHLTDEIRVLDARIEEMAKQRYPETALLAQVSGVGTLTATVFVLTVEDPARFPRSRAVGAYLGLRPRTASSGLSDPQLRITKAGDDHLRWLLVTAAHYILGPFGPDSDLRRWGLALAEKGGKRGKKRAVVAVARKLSVLLLHLWRTGEVYEPLQGARMQVRSLPPSWPETEA

SEQ ID NO: 339198 - protein, 384 aa, unidentified
MNKHSILFIGLDTHKEFNEVAYIEEHRGAQPVHLGRIPSSKVAVQKLVRQFESKYPGATLHFVYEAGPCGYWIYRLITSLGHCCYVVAPSLIPKKSGEKIKTDKRDALKLSKLLKSEDLTPIYVPEPEDEAVRDLSRAREVAMKDLKDAKYQLKALLLRNNINYKGTANWSQKHLRWLTELVLPHPAQHIVLQEFLHTINERISRLERLDNELTHHVHQWRYYPVVKAIQAMRGVRLLVATGVVAELGDLSRFDHPRKLMSYLGLVPSEHSSGGKRHIGAITKCGNGRARRLLVEGAHTYRYAANISTDMQKRQEGLPKDIIDIAWKAQLRLCKRYKKMIAKGKHYNLVVTAIAREMIAYIWAIAKEVVLTPVNTKLRLARVPA

SEQ ID NO: 339199 - protein, 325 aa, unidentified
MQIHFVSGDGEITDKQVKRAEFLDFFRNRSKCLIGMEACGASQDWARKLEAMGHEVHLMSPKAVKPFVSGQKNDYNDAIGIYKAIFNGVRRVPVKSTEIRDLQTLRRIRSQVTKDRVKEINHVRGLLAEYGIVMGKSITAFNKGISSALESLKERGDVSPLVAEELRTTVESIKTKIERQKKLDREIEQLARGCKNYENFLKTPGVGPFTAAMLCVLLCDPDIFANGRKFAAYIGLAPRSRGSGGKYFVTSIPLKFNCDSESRAVFVECAQAIARYKNKSPWVEDILRRKPKKVALIAIANKLARQVWAMANKGENFKQMAILTA

SEQ ID NO: 339200 - protein, 344 aa, unidentified
MENMYYIGLDVHKRKISYCVKDGSGKVFAEGSLPATRLDLDLWMKTLPHPWSGAMEATMFTGWIYDHLKPHAAALKVAHPLMLRAIAAAKKKNDRIDANKICDCLRCDFLPECYMVSTAIRERRRTLRYRNLLVRQMVQMKIKISSLLMEAGVSYNKQRLHKAGYFRELLASNPDIDEGLRALLRLCRETVVRLQKTESAMVRSLERDSLLIDRVERLMTIPAVGPITALTWALEVGDVQRFSSIKKAISYCGLCGAERSSGNTVQRTPLSKQRNKHLQTTLIEAAKMAPRNSADLAMLYDKEKQKGNANRATLAVARKLVAYLMAVDRGQRNFQVVESDVIAA

SEQ ID NO: 339201 - protein, 437 aa, unidentified
MRRKKNKANKSVNLQVLPVVHPNAAGIDVGAKEHLVAVPCDRDPQPVRTFQAFTPDLHELAAWLKHCGIESVALESTGIYWISLYEVLEQYGFEIRVVNARHVKHVPGRTKTDVLDCQWIQKLHSFGLLNGSFRPDQQIRKLRTYMRLRDNLVVNSTQAVHHLQKALFEMNVQLSNVISDIVGETGLNILEAIIAGQRDPKQLAALCSSRIKASRETVAKSLHGNWDDALLFALKVALETYRFSQTKIQDCDCCIQHHLALFESRAEVTNSPQNLKTQLHRVCGVDLTKIPGIKEQSAQIIISEVGLDMTKWNTEKQFCSFLGLCPNNSISGGKVLHRATRKVYNRAADTLRLCAQSLTHSKSALGAKYRRLKARLGAPKAIVAMAHHFARLVYRMLRYGQNYVEQGIHQYELKFQLQRIKWLKKEAQSLNLQLVPA

SEQ ID NO: 339202 - protein, 315 aa, unidentified
MTNPPVFVGIDVSKGQLDIALRPGGIFSVPHDEAGFAQILERLKANPPTLVVLEATGGLEIPLTGALAAAGVPVVVVNPRQVRDFAKATGKLAKTDTLDAQVLAQFAEVIRPEPRPLPDDQMQRLAAFLTRRRQLVEMLTAEKNRLASARQPIRKNLRAHITWLERALQQADTDMTEAIRQSPVWREKDELLRSVPGIGPVLTTTLLANLPELGTLTHKQIAALVGVAPLNRDSGTLCGRRTVWGGRAQVRTALYMAAIVAARFNPVIRAFYQRLCTAGKAKKVALVACMRKLLTIVNAMLKHRTLWDPNGVHHA

SEQ ID NO: 339203 - protein, 484 aa, unidentified
MKTKKHIQSSAGPKASRQSKSKKQSWKVVHPHAAGIDVGATEHYVAVAPDAVAAGMATVRSFGCFTEDIDAMVEWLKACGVDTVAMESTGVYWEVPFQKLEAAGMDVVLVNAQMLKHVPGRKTDVQDCQWIQQLHTYGLLRASFRPDEATCRLRTLVRHRANLVSSGAEHILHMQKALTQMNVQLHHVVSHLTGETGLRILKAILKGERDPRKLVELRDPQITRSSVAQMSKALVGDWREELLFVLEQSLRAWEFYQEQMRACDLQIEEQLKRLPSAAPPPAEEPKAGADPLASRTARPKAKQSRKRNDPERDLGPELARICGIDLTAAHGLRLLTVLTIVSEIGVDMSKWRSAKAFTSWLGLNPNNKISGGRLLSSRTRKVVNRVATALRMAAVGVAETDTWLGSHHRRMRARLGPAAANTASARKIATIVYHLLKTKEPFVDRDVLLYEARVYRHKLARLKKQAKALGYELVETSEQKQLAE

SEQ ID NO: 339204 - protein, 365 aa, unidentified
MLYIGLDVHQKSTTICIQDADGTELVITDCPTDEAGFRDALGVTLKENPGTLVGMESCAKAYVVSGIIEWLEGIPLVIAADEVASKTRSKKKKNDRRDARDLCTNLRTGALQRIVQLPPPAMRHLRSLLQTRNLLDKQQVQVRNAAKAVLREYGLAYATGPLFSASHWAKRLDQEMPEVVRLILEIHRDHTLWLRAKIDALSAEIVELAATNEAFAVVETIPGIGPITRAALAAYLFDIERFDGPKKVSAYVGLCPSSYDSGERRQGGRITREGPSILRGLLTEAAQQTARLYHPLNPYYRKFARKHGHKKAIVAMANKLCRIVYALVKNQEAFDPAQLGVERAEGGTMWFFKDAPKGPWRRVPA

SEQ ID NO: 339205 - protein, 391 aa, unidentified
MSMYFVGIDISKYKHDCCIISAVDQQIVSKFTITNDKDGFEQLLTALNSLSNPEDIKIGFESTAHYALNLELFLENANHSFMEVNPVLIKEYKKSTTLRRTKTDSVDCESIARWLMTVEYKPHSKGFYHAYSLKSLTRLRDRLIRQRSFYLVKITNVLDHTFPEFKPFFNERLSKTAIYLLENYGSAEKMAHMNSASYDKLRCISRGKFSIQQFLHLKELAANTVGVNNSIFDIELNSLLTLYNSLCKEIKNLEAEITRLIEEVHPHYMSIPGIGPISAAVIYAEYGDISNFSNPSQMLAFAGIEPGINDSGTESHGGRMVKHGSSQLRYVLLNACLPLIRFDLTFATYYAKKRAEGKKHRVAITHVAKKLIRVIYALERQDVDFNAQKIR

SEQ ID NO: 339206 - protein, 332 aa, unidentified
MSVYAGIDVHRKRSQVAVIDQDGEVLASRNVPSGVKPILGVIGGLPAGTPAAFGAAFGWGWLVELLEGYGFAPHLVHPLQCKAIASARRTNAKAGAAILAQLLRADLLPEAWIAPPAVRQLRALLRHRIQLVRPRTLLRNRIHAVLAGHGHGRPGGCWSGPGRAWLAALELPAASREVTGDGRALIDARQEPIDRLDGEIRQHARRDPRVKIVTQLPGVGPFTALVILAETGDISRFAPARKLAAWAGLTPTVRGSDRTVRHGHISKQGSVWARWILCEAAQTAKRHPDFAASYQAIARRRGKKIATTAIARKLLTRAYHLLTDASSGGAPH

SEQ ID NO: 339207 - protein, 403 aa, unidentified
MNMNAVGIDVSKGKSMVAILRPYGEIVSSPFEIKHTSSNIQSLIERINSIEGNSRIVMEHTGRYYEPLARQLSLADLFVTAVNPKLIKDFGNNSLRKVKSDKADAVKIARYTLDNWIDLKQYSLMDELRNQLKTMNRQFGFYMKHKTAMKNNLIGILDQTYPCVNTFFDSPAREDGSQKWVDFATTYWHVDCVRKLSLNAFVGHYQKWCKRRMYNFSKDKAEEIYGAAKELVPVLPKDDLTKLIVKQAIEQLNTASRTVEELRTLMNETASKLPEYPVVMEMKGVGPSLGPQLMAEIGDVTRFTHKGAITAFAGVDPGVNESGTYEQKSVPISKRGSSSLRKTLFQVMDCLVKTKPQDDPVYAFIDKKRAQGKPYYVYMTAGANKFLRIYYGRVKEYLMSLPE

SEQ ID NO: 339208 - protein, 380 aa, unidentified
MQQELPKDPTATPAEEAVLFVALELSRTSWLVAVQAPGGEKVSRHKLAAGASAELLELVGRQRAAAERRTGRAVRVMSCYEAGRDGFWLHRLLVANGVENLVIDPASIAVDRRARRVKTDRIDVEMLLRAMMARARGERRVCAVVRVPTPEAEDARRPTRERAALLAERVRHVNRVKGLCALQGVYDFEPLRPGAAERLGRLVTGDGRPFPRHLAAEVRRHLERLEQVCRQLAEVEAARDEPASPLAEGVARLVRLCGVGRHTASVLQAEILGRRFANRREVAQYAGLAPSPWASGGTRREQGIGKAGNARVRAAMIELAWLWLRHQPDSALSRWFRERVGQARGLVRRIAIVALARRLLVALWRYAIDGLAPEGAIVRG

SEQ ID NO: 339209 - protein, 351 aa, unidentified
MATATADNTQIIGGVDTHQDLHTAAVVSHDGTVLGAESFSTTRAGYRAMLRWFRSHGELLRVGVESTGTYGAGITRHLALSGIPVLEVTGPDTASRRAKGKDDALDAIAVAEAARTRRRVQVAKDRSGAVEALRVLRTTRKTAIKCRRAALQQLHNTIVAAPEEVRDQVRNLTRMQRLRTCAAWRPDTVGYRDPVVATKLSLKYLARRILDLNDEIAELDRFIIPLVEELAPSLLELEGVGTENAGAILVAVGDNPDRLRSEASFAMMCGVCPIPASSGKTQRHRLNRGGNRQANSALHMVVVCRMRTDQRTRDYVARRTLEGLSKREVMRCLKRYVAREIYRVLTALPAA

SEQ ID NO: 339210 - protein, 347 aa, unidentified
MVTLGGDCHKRNHMLMAVDENGRPLSELRVAATEQGHRDALAWARQWPERRWALENCRQLSRRLERDLLTAGEAVLQVSPKLMGTARRSGREAGKSDSIDALAVARAALREVHLPVAQLEGRARELKLLVDHREDLVGERTRVQNRLLWHLHELEPGFQVPPRGLLRAVVQADVRRRLKRHRGLVAELASDLVGRLLELTKSVQQLQRRIEALAAELAPSLLRLPGCGGLSAAKLVAETADVRRFHSSAAFAMHNGTAPIPVASGNQQRHRLNRGGNRQLNAALHRIAITQIRLGGEARAYVARRISRGNTKAEAIRALRRQLSDEVYRRLRQDSIEPLSMPTAAAA

SEQ ID NO: 339211 - protein, 368 aa, unidentified
MMELAPSRLHHTYTSEAFTMRSFTPPADTRFYAGVDLHARAIFLVILDHDGRIVCARNLPANPDSFLRAVAPFRDGLLVACECMHCWYWLADTCRDQHIPFVLGHAWAMKAVHGCKTKCDRKDAEAIARLLKGGNFPPAYAYPREKRGLRDLLRARLRLVRQRAELYGHVHTARRQANLPPVSNDVKYKCKRAGCTADIADPFVRRRVETHLALLEPLDTTIRRLEAEIEDAAEQLFPTELAVLQSTPGVGLVLSLTILLEIDTIDRFDSRQQFCSYARLCGAVQSSDNKRCGQGNSKAGNAWLKWAFSEAAVLSAQKDDRIGGLFNRLAARLGKAKAYSALAHKLGRAFYHMLHTKEVFDVNRFVRH

SEQ ID NO: 339212 - protein, 339 aa, unidentified
MQQQRQYVGIDLHRRRSVIVRMTEDGEVLDTVRIDNDPVALSLELAKAGPDPEVALEACYGWYWAADLLESDGAKVHLVHPLGLHWDSRRVKNDERDATELAHRLRRNDLPESWIAPPELRELRELVRYRSRLTALRTSAKAQIHGVMAKLGILPPLGRMFGPAGQVLLDEMPFEGAYAIRVESLRDLLEIYERELAMVERELARRLAGHQGYWAIQAIHGVGPIMAAIFVAEIGDVTRFPDARHLCSWAGLTPSHRESDTKVRRGHITKQGSPLVRWAAVEAVARYHGGDPIAPAYMRIAKRRGQMIGRVAAARKLLTLVFYGLRDGEIRCLAEQETS

SEQ ID NO: 339213 - protein, 344 aa, unidentified
MQIAVIGLDLAKNVFQVHGIDDAGQAVLKRKLRRSEVLPFFAGLDAALVGIEACHTAHYWGREIAALGHDVRLIPPQFVKPYVKSQKNDAADAEAIAEAVQRPTMRFVPIKSADQQAVLMLHRTRDLLIRQRSSLISAIRAHFAEFGIVIGQGIRNVERLLALLETAGDQRLPALAAEMLGILAAQLRYVAEQVKEVEVKLLAWHRADETSRRLQSVPGLGPITASAIVATVGDPKQFKSGRQFAAWLGLVPQQRSSGGKERLGGISKRGDGYIRRLLVHGARAIVGWRKRSATHKTPWIERLLARRPTNVATVAYANKLARIAWAIMMHGNRYNPALAFATIP

SEQ ID NO: 339214 - protein, 339 aa, unidentified
MARVIGMDVHRDFAQVVVLDGDQLRHFGRVRLDKDSLTTFADRLMADDEVVLEATGNTFAIVRVLRHKVRRVAVANPLQVRLIAHAKIKTDKIDAAALAQLHASGFLPEIWVPDPETEALRRQFTRRSQLVRHRTRLKNEVHAILNANLIGRCPVTDLFAATGRKWLAEQALPIADRDAIDRGFREIDRVGNDLAALDRGLAAQSIDDKRLHHLMTITGIDVVSGLGLLATIGDHTRFASSEKLVSYLGLNPSVRQSGSGPARHGRITKRGANQARALLVEAAWAAARVPGPLRSFFMRVMSRRGSQVAAVATARKLAAIIWHVLNRQEDGRLQPGDES

SEQ ID NO: 339215 - protein, 407 aa, unidentified
MYYLGIDISKKSFTVSILDEEGEAITKSLTYPCTGKGFEKLVDKISSLKLKKNEVMIGIEATGNLWENLYSFLKGYKVIILNPYQTRKYHQVLSKKAKTDKVDSLVIAGLLRSKEALASYVPEEEVQVLRELVRLRHHLQKDKKNYLRKAYSLLNLVFPEYADLVKSPFKKVSSMILKKYPTAIHMARARKTDLVKMARRIQGNNYSSELAKKLIEVAKESIYSGKASEVRGMALRIIIDEIQFLKNKIKEIEDKIEEILSSNEPSSPQKRLLGIPGVGPKTIAAFLGEVGGDVTRFSSANKLIGFIGWHPKISESGESKNLHPKMSKRGPSALRASLYMAAVASLKHNPYLRSLYHRKISEGKESKQALICVGKKILSIMYSMLKYEADYDPQRIFFQFEKERILT

SEQ ID NO: 339216 - protein, 376 aa, unidentified
MSNLRFIGLDVHGETIAVAVAEPGGEVRSLGVIPNRSEAIRKLVKKVGPAAQLRVCYEAGPTGYVVYWQLSELGVKCEVVAPTLVPVKAGDRVKTDRRDALKLARSYRAGDLTAVWVPDAAHEALRDLVRAREAAKKDQLRARHRLGKFLLRQGRRPATKMNAWTQKHLTWVKTVHFEHAAQEATLLDYLNEVEHVADRLERLERAIDDAVKSAPERMRTVIDALQALRGIAQVSAVTIVAEVGELSRFAKPRQLMGYSGAVASEDTSGKRTRRGGITKTGNAHLRRIVIEAAWAYQHRPGIGPALRKRQASVSPEVRQIAWKAQHRLNARYRHLTAKGKCRQEVVTAVGRELLGFIWAIGVKVEAQGRRQQSAAA

SEQ ID NO: 339217 - protein, 412 aa, unidentified
MNIRVEKACGIDIHEAFLVATMLDMAGTKDTRRFSTCIEDLLNLREWLLDSKCQRVAIESTGVYWIPTYTLLEGKVETIVANPLQIKNIPGRKNDDIDSEWIAEVCLNGQIKPSYIPPKEIREIRELTRSHVKLTQAKTSFKNRVHKVLSRAGIHVSGVLSDIFGKSGIIILNGILNGKTIDQTLAEIKDKRIKIKKMEIKDSLKGELSQNDIFVIKECIDSIKFLDQKIKEFDSKINQNLNGLQKEMEIVMSIPGVGFTTAAAVMAEIGNIEEFSKPKQLVGWSGLAPAINESAGKSSNGHITKRGNKFLRTILVLAANSIAIGRPNKLRFFYERIKAKKGHKKAIVALARKLVSIIHHLLMFKEMYSEEEMKQKNFKLPKFIPVPDFSIDDMIGILCEAGYSVNKTAVKT

SEQ ID NO: 339218 - protein, 387 aa, unidentified
MARKRTLSTLDTSIAYEAVGLDLAKEDVALAAFDSEHKEPYLIDRIPYDKLYELLADMAPTLVAMEPCSGAHQIAEQIQELGHEVMMISGRHVQAWVKDHCNGQKTDLNDAFAILNLAYDRWLTPIRGKTREECRLLALQASYRQLKGQRTKTMVHVKATLHAWGFPIRAGSFNQKVLHELIDTNREAFGDEVVETLHLMINRVRDLDHDIATVLKLLTEATKRDPRASLLRSIPGFGILTMSRWCAVIGDIARFDSPKQTMAFVGLVPNNRITGHHTETSSGREARGQGRMSKRGDKMLRSLCIMGAGSLCLMVRNDRLPDCPFVASIKERLASPRPWFKVLVYVAAKLVRIATALLKYGETFSFEKAGISKAVLKQWELEQAKAA

SEQ ID NO: 339219 - protein, 430 aa, unidentified
MKSNTQNAKIKAITETTLVLGIDVGSETHYARAFDYRGIEYSKKPFKFSNDEAGFMTFKAWILDIKEKHGKDKVVPGMEPTGHYWFNLGKFLQDNEMKLVLVNPHHVKKSKELDDNNPTKNDRKDPKVIAGLVREGRYMIPYLPEGVYADLRTASNMRFQLQAELTRIQNRISRWFNIYFPEYKTVYGQPDAKSGMLILKVAPLPEDIMTLGIDGVNQIWRDAKVRAIGKARAKTLIEAAEHSVGSKEGEISARMEIRMLLEDYESRNTRLQEVVALIEELVKKIPMAEKLLEIKGVGIKTVSGFLAEVGDISRFNNPKELQKLAGLALVENSSGKHKGETTISRRGRKRLRYLLFEVAMSLVSKNPEFRELHSYYTTRKLNPLKKMQSLMAVAAKLLRVFFAMLTKGVDYDPKKLVGDIKRPAVYLQVA

SEQ ID NO: 339220 - protein, 397 aa, unidentified
MGNEFAVCCGVDVGKWAHHVVAIDTETGEVLFDSKVDQSEREIRAALSPLCAAGKVRVVVDEPGPMSRLLFAVAKDMGMEIGFLTPRAMAKAIEMYGGDIKTDRRDATILAEVASGIPKLVKAVDEKTPERHRLAAIMSHDRELTAEVTRSANRLHALLLAVCPPLEELMAGKKIQGGLALLLLERYGGPCGLRTAGRGRAKRFVRSRKGFGGASGAKVDRVFDAISEQTLVLPGAEDLEDLIRMEARRLSSALESRKTVAKKRDAILEAIPEAEILMSMPGVGAVTCATFLAEVGDVTRFPTAARLASYAGLSPKVRQSGRSVNSVTKPRGGNRRLKRVLVLSASKSILFCDESRKYYERKRAEGRCYNSSITALARKRLDVMYAMLRDGNKYKKK

SEQ ID NO: 339221 - protein, 424 aa, unidentified
MSKKKSSLAGLQALYARACGLDVHKKLVVACVRILDSKDGTVQSTLRKFGTMTADLLELRQWLAELKVTHVAMESTGVYWQPVFNVLEGHFKVWVVNAQHIKKVPGRKTDMKDAEWIAQLLQCGLLRPSFVPERQQRELRDLTRQQTKLVQQRNAVDNRIQKVLETANIKLGSVASDVLGVSGRKMIEALMAGEKDVVVLAELAQRKLRGKIPELQRALEGELTEHHRFLLRQLLGQYDFLQKEIQSVSERLGAVAPPWFGAAVEQLDAIAGVGERGAKALLAETGTDMSRFQTHKHFASWAGRCPGNHESAGKRRSGKTPAANRHLDAVLTEMAHAAVRTKNSYFKAQYHRLAGRRGKKRAIGAVKHSLLVTVYFMLRDNRPYNDLGVDYFDKLNPQQRIRYHVRRLQQLGQEVELSPFADAA

SEQ ID NO: 339222 - protein, 346 aa, unidentified
MRIIGCDYHPSWQQVCWVETTTGETGEVKLEHASGGATRFYRQLPGHALIGMESTGNCQWFVEMATTAGHDVWIGDAAKIRAGETRQQKHDRRDAALILKLLLEGRFPRIWTPSGEEKDLRQLLIHRYKLVRLRATTKNELQHLAMNQGVTKKRKLWSKAGEKLLRELPLRPWASRRREDLFKVRGMLDEQIASLDAAVVEAAEKNEKAKLLMTQPGVGPITSMAFVLTMGDVNRFPRGKQVASYLGLIPREYSSGGKQRLGSISKQGNRFMRMLMVEAAQNAVRCDPGFRSEYLHRCHTKAKGVAKVAAARKLAIRLYWMLRTNTAYPEVVRVESSSRVALVGAS

SEQ ID NO: 339223 - protein, 313 aa, unidentified
MAMPSSSTVIGVDVAKAELVIYRQDLDQLKTHANDKAGCAQLLKTLPPRRLIAIEATSTYHLLLIEMAYRQGHRVYVIDGYRLTHYRKGIGGRAKTDACDARLLARYLASEIDSLRPWNPPSKAYTSLQRLLRRRALLVKTRTALKQSVGEDPQFKSLFKPLIERIKRIELLIEKRLHDTLKAAGLLEQAQRCRGVEGIGELTAAALTMAFERGAFQSADAFIAFLGLDVRAKDSGTFTGRRKLTKQGDPEIRRLLHNAALAAARKGHWKQLYEQYQARGLRKTQALVILARKLARIAFALMKKREDYIPRTA

SEQ ID NO: 339224 - protein, 361 aa, unidentified
MNATTVAVDLAKSVFQLAVADDTWRVVQTHRLSRTQFERWFANRDVSLVIMEACGSAHHWARWLSGMGIEVKLLPAQYVRAYFKRNKTDAADAAALLEAARASDIRPVRVKSVEQQALQGLHRIRSLWMGTRTSRINALRGFCREFGITIPVGARTGIEAIGRVLADPQTAVPDLIRGTARLLMEEIRLLEARIAQLERELTDMARSSPACKTLLSVPGVGLLTATAMVAATSGDVSHFRDARHFASWFGLTPKEYSSGSTRHLGRISKRGDRYLRMLLTHGARSVLRSAVVATGAGREVIGVRRWALDVQHRSNHNKAACALANKMARICYATLRDKEPFAEGTVRLSKKINRQAFVMPA

SEQ ID NO: 339225 - protein, 340 aa, unidentified
MGEITTIGLDLAKHVFQVHGVDAEGTVVLRKQLRRGQVLSFFGRLPRCLVGMEACATAHYWARELGALGHEVRLMPAQYVKAYVKRNKNDAADAEAICEAVVRPTMRFVAAKTADQQAALLLHRGRERLVRQRTGLVNALRAHLAEFGIIAPQGLRNVGKLIAIVRDESDARLPALARAVLQVLATQIEQLDASVTALERQLMAFHKSNPVSQRLATIPGIGPIIATAIAATVFDPSGFRSGREFAAWLGLVPRQNSTGGKTRLGGISKRGNRYLRRLLINGASANLLRSKATNADPWVIGLRRRRPSLVVAVALANKTARIAWAVMQREEDYRRVAVAA

SEQ ID NO: 339226 - protein, 352 aa, unidentified
MFTIALDSHKRYSQVSVETMEGQIVKEGRIVHQPGAITQFLRAWPAGTPVAVETVGNWYWIVDEIEQAGMVPKLVHARKAKLMFGSINKTDKLDARGLNQLQRCRTLPTVWIPPGSTRDLRELPRLRMSLSEKRTQLKNRVHSALEKYGLICGQTELSDLFGKAGRQWMEGQIEHLPEQTRYTIRMLLELLDQIQQRIDALERRMRTVFGDTPEVQRLMTLPGIGWILSVVIAQEIGDIGRFACAERLASYAGMTPRIHQSGAKRRIGSLRSDVNHYLKWAFSEAGNSVALNHRRLPQRHVSQLYGRIRNRRGHAKAIGAVGRHLAEASYWVLTRQENYREPSMQKGSSTWA

SEQ ID NO: 339227 - protein, 324 aa, unidentified
MIDGVLGIDVSKNTIDVSISGCTKVRARSFANSADGWRHLLAWLITQKIQLVHACLESTGRYSLGIASALYEAGHVVSIVNPAQIRDFARTKLGRNKTDGVDASHIREYCELFKPKPWAPASEAHRRLGELQTIRAGIIAGLTEWKNRKNSGMIDAVAQSLADVTISHFTSQLGAVDEAITLTIDNDPVLRRKRDLLLSISGVGETLAGVVLAELPGPDVLRSSAEVVAYAGLNPRLHQSGTSIDRMTRISKIGNAVLRAALYMPAMSAMRYNPAIAALVARLKSRGRLKPKQIVVAAMRKLLVLCFGVLKTGKPFDPAIAMGC

SEQ ID NO: 339228 - protein, 428 aa, unidentified
MRFIGLDVHQGFCEVAIREDGKTRSAGRVETARGTLELFARSLSLTDEVVMEATGPAMEIARIIKPHVARVVVANAQEVRAISHARVKSDRFDARTLAELLSAGMLEPVWVPDAQTSGLRRRVARRAALVRQRTRAKNEIHATLARCLLGRSPVSDLFGKKGRAWLDEQQLGTEESETVAGCLRQIDFLDAEVAAIDRKLSEWAVDSEDAKRLMSIPGVGAGVAVTLMAAIGDISRFSSPRQLVAYLGLDPKVRQSGDEPPRHGRISKRGNAQARSVLVEAAWIAMRQPGPLNAFGERIRARKGAQVAAVAVARKLTCLCWQLLNKEEDYAFARPSLVRAKIRQTELRAGAARHSTRHDGQRISSSIAEREAERELVQRAETAYRQLITDWKASGPAKTGAGATRGRAPSRPSKRQATRQAPAQTPAL

SEQ ID NO: 339229 - protein, 342 aa, unidentified
MDHSAGLDVSVKETSICIVDDTGRIVREVKVASEPEELLAELKNAAYHFKRIGLEAGPLSQWLFSALAEAGLPVICVETRHMRAVLKAQINKTDRNDARGIAQMMRVGLYRPVHVKTLRSQKLRMLLTHRKLLQSKAIAIDNDLRGTLRNFGLKVGMVGKVKFEARIRELVENLPDLAELVEPLLVVRRVLREQFIMQHRRLLAIVRDDEVCRRLMTVPGVGPVVSLTYRATVDVPARFHKSKSVGAVFGLTCAKYQSGEVEWSGRISRCGDEMMRVMLYEAAQSMMRSKKWSWLKAWAMQIARRRGMKKAIVALARRLAVIMHRIWVDGTEFRWTREAAAA

SEQ ID NO: 339230 - protein, 317 aa, unidentified
MMPHTEKLVGIDVAKSWLDVALGDKVERIANSTAALRSLAARLVARGTLLVGLEPTGGYERLAVTLLREAGLDVRMVDSWRLRQFAKGRGTRAKSDPIDARMIRLFLVHQETRPFPEPSKRQVRLTAWVREIGRAEADLRRLVSRRAAVALEAIAARIDAEIVVLKATIAEAERMIDAIIAEDPELTLKAELVSSVGGVGRKTTRVVLAELPELGCLTDRAVAALCGVAPYVRQSGKTRRHSYIDGGRDALKRAGFLAAQAMALHNPWAKALIQRLRAHGKPYKVAIIALARRLFVILNAMIRDRTPWQMPATNARP

SEQ ID NO: 339231 - protein, 479 aa, unidentified
MKPKPTEKGTSRATPGHWQQMNRKQRREITRKIQSEDIRLEVIHPDAAGIDIGNESHYVAVPPTRDSQPVRRFGCTTAELKEMAAWLKQCAIRTVAMQSTGVYWIAVFDILEEAGLEVYLVNARDTKNLPGRKSDVQESQWLMKLHTYGLLRNSFRPLSEIRTMRTYWRQRNDLVQSAGRHIQRIQKAMTQMNIQLANVLSDLSGMTGQAIIKAILAGERDPHKLATFRDPHVKASKEEIARGLEGNWQEDLLFVLQQEQDGYEFCQKQMAQCDQRLEQYLQQREDRSAGAHLPEEKRKERLRKRKGNKPRFDLRTGLFRMTGTDLTRIDGIDVMTAMTILSETGWDMSKWETEDHFVSWLRLCPDNRISGDKIIGKGRLQTNNRVSITLKLAATTLRLSKTYLGAQFRRLRSRLDTPVAIKAMAAKLARLVYRMLRYGMKYVDRGAAFYEAQHRQLQIKHLKSKAAKLGFQVMQIPAA

SEQ ID NO: 339232 - protein, 339 aa, unidentified
MNRIVVGVDIAKRVFQLHWVQPETGEIMALQLKREKFLEHFANRSSCLIGMEACGGSQHWARSLQKLGHEVKLLSGRMVKPFVVGNKNDAADARAIWTAVQQPKIKAVAIKSEEQQAVLALHRMREQLVKFRTAQINGLRGLLTEYGEVMPQGRAGIKRDIPGALGRLADRLPAMVIETLREQYARLGELDEQISQIERRLRQWQRDDSATQRIAAIPGVGLLSATAAVATMGDAKAFKSGREFAAWLGLVPGQTGTGGRVRLLGISKRGDKYLRTLLIHGARAVLTHSKSPPEWLTELMKRRPKNVAVVAMANKMARTIWALTAHERAYQSGYVSRPA

SEQ ID NO: 339233 - protein, 341 aa, unidentified
MDGNDKDRAVTVWIGIDVSKDTLDVCLLRASSKEKHKEFSNDAAGHAKLLRWVQHLVSEEGCHYCLESTGSYSMAVAHFLAEAEQRVSIVNPARIKYAGMAQGAGNKTDRADARLIADYCRKENPALWRAAAPEVRELVALVRRLHSVQGLVVQEQNRLQAPGLPQLVRTSLRQSIGFLQAEVKRLQKHIQQHIDNYPGLKADKELLLSIPGIGETTAHELLGELPDVTQFASAQAMAAYAGLCPREHSSGSSVRKRTRLSKQGNSHLRKALYFPAVSAMQWNAPVRAHYERLREKGKGKMVALGAAMRKLLMICYGVLKNRLPFDANWQQKRQQPLVAAT

SEQ ID NO: 339234 - protein, 433 aa, unidentified
MLKINYMSTLFVGIDVSSKSNMVYAMDFEENKYFSSSFGNNQPGADELAGMIAQCMKRHSNLASIIVALESTSVYSVHIANFLSTSEILMPFKPYVFCVNPKATSNYRKSYIGMEKTDPTDAFLIADFARVGRTKKLEPWRGGQFIALKRLTRHRMHLAECITREKTYMVSNLYLKFSELQLLEGDDKPFGNIYGTTSSAVLTEFLSPQEIIDLSEEDLLAFLAEKSRNRISDISRTSELLRKAARDSYRLDQCMYEPLNISLASSFNCIHAYQKEIKLIEQAIEKCINGMNPNALIILQSIPGIGPVWASGILSEIGDITAFHSSDALAKYAGLYWPKGDSGDFTSEDNKMSKAGNPYLRYYLGEAANSIRKHIPEYAEFYARKYAEVTKHQHKRALALTSRKFVRLIFGLLVKNQLYTGEKLDAEYNIESN

SEQ ID NO: 339235 - protein, 436 aa, unidentified
MGNTKLKKVFPKSAGIDIGSEKVFIGIEDKEVKSFNTFTEGYLSAISYLKENDISTVAMEATGVYWFSLYDFLEQSGIDVFLVNGRDVKNVPGRKSDVADCQWIQQLHSFGLLRPCFIPDDITRQLRTYTRLRQDHLSLAAQHIQHMQKALILMNIKLHNVISQINGVSGMRVLKAIISGNHNPEKLASLCEDSILKKKKELVAASLMGNFREEHIFSLKQAVDAYEFYQKQIQDCDNKIQQLLETINQHKTTPPNITKAKRIRHNEPRIDKLHEHLMKLTGGKDPSQVTGLSDKALLELIAETGTDLTKWKTEKHFTSWLCLCPSKHQSGKSNKRRKKKGSTKAGQIFRNAAYSITNSKYSALSAFHNRIKARKGSIVAIKATARKLAVLYYRIMTEGLDFVERGLIAYQQKFKEQQIKRLQKQAKHLGLQLITP

SEQ ID NO: 339236 - protein, 306 aa, unidentified
MKEVVKFPQVVKVGCGIDVHRDIIVATIRKSDDEFETREFGAYTSSLTSLRDWCKTEQVSHVAMESTGVYWKPVFNVLEEDFDIILVNARHVKNVPGHKTDKKDSRWLSKLLLSGLLKGSFIPPVDIRELRDLVRYRKKVVAQAASEKNRIIKILEDGNIKLSSVLSNVDGAVGTKIINSLIQGQTDINELAKFYHGKMKVSKAEFRMALEGRISKHHRIMLRFHQDSIADKERLLERIDTAIEEATKAYQVEIDLLQTIPGVGKGSAISIVSEIGVDMSKFPNENHLSSWAGVSPGNNETGGKKK

SEQ ID NO: 339237 - protein, 343 aa, unidentified
MEHIAIDLGSRESQVCVRDAQGSILLERKVPTDGLPSYLSKRPHSRVILETCAEAFFVADAASALGHEVRVVPATLVRQLGVGERGIKTDQRDARKLSEVSTRIELPSVHVPSELSRERKRLCNSRSALLQSRVQLTNYVRGQLRAHALVLRKRNPETFPARVRELLLGHSGGVAAHLERVLLVLESLNAQLKQADRELLELAEQDPLCQRLMAVPGVGPVIALRFVAVVGQPERFCNAHERMSYVGLTPGEHSSSLRTHRTSITKAGASDLRHALVQGCWSMLRSKPNEPMVRWALSLAARRNRQIAVVALARKLVGILWVLWRDAATYRPELAAQHCSAAH

SEQ ID NO: 339238 - protein, 346 aa, unidentified
MQHYVGLDVSLKQTAVCVVDQAGKIMREAMVASDPDAIAQFIAVHAPHAARIGLETGATSTWLWTELNKRGLPVICIDARHAKAALQMQINKSDRNDAAGIARIMQCGWYREVRVKALDSHAIRALLSSRALLVQMKRDLENQIRGLLKNFGLVIGRAKMNTFTVKALELIEGRPALAAAIEPLLKAREALAHQIAGLDRKVLRLARGEPQVRRFMTVPGVGPITALYYLATIDDPARFKKSRSVGAYVGLTTRRYASGETDRTGRISKCGDEMLRSYLYEAANVLLTRVTKWSTLKAWGVRIAKRRSLNKARVAVARKLAVILHRMWVDGTEFCWSAQTPAMQAA

SEQ ID NO: 339239 - protein, 412 aa, unidentified
MQVLYPCCCGIDVHAKTAVACLIKQGKRQTRTFSTMTDDLLHLSDWLTSEGCTHVAIESTGVYWKPVFNILEAALTVILVNARDAKAVPGRKTDVRDCEWLADLLRHGLLRASFIPPPEIRELRELTRYRQTLIKEHTAVANRIQKLIESANIKLGQVATDVLGVSGRLMLRALADGERDIEKLVGLARGSLKEKKPELRRAMTSRLTPAQRFVLNELLLRLAELEAATARVGEQIVKEVAESADPFVPEAVQLLQTIPGIGLRVAEVIVSEIGVDMARFPTDAHLASWAGVCPGNNESAGKRRSGQTTKGSPYLRAAITQAAWAAAHTKNTYLAAQYHRLIKRMGKNKALVAVAHSLLVITYHVLAQRADYRELGGDYFDRQHRQTQQQRLIKRLEAMGLKVMVEALPEAA

SEQ ID NO: 339240 - protein, 341 aa, unidentified
MNNVTLVGLDLGKHSFHLHGQDKRGAMLFRKKCTRKQLIEFFSNFPVCTVVMEACAGAHQMARQLIAFGHVVKLISPQFVRPFVKSNKNDFVDAEAICEAASRPSMRFVTPKTESQQTLSALHRVREALIRDRTGTTNQIHGFLLEFGISLPIGAAVIKRLPATLAEHTLPPRLVAVLERLHAHYKYLDEQVDEIEKELRQQLADDDIGQRLLTIPGIGPITASVLAADMGDGKQYGCSRDFAASIGLVPRQYSTGGKANLLGISKRGDKNIRRLLVQCARSIMLRVDKRTDQLGLWIRAMLTRRHSNVVACALANKLARIAWAIVARNNVFEERALAMPG

SEQ ID NO: 339241 - protein, 349 aa, unidentified
MNATIVAVDLAKNIFELAVAGSDWRVTQRQRLARSKVLSFFVHLAPCEVVMEACGSAHFWARRISALGHTVRLLPAHYVKAYVRRNKTDQADAGALIEAARCAEIREVPVKTVEARQIQSLHRLRSQWMSTRQRCVNTLRGILREFGFAIPLGVNVAKAQIGLALTDTDTEIPAALRATLVEMFREIAVLEGKILTVEHQLDALTRTDVRVQQLRQIPGVGALTSTALRAIVGDIQRFPSGRHFASWLGLTPNERSSAEKRRLGRISKQGDVYLRTLLVHGARSALLAAHRALRAGRPLDRLRQWALNCERQRGHNKATVALANRIARIVWATWKYERPFDGNWSAEAN

SEQ ID NO: 339242 - protein, 406 aa, unidentified
MSMNAVGIDVSKRKSTVAILRPGGEVVASPFDVPHLSGCFQPLIQHIRALNGPTRIVMECTGRYYEPVARQLSQAGFFVCAVNPQIIHGFQGQDNPLRRVKTDKADSIKIARYTLDNWANLKQYTLMDELRTQLKTMNRQFDFYMKHKTAMKNNLIGLIDLAYPGANTYFDSPAREDGSQKWVDFLDTYWHVDCVRKMSCNAFTLHYQKWCCRKKYNFSRLKAEEIYETAKELIPVLPKDDFTKRIIKQAIQQLNAASQTVEQLRILMNETAAKLPEYPIVMAMKGVGPSLGPQLMAEIGDVARFTHKGAITAFAGVDPGVNDSGDYSQKSVHVSKHGSPALRKTLYQVMDVLIKTKPDDPVYLFMDKKRAQGKPYYVYMTAGANKFLRIYYGRVKEYLASLPASE

SEQ ID NO: 339243 - protein, 341 aa, unidentified
MKPEMSVLGIDIAKRVFHAVGMDERGKIVLRKRLSRHDLMPFLAKLPPVLIGIEACGGAHYWARRFREHGHEVKLMAPQFVKPYVKSNKNDSRDAEAIAEAVTRPTMRFVPIKDVDQQDIQALHRVRERLMGERTALVNEVHGLLHEYGIVIPKGVSKFRQAVVGKLESEKDKLTPLSQEMFWKLVEEFAALEAQLAYYQEKLDTLAQSHPECQRLMTIPGIGPLTATALVAAVSDASAFKNGRQFAAWLGLVPRQYSTGGKERLLGISKRGDTYLRKLLVHGARATIRWVGLKTDRRSQWIRQLVERRGKNRTAVAVANKNARIVWALLTSHQDYQPATS

SEQ ID NO: 339244 - protein, 455 aa, unidentified
MPATTYDVYCGIDVGKSTHHAIALRPDGSRIVSRELPQDEKRIRELVVELAAYGSVLVVVDQPRNIGALPLAVARDCGVDLAYLPGLRMRRIADLYAGSSKTDARDAFVIADAARTLPDTLVPVDTRNETIEGLRILAGFDADLAVEENRLISRLRSLLLSVHPALERAIGKHFHRPIAPGLLATFGGPHGLANARPAALRKTARHYAPRVGDEVVASIAQALAEQTVVVPGAGKADFVISTLAQQLLALRAARGELDAQFEAELAQHPHGEIMLSMPGVGTRTAATMLVEISDIRRFDNPGRLATYAGVAPRTHRSGTSIRGEHHQHGGNTRLKRAMYLTAFASLKRPESRAYYDRKRAEGKTHHAALICLARRRSNVLYAMLTANHLYVAPTAGAVTATRTVADVRMGQQQAVEGAPWVSVADPVQHTPAASSEASARSCGLVPKVLESARTV

SEQ ID NO: 339245 - protein, 358 aa, unidentified
MKEKLRFLGLDVHAETIAVAVAEPEGEVRSLGTIPNRAESIRKMIKKLGPAEKLRACYEAGPTGYVVYWQLAELGIQCEVVAPTLVPVKAGDRVKTDRRDAEKLAHCYRSGDLTAVWVPDEGSEALRDLVRAREAAKQDQMRARHRLSKFLLRSGQRPPTGVRPWTRPYLIWVAQLHFTQIAQEATRQDYLHEVEHMRERVARLEQAIMEAVKLASPALQQVINDLQALRGIADISAVTIAAELGQVSRFGSARQLMGYCGAVPSEDSSGKRIRRGGITKTGNAHLRRIVGEAAWSYRRPPGIWYGLRRRQESISEEVKEIAWKAQHRLHKRYMKLGAAGKPQGKIITAVARELLGFI

SEQ ID NO: 339246 - protein, 331 aa, unidentified
MQGKISSEQSAMARGYLIIERHVYLGIDVCLEWLDVYLHPTGQAFRVRNTPEGLKSLKRKLAGLDVKLVVMEATAKFHRLAHRVLHAAGYAVAIVNPLRSRLFAEAAGQLAKTDRIDARMLAIMGESLDPTAVAPTPESLAALQELLHARAAAIDEQTALSNRRGASELAFLKAEIGRRLKQIATHIERLNKEIERRVKADPALKRRYDLLLTIPSVGPVAALTLVIALPELGTCSAKAASLLAGLAPMACDSGQKIGERHIKGGRAMVRKGLYFAAIAAARFNPQLAAVYKRLREAGKKPKVALTALMRKLVVLANTLIAEDRPWRPIHA

SEQ ID NO: 339247 - protein, 289 aa, unidentified
MACAENRFSPRKIGNQRATVLSFLKELPAGSRLGVESTSSYHELLATLAYKRGFVVYILNPKDTHHYAKAMGLRGKTDRVDAQLIARMIAHEHAKLHPWIPPTPEQRQMDQLIKRRATLSRIRAALTQSLKDLEGLGPEIKALRQRPDKLIVAMDARVISLMEASPVHKQDYARLQTIQGVGPVVGASLANTLERVPLRSADAFVAFTGLDPRPDESREHRGRRRLSKRGPSELRRLLYLAAMAAAKTKPWKPLYESTRARVVSPALSGIYFISLQSTLARVVSPPLRP

SEQ ID NO: 339248 - protein, 412 aa, unidentified
MDVLVERCAGLDVHRDSVMATVRLPGERSRQREQHTRGFGSTIAELHALGDWLQGFGVTLVGMEATGIYWRTVFDALEPRFRCWLLNARHLRNVPGRKSDVIDSAWICQLVEHGLVRPSFVPPPEIRRLRDLTRLRKAQIEERTRAIQRLEKVLQDAGIKLTSVASQAYSVSARAMLEALLGGVSDPHELAELARGRLRLKIPQLREALAHRFDLAHHGVLVVQLLTHIDSLDLAIETLDQRIAHVTEPMAELIELLCTIPGVKLRTAQVLIAECGSDMSVFPTVGHFASWAGICPGTNTSGGKRYSGKTRPGSKWLRQALSESAQAAARSKGTYLASHYWQIRGRRGTPKAIGATRHDILVAYYHIVRDRVPYRELGPDWLARRYSPEHRARRLVRQLEALGFNVSMEAAA

SEQ ID NO: 339249 - protein, 386 aa, unidentified
MKTVAGLDVHKDSVYLCILRENGEKIERVYGVLTPQLDSMRDFMEENEVSEVAMESTSVYWIPIWRVLVDSFELKLVNPYFIKQLPGRKSDVKDAQWIAECVMKELIRGSFIPPPLIQQLRLYDRRIFELNAELVRKYSKIDAILQRCNIRLSNYVSNTDCKSYKNVVKRISEGVTSPQELLMLVHKRIINKHGEDTILAALTGVVSEAEIDMLAQYVAESALLEDNKNKCIEKMREICNREFEEQMKNLQTIPGVSERSALTVLAEIGPDVNAFPSAKHLVSWCGFNPRNDESNKKIKSSKITHGNRFIRIASVQCAWAASRTKDCYFSKFYAFHTQVRKKFKLKVVVAVARKILVCIWHILKFNVSYKDFEPQKSVAKDCTQLA

SEQ ID NO: 339250 - protein, 347 aa, unidentified
MVMIGIDPHKRNHTAVAVSRCEDVLGKRLVHAGGAQVAELVAWADRLDDPQRTWAIESAGGLGYLLAQQLLAAGERVVDIPAVLSARVRVLSSGTSNKNDPNDAFSVAVAALHAKQLIAVRVEDHATILRLLTRRHTQLAQANNKAACRLHALVCDLIPGGISKEIVVRQAAELLDGIVPSSRVAEQRLLLARDLLADVELLTQQRRESKKRITAAVAASGTTLKEIFGVGDVVAAILIGHAGNPSRFNTADRFAAYNGTAPVERSSGDPNNKIWRLSRRGNRTMNHAIHIAAVTQIRHRHSPGRAFYDRKLAEGKSPKKALRALKRRISDLVYRHLIADAARAARR

SEQ ID NO: 339251 - protein, 470 aa, unidentified
MKERNAIGIDPDSQGFVCAYVKRSDTKVDTRGYMATDSDLKSFLKWVKGEKDVVVAIEGSNGLSKPLEKALREAEIVFYSFKPTDTDKFRKAVLGQNKNNKKDAESVARYAMALEAQGKLEKYRRVWFADMELQLLTRRHESLNQQLTAEVNRLWKLLRYASADLYLALGGKNPEVECGEKVVKSEGILNLLISTPDVGKWKSLSEKQMLEAMGGGNYKGRRALIQELRKVISSFQSVSKAMALLLSTSAHQIQRLKEEQLDIVRMLEELTAENTAVQELRQMKGIATKTAAKMIAEIIDIRRFAREDSLACYTGLGMREHSTGQTTNMVPTQLFNHRLKDAFMTAARNVVFYDPDSHIAGYYRNLVKAGMSPLAATRRVARALVRVVYRKLSALTAGTTDVPTGDKQEEGESDMASGSTRSGQSHTSDISLSSPRNHRARSVRKVKREVTLTGRTRELGRRKIISKKIT

SEQ ID NO: 339252 - protein, 475 aa, unidentified
MKEPKEAKAKTKSEVSKSIREHEPNAAGIDLAANEIWVAVPADRSSTAVRRFEGFTRDLMAIVEWLIQCGVRSVAMEATGVYWIPLFQLLEDKGLKVCLVNARHVKNVPGRKSDVRDCQWLQYLHSVGLLLGSFRPAQAICATRSIYRFRQNLLTMAGQYVQHAQAALDQMNIKLHHVIDDITGVTGQAIIEAILSGQRDPVQLAKLRDKRIQASAASIVKALEGDWRKEHLFVLQKAWAQYQQVQKQIQDCDQELLAYTHELEAATTVIKPTKVVCLRPELLGEPVSNQPVQKTPKARKKTSKNQPQGPWKEELGRFFGVDLTAIPGISVLSAITLMTELGNDLSAFKTEHHFASWLCLCPDNETSAGKVLRRRTRRSQNRVRQALRMAASSLHRDKSYLGDKFRRLRARLGPAKAITAMAHQLARIIWTLITRQVPFDLSVFAYHQKLNEQRRLKRLAASARQMGYQLTPLAA

SEQ ID NO: 339253 - protein, 313 aa, unidentified
MIIALRYVGIDVSKKHLDIFDEADGVPRRIANATQAITQQVARWQCDALVVFEATGIYDLALREALRQAGIQFARINPARARDFARASGLLAKTDPIDARMLAAFARAMQPAPEQVADPARGALARLAKRRDQLVLMRAQEKNRRSEADDRAMAERIGRLIEVLDSEIAGIEADISALIKAEAQIADDAKLMRSLPGVGPVACIQLIAQMPELGRVGPKQLAALAGLAPFNVDSGTFRGKRKIAGGRKRVRDALYMAALNAVRRADPFKAFYARLRQAGKPAKLALIAVARKLLTVLNAMMRDRKPYLQTKPT

SEQ ID NO: 339254 - protein, 464 aa, unidentified
MGRRTASGTKNKTKGSSKRTKDRKHSRILDQINLNAAGIDAGAEYHYVAVPEEGATPSVRRFSTTTRGLYELADWFAEVGIDTVAVEATGVYTVPLLEVLDARGMAVVLAKPSSLKSVNDCQKSDMMDCQWIQVLHTFGLLRASHRPEQMVATYRIINRQRRMIIEHSSVSIEHMKKALTQMNIRLDQAVSDVTGLTGMRIIRAILAGERDPLVLAKMRDERCNKSEAAIAEDLFGKYSDEHLFTLDQAVRTWDHYQVLIAECNAKLEKLLETFDKKADRKDLPKPRRIEHVRKNVMTFDARSLFFELLGQDLTQIDGISTGTISTFLAEVGTNLDDFRTDKNFTSWLRISPGLNTTGGKNRSGANRPTTNRLATALRVAAQTLSRSRSALGAYYRRKRAQLGPEKAINATAHKLARMIYFTIKLQRPYLDPGPDHYAQQHRERLLKSMGKRAKQLGYTLVKAA

SEQ ID NO: 339255 - protein, 405 aa, unidentified
MNAVGIDVSKGKSTVAIMQPFGVIVASPYEVGHTVSELKRLADRIRGLTGETRIVMEYTGIYCQPIARFLYDEGFFVSVVHAKLLHDFGNNSIRRVKTDKADAVKIAAYALSNWLELPRFVPEEEIRQMLKAFSRQYDKYSKLKTVLKNNLIALIEQTFPGVNALFSSPARKSDGHQKWLDFAAKFWHCECICGVSAKSFATSYQKWCAKEGYRFRLSKANDIYAAACGHKSVMPKSDATKLLITQAVSQVNAVGETLAAVSKEMNRLAALLPEYPVVMDFFGVGETLGPQLMAEVGDINRFKKKGSLVCFAGLDAPPHQSGQFESRNRHISKKGSPHLRKVLFLIVDGLLKHAPSDNPIYQFINQKRAERKHYYSYMTAGCAKFLRVYYGRVKEFLEKLHSAIA

SEQ ID NO: 339256 - protein, 447 aa, unidentified
MDLIDQPVDADPGEEEILDRVAAIDVAKDSGMVCVRVPHQTQPGKRDTSVWSVPARTNSIIELANQLAEQGIQRVVLESTSDYWRPFYYLLDARGLTVWLVNARDVKHVPGRPKTDKLDAVWLAKLNERGMLRASFIPPVEIRQLRDYTRLRFDLTGDRSRQVQRLEKLLEDALIKISSVATEMMGVSGRAMIEALIAGERDPRVLAELAKGRLRLKHAALIEALTGRFDDHHAELAALLLEQIDGLSAQIEHLDARIEQLIADIPAARAPRPGSGQDSDAAHVPLDAVDRLDEVTGIGRHAAQVIIAEVGLAMAVFPTDAHLVSWSKIAPRTVQSGAKSHPGKTGKGNPYLKSALGEAAASAARTNTFLGARYRRLARRIGKQKAQVAVARSILVIVWHLLADPTSRYRDLGPDFFDTRIRPERRKQNHIHQLEALGYKVTLEPAA

SEQ ID NO: 339257 - protein, 325 aa, unidentified
MHYFLGCDIAKVKIDVSLIDANGRELWVDKVANEPIAIATLLLTITGHYSEDELVAIVESTGSYHNCMAETSYALGIGCLVYNPIITKQQVKATIRGKKTDRTDALMIARLGLRGEGQLYTPEPYKSTKYYARSAQKLSVIASSFKLHHAHMANLLESGLSTEAEELMLGIQESIVCAQKQLYRDMATSAQGDIFTLLQTITGIGPYIAASLIGEIQDMSRFKTAKALTAFAGLDPKIRQSGHTLNSTGHLTKRGSSYLRHSLFLAASVARQHNPQFRDLYDRKRAEGKSYTAAICVVARKLLAIVRAVWLSGKAYDKTFSNEKA

SEQ ID NO: 339258 - protein, 340 aa, unidentified
MKITIMGLDLAKNVFQAHGIDETGNTVLVKRLHRKQMLPFFSKLPSCLIGMEACGTAHHWARTLAAMGHEVRLIPPSYVKAYVKRGKSDALDAEAICEAVQRPTMRFVPVKTVEQQGILMTHRARALLVRQRTMVANALRAHLAEFGLVANPGIANLAKLAQQALSDEDGLPSYARTSLDILIRQIMVFTDEIAVLDQQLHAWHVDSEASRRLAAIPGLGVVTATAVAATVTDPDQFRSGRQFAAWLGLTPQQHSTGGKTQLGGISKQGDRYLRRLLVVGATAVIRHTKDKATPMANWIRKLLERKPFRLVSVALANKLARIAWVVLTRKEAYRAHELTA

SEQ ID NO: 339259 - protein, 338 aa, unidentified
MFVIGIDPHRGSHTAAVLDGTEELLDEYRVVADRRQRQRLLEWAAPFTPRVWAVEGATGTGALLAQQLVAAGEDVLDVPPKLSARVRLLDSGRSDKTDSHDARAAAVVALRHASLRPVRAEDHVAVLRLLAKRHHDVVAARTRAVCRLHTTLCHLAEGHFPKRMKAAQAAAILARIRPGDPVAVERKALARDLLAEIRRLDRDLAALGARITTSVAASGTTVTDVFGVGPVVAAYLIGHSGDIARFPSAGHYARYNGTAPIQASSGPTKRHRLNPRGNRQLNHALHIAAVTQVRNDTSGRAYYLRKQAEGKSKKDAMRALKRRVSDAVYRQLLGDSHR

SEQ ID NO: 339260 - protein, 384 aa, unidentified
MNYKQNEKINQVKESTLVVGIDIGSTTQYARAFDWRGIELGKVFTFSNSREGFESFKAWMQHLQDKYRKSDVIVGIEPTGHYWFDLGAYLEDEGILLVMVNPYAVKQTKELDDNSQSKNDRKDPKVIAKLVIEGRYSAPYTPDGVYADLRIMVANRKRLIREMTQIKNRFARWFAIYFPEYTDVFGDYEAQSSMLLLKKVCTPEAIVELGAEKINQIWRDAKLRAVGMKRATTLCETAKRSIGLKKGSSAARYEMKLLLEDYEYKKAQLDAVMEEIEKLCRKIPESEQMLAIKGIGVITVAGFLAEVGDVRRFESPRQIQKLAGLSLRENSSGKHKGQTTISKRGRSNLRAVLFNAAIPLIAKNPEFKSLHEYYTTRATWCGIW

SEQ ID NO: 339261 - protein, 410 aa, unidentified
MKLYVGIDVSSKDMKACLMNQDGASLHQLSVDNNFHGASYLRDQIVTVYDNGDFQSIQIGLEATSFYSWHPAMFFHEDQALQARSTKVFTINPKLIRKFKEAYVDLDKNDQVDAWLIADRLRFGRLPVTVVLQEQYVALQRLTRMRYHLVKTLVREKQIFLQHLSYKCSSFTTEVETSSVYGVAILDLLLEKLTLEEISSMELEMLANFLREKSKNRYPDPECVAKSIQRAARSSYRLAKCVEDSIDLLLHTSIESIRSIKTQIKQLDKAIKKLLDVIPNTLQTIPGIGPVFCAGILAEIGDISRFENQASLAKYAGLSWKKHQSGSFQAEETNLIRTGNRYLRYYLVEAANSVQRNESEYRAYYQKKYQEVPKHKHKRALVLTARKLVRLVDALLRNNQIYMPGRMVNR

SEQ ID NO: 339262 - protein, 364 aa, unidentified
MRWPPPPHERVTLAEYFLTRRRHHAKVTLVGIDLGKHSFHLHGQDRHGKAVFRRKVGRKQLIEFFATLQPCTAVMEACAGAHYMARKLATLGHHIKLISPQFVRPFVKSNKNDFVDAEAICEAASRPSMRFVTPKTESQQTLSALHRVREPLVRDRVKTSNQMHDFLLEFGVSLPVGRAVITHLSTVLAEHTLPPRLVVILEHLHAHFKYLSEQINAIERELVRQLDDDDLGQRLLSIPGVGPITASVLAAEMGDGKQYGSSRDFAASIGLVPRQYSTGGKANLLGISKRGDKNIRRLLVQCARVYMQRLDRQSGPLADWVRTLRGRRHSNVVACALANKFARTAWALATRNTTFDARGAVTPV

SEQ ID NO: 339263 - protein, 357 aa, unidentified
MTSDKYVGLDVHQASTSIAVLDSNGKLITTAVVRTTANAIRDFIRGLSGTIHVTFEEGTQAAWLYEVIKRLVAELIVCDPRKNKVLAVGNKGDRIDATKLAELLRGGLLKSVFHSNHDTKLLKQLTHNYDSLVSDTTRVMSRIKAVFRGQAIPCSGRDVYYKRNREQWMTRLAEPGLRIRAQFLFDELEPLKALRREAKKVMLKEARRHQAFKILSEVPTLGPIRIAQIIAVVGTPHRFRTRRQFWAYCGFAVVTRSTDDYRWDENGPLRRSRLPATRGLNRNFNRRLKHVFKSAALQGAGREPFKSYYQARVASGMRPEMARLTLARKIANITLTLWKNGGQFNERKLSAQHDRTT

SEQ ID NO: 339264 - protein, 316 aa, unidentified
MTTSALVVGVDVAKDRLDVAVRPSGETWSGANDEAGITALVARLRPLGPSLIVCEATGGFERAAIAALAAAGLPVVVANPRQVRDFARATGQLAKTDQLDAGILALFAERVRPTPRPLPDAAAQLLDAVLTRRRQLLEMLVAEKNRLGFAPQPLHRGIQAHIRWLERQLDDVTKELAGLIEASPVWRAKDDLLQSVPGVGPIVSSTLLGELPELGTLSHKQIAALVGVAPLARDSGTLRGKRMVWGGRASVRTALFLAAMCGRRWNPVLKVFYDRLKAAGKPTKVALIACARKLLTILNAMVRDHARWSPNVQYSC

SEQ ID NO: 339265 - protein, 428 aa, unidentified
MADLLEGALPLNLVAIDVARYSNAVLIELSDGKRQRFRMTNNASDFDRLLSYLQALPGNCRVALEPTGDYHRPLAHRLLTAGHEVVSINSVAQARYREAMFNSWDKNDPKDAQVILEMLRRGTYQRYVDPQIAGHHDLQELAKTYYQVSRARTKVQHSLINHCLPLYFPEMHRYWCTTRNEWFVRFLLEFPTPTHVRALDRESFVAAAWDLVGRKVNKRAKLEEIWETAAHTAALPHALDCLAVETFRITLRRYQELNVLREAIEARAEVELHDNADFAHLKTLPGIGSVIAMTILAEAGDLRRFGHHRQFLKYCGFDLAKIQSGTQRGREQLSKRGNARLRLAFWMAGMAAVRMKENSFRSKYERYVHANPDDADLKRKALTAVAAKMARVAYSMIKKNQPYRQFFELGLPSGSIPLSAAVGAQATP

SEQ ID NO: 339266 - protein, 346 aa, unidentified
MRPRSRFQVVVSKSRLFFHKSFLMNKYTETFGIDISKDVFDCYGSIQGHLQFKNTAEGFVKFLQISHPNTLVVMEATGYYHYRLAQFLYKKKVIVSVVNPLSVKRFIQMKLAKVKTDKSDAKAICEYGIINEVPLYNALTDVQSECLQLFRWLDNLIKKRTATKNKIHGEQVLGIPSKFVYRSLNKTKKFLDKEILGIEEKLLSLVKQEQQVQLTLLQSIPGIGLKTALFLIIVTDGFKKFENAKQLCSYVGITPTIRESGSSVRGRSRISKVGNRKLRNLFFLCSFSACRQNKGCREIYERIVNKGKSKKLALIAVSNKLLKQSFAIAKSGNPYDAGFVSVLKVT

SEQ ID NO: 339267 - protein, 429 aa, unidentified
MRDHGSVRVTNQNEFNKLLSGNITYLFQKAGIVMISVGIDVSKGKSTVCILKPGGEVIKPSFEIEHTAEELDSLVSLINSFDEETRVVLEDTGHYHLPVASYLSSHGIFVCCVNALRMKKYCSQSIRRAKTDRIDSVRIAEFGITYWSELVKAYDAPDTYDELRFLARQYYQITSILVKAKVNLSNLLDQVMPGINDILHNQGDNHKLTEFVNRYIHYNKITDMGEKRFSADYCKWAKKMGYRCNEHKAAEIFALAQNGIPSLPNSQSVKIAVREAIKLIHSTEESRNTILTQMQDLCKTLPEYSVVREMNCIGDVLAPRIIAEIGDVRRFRNKHSLIAYAGIDAPPYQSGSFNASERKISKRGNAYLRKTGYEIMQSLIKHKPADDPIYDFIQKKRSEGKCAKEAMIAGLNKFLRVYYGKVMELYSEI

SEQ ID NO: 339268 - protein, 391 aa, unidentified
MNKRFFGLDVHKKYATICGISQQGEVVVKEDHLPLDRLATWAAGSLTSEDAVALEASTNTWWAYDCLAAHAGRVVVVNPIKTRLIAQARISTDELSAEALARLLQSNFICEVWVPDERTRGYRQVISHRIRLAQEGTRLKNRIHATLHRQQLRSPYGNLFSQAGRAWLGKLELPELEKLLLRQNLELLRSSEAALAEVDQLLARLAQEDQRVPILMQIPGINIFSALAILAEIGEIGRFASAKKLSSYAGLVPCLHRSGQKHSTGPITKAGRSRLRWVLVEAAHVAARHDPRLGRFYYRLRAKKGTNVAVVATARKMLVVIWHLLSGDGVYRGRQVQMIARKFLEWGWKVGERNRCGTTKEFVFTRLHQIQVNNLTHVQAGRHAYALTGPH

SEQ ID NO: 339269 - protein, 414 aa, unidentified
MEIVHSRCAGMDVSKRDAKVCVRVAGRGRRQTVERVRTWGSTTNAVLALREHLINEQVTLVVMEATGDYWKPFYYLLEDADFEVMLVNARHVKNLPGRKSDVSDAAWLAQLGAHGLVRGSFVPPAPIRELRDLTRARTAMTRERGREIQRLEKLLEDAGIKLSSVASDITCVSGRLMLQALIDGQRDPAVLADLAKRRLRAKIPELTEALTGRFSAHHAFLTGMYLGAIDQRSRQIAELTARIEVVIEPFRSFCDLIGTIPGIGQRSADVIVAETGADMSIFPTAAHLASWAGTCPGSNESAGRVKSTATRPGNPYLKAALGAAALSIANSHGTYLAAKYRRIAAHRGPKKALVAIEHTILIAIWNMAHTGALYDDPGADYYTRRDPERARRNAVNQLQRLGYQVTLTPTAASA

SEQ ID NO: 339270 - protein, 350 aa, unidentified
MIIIGCDYHPSFQQIAFVDSETGELQERRLQHREEAEKFYRDLAAQGMKVRVGMEASGHARWFERLLAELQLELWIGDAAEISTKRVRKQKTDRQDAQLILRLMMKDDFPQIWVPSWENRDLRQLLWHRHRMVQARTRIMNQLQAVALNEGLRSKKRLWREAGREQLEAIRLAPWASQRRRDLLELLDRLNPTIAELSQAIEKEVEKCPAARRLQTHPGVGSLTALAFVLIIGRADRFQCGKQIACYLGLVPLEKSSGKQRRLGHITKQGNSLLRFLLVEAAQVTVRSLPEWRSKYVHLTMRRGRKIAKVAMARRLAVRMYWMMRKEWDYERLRKFGSHTGKPGSGDGVK

SEQ ID NO: 339271 - protein, 402 aa, unidentified
MNCVGIDVSKGKSMIAVMRPFGEVVVSPFEVVHTDSELSKLAGLLKSLDGETRVVMESTGNYHAPVAWLLHGAGFYVSVVNAMLVHDYGNNSLRRGKTDKKDAVKLANYGLDHWLTLPRYVPEEDTRLMLKTCYRQYQQYSKVQTMLKNNLISLLDTTFPDANRLFTSPPRADGSEKWVDFVATFWHCECVCGLSKKAFTAKYQRWCRKHGYNFSQDKALDIYASACGRFGVMPKTDTAKLLVEQAISQLQTTSSALAALKQEMQSLAASLPEYPVVMGMFGVGPTLGPQLIAEIGDVRRFHSKKALVAFAGIDAPPYQSGQIDVRSRSISKRGSASLRRTLFLVMSVILQRAPMDEPVYQFMNKKRSEGKPYRVYMMASANKFLRIYYATVKAYLEILEQI

SEQ ID NO: 339272 - protein, 341 aa, unidentified
MSEASTIGLDLAKRVFQAHGADASGKVVFRKRLRREQVLAFFAGRPACVVAMEACSSAHYWAREIGELGHRVRLIPPAYVKPFVKRQKNDATDAEAICEAAQRPTMRFVLVKSEAAQANAVVFRARDLLVRQRTQAINALRGHLGEYGVVVAKGPSHVAQLIAHVEDPAAGLPEAARTVLRVLTASLQFLSERIDLLDREIARRAREDKEVRRLTTIPGVGPVIATALAALAPPADAFRRGRDFAAWVGLTPSQHSSGGKQKLGATSKMGERTLRRLLITGASSVVQKAIKHGTPSGSWLGPMLARKPRMLVIVALANKMARTVWALQATGEIYRAPVVAA

SEQ ID NO: 339273 - protein, 350 aa, unidentified
MLIIGCDYHPSFQQIAFVDTDTGELQERRLEHREEAEKFYRGLGVQGMKVRVGMEASGHARWFERLLGELNFELWIGDATEIARKRERKQKTDRQDAQHILRLLLKDDFPRIWIPSWENRDLRQLLWHRHRMVQARTRIMNQLQAVALNEGLRSKKRLWREHGREQLESFRLAPWASRRRQDLLELLDRLNPTIAELSQAIEQEAEKFSEARWLMTHPGVGPLTALAFVLIIGEADRFQCGKQVASYLGLVPLEDSSGNRRRLGHITKQGSSMLRFLLVEAAQVTVRSLPEWRSKYFHLMMRRGRKIAKVAVARRLAIRLYWMWRKGWDYEQVKKFGSHAGQLGTGDGVQ

SEQ ID NO: 339274 - protein, 346 aa, unidentified
MRVLIGIDPHKATNAVAAIDERGELLEYAVFSTNRAGLRSLARWGKRFQKRRWAVEGAGGLGRFVALCLVAAGELVMDVPAKLSSRARLLATGNARKNDRVDAIHVALAALRRGERLAEVGEEEQAEVLRMLSERREDLIKERTRTLNRLHGLLRDLLPGGAPKNLSAEKAARVLRGVRPRSGPARTRRRLAADLLRDIRRLERQLYELECRIREAVKEASTGLTLMFGVGPILAAEIIGRVGNVARFPTKAHFASYTGTAPIEASSGEVVRHRLSRAGNRKLNHVVHMIAICQARHDTKGRTYYRRKLAEGKSEKEALRCLKRRISDAVYKQLRADLPAANLAAA

SEQ ID NO: 339275 - protein, 384 aa, unidentified
MPKQSTATAFDHDSTLVLALELSGKGWEVGAVLPGVARRPRRSLPARDMAALLQQIERWKAEVLRAGRTVCRTVLAYEAGRDGFWIARYLLACGIEVQIMHPASIPVERRGRRAKTDRIDLDMLLRTLLAWLRGEPRVCSIVRIPSEAEEDMRRPERERERLVSERVALENRIENLLCLHGITGFRPRLKKAAVRLDELRCAAGGPLPPQLMAEVKRLMVRHRLLSEQLSEIEAAREQTAMAAEPDHAVQQIQMLTRLVGLGLATATGLTREVFCRSFADRRAIAGFVGLTGTPFNSGGSEREQGISKNGNPRVRRILLQLAWRWLRFQPDSALSCWFLERTGGAKGRIRKIMVVALARKLLVALWRYVETGELPAGARFAAAA

SEQ ID NO: 339276 - protein, 447 aa, unidentified
MDTESATQYAAYIGIDWADKDHAYALRATEDKKVEQGKVEAKPEAIEEFVARLRQRFGGKAIAVALEQSRGSLLFMLSKYDHLVLYPVHSSTLDSYRKACHPSGAKSDPDDAALILDLLQKHPEWLQPFAPDTVPTRTLQFLTEERRDAVNDKTRYLNQLTAALKTYFPQMLEWLDVDSKVMCEMLQRWPTLEQLQQQKPSVVEEFLREHRYPVVRVKPLQEAMEKAIPATTDQAVIEAKKFTVQRTIAQLEALRENIAELDRRIEQITRLHEDYRVFASLPCAGKVMVPRLIAAMGTQRDRFQTASELQCQTGIAPVKEASGQREWIHWRWACPKFLRQTFVEWAWLSTRKSQWAREFYDRQRAKDKSHHAAVRALAFKWQRIIFRCWKDRCPYDEARYLATREQRARTAKASTDGSPQLKSSQAGGVEITWKNVSGFSRPDSISC

SEQ ID NO: 339277 - protein, 338 aa, unidentified
MDRQYVGIDFHRRRSVIVRLSADGERLGVYRIVNDPCELVNVVGLCGEAPEVVIEATYGWYWAVDLLQALGATVHLANPNALNWGDRRVKSDERDAHDLADMLRLNRLGEAWIAPPALRELRELVRYRAKLVQLRTGLKAQVHAVMAKEGVLPRHSDMFCAAGKRQLDAMELAAPFAHRVRSLRELIAVYDREIVVLERDIHQHLKHDRGYQAVQAINGVGRISAAVLVAEIGDVTRFPTPQHLCSWCGLTPRHRESDLKTRRGRISKQGSRLVRTTLIEGISRYHGGTVLDAQYRQLAKRRGRNKARVAVARKVLTLVYYGLRDGEIRCLAPAATAA

SEQ ID NO: 339278 - protein, 447 aa, unidentified
MKQKKPSKKGSIKLPKHLQHLNQHAAGIDVGSRSHFVAVPEGTDEQPVREFSTFTDDLERLAKWLRSCGVTAVAMESTGIYWIPVFELLERHGFEVRLVNARHVKNVPGRKSDVLDCQWLQQLHTYGLLRGAFRPTDQICTLRAYVRQRATLVRSSASHIQRMQKALAQMNLQLHNVVTDITGVTGMGIIKAIIAGERNPKVLAGLRDKRCKNTEETIARSLHGNYRAEHLFSLQQAVELYEFYLQKIADCDQQILAQLKSFDSSDGGDSDSKPPRSIEEALQQMSGVDLSSINGISTNTALKIIAEIGTDMNRWKTVKHFTSWLGLCPGSKISGGKVLSSATKPVANRAAAALRMAALTLFNSKSALGAYLRRQRSRLGAPKAITATAHKLARLVYSMLKHGTDFVDAGQEQYEERYRSRVVQNLKRRAQEMGFTLIAIQEETQTI

SEQ ID NO: 339279 - protein, 348 aa, unidentified
MTLVGCDLHSRKQQVAVLDTRTGELVEQELVHEGDAVERFYCALPPPVTIGIETTGYTQWFHALMHQLGHTVVVGEAAKIRAMVVRKTKTDRRDARHLLDLLQHDRFPAVWIPDPDTRDRRALIAHRVRLVRMRTVVKNGLQAIALNQRLALHSALWTQRGLTQLKALALPPHTTRRRDDSLALLAWLTTRIDQLDAHIATVASADPRVQLLLTHPGVGPLTALTTVLVLGPLARFPDSKHVVSYVGLAPAVNASADKQRLGKITKQGNALLRWVLGQAAPLAARADDELRRRYFSILHRRGRPKAKVALARKLLVRLYIMLRDQIDYEEFRRRGRAPRPHPLPVAVM

SEQ ID NO: 339280 - protein, 359 aa, unidentified
MATRVKRNKINFKGKMVSIGIDMHKHSWRITALVEGDVVLAVTLASPNYDSFTKILTQFKGNHVRIVYEAGPGGFALYDRLTADGVECIVTPPSLIPTQSGSKVKTDKKDSLKLAKLLESNMLKAVWVLSPEERAHRQLVRTRRQIVDHRSDVMRQIKSLLLFHSIPIPFSSKQQWTGPFVRWLHDLDLGDEYLNRSLETLVSLFDYLSEEKRRLTHEVIQLSKDQKYASRVKILKSIPGIGALSAMETLVELQDITRFKTADELAAYLGLTPSQYSSGEYIRLGHITHAGNDRVRTTLVESSWILIGKDPKMRCKYENIKHRRGGKRAIVAIARSLSACIRRILLDQVPYELGFQKAA

SEQ ID NO: 339281 - protein, 465 aa, unidentified
MRSKTRKSQKQKKKIVIDPAWELINPDAAGIDIGSREHWACVPARSAEKNVRSFGTFTADLEALAAWFQQCGVKTVAMEATGVYWIPVFQILERRGFQVVLVNARQTKNVAGRKSDVQDCQWIQRLHTYGLLQGSFRPKDPYCVVRTYLRYRDELVGARTTQCQHLQKALQQMNVPLHHVLSDVTGVSGLTIIEAILNGQRDPVKLAAMVDRRVRASQGVIQKALVGDYRPEHLFVLKCAFELYHTYEAKINACDEQIVLEVAKLPDRVDVKVKPLPARKEGRRCCDDQMLNQDMRAALYPKLGVDLTAIEGIGVLTSLVILTEVGPDLSLFPSEKHFASWLGLCPDQRISGGKVLSSRTRRVINRVSDALRMGAVSLERSQSALGAFYRRMKAKLGAAEAVTATAHKLARLIYRLLKHGEAYVRQGMENYENQYQNRKLSALKKSATAMGFELVAKQPITEGVS

SEQ ID NO: 339282 - protein, 339 aa, unidentified
MNKITTVGLDLAKNVFHVMCCDARGKVVKKRMLRRGQVVAFFANLERCLIGMEACASAHYWARQLKALGHEVKLVPAQYVKAYVRGNKNDYNDALAISEAVTRPQMRFVSVKTVAQQDVQALHRLRERSVQMRTGLCNQIRGLVGEYGLVCAKGVANLRRQIPLWLEDGENGLSDFFRRLLSQSYQQLQMLDKQIDVYTQELKRHSQQNEACQRLQSIPGYGPIVASVFYSQVGNGEAYQRGRDVAASLGLVPRQHSSGGKDSLLGISKRGDRYLRSLLVHGARAVVSRAENKDDRLSRWINRIRAERGMNKATVALANKMARMGWAILANKTIYQPAS

SEQ ID NO: 339283 - protein, 339 aa, unidentified
MRLYGAIDLHSSNSVQAVVDEGGRRVFHRKSPNDLKTIVGGFEPYRSEMVGIVVESTYNWYWLVDGLMSEGYRVHLANPVAIQKYSGLKHADDKHDAFWLAEMLRLGILPEGYIYPKEERPLRDLLRKRHQLVSLRTSLIISLQNIITRNRGVPMAANDIKRLTVDRVAPVLEGNEDLAMAGKVSKESIDFLTRQVRAIEATLEKRCEVSSYYRYLLTLPGIGKILAMSIMLETGPISRFPKVGNYTSYCRTVSSRWTSNGKTKGRGNKKNGNRYLAWAFSEAAEFARRYDATARAFYNRKLQKSNFMVAHSALAHKLARAAYHVMKDQVPFMPDKLFA

SEQ ID NO: 339284 - protein, 440 aa, unidentified
MAVRKREDEVFPNAAGIDVGASSHWVAVPPHLAEESVREFGAMTDDLNALADWLLACGIDTVALESTGVYWIALYDVLEQRGLKVWLVDARQMKYVPGRKSDVQDCQWLQKLMSLGLLRAAWRPDGEVCVVRAVARQREVLITEQASWVQRMQKALVQMNIQLTEVPADVMGATGQAIIRAIVAGEHDPEALARHRHARVKAGAAEVIKALKGNWRDVHLFVLAQALSMYDDIGRHLLECDTKLQVLLAERSQAVVDLGKAPRQGTKSRAEFDVRKALANWAGVDLTKIDGLGVTVVMTLLTEIGPDVSRFANVKHFCSWLGLCPGNKISGGKVLSSSTKRTANRARQALKMAAMALWHSSSALGAFYRRLCGRLDKPRANTATAHKLARMVYFMLTRGEAYVDKGQQHYEEQQRQRSIAALKRRATALGFQINPVTASD

SEQ ID NO: 339285 - protein, 402 aa, unidentified
MFFVGIDIGKRHHEAAIIDELGHPVGKSIRFSNSKAGSEKLLEFINKHELLPDNTLIGLEATGHYWLSVFSFLLDLEFNVVPFNPIQSDSLRNFYIRKTKTDTIDAVLIAQVIRMDLPDQTYVPSENIVRLKQLTRFRYSIVDQISDIKRKVIASLDQVFPEYETLFSDMFGKSSTQLLLQSPLPEDLLEIDSQKLVELLNQASNGRLSLEKSTGKVLKLKELAEDSFGIKVASDVYKLQIQLLLQQILLLENQLEMVEAEIAALIAMNDNHLTTIIGVGPITAAVIIAEVGDIHRFERPNQLLAFAGLDASVHQSGDFLGTRNKLSKRGSPYLRRAIWQAAFVASNKDPALSLYYQSLRKRGKHHGTAIGAVCRKLVNIIFAVWTNDKPYEPHINRDLLDQ

SEQ ID NO: 339286 - protein, 368 aa, unidentified
MFEHTFIGLDVHAVNVVGHALNPATGEISAQTMTADPAVVLQWIRRFEPGVKVVYESGPTGFVLARYLHAAGINCVVAASSKLLRAPGDRVKTDRRDARVLAEMLAVGSVIEVRIPSLEEEALRDLSRLRSGTATDLAHGRQHVNAILLRHGIRYPKETRWTKEHRLWLHRQRFDKPALQFTYEADVEQAELLAVHLARIDKQVAATAAACSYGPVIEALMCLRGIQMTTAFGLAVEIGDWTRFTGSTIGSYLGLVPSENSSGQSRHQGPITKAGNTYARKLLVEAAWVHRRPYARPGERLLRQLDRVAPATRIRALEGNHRLHNKWQHFDDRHKMSVKANTAIARELAGWCWSLAAPLQQGERMNVA

SEQ ID NO: 339287 - protein, 343 aa, unidentified
MDHFAGLDVSVKETSICIVDDTGKIVREVKVASEPEALLQVLMNPAYHFKRIGLEAGPLSQWLFSALAEAGLPVICVETRHMRGVLKAQVNKTDRNDARGIAQMMRAGLYRPVHVKTLRSQKLRMLLTHRKLLQAKAIAVENDLRATLRNFGLKVGMVGTAKFEARIKELVENLPDLTVLVEPLLIVRRVLREQIYILHRRLLAVVREDDVCRRLMTIPGVGPVVALTYRVTVDVPARFKNSKAVGAAFGLTPTRYQSGDIDRTGGISRCGDEMMRAMLYEAAQVMLIRTTKWSWLKAWAMKIAKNRGMKKAIVALARRLAVIMHRIWVDGTEFRWTKEVAAA

SEQ ID NO: 339288 - protein, 348 aa, unidentified
MSKINKNRYNEVVRIGIDTSKRHFQIHGVNAKEQVVIKKAVTRNKFVETIALLPVCEIGIEACGASHHWARTFEKMGHRVKLIPARAVKGYLYKNKNDANDAAAICEAISRPNIKFVPVKTIRQQDIQALHRVREDIVKSRSSLVNQIRGLLAEYGVVISKGIWNIRGTLIDIISDADNGLTIHFRETLDALYEAFRNLDVRLKDIEKRIEKSSTEDELPKLLMTIPGIGKIGSSAIVAAVGNGSQFKTARDMSAWAGLVPRQNSTGGKTKLGGISKSGNRYLRRILIAGARAVLKYCKNKTDKRSIWMQNLIERSGFNKAVVAVANRNMRIAWALLKTKEPYCVASC

SEQ ID NO: 339289 - protein, 460 aa, unidentified
MNEYFIGIDASKGYSDFVMLNEKKQTVIDNFQLDDTFDGHAQLYELLHSFNKDNPEAAIYAAVESTGGYENNWFQSLLTFQASLPVKTAHLNPLGVSHNSKADLKRNITDKISAKNVAEYMIAHPEKVSYQHQDSLASLRKQWGFITMLTKQSTQLLNQLESLVYNANPEILTYCKDGSPQWVLKLLTSYPTALRLSRAKVKVLARIPYISLDRAKQLIATAKKSVASASDKITEQLIVATVKQIIHLKKTIKVQSEALANECQIPEVALLKTFTGIGDYSAIGLMLQIQSVNRFLTSKKLSSFFGIHPEYKKSGDGTYKYRMSKKGRKEGRRILFIVALSAVQSNPLIRDVYQQAVERGMEKMSAMGLCMHKILRILYGMLKHNKAFDPQIDLKNRQKKPPQKRKIGHDKNRRYQDFDSKAPISRRQKMRRKERKQSQNVNNVEYGISEASVPDNHLAN

SEQ ID NO: 339290 - protein, 405 aa, unidentified
MLYFGIDWSRNKHQLCIRNDAGATISQMTFAHSLAGFHQLEAERCKLGVPPSECLVAIETAHNLVVDFMLERAYPVYIIPPQATAGYRNRQRLSGAHDDQSDAALLAGILRTDRASHRRVQPTSALFQQLQGLVRLIETLRRSIQRQASQLHAALLRTYPPAVDLFSDLTTYIALEFLAAYPTLAEAQRLSLEQFSDFCHQHGYKRRTLIARRYTHLLAPAPPVSPAVSQAYRVPIQTLAQVLLPQVQARAAALSQLSQLFAQHADAPVFSSLPGAGPLLAAALLVKFGEQRERFPSAAEAQALAGTCPVTKRSGQKKLIQFRWGCDKEFRRIAQQFAQASRQQSGWATAYWHDVRPACGSDSHAYRILANRWLAIIWKLWQTGKPYDEAYHVQQRALRRRPKSA

SEQ ID NO: 339291 - protein, 409 aa, unidentified
MRIIGLDIHRAFAEAVAWDDGKLKRLGRVDMRRHLLEAFAKKLSKEDVVVVEATGNASSVAAVIAPHVKKVVIANPKQVRIIAHAKIKTDTIDASVLAQLYASGFLPEVWIPDEPTQALRRQVTRRNQIVRQRSRLKNIIQSILHSHLIPSCPHADLCGASGRAWLFHQILPEDERLAVERHLREFDRLGEDLKVIERDLARSALGDEGVKRLMTIPGVDMVVGLAIVAAIGDAGRFEQSQKLVSYLGLNPSVRQSGPGPAYHGRITKQGRGHARGMLVEAAWAAARAPGPLRAFFLRVRARRGQHVAAVATARKLAVVIWHLLRKGESYAWARPALHARKLRDLELKAGYKAERGQRGAAHAYNIKSHRDEERRWVEQAETAYARFVAGWNPRGPKRARTGAANEGRQ

SEQ ID NO: 339292 - protein, 416 aa, unidentified
MKYAPPVLPEKPAHGVTCGIDWARDDHAVSVVDSRGCEVHRSTVEHSSTGLRTLLALLARSGVDEVAIERPDGPVVDALLGAGIAVVVISPNQLKNLRGRCGSAGNKDDRFDAFALADTLRTDRARLRPLIPDTPATVALRAACRARKDLVVHRVGLANQLREHLKRVYPAAVGLFADLDSPISLKFLRRFDSQGRADWLSPNRLAAWLSSVGYCGRVDPAVLHARLTSAPRGAIGDEGLAAAHITRALLAALDTLVEQIKTLSEQIAEQLATHTDAHIFTSLPRSGTVRAARLLAEIGDCRSRFPTPESLACLAGVAPSTRQSGKMRSVGFRWSCDKQLRDAVTDFAADSRHANPWATDLYRRATARGHDHPHAVRILARAWLYIIRHCWQGHTAYDPTRHNALQRLLNQQIAAA

SEQ ID NO: 339293 - protein, 323 aa, unidentified
MQTPSAVLNIGADVAKDAIVVACSEGSFPVREVANQRAAVLAFLKGLPAGSRIGVEATGSYHELFAEAAHQLGFAVFLLNPKDTRHYAKAVGLRGKTDRVDAELIARMIAHEHTKLHAWIPPTPHQREIDRLIKRRATLISLREAAEMSLHELDGFAAELKALRTRFNQLIARIDLRVRALIDASPERKQNFARLCTISGVGPVVGAAVVNTLERVPAKSADAFVAFTGLDPRPDESGQHHGKRRLSKRGPAELRRLLYLAALSAVKTKPWRSLYEHYRARRLPSTAALVILARRIARTAWSIYTYKTEFDPARLTNPVLRMH

SEQ ID NO: 339294 - protein, 427 aa, unidentified
MSCLSVDSWIGVDTFMSRKFTRSDRCRDGKVSGKAVFFVKRLFCGIDVAKYEHVASIYDPATGEYILDSLHFGNDEKGFDSLFSHLSKLKKGQEILIGFESTGHYHMALFSYLTGKKYTCYLINPYMTSRFRSVSLRDTKNDDIDSRTIAAFLSFEYSRLENEEFINNELKELSLQRHFLKEDIAKMKIKLKAYLDRVFPEMEKLVNISTEAIRAILKEYPTAKDIAGVRIDKLKNLADKASKGKYPPSKIIRLKEAAKVSVGYPSEAIGLNIRHCIETLEVKERQIEEIEMMIRIHPLVAQSPLKQLKGMNDIEIGYIMSAVISISRFSSPKKLVAYAGLDPKVRQSGTWEAKTTRMSKRGNRLLRYALIWSAYNMTRCEGPLKDYYELKRSQGKSHYNALGHCAAKLCRYIFWILNHPEEEFLYR

SEQ ID NO: 339295 - protein, 347 aa, unidentified
MLHLGLDLSRKRLDVCVLNEAGTKLAVTQAPPDLDGLRHLAKEVAALGGPVSAAIESMNGARFVHDSLELMGWDVEIADAQKVKGLAPLACKTDKIDAWVLAELSRRDLVPAIWLPDPEIRAERERARFRLHLVRHRVMLKNRIHSSLLAFGKPCPVSDLFGRSGRELLGRLELPDPWTKNIATALSMIDDLDSEIDACEKELRSLGADHPYVSLLQPAPGIAWVLGFTIASEIGDISRFSSPKKLMGYTGLCPRVYQSGGKDFRGPISKNGPKYLRWSLIEAAVHASSHPVYRDHYDRTKARLGRQRGAKIARIEVARKLAEAIWHMLQTGSMFAPARSPAAPLVA

SEQ ID NO: 339296 - protein, 385 aa, unidentified
MALTPATQTPPYPDPSCLYMAIELSAAKWRLALSGGGQRIREKTIPAGDREKLLGEIRAGKKRFGLAEDARVISCYEAGRDGFWVDRLLSELGVENVVVDAASMKVNRRARRAKTDKIDAKQLLADLVRHHRGEKDVWKVVRVPSEEQEDKRRLHRGLERLKKERTQHRARILSLLATQGVQKCNLKVVLVELGAVRIWNGEPLPPGLKAEIERERDRLRLVEEQIRTITKEQRDQLKQPSSPELRMIKMLTRLRGIGVDSAWVLVMEFYGWREFNNRREVGGAAGLGGTPYNSGSTEHEQGISKAGNPLVRTRAIELAWLWVRLQPHSELSQWFMKRFATGGSRMRRVGIVAVARKLLIGLWHLVEHGAVPRGAVIDLTESCPS

SEQ ID NO: 339297 - protein, 387 aa, unidentified
MPQPNDLSRSLVTLEQDSTLIAVIEMGQSSWLVAGIVPGIERQPLKKLTADQDGLLQLLHRWRKEAAQAGHTIKRIAVAYEAGRDGFWLARWLRAREIEVYVIHPSSVPVSREHRRAKTDRLDTELLKRAFLGWLRGEPKHCSMAAIPTVEDEDAKRPSRERESLVGECTRIVNRVRANLARLGIRGFRPRLAHAPKRLDTLRTPEGTTLPANTLAEMQRDMAHLRFVKQQIKEIETTRTKRLQQASEGGRDAMVRLLARVVGIGIETADLLVQEAFSRKLRDRKAVARYAGLTGAPDESGQKRRERGLAKAGNARVRHAMIELAWGHLLHQPDSALAEWYRRRTVHARSGTRKTMIVALARKLLIALWRLVTTGEAPAGLLLRSAV

SEQ ID NO: 339298 - protein, 415 aa, unidentified
MSDPFRFFVGIDLGSASHQVCVVDASGQTLGERGVAHSGADMAALFQWLATLTQGADPQSIAAASEMPHGAMVEAFLERGYAVFAINPKQLDRFRDRFSVAGAKFKKRDAFVAAHALRTDRYAFRPLALGDPRLLRLRELGRAEESLQQDLRRAANQLWQLLQRYFPGLLTLVPAADEAWLWDLLENAPLPEKAARLRPSTLQRILKKHRIRRVSAQQLAELLAQPALPLAPGANAAIAEQVLLLLPRLRLLRKQHTQLGRNIETLLEQLAGDESFKQHRDVQILRSVPGVGRIFTATVLAEAAEPLAQRDYRVFRTVSGVAPVTQQSGKTKLVSIRRACHPRLRHAVYHSAARYAQDDPRGQQHYARLRARGCSHARAVRGVADRFLALIFALLTHNQLYDPCRRALLDPAPTC

SEQ ID NO: 339299 - protein, 343 aa, unidentified
MEQLRVIGIDLAKSVIQIHGSDSRGKCLIRKKLRRNQLLPFMAKLPRCLVGMEACGGSHYWAREIKQLGHDVKLIPPQFVKPYVKTNKTDVADAEAICEAVDRPTMRFVPIKGPDQQAVLLLHREREGLIKERTAVINRIRSSFSEFGVVIPAGPKRLRQWLSDSYGDVENDLPATLNRLMLRMVDRLNYIESEICDLDKEINDQNKSDERCKRLIEVPGVGRLAASAIVASVGDAKEFRSGREFAAWLGLVPRQYSSGGKQNLQGISKRGDAYIRKMLIHGARAVIRHMNRNSAPVDWLEDLMRRRHRNVVIVALANKLARTIWALLSKEQSYKRYEDTVVA

SEQ ID NO: 339300 - protein, 338 aa, unidentified
MALYCGIDLHSRDCWLAILDEKRKVVHETKVGNDLEALLQVLEPYREDLEGIAVESTYNWYWLVDGLEEAGYQMHLVNTWAVKQWEGLKYTDDRHDARWLAHLLSLKILPVGYICPKQERSVRDLLRRRAFLVRKRTSFLLAMRGAFECRTGKRTTSSEVKQWTAEEIESYLDDAIEALGITCLLQPMKAVDDQIRILEKEALTRAKLRDEFAPLLTVWGIGKVLGLTVMYEVGDIERFKKVGNFASYCRLVKTARLSAGKRKGSGNARNGNPYLSWAFSEAAHFAVRYHPEAKKYFQRKRSKTNGIIAIRTVAHKLARAAYYVMKDQVAFEPEKAFG

SEQ ID NO: 339301 - protein, 335 aa, unidentified
MKDVSVIGIDLAKHVFELVALDDRGRVLWRRRFRRDQLLAFMAQQPPTRVGMEACAGAHDWGRRLSALGHEVRLLPMHQVKPFRQGTKNDRNDALAIAEAAMRASLKGVAIKSQAQQDMLSIHRCRQLLMRQRTALINQGRGLLMEYGVVLRRGAGQFRRGLPLLLAEADNGLTPSIRETLALIGRQVSELDERIEGLERRLKAQADAVSRRLRSRPGVGWLTATAFAASVGDPRTFHDGRQVAAWLGLVPRQHSSGDQIRLGRISKRGDRYLRTLLIEGAHSYLRRAPHYDTRLSRWAVALQARVGQQKAAVALANKNARVLWSLMASGEVHQD

SEQ ID NO: 339302 - protein, 563 aa, unidentified
MSRRALKARFKRRFTRRIYCGDVPIVDSALDAGDTVADTVSKVIHKGRSKACEEPCVEGPPLVKNFAAEQMGVVNNLPSGQDGWERHAPKPARSTVAIPSRVICRRPAGSRASVRRSERTSSREDPCISLTGDRRVALTPRPFTGKRNMKAWNEITYYGGFDWARDHHDVVIVDRRGQMVADFAIEHTAEGWQRWREQVAALEAENLAVCLESSQGMVVEQLLESGVTVYPIAPVSSKAYRERKAPSGTKTDRLDAWSLADALRLDGHSWKALAKEDPLIAELRLLCRDEIALIEERTALLNQLQSALQEYYPAALEAFEDWTLPAAWAFVEVFPTPGALAGAGKRKWEKFLHVHKLARPQTYAKRLEIFARGSELAAGEALTRSKSRLALARIRMLRVLQHQIEAYRAEIEKLFAKHPDHHLFGSLPGAGPKIAPRLLGEIGSDRARFDDPSALQALAGTAPVSYQSGQIHKVYLRRHCNKSLRATIHLWANLSRRASPWAALYYQALRARGKSHASALRSLGQRWLKILWKIWQTRRSYDPDLHARNQLKHGSWVLTLQSA

SEQ ID NO: 339303 - protein, 413 aa, unidentified
MRLFVGDDWAEDHHDVELMDATGRRLAKARLPEGVAGIARLHAMIGGQLGEAAEEEDAGQVAVGIETDRGPWVQALIAAGYTVYAINPLQAARYRERHGVSGAKSDAGDAHVLADMVRTDSHQLRPVAGDSAQAAAVKVVTRTHKTLIWERTRHTQRLRHALRDYFPAALEAYEDLDAPDTLELLGRAPDPASAARLTTAQISAALKRARRRGIAGKAERIQAVLRAAHLGQPAIVTAAYAASVRALIAVLGTLNEQVTTLEGQVEAYFGQHPDAEIITSQPGLGPVLGARVLAESGDDPARYASAKARKNYAATSPITRASGKKKTVMARYVHNDRLTDALMSQAFSALQTSPGARAYYDHQRARGSGHNPALRQLANRLTGILHGCLKTRTLYDETTAWPQYAAKTEQAAA

SEQ ID NO: 339304 - protein, 426 aa, unidentified
MKSTQNEKISQIKISTLVVGIDVAKETHYARALDFRGMELSKLLRFSNTREGFEELEQWMQGICRQHQKTDIIVGFEPTGHYWFTLGDFLKSQGHRLAIVNPFHVKRTKELDDNSPSKSDSKDPKTIAMLVKDGRYREVYIPEGMYQELREVVAERDRLVQRLISINNQVSRWIDIHFPEYPTVFKDWRGQAGFLTLRHFPTPEKIASVGAEKIAATWKGSMKRSAGFKRAQELFKAAQSSIGRKTGLVAAEASLQNLLTEYELYRRQYTELEQLMLDLLQQVPNGEKLLDIKGVGLVTAATFVGEVGDISRFKDPRQIQKLAGLNLVENSSGKHQGKTRISHRGRKRLRHGLFMAMITILATNPEFRMLHQKNLTREKNPLTKMQSIIALCGKLIRVFYGLLRTGTDYSAEKMLGDIERGIKAAA

SEQ ID NO: 339305 - protein, 391 aa, unidentified
MYLVGIDVSKFKYDCFIMTETGEVINNSFSFDNNDSGFTLLLDTLKSLDQSQKIKIGLEATGHYGNNLKLFLTENNYSFMELNPYLVKKFAESFTLRRTKTDKLDAMTIASVLGSPNLTYEPYQISSYHISSLKSLTRYREAFIKERSLHLVQLTNIMDQIFPEFKPFFNGKFGTTAIYILKKYKTPERISKLTDEDIFKIKTVSRKISASKLVKLRELAKNTVGHSSISNQILLKSILNLYTNVDDEVTEIEKQIDSIMSEYKNHIVSIPGISKYSAAQIIGEVGDFKRFSSASKLLAFAGMEPSTIQSGTMDFKGKMVKHGSGHLRYVLMNIAITIIIHNPTFYSYYSKKHHQEGKNHRVALSHVVRKLVRIIYHLEVTNQDFNSILLK

SEQ ID NO: 339306 - protein, 351 aa, unidentified
MKEFIALDAHKRYSWMEREEVKSRKIRHARIEHAPGAIRECLEGREKGTPVAVEATGNWYWIVDEIEQAGLEPKLVHPRKAKLMMGLVNKTDKLDAHGMNQLQRNGTLPTVWIPPRELRDQREITRARMVLTRHRSRLKNRIQATLSKYGWNGGEASDPFGKKARGELRKAIRGLPPQTAQITEMLLQQLDFVHAQIEALEEKTRELVRDTAEMDRLRSQPGVGWILSAVIALEVGEMSRFASAERYASYAGTTPRVHASGDKVRYGRLRPDVNRYLRWAYIEAAHSVCLYRQTYPERHVSQLYERIRERKGHGKAIGAVARHLAEATYHVWIREEPYQDPVLRKGRSTEV

SEQ ID NO: 339307 - protein, 422 aa, unidentified
MLAETQDNEEIIARVAALDIGKAELVCCVRVPQDGRPGRRLQEVETYPAMTRPLLSMAGRLACLGVARVVMEATSDYWKPVFYLLEAHGFEVWLVNAREVKHLPGRPKTDKLDAVWLCKIAERQMIRPSFVPPPPIRQLRDVTRYRADLVAARTAEKQRVEKLLEDACIKLSVVVSDVFGVSGRQMLAALIGGQRDPKALAQLARGVMRGKITALQEAFTGYFTDHHAFLLAKMLARVDAIDADIAALDERIGQMIAPFGPAAARLAEIPGISSVAACAILAEIGTSMDRFPTAGHLVCWAKFAPGVKESAGKKKGKNTTGHGNRYLARVLGNAAASAGRTDTFLGERYRRIARRRGSKKAVVAVGRSMLVIIWHLLADPDVRYTDLGSDFYDTRINPERRKRNHVRQLEALGYKVTLEPAA

SEQ ID NO: 339308 - protein, 359 aa, unidentified
MDGSRSEPKMTAGVDIGDKYSYLCLIDTESGEVVEEGRLRTNPKAFRRRFASEQPMRIAIEAGTHSPWVSRLLEECGHEVLVANARKLRLIYANKRKTDEMDAENLARLARVDPKLLYPLKHRGQECQTHMAIVRSREALVGTRTQLVNHVRGTVKSFGGRLPKCPARSFHKRASEHIPEALLAALGPILEQIGSLTERIRQYDRKLETISKERYPETELLRQVEGIGPLTALTFVLTLEDPYRFEKSRSVGAYLGLVPATDRSGDRDPQKRISKEGDQMLRKLLVSSAHYILGPFGSDSDLRRHGEKIASRGGKNSKKRAAVAVARKLSVLLHRLWVTGEIYDPLYNTRRRAQQGEAA

SEQ ID NO: 339309 - protein, 355 aa, unidentified
MKRRYFIGIDVHCLFCEIAVVDHRGTVVLRQRCDTTIAALMQVLEQVPRPRSLVIEEGPLAGWLWRNLHPLLEEMVVSDPRRNRLIAKDGDKDDDIDAEKLAQLLRGGFIKPVHQCASEEQAVFKQQVSLYRHRVRQRVREAQRISALFRQHGVMIRERAFVAVDARQELVQQLPANEVLVEAIALLWQSYDDAVSHEEQWRTRLIKLAQQHEVVRRFEALPGFGWIRSATLFAYLDTPWRFRSKQALWKYLGIGLERHRSGNGPEHVGVPKLVHRLIKSTILGAAQSAAAQGDNPFADLHRRWTAQGLSSRLARRNVARSLASTLWGLWKNGSVYEPKWVGAAGAASAVNKQSR

SEQ ID NO: 339310 - protein, 325 aa, unidentified
MSFKILKNNCCGLDVHKTWIYACIGITDSFKRTEYKQARFSSFTKGLQELCLWLAKYNCIDVCMESTGKYWIPVFNVLEKNNIFVTLSHPKYTKPQKGNKTDRKDAKWICDLYMCGMVKPSFIPPADIRQLRDLVRYRFKLTCMITGEKNRAHNCLTVSNLKLDDVFSDIFGKSSRSITEQILQHPGEVFDVAPFVDSRCKTPIEEIQAAVDGAISHEQAVKLRQCLKHIDELEMHKAEIEREIFRLSQKYESVLDLIRTIPGFDKNPLTAIQVLSEIGADMSVFPTAKNLVSWAGCCPRNDQSSRKIKSTRISHAGSLCVILYF

SEQ ID NO: 339311 - protein, 345 aa, unidentified
MKKVMAGIDLHSNNVVIGIMDTDGKRVTSAKLPCELKEIAKFLAPFKKRLEQVAVESTYNWYWLVDGLQELKYPVVLANPAAMQQYSGIKHADDTNDAFFLAELLRLKILPTGQIYDAQLRPVRDLLRRRMTLVHQRTALMLSFKSLYTRTTGQEMTLSQLKELEIKEAQELYDHPANQIIAGMQIKHIEQLTESINKIERVVMASARELPAYGKLTTLPGIGIILGMTITMEVGSIERFAEAGHFASYCRTVQAQRTSNSKKKGENNSKCGNKYLAWAFIEAANFARRYDPQCRKWYDRKAAKTSKVIATKALACKLAKAAWFLMSQGSDYDAQRMFGQPATVK

SEQ ID NO: 339312 - protein, 358 aa, unidentified
MRIIGVDLHTRQQTVAMLDTETGELTEKTFRHDGNEVREFYSALPGQVLVGIEATGSMHWFLELLEELGIDHQVGHPSEIRKAETRKQKHDRRDAALLLKLQVENRFPAIWMPSTELRDLRTLLMHRHQWVRMRTRVQNALQAIALGHGLRRGKTLWSQLGQHTIESLPLAPHAAHRRTQLLALYGELQAQIDELDEQVMDHAQQRPGAKLLMSHPGVGPVTALATEVFLGDPARFADGKAVVSYVGMIPSESSSGGQQRLGGLSKQGNPFLRFLWCEAAVHAVRRDPELQRFYRRKLAQKGLGKARVAAARKLGIRLWIMLRDQIDYQEFCRRGQLRQKNGGACAGMPEVGHSPAMQ

SEQ ID NO: 339313 - protein, 345 aa, unidentified
MTRISVPRAVIVGVDTHKDVHVAVAVDQDGRVVGRQEVKTTQRGCVALHDWAVRLAPTVQFAVEGTGSYGAGLSRYLALQSIQVTEVRGPSRQVRHDRGKSDTVDAEAAARAVLAGTARTVPKSGDDWVEMVRVLRIARTSAMHQRGQVTNQVHAVVVSAPPSLRDALRDLRQADLVAKVARFRVQPLSGPREATRLTLRLLAQRHQSLTAEIDLLDEELRTLIEEHAPHMLAIRGAHTEVAGTLLVVAGDNPQRLRSEASFAALCGVSPLPASSGMTHRHRLNRGGDRQGNRALWWIVMSRLRNDPRTQEYARRRSAEGKSTREIIRCLKRYVAREVYAVLTTA

SEQ ID NO: 339314 - protein, 305 aa, unidentified
MKKNIMYVGLDVDDSHYHGAGFDKLTGEAVSFKCRPTLKGLIRQLEKLEVYFPDGSLRLCYEASYIGYSLQRDLAASGYHCDVIAPGSIPRKGGSKSVKTDRIDALDLAQFHANDLLTIVQAPDVTMEQDRDLIRSRQHTMQQQGHIRRHLQSLLRRNGLYYRSENKTRTHWTKQHYCWLERTIEDCTGSLKINLQLLLAQIKSLDEILTTYRQAIDAMAASPGYQEPVSALTCYKGVENLFAMTIITEIGDIKRFAHPRQLTAWVGMDIREYSSGGKQHRFGITREGNRYLRTAFIEANQRAWV

SEQ ID NO: 339315 - protein, 401 aa, unidentified
MNAVGIDVSKGKSMVCVMRPFGEVVLEPFEVLHTAQSLNDLAGKLKALDGETRVVMEATGNYHKPVAFVLHDAGLFVSVVNPVLIHDYDNNSLRRVKTDRKDAVKIANYTLDKWTRLRQYLPEDDTRLALKNCYRQYQQAVAVRTMLKNNLISSLDLTFPDANKLFSSPAKSNGCEKWVDFIGDFWHSECVSSLSSDAFAKKYLKWCQKYGYNFTRSKSDTIYACAVNAASLPKSPTSKLLIQQQVAQLKAVSQSVAAFQQEMLRLSQQLPEFDTVMEMYGVGPSLGPQLMAEIGDVRRFSSKKSLIAFAGIEPQPNDSGKIVGSDSGISKVGSAVLRRTLFLIMTVILKTQPQDEPVFQFMNKKRSEGKPYKVYMMASANKFLRIYYARVKAVMDSKHSK

SEQ ID NO: 339316 - protein, 319 aa, unidentified
MKRVKHITVAAQVAGIDVGKRWLDVWSLTSGEHQRFERTSCGLWLLVSWLRDQDIVRVGLEATGGYERIVCEALHDASFEIVVHQPAQVRYFAKSQGIRAKSDKMDARLIAEATASRHNATLYRPSDSPTLTGLMTLYQHIATLLAEAKTFAEHVELEVVEAIHQSVMADLESRKAEVLRSVLAVIRKNASRQARFDLLKSLPGIGPVVAAGLLAYMPELGSLAHGQPAALLGVAPFDSDSGEHRGKRFIVGGRRRPRDLMYLSALAAKRMDTPFRLFYDRLITAGKPAKLAIVAVMRKLIEIANLVLKRQTPWVRQIG

SEQ ID NO: 339317 - protein, 419 aa, unidentified
MAFKIFRKNCCGLDVHKTWIFACIGITNTKGLTAYKEKRFSSFSKGLRELSEWLSSSNCTDVCMESTGKYWIPVFNVLEKTCNVVLAHPKYTKPQRGNKTDRKDAKWICDLFMCDMVKPSFIPSADIRQLRDLVRYRFKYTNMLTGEKNRAQNCLTVSNLKLDDVFSDVFGKSARSITEYMLRHPGESFDVTPFVDHRCKTPISEIQAAVDGAISESQAVKLRECLDHIDEMGKHKEKIEREILRLSEFHSSTLDLIRTVPGLDKDPFSAIRILSEIGADMSVFPSDKHLVSWAGCCPRNDQSNFKIKSTRISRAGSYLKPLLVQVSNALIKSKAHPEFGRRYRRIKAHRGHKKAIIAICRMLLTAIWHILTDKKPYSPDGYLQPRTAKKNMVLTTSQAFNLLKSRGYIIKDDPVTATA

SEQ ID NO: 339318 - protein, 350 aa, unidentified
MSRTCNAAVVTIGIDPGKNVLHLIGLDVRGAIVLREKIARARIASRLANVPPCLIGIEAGAGTHYVTRELLALGHDVRQVPPVYAKPFRQSHKNDFRDAHAIAEAVQRPTTRCVPAKTDEQLDLQALHRVRYRLVGQRTAIINQMRSFLLEHGITVRQRLHWLRHALQDILAQRTDVLSPRMVRILEDLAQDWRRLDDRIEAVTDEIEALSKNTESCQHLMTIPGIGPIISSAVVAAIGNGTAFTRGRDFAAWLGLIPKQISTGDRTILGRITKRGNRYLRMLFLQAARVVLLRPRNWMKHGFGPWLAAAAQRLHHNVLATALANKLARIAWSVLAQHRAYEARPTVAAV

SEQ ID NO: 339319 - protein, 349 aa, unidentified
MSQNLNSAVAVIGIDIGKNSFHVVGLDDRGAIVLRQKWSRGQVEARFANMPPCLIGMEACVGAHHLSRKLKALGHDARLMPAKYVRPYSKGQKNDFRDAEAIAEAVQRPTMKFVATKTADQLDLQALHRVRERLVSQRTGIINQIRAFLLERGVAVRQGLRFLRAELPRILAMPPDVLSPRMVRTIEALAEDWRRLDERVDHLSREITALARQDAGCERLMSVPGIGPIISSAMVAAIGTGEVFAKGRDFAAWLGLVPKQISTGDRTILGKVSKRGNRYLRVLFVQAAWVVLVKPQSWERHGLKRWLDAAKSRLHRNVLAIALANKLARIAWGVLAHGRTFEAHKLRVA

SEQ ID NO: 339320 - protein, 340 aa, unidentified
MRLVGCDLHGSQQSIAMLDRDTGEVVEKTLAHEDGAVRAFYASIPPPVVVGIEATGSMGWFLRLMEELVIECRVGHPTAIRKAETRRQKHDRRDASLLLQLLAEDRFPAIWMPSTEYRDLRSLLLHRHQWVRMRTRVQNALHAIALAHGVRRGHTLWNREGQALLASLPLAPHTADRRSELQALYQHLNEHIDRLDDRVQHVANERARATLLMTHPGVGPVTALATEVFVGDPTRFLDGKALASYVGMIPREYSSGKRQRLGALSKQGNPFLRFLWCEAAAHAVRRDPDLERFYRRKVVQKGFAKARVAAARKLGIRLWIMLRDQIDYTEFCRRGLARQS

SEQ ID NO: 339321 - protein, 359 aa, unidentified
MQGQNYELDFSGKEIYAGIDVHLKTWKVSIMTNGVMCKTFSQSANAADLKKFLERNYPNANYHSAYEAGFSGFSAHRELEKLGVSNIVVNPADVPTTDKERRQKEDSRDSRKIVRSLYNNELEAIHVPNIDIEGLRALVRYRKTVVKEISRHKSRTKSFLYYHGIEIPEELKIGSGHWSKPYSQWLQVLEFESEYSKQVLLQIIDTVEHLRKKLLEVNRKLRQLEKDSQYSEQIKLLRTVPGVALVTTMTILTELNDMKRFKNIDRLCSYVGLVPRTDSSGEKDRTGGITPRCNQQLRGMLIESAWIAIRHDPALMMKYGELIKRMDPNKAIVNIAKRLLSRIRYVLLNKKAYVKGVVK

SEQ ID NO: 339322 - protein, 339 aa, unidentified
MSNVTTLGIDLAKNVFHLHGVDRRGKVVLQKCVSRRALPSLMAKLAPCRVGIETCTGAHYWARVLRGYGHTVGMMSAQFVKPYVKSNKNDRNDAEAICEAVSRPTMRFVTPKSIEQQDIQSLHRIRQRLVQQRTTLVNQLRGLLSEYGVVLPRGISHIRGRLPGVLEDGDNELTMFGRELFNELYEEYRALNDRITGYERKIQQVFKQSEACQRLAAVEGIGPLTATALVAAVGDAHEFTSGREMAAWLGLVPRQCSTGGKPRLLGISKRGDRYLRTLLIHGARAAIQHADRKTDARSQWVSRLRERRGKNIASVALANKNARVCWALMSRGEAYQYAP

SEQ ID NO: 339323 - protein, 334 aa, unidentified
MNYIAIDAHSSTCTMCVLDNKGCEKDSSQIETNGRLIKNYLRSFSGKKIVTFEESEMSSWLFDIIRPEAEEVLVCNPVAVKDYSKKKTDKLDARKLARLLRGGFLIPVYHDGSKREKFKHLVSGYNALVEDAVRIKNRYKSIFRKSGKKQTGIKLYTDESLLKDIPDFGHKFVGHHLYNLLVEIEKSREVYVKEIKTQLKEFEENKYIRSIPGIGDIQAAKIIAHVIDPRRFANKHKFYSYCGLVRHQRVSDGTKYGSNKIFGNRTLKCVYKMAGYSAINGNNVLKQYHAHLIKNGVNERNAYNAVCRKIAAISLAVWKNKKYFNDEEILKLIK

SEQ ID NO: 339324 - protein, 321 aa, unidentified
MDGQDKRVFKKKLRNEPQAILKTLEQFKAEIVGVVVESTFNWYWLVDLLMDAGYRVHLANPSAIKRYEGLKHSDDNHDAFWLAHLLRLGILPEGYIYPKEERPIRDLLRKRGHLVKLRTSLILSLQGIIQRNCGVAISGNNIKRVKENHVAPLLNGQEDLELSGSVSKETIDYLTRQIRQIERFIEAKAKLKEQFVYLQTICGIGKILSLTIMLETGSVERFPTVGDYVSYCRKVPSTWTSNGKTKGKGNKKNGNKYLAWAFSEAAQFARRYDSDARAYYQRKAARTNFMVAHSALAHKLARAAYYVMRDRVPFDPEKLFA

SEQ ID NO: 339325 - protein, 353 aa, unidentified
MKQFVAFDSHKHYTLVEREVKLNRETQVNRIEHEPGAILAYLNKHAEAGTTVAVEATGNWYWIVDEIEAAKCLPALVHPYKAKVMLGCINKTDRLDVRGMNRLQRAGTLPTVWIPPAEIRDLRDLTRSRMFMVRHQTRLKNRILAALARYGWKVAATDSFGTAGRKEVRQLIQRLPATTQSMTDCMLQQLEGLEKQIEVAEDRIKELIKETPEMQRLMTIPGIGRILAAIIMLEIGDVSRFPTAAHLASYGGTTPRVHASGGKIRFGRLRPDVNRYLQWALIEAANSVCRMHRVHGERHVCRVYTTIAKRRGHGKAIGAVARHLAESAFYILARKENYREPQNKVHKVSSART

SEQ ID NO: 339326 - protein, 341 aa, unidentified
MENCGIDVHQKSSQVTVVDQEGEVLERATIPTTRAGLERWFGRRARMRILVEASGSSPWVVRVLAELGHEVEVIDPRRVRLIAQSTLKTDRIDADTLAELARLRIKLRTLVWQRSEASQRQRGHLRVRRALVEARARFIVTIRGLLRSFGVRVASCRSDRFVARCQASAIPPELSEVITPLLFAIRDLDTRIAAMDEVVEQVGHLYPAVESFQDIPGVGPVVALAYLLSVEDPSRFRRSRDVPGYLGLRPNLRASADVVRRGRITKEGDSDVRRLLVQAAHAHLRSHADTALKRWAESLIPRIGKRKAIVALARKLAVLMHRLWITGEVYQPFPNNTAMAA

SEQ ID NO: 339327 - protein, 264 aa, unidentified
MTTLDETYVGIDVGKTWLDVAVWGNEETRRVRNDEAGVAEIIQHIAEGAPRLIAVEATGGYEQLVVQAMLRKGLPVAVVNPTRVRALAKAAGKLAKTDVIDAHLIAEYAIKIQPPAQAPKEENEVRLRALVTRREQLVEMRTAEQNRMGTTHDALKADLRAHIDWLSRQICELEMQIQELIDLLPDWKAQVELLDTIPGVGLIVAVSVVADMPELGQLDRQKVAALAGLAPFNRDSGKKRGKRRIFGGRKGVRRVLYMACLSAI

SEQ ID NO: 339328 - protein, 318 aa, unidentified
MNRQEPNTFIGIDVARDRLDVHVLPGGKAFSVTRDRQGLSTLIAYIREHDDPLVCLEATGGYEIEVVQASAAEAVRVVVMNPRQVRDFARSTGRLAKTDRLDAESIAAFAEAVRPQVRPQVRPLPSHEQRRLSALSRRRRQVVTMAAAEKRRLKRTWDPSIEHRITLHMAVLTAERDDLDAEIRAIVQADVGWRNKAELLQSVPGIGEATAFTLIADLPELGTLERNPIAALVGVAPINRDSGTLRGRRMIFCGRKHVRNALYMATISAVQFNPAIKAFRDRLRAKGKPPKLILTACMHKLLIMLNAIIRDQKEWKPA

SEQ ID NO: 339329 - protein, 320 aa, unidentified
MENQEQTCIGVDVSKESLDVAVHGVKNVMHAGNDEAGVQKIVRLAVKRNAVLVCFEATGGYEVKLWMTLTEAGLNPAPGNPRMVRHFAQSAGRLAKTDALDAYIIADYAYAMNPRVMPFPETAELKELASRRCQLQEMLTAEKNRLHTARNSSLKEQIQAHIAWLEEELDRVDSKLKADIEACPEWQEKDKILQSTLGVGKGLSTCLISQLPELGILNRQRIAALVGVAPLNRDSGHSHGKRRIWGGRNHVRAALYMSTLSATRCNPAIRPLYLRLLEKGKTKKTAITACMRKLITILNAMLKHHSYWRFTTQPTVAMAH

SEQ ID NO: 339330 - protein, 419 aa, unidentified
MSFKILKFNCCGLDVHKTWIYACIGITDSNNRTEYKQARFSSFTKGLHELCDWLAKYNCKDVCMESTGKYWIPVFNILEQHNLWVTLSHPKYTKPMKGNKTDRKDAKWICDLYMCGMVKPSFIPPADIRALRDLVRYRFKLTCMITSEKNRAQNCLTVSNLKLDDVFSDVFGKSSRSITEQILQHPGEKFDVSPFVDGRCKTPIEEIQAAVDGAISKEQAVKLRQCLDHIDELQKHISEVEQEILCLSDKYEATLNLIRTVPGFDKNPITAIQVLSEIGGDMSVFHTAKHLVSWAGCCPRNDKSDRKIKSTRISRAGSYFKPVLVQVANALIKSKKYPEFTTRYKRIKTRRGHKKAIIAICRMILTAIWHILTDLKPYTPEGFLESRPVNKEKVLTTSQALNLLKQRGYLIKDDPSPAS

SEQ ID NO: 339331 - protein, 347 aa, unidentified
MDYYAGIDVSLEASSVCVVDASGKIMREAKVLSEPENLIGWFKELGLELTRIGLEAGPLSQWLYAAMKKDGLAVELLETRHVHDAFKAMPVKSDRNDARGIAQLMRLGWFRPVHCKSMPAQEVRALLTARKLVQSKLFDIEMSLRGILRGFGLKIGRTTPNRFRLRVEELVAGHPTLEIIGKALLAAHEVLLRELNGFEKRVRQQARQDKRVLLMMSAPGVGSIVGLTYVAAIDDPTRFKSSKQVGPHFGLTPKKYQSGETDYSGRISKIGDASVRTALYEAANVILTKPLKGATALKSWGMKLAKRAGMAKAKVALARKLGVILHRMWVDGTKFADKGISPKPVTA

SEQ ID NO: 339332 - protein, 371 aa, unidentified
MKSIIYIGMDVHKKTYSLCALLKETGEIIGETKIPADVSLIIKFIENAKKSVDSDDVQIKTGYEAGCLGYSLYWQLAAKGIECDILAPSTMHRSAKNKVVKNDRRDAKNIAANLANGTYKSVYVPTDEDVEIKEYIRMMHDFKIELKKVKQHINAFLLRFGHQYPGKSKWIPAHIKWLKELELSDMYREILDEYLSQLEILSEKIERFKHRLEELSQKETYNEKIGQLRCIKGMDTTAAMTMHAETSDFDRFPTANAFASYCGLTPGEDSSGESYHRLGITKQGNSMIRTTMVEAAQVLVRGTIGKKGKKVKSKQKDQDVKVIDYADKAVVRLQKKYHRMIFRGVKRNIAITAVARELACFVWGIETGHIS

SEQ ID NO: 339333 - protein, 347 aa, unidentified
MSSVAEIYSHVIGVDTHAKTHTFTIVDAPTGRPLKTATFPTSPAGLTRAVSWVERHSPPTRLLVVEGIGSYGALLAEQAVNAGIEVVEAGVISKAERRAHGKTDELDSVLIAKSVTGKQVSELRRPRFDAGLRDALHVLVIARESMTGEKTRFINQLTALIRTRNLGMNAPRPLSDAQIRVIAGWRKRDEPLHLELARGEAIRLANRIMELDNSLDDNKKQAEIIIRSTPYHVLLDTPGVGPVSAAIILTAMGTNQRVHSEAGFAKLGGVNPIPASSGNTENHRLNRGGDRRLNKALATIITARMRHHQETKDYVARRTQEGMAHRSIKRILKRYLARQIWRMVSQI

SEQ ID NO: 339334 - protein, 467 aa, unidentified
MIAPGRRPGRPAKTRPPFVVLDPHAAGIDVGATVHWVAVPPGADAEPVRSFGTCTADLEELADWLQACGVTSVALESTGIYWIPLFEMLESRGLEVRLVDARQTRGLPGRPKDDVRDCQWIQRLHSCGLLRGAFRPDDQVVVLRSYLRQRQMLIACAGDHIRHLQKALEQLNVKLPEVVADITGVTGMSIIKAILAGERDPARLAKLRDQRCKQDEQAIARALYGNWRAEHLFCLRQALELYEFYQQQLAACDRQIDAQLQTFADQSAGAPMPPRPAGKRKMRRRYKGNVPGFDARARLYRMSGVDLTQIEGVEEGTALVLLCEIGLDMNRWPTEKHFCSWLGLCPQHKISGGRVLSRKVRPGVNRAAQALRLAARSLEHSLSALGAYFRRLKARLGAPKAITAAAHKLARLVYSLLKHGQTYLAKSLEEYEREHHERQLRNLRRKAHELGYKLVQPGQVASAPMPA

SEQ ID NO: 339335 - protein, 338 aa, unidentified
MTTMTLLGIDIGKNTFHLHGQDARGHQVLRKKLNRNQLLPYLAQISTCKIAMESCGGSQWLARKIKEQGHQVQLIAPQHVKAYVTGNKNDFIDAEAICEAASRPRTRSVQVKTVEQQVLCTEHRLRKSLVSRRTAVINQVHGFLLEFGVIFPAGYAALDRVSGLMQSRELPIRLINAIERMLEDIRQLTGEIKKLDVEIKQNLVQSDAGQRLQSIPGIGPLIASALVADVADASAFKSSRDFAASLGLVPRQYSTGGETVLLGISKRGDKYLRSLLVQGAHTVLYRVDHRTDALGMWAKNLLTRKPLNKVACALANKMARIVWVLLTKGGTYNSQLLA

SEQ ID NO: 339336 - protein, 340 aa, unidentified
MTITTVGIDLAKNVFAVHCVDQNGKTVLVKPKVSRAALPELIAGLPPCVIGMEACSGAHYWARLFREYGHEPRLMAAKFVSPYHMAGKSGKNDAADAQAICEAVRRPHMRFVPVKDESQQAMQCLHRTRQGFIEEKTATYNRLRGLISEFGVIAPQSTDALRRMVSEQKNSLPFKVQQCIDDLLEHVDRIEANIADYDRILSRMAKTDHRSQRLMELKGVGPTTACALVASIGNAHDFKNGRQLAAWLGLTPSQYSSGGKSKLGRITKAGDSYLRTLLVQGARSVLIGADKRTDSFSRWVCTLVERRGYWRAVVAIAAKNARLCWASLHYGDDFRLYSAS

SEQ ID NO: 339337 - protein, 455 aa, unidentified
MRKPQVIPDEDHEVVYERVAAVDVAKASGVVCLRTPDPQRPGRFVNRIWEDVPATRARIAELGGELLRCRVQMVTLESTSDYWRIWYYVLEGLGLAVQLVSASQAKNLKGRPKTDRLDAMWLARLTQWGMLRPSFVPPAAIRRVRDFTRARTDLVRERTRVLQRLEKLLEDAMVKITSVVTDGLKAKSSVAMVAALVAGERDPRTIADLAKGSLRGKRDQLAEALDGMFDSHHGVIARMLLDQVAFLDARITAMEDQAIAALAQVEESWGVDATGETGPGCGTTAESPVLAAAHRLAEIPGISVWLAIVIIAEIGLNMAVFPTPAHLVSWLGLCRSAAQSGTRHGKGRQKKGNSYARGAAGQAALAARGTATFLGERYRRIARRRGGAVAQVAVARSIMIIVWHLLNDPAARYRDLGPDWHARRTNRDKKIRTHIQGLKALGVTVAITDDEPQAA

SEQ ID NO: 339338 - protein, 389 aa, unidentified
MKHRSDLNQSYAAFDQASTLVCVIELSSKSWLLAGTVPGVKRQPRKNLPAGKPQELLAQMERWRAEAVKAGHAITRIVVAFEAGRDGAWLARFLGDYGIEAYVIHAASIPVPREHKRPKTDRLDTEMLMRALLGWLRGEPRHCRMVQIPTLEQEDAKRPAREHDSLVRERTSLINRMKSALVWLGITGFNIKLVKAGQKLAGLRTPNGEPIPPNTLAELYRDLERLAMVRKHIKAIEEARLKRLKEKPNHGANPLVLMLARIFGLGLETADLLVHEVLARNLRDHRAVGRYGGLTGSPDESGKTRREQGLAKAGNWRVRHASLQLAWRWLKHQKDSVLTQWYRERTAGGGDIVRKKMIVALARKILVALWRYVTTGELPAGVVLKPVAI

SEQ ID NO: 339339 - protein, 406 aa, unidentified
MYNDDILVVSLDVHKKIHFAHCELKSSAKSIGKDFSFPNSASGFNTFFSEVNNRLHHILIKSVAVVLEPTGPYWKPIGYAVINRGWPLYIVSPEQVYHQRIADDPSASKLDKLDPKTIAKLFRDGKATIARLPQGTFRELQKLHREYIDLTKKLAREKIQLKSILAEVNPELASFFSNVFGKIALAILSTAPTPPEILALGIERLTAIFKKHGNGIIGRKKAEKLINLMKSSIAVPQKSAISLLDRTLQRVSIYRTQIQDVADSLINMAYPWASRLTTIDGVNIRPACRFVAELGDPSSIHSPKALVKLASLIPKEFRSGSSIHKKAIISKKGNPYLRTIAYYMAISCVKRNHRLSQYYKHLISKGKPKMVAICAVARKLLMIIYHVLHNEPYVPEKVGVGLNKHT

SEQ ID NO: 339340 - protein, 393 aa, unidentified
MYYVGIDVGKNNHVASMMDASRKTVFKAYAFTNTREGAQSLLEKIQCHAPEATQIEIGMEATGHYWLALYSFLFDAGYTLHVINPIQTDGWRKGVEIRKRKTDNIDSLLIADLLRYGEFIETRLTDEGLLSLRTLTRFRSYLVDSIADLKRKVICVLDQVFPEYESIFSQVFGTTSKEVLLTYSTPAELEGVSVEQLTELLAGLSRQKCGTAQAERLSQAAAHSFGVTFCRDTFSFQLRILLEQMNFIEQQVADTEKQIKALMDQLASPITSITGIGPVLGAVILGEIGDISRFDFASKLVAYAGIDASVSQSGEFESTSNRMSKRGSPYLRRALYQAATVAAFHDPQLAVFYQKKRAEGKHHSVCIGAVARKLCYIIFTILKENRPYVKRQP

SEQ ID NO: 339341 - protein, 343 aa, unidentified
MQAVTTIGLDIAKSVFQVHGIDTEGNILIRRQLKRRSVLAFFEKLPPCLIGVEACATSHHWSRQLKGLGHSVRLMPPAYVKPYVKRQKNDAADAEAICEAVTRTNMRFVETKTPEQQSCLMLHRTRQLFIRQQTSVINAIRAHLAEFGIVAPVGRKGVEHLLGVVTDGSDQRVPEVARVCVAALGAQLRGLKAQILEFDRRILAWHRSNETSRRLDAIPGVGPALATALVASVADAKAFRSGRNFSAWIGLVPKQRSSGGRDKLGSISKQGDRYLRSLFTAGALAVIRYAKIHGTKHRPWLTALLARRPTKVAAIALANKLARMAWAMMAKGERYKEPVALAA

SEQ ID NO: 339342 - protein, 331 aa, unidentified
MHTQGGVVGSAQRPNAGIDVSKQHLDVCCGTEERRLANDAQGWDAAAAMLLRANVDLVALEATGGYERGMVCALQGADIVVARVNPRQARDFAKSLGKLAKTDKVDARALRDFADVLSRHQDRQKYITEPVEPHREELAALVTRRKQLVEMRVAEGNRLGQARAHTTVKSIKNVIKTLDRQLADIDHDIDDLLEEHFKSQRSLLNSVKGVGPVTIVTLLALVPELGRLARREIAKLVGVAPLACDSGQHQGKRRIWGGRADVRSVLYMATLTAIRYNPPIRLFYERLLAAGKPKKVAIVASMRKLLTILNAMLRDQAMWDAAKHVVQPSVT

SEQ ID NO: 339343 - protein, 442 aa, unidentified
MEVLYEQCAGLDVHKKTVTACRVRMVGRRREQAVQRFGTTTPELLALADWLAAWSVTHVALESTADYWKPIYNILEGSYELLLVNAQHLKHVPGRKTDVKDAEWLAECLRHGLLKASFVPQRPQRALRDLTRYRSKLVQERARLANRLQKVLEDANIKLGAVATDVLGKSGRAMLEAMIAGEENGEVLADMALGSLRSKQAELAKALTGRMTDHHRFLLRQQLQHYDFLTEQIAVLDARIEQQMAEMDDQKPPIELANTPEDTIEPEDSADNEPLTHSEAIALLDTIPGVNERTAEVIVAEIGLDMGRFPSHKHLAAWSGVAPGSDESAGKRRSGKTKPGNKALRAALSQAAWAAGRTKGTYLSSQFKRLAARRGKKRAITAVCHSIIVIAYHILSKREPYRDLGAEYFDEYKKERTIKRLMHRLKDLGVEVDVKTQMIVPA

SEQ ID NO: 339344 - protein, 362 aa, unidentified
MSMLAELVEVVIGVDTHKHTHTAAVVDARTGAVIDRVTVTADPDGYTELVTVADRHSGLRAWAMEGSGGYGAGLARHLSDLDEMVVELDRPVRPARRAGAKSDLIDAERAARDALARTKLAQPKTGAERAALQMHTTARRAAVEAASDAQRQLHALVVTAPEAVRARFRGRTTRAMITVAERLRPQASAATRGARSAQPSTGTDVEVLAALRVLKALAARIRFLEAEAAAHEKAILALVRSWRPDLLALRGVGPIVAAAVLTAWSHPGRCRDDAAFAMLAGAAPIPASSGKTTKYRLNRSGDRQLNRALHTIALSRLQYDPATRAYADRRRAQGKTDREIKRCLKRYIARQLYRQLEAPSPA

SEQ ID NO: 339345 - protein, 408 aa, unidentified
MGRAAEVVAPSSSIRTDGGCPVVQVNDLSRSLAAFDPISTLVVVVEMSKASWLVSSVVPGVERQPLKKLEPDATALLRLIERWRTEAVRAGRPIRRIALAYEAGRDGFWLARWLIARGIEAHVIHSASVAVSRERKRAKTDRLDAAMLMRVFLGWLRGERGHCGMVAIPTMEEEDARRPNRERESLVKERSRIINRMKSALARLGIRGFKPHLRKAPERLAGLRTAEGTGLPANIIEEFRRDMARLALVREQISSIEKTRAERLERAPDTGPHAMVRLLARVIGIGIETADMLVREILSRKLRDRRALARYAGLTGSPDESGLKSREKGLAKAGNARVRRGLIQLAWRFLMFQKDSALARWYRTRTEGPSGARKTTMIVALARKLLIALWRLVTTGEVPDGVELRTAA

SEQ ID NO: 339346 - protein, 399 aa, unidentified
MRHHTEAFIGIDTSKLRNAVAIAEGGRGGEVRFLGEFPATEAAMRKLVAKLAAKYDKLTFCYEAGPTGYGLYRLIKSLGHECAVVAPSLTPKKPGDRVKTNRRDAVSLARLSRAGELTAVWVPDERHEAMRDLSRARQAAKKDLQGKRQQISSLMLRLGRCYPGKKTWGPAYMKWLRSQKLEHGEQRMALEELLEGVRQEGERVERLEQAIREAVPEWSLVELVTAVQAMRGFDLIAAVGVVAETGDLSRFQNPRELMGYLGLAPSESSTGDSVKRGGITKAGNGRARRMLVEAAWAYRHPARVGREKQAKVAAAPRSVREIAWKAQTRLCRRFRFLERKGKRRTVVATAVARELAAFIWAINREVMQNRQATSAGAVDRSSRECARPAHSPSVAIQIK

SEQ ID NO: 339347 - protein, 411 aa, unidentified
MDVVNPRCAGLDVHKATVVACVRGPDTRRSARHAETKTFSTTVGGLTQLREWLLGHGVTTAALESTSVYWRPVYAALEDRVELVLVNARHVKMVPGRKTDVRDCEWLAHLLECGLLRASLVPPRAIRDLRDLTRLRKSLVRERGHHVNRIAKILELAQLKLSCVVTDIMGKTGRAILEALALGIDDPAQLAAGAQGSLRKKRAELREAVRGGLTPHYAFLLQQHLSLIDTLDTHLVAIDARIEGAMVPFAAEAALGETIPGIATRSAQAIVAETGVDMSRFPTAAHLASWARLCPGNHESAGKRHAAGTGKGATWLRATLQETAWAAARTKKSYYHALFHRIRARAGAKKAIVAVQHAIIVALWHILKKRVAHHDLGADYFDRRNTDRLRRHHIRRLERLGYSVVLVDKVA

SEQ ID NO: 339348 - protein, 434 aa, unidentified
MESEFAAFVAIDWADQKHAWVLQLPGSSDRGNGTIDHTPEAIDVWAAELRLRFGGQRIAVALEQSRGPLVFMLTKYEHLVIFPVHPTVLVNYRKSFRPSGAKDDPSDAGLLLDVLMLHRDKLRQLDPDTSETRTLQFLVEERRKLVHEKTRYSNRVTAHLKMYFPQVLAWFDEIGSNIAAEFLERWPSLEKLQRARPATIERFFIDHNSRDSERIAERLEQIRRAVPATTDTAVVMSCSAAIVVWAGLLKQVLAAIATYDENIDELARAHPDYALMKSFPGAGPALTPRLIAAMGSRRDRYQGAYELQCYSGIAPVVASSGQQRWVHWRWACPKFLRQTFHEWALHSIAYSQWAREYYEQQRAKGKRRNTAIRSLAYKWIRILFRCWKERKPYDEIAYQHALAARRPKKHSAPQPVELGWKNVAGFSKLVVPGA

SEQ ID NO: 339349 - protein, 343 aa, unidentified
MQAVKTIGLDIAKSIFQVHGVDADGQVVIRRKLKRRYVLAFFAKVPSCLIGMEACATSHHWSRELQALGHRVRLMPPAYVRPYVKRQKNDAADAEAICEAVTRANMRFVETKTTEQQSCLVLHRTRHLFIRQQTSVINAIRAHLAEFGIVAPVGRKGLEQLLDVLANSEDKRIPQVARACVAALGAQLHALKAQILEFDRQIMLWHRSHETSKRLDEIPGVGPALATALVASIADPKAFRSGRDFSAWIGLVPKQHSSGGKEKLGSISKQGDRYLRSLFTAGALAVIRYAKIYGTQHRPWLAALLARRPTKVAAIALANKLARMVWAMMTRGERYKEPVALAA

SEQ ID NO: 339350 - protein, 317 aa, unidentified
MSKRSTICAGIDIGKSKLDVALHGRSDRLQVANTAEGHEKLFAWLRRQRVNRIGVEASGGYEQPVVCRLRRGGFVVVVFQPAQVRAYGRFKLQLAKNDKIDAGLIAACTAKIETIHAPPDRRLMALAAHQTQIDQIVGEIRRFKNYREACHDARVRQLWDDEIRRFRGLFRQRLKDLVAAIRQHPDLAERLDLVASVDGIALRTATAIVVRMPEIGTLNRGQAVALSGLAPYDDDSGDHVGARHIAGGRERLRNNLYAAAWVASLRWNPELTALYKRLRARGKEHKVAVVACARKLLIYANAVVVRGTPWQSRAATN

SEQ ID NO: 339351 - protein, 321 aa, unidentified
MAMLSFCGIDVSKDRLDVMVLPGRQSFAVRNDAAGWAELIARLRGLTIAAIGLEASGGYERGAIRTLLAAGLPACQVNPFKLRQFARASGVLAKNDPLDTRMIASFVAIMPTRPAQPRPPAIERLIEMLAVRRQLNAEKVAAENASRLLEDAMLQRLSRRRIARLAADIDRLDRRLVEITASDAALAHRYRLLASMPGVGLVLACTLIALLPELGTMSRKQVAALVGVAPYAFESGKFKGRRCIWGGRAPVREVLYMAAMSASNWNPVFKAFHKRLKAAGKLPKVAIVAVMRKIITTLNAMVRDDVVWADHLHGRHIVPTA

SEQ ID NO: 339352 - protein, 399 aa, unidentified
MFVGIDWAQQAHEVCAVDASGKICHRATVEHSQDGLDQLVGYLGRWATKEELLVGIERPEGRLVDRILEAGYPILLVPTFAMKDLRRRYTIGGAKSDRGDCYVLADVARTDGHRLRRLEPLSEHTRALRAVVRTRDDLVDQRKTLANQLRATLEAYWPGAGAIFADVDSEICLAFLERYPTPESAAGLTEVRLAGFLTKAGYSGRRPAAQLLARLTAAPAGVVGIEADARADTVRAMVRVMRALLGSIKNLDRSVIAHLGEHPDAEVFTSLPRSGQINAAQMLAEWGDCRQAYPQADSAAMLGGLCPVTHASGTHRDVSFRWACNKRLRQAMTTFANNSRRASPWAAEVYRQAIARGCDHPHAVRILARAWTRVIWRCWQDHAPYDPALHRAARQLKAA

SEQ ID NO: 339353 - protein, 343 aa, unidentified
MQPVSTIGLDIAKSVFQVHGVDAIGQVVIRRQLKRRYVLAFFQKLSPCLIGIEACASSHHWSRELQALGHAVRLMPPAYVKPYVKRQKNDATDAEAICEAVTRANMRFVPIKTPEQQSGLVLHRTRHLFIRQQTSVINAIRAHLAEFGIVAPVGRKGVEELLTVVADPNDKRVPEIARACLAAFGAHLRRIKEQILEFDRLITAWHRSNEMSMRLDEAPGVGPVLATAVVATVADPKVFRSGRSFSAWIGLVPKQHSSGGKDRLGGITKQGDRYLRGLFVAGALAVIRYAKIHGTKHRPWLTALLERRPIKVAAIALANKIARMVWAMMAKGERYKEPVALAA

SEQ ID NO: 339354 - protein, 410 aa, unidentified
MSKLFVGIDVDLRKNTVHCMTANGDTLKKFKVPNNIDGALALVDNIVELSARHSLQEVVLGLEATSNYGYHLAAFFKDSEKLAPLSPKVHILNAKVVHNFKKSYSDLPKNDDVDAWVIADKLRFGRLPQEAFMDERFLALQRLTRTRYHLVNTIKREKTYFLNNLFLKFSSLRQEKIFSNSFGATAMAVVEEFLSPDEIAAMPLEELVSFLEQKSKNRLVDADGIAKALQRAARSSYRLSRSMADPVNACLASSISVIKTLQSEVKKLDRLIEEHMKAIPQTLTSIKGIGPVYSAGILAEVGESRRFKNHKALAKFAGLVWNEHQSGEWKAEDINRVRSGNKYLRYYLVEAANLVRVHEREYAEFYRAKYDGAHTHKHKRALVLTARKLVRLVYALLRTNQLYIPRKRGG

SEQ ID NO: 339355 - protein, 347 aa, unidentified
MITIGIDPHKDTHTAAAVEDATGQLLGELTVPGTDEGHERLRAWAHELAPAGTKPRFALEDCRHVNGRLERFLVAGGEMVLRVGTRMTAHARQGARTYGKSDAIDALAVARAVLREPGLPQATHDPALRELKLLVDHRDDLVAERTAHSMRLRWHLHDLDSGLEPFGRTLNDEKVRRGLAQRLGHYGSGVQVRICRELLLRIGELTRVVDSLRKEIAALVRPMAPALLAISGVGELVAARIMVEAGGPGRFTSDAALARHAGCAPIEVSSGRTRRHRLSRLGNRKLNATLHVVVLTQARVHPPARAYLAKKRAEGKSNKEAFRCLKRHLVRAVFRALQEPQTVAVSP

SEQ ID NO: 339356 - protein, 405 aa, unidentified
MVGVDPHKHKHAIISMDQKAVVRTRFKISNDRQGFEHLLMRVEQETEKAGASGIIFAIEAGSHYWRNLAYYLAEKNVRFRLINPFTLKRQREGEDLNRRKNDYRDAIMAAELLRMGKFTETRLLEGDYAELRALDRCYQRLKHEQARAINLLRGLLDGLFPEFCQVFKSPSGQSAMSVLSAIMVPGAIASLSPQEFICMVRSHHQGGRLAVGKLAALHRLASVSVGVKAGAGGVSGEIRLLVERLRILATQIKQAERELLELVGKLPEASYALSIKGLGKLTVARLIARIGPVGDYGNAKDLIKLAGSNPTQSESAGKSRSHTPMSKKGRSDLRGLLWLAAMSLLRHNEEFRNWAKGMENRAAQANPLHRREVVGAAMNRLLRLYFALVTKGQMYRPATTLAVAA

SEQ ID NO: 339357 - protein, 356 aa, unidentified
MRQVKQLDFTGQKIFCGIDVHKKSWKVCIRSEQMELKTFSQNPSAIELVRHLRKNYPLANYQVVYEAGFCGFSPQREFSKEEVSCIVVHPADVPTTDKEKQRKSDAVDCRKLSTSLGDKKLTGIYVPGIEQQDDRSVIRAYQQFVKDQTRCKNRIKGWLSFQGISTMDNDNEYKYWSNNFIKWLKELSLTPSARISLDLLIQSYEQTRKMVLAATKQVRGLSRQERYKEKIKLLRSIPGIGQIAALLFTTEIGDINRFKTFDQLCDYIGLVPNVYGSGERETILGLTNRGHHKLRETIIEASWVAIRLDPAMTMAFNEFTKTMKKNKAIIKIARKMLNRIRFVIKNQSEYVMAVVE

SEQ ID NO: 339358 - protein, 430 aa, unidentified
MKSNTQNAKIEAITEKTLVLGIDVGSETHYARAFDYRGIEYSKKPFKFSNTEAGFVTFKEWILDLKERHEKDKVVLGMEPTGHYWFNLGKFLQDNEMKPVLVNPHHVKKSKELDDNNPTKNDRKDPKVIAGLVREGRYMIPYLPDGVYADLRTASNIRFQLQAELTRIQNRISRWFNIYFPEYKTVYGKPDAKSGMLILKAAPLPEDILTLGIDGVNQIWRDAKLRAVGKARAKTLIEAAEHSVGSKEGAVSARMEIRMLLEDYESRNMRLQEVMVLIEELVRKIPMTEKLLEIKGVGIRTVSGFLAEVGDISRFNNPKELQKLAGLALVENSSGKHKGETTISRRGRKRLRYLLFEAAMSLVAKNPEFRELHNYYTTRRLNPLKKMQSLMAIAAKLIRVFYAMLTKGVDYDPKKMVSDIKRPAVYIQAA

SEQ ID NO: 339359 - protein, 372 aa, unidentified
MTNHEAFVGFDVHKETIAVAIAKGGAGGDVGGFGTIKNSKQAVALLARKLARTHGKLSFCYEAGPCGYAIYRQLADLGHDCQVVAPSLIPTKPGDHIKTDHRDAVTLARLLRAGELTAVWVPDQAHEAMRDLVRGRIAVMQSVRKARQQLQGFLLRQDLRYPGKSPWTKLHRDWLRSLTFAYPAHHVLVHELLHVIEEGQRRQQRIEQQIQALLPTWSMAPIVRAIQAMRGVSVIAALTLAAEIGDFRRFDNPRQLMAYLGLVPSEFSSGKRVTRGSITKAGSAHARRVLIEGAWAYQQRAGISKPHMQRLTNLPTQIREIAWDAQLRLCARYRRLAAKGKCKNVVTTAIAREMAAFVWAIAREVEPVRIAE

SEQ ID NO: 339360 - protein, 343 aa, unidentified
MEYYVGLDVSLKQTSICVVNQTGSVVREGVVDSDPEAIAAFLRAKAPGAVRIGLETGPTATWLWTELKRLGLPVICIDARHAKAVLKMQINKSDRNDAVGIARIMQTGWFKEVRVKDLDSHAVRALLASRALLVKIKRDLENQVRGLLKNLGLVIGRAKFNVFAVRAEELIEGRPELVAAVRPLLDARQAIEQQVDDLDRKVQKLARHNAQVRRFMSVPGVGPVTALCFKATIDDPARFKRSRSVGAYVGLTTRRHASGELDWSGRISKCGDAMLRMYLFEAAGVLLTRVPKWSALKAWGTRLIKRIGLRKAKVAVARKLAVILHRMWIDGTEFSWSKKELAA

SEQ ID NO: 339361 - protein, 308 aa, unidentified
MHYLYYVGLDVSKETFDASLVAFEDANEMAHRKFANSRKGICSCLHWVEKRHGIRLDDVIFCAEDMGSYISEMAVCASDRTLNFNFSLISPLVIKYSMGIARGKTDRVDARRIAEYAITHYRKIALYLPAEKELCQLRTWLILRAHLAKQRVAKLVLLEKLDYKEKFADVSIQRSMLQEEIAYAETHMKTIEREMKELITADSNICRNYKLLTSIKGVGPITAIVMLCSTLNFTKITDHRKFACYCGLAPFEHSSGTSVCGGCHTSSMANRDIKVQLNRRALIAIRCDPQLKAFTNAKWLKVNINSAS

SEQ ID NO: 339362 - protein, 407 aa, unidentified
MLFVGDDWSEENHDVELMDASGRTLARVRLKEGAAGMTRLHAMIGGHAGDDEPVVRVGIETDRGLWVMALTAAGYEVFAINPLQTSRYRDRHQVSGGKSDAGDAHVLADMVRTDSHQLRQVAADTPAAQAVKVVARAHKTLIWERTRHVNRLRHQLLDFFPAAVEAFDDLDAPDALELLAKAPDPAAAAKLTTAQVAAVLKRAGRRNITDRTAVIRAAFRSPQLAQPSQVTRACASVVRALTAVLAALNEQITVMEAQVDAHFLQHPDAEIIMSQPGLGHILGARVLAEFGDDPARYASAKARKNYAATSPITRKSGKKKIVLARYVHNDRLVDALDSQAFCALTASPGARAYYDRQKARGISHHAALRQLANRLTGILHGCLKDRTLYHEETAWPQSASPNISTAA

SEQ ID NO: 339363 - protein, 353 aa, unidentified
MKCDKYMGMDVHQAMTVVVVLDADGKVTLETMVPTEAAAIIRLVQGLSRPLRVTFEETTQAAWLYEVIRAYVTEVIVCDPRRNKLLEDGSKADKVDARKLAELLRAGLLRSVYHGHEATRNLKELVRAYETFSIDTQRTMARIKAIYRARGIRTPGRGVYQPKQRERWLELLTDAGIRQRAAWLYEQLEQLQPLRREAKQAMLAESRRHRAVSLLRTIPQMGPIRCAFIVATVDTPHRFRTKRQFWSYVGLAVVTHMSSEYEMTAGRVVRRRKPVATRGLNHNCNRRLKEVFISAATGGSLHEPYKPFLERLKQNGMRAEMARLTLARKIAAVVLIVWKKGVAFDSTKLNWTT

SEQ ID NO: 339364 - protein, 326 aa, unidentified
MTSSHLTDNIFVGIDVGGAGLDVAWHRGDSAHYANRPDAIATLVERLRMGPEVTRIVLEPTGGYEKALVKALRQAQLPVEIIHTTRFNAYRALVGVKAKSDSSDARLLASYAAAPDEVRGRKAGHVELPEDATREALSELASRRDQLKHMIHAETCRLGTVRMDELRQMITAHLEALRAEDKQVHRMMLELVRQRDDLRRDQRLLETIKGIGVKSALVLLASVPELGRIDNKAAAALIGVAPFVRKSGTMNAPARIHGGRAPVRSILYMAAVTASRHNPLLSPFYDRLIAKGKPPKVALIAVLRRLVVFANAVLRSGQPWKGASAT

SEQ ID NO: 339365 - protein, 313 aa, unidentified
MTQIAFHVGIDVAKDRLDVAILETGELFTVDNTEAGHAALVERLSDNEIGAIGLEASGGYERAVLKTLWQAGLPVRRINPHRLRQFARAAGINAKNDRIDARLITRFLATLPVHPVELDPSLELVIELVTARRQLQAELSRVNNQAEHVRDAALKRLAKRRATRLSADILLLDKRIAQAIAADPALSQRDRLLRSTPGVGPVLSAALIALLPELGRLSNRQITALVGLAPYDHDSGKLKGKRCIWGGREPVRNVLYMAALSAGVHNPVFAAFRQRLRSNGKVAKVAIVAVMRKLITTLNAMVRTNKPWNPASV

SEQ ID NO: 339366 - protein, 418 aa, unidentified
MKKILYVGLDVHAETIAVAVAEGGRDGEVRSLGTIANRLEAIRKLVKKLRDQGEIRTCYEAGPTGYCLYWQLTQLDVPCEVIAPSLIPVKASERIKTDRRDAEKLARCYRAGELTAVAVPSPEQEALRDLVRAREAGKKDQLKARHRLGKFLLRHGRRPEGLKAWTKQYLEWIKIHVHFEQKALEVTLLHYLHEAEHCAERIVHLEAAIDEAVREAPAELRAVIEALQALRGVAQTTAATIVSELGSLSRFTSPRQLMGYSGLVASEHSSGGKVQRGPITKSGNAHLRRVLVEASWSYHHRPNVTGFLLRRQKNLALSEEVKTIAWKAQHRLNKRYKTLAAKGKNKNQIVTAIARELLGFIWAIAAKTENQTLAAGQGGMDQAHATQTSSVGPDPRPSRPGPTGALRAALTGSGLAKS

SEQ ID NO: 339367 - protein, 405 aa, unidentified
MNAVGIDVSKGKSTVTIRQPGDVVLLAPRDYLHTQSSINDLITTIKSLEGETKVCMEHTGRYYEPMASWLSAEGIFVSAVNPSLIKDYGNESIRSPKTDKADAMKIARFALDRWAKLPQYSRMDELRNQLKTMNRQFGFYMDQKTAMKNNLIALLDQTFPGANDFFDSPARSDGSQKWVDFVSTYWHVDCVRGKSLEVFTERYKNWCKRKGYNFNAGKAEEIYLAAADLIAVFPKDDYTKLLIRQAVAMLNVASETVETLRIKMDQTASQLPEYTVVMEMDGVGHTLGPQLIAEIGDVTRFKHRGALTAFAGVDPRPDESGNHKRKSNPTTKKGSPYLRKTLFQIMDGLIKRSPSDNPVYAFMDKKRAQGKPYYVYMTAGANKFLRIYYGKVNAYLSPAEGVEDS

SEQ ID NO: 339368 - protein, 340 aa, unidentified
MHKSSAEAFLSCGIDVSAAQLVVALEGEGGSWRQRSFTNRAGGHQALIRWLQKSGERVRICLEATGRYSLDLALALHAASGIEVAVLNPKLVHAFAVTLCRSKTDPADAQVLAEYARRMAFQPWHPPRAAALELRAITRHIAALTQQHTQQSNRLHALSASSTGSGWVRQDLKRSLRDLERRMEKMRGAALALIAKDAELHPRWAHLLSMPGIGEISALSLLGELALLAPGLSVRQWVAHSGLDPAHHDSGSSVHKRARISRAGNRYLRRALYMPALVAVRRDPHLRAFYQALLARHKAKLQALMAVARKMLHAIFGMFRGNADYDGSRLFPGLELAAAA

SEQ ID NO: 339369 - protein, 468 aa, unidentified
MTPRSGKAFRTSEQADDLAVCQRHAAGVDVHAAVHFVSVAPDDVPAGFRNPDPKLPVGVRKFGAVTPELETLAAWLKQCGVATVAMEATGVYWIPLFDLLAGQGFHVILVDPRQTTHAPGRPKSDVLDCQWIRRLHSYGLLTASFRPCDEIVRWRGFVRQRDVLIRYAAMHVQHIQKTLEEMNLKLTEVVSDVVGQTGMKILKDIVAGQRDPLKLAKHRHDNCKSTEAEIAAALTGTWRKEQLFALKQSLKLYEFYQKQLRECEAEIESCLRSMEDKSQGAELPPSQRKHRKPEKNEVRFGARSLLFQMAGVDLTAIEGISETTALVILSEIGVDMSAFAHEKNFVSWLGLCPQHRGSGGKIFQRRTRRGANRAARALRMAAQGCHRAKNALGAFYRRIQARAGGAKAVTATARKIAERVYRLLKYGQEYVRQSEEAYESAYRLRLEKALAKKAASLGYKLVPETMPA

SEQ ID NO: 339370 - protein, 375 aa, unidentified
MGDHSEAFVGFDTSKLRNAVAIAEGGRDGEVRFFGEIENTAEATAKLVRKLAGKYERLTFCYEAGPTGYGLYRQITGLGHGCNVVAPSLVPKKPGDRVKTNRRDAVSLAKLLRAGELTAVWVPDEGHEAMRDLTRARDTAVNDLRAKRQQVSALLLRLGRHYPHKRTTWTKAHMNWLASQKFAYPQQRFVFEEMMLAMRQAQERLTRLEDAIRGAVPEWSLAAVATALMAMRGIDLISAATLLAEIGDLSRFRTPHELMGYLGLVPSEDSTGDTVRRGSITKAGNGRARRMLVECSWSYQHPPRVGAHKQHKVDAAPPAVREIAWKAQCRLHKRYRALIRRGKLKTVAITAVARELAGFIWAINREITTACGVAR

SEQ ID NO: 339371 - protein, 350 aa, unidentified
MNYYAGIDVSLGSSSLCVVDAGGTIFREAKVASEPSALISWFLGLGVGLERIGLEAGPLSQWLYAALREAGLAVELIETRHVRAAFVTMPVKNDRKDARGIAQLMRLGWFRPVHCKSLAAQEVRATLTSRKLMQKKLHDVEMHLRGILRNFGLKVGRTTQKGFAGRIRELVAGHATLESLAAALLSVQEVLLREFTKLEKQVRSMARADKLVRRFMTAPGVGPIVGLTYAAAIDDPLRFTSSKKVGPHFGMTPRKYQSGETEFDGRISKAGDASVRTALFEAAHIILTHPVKGSALKSWGIRLAKRSGPKKAKVALGRKLAVILHRMWVDGTDFDFTRGAASVASDKKAA

SEQ ID NO: 339372 - protein, 339 aa, unidentified
MRLYAAFDLHSSNSYLGISDEKGKRIFKKKLPNDPARIKEALRPFKDEIEGIVVESTYNWYFLVDLLREEGYRVHLANVMKTQQYAGLKYSDDKNDAFWLVEMLRLGILPEGYIYPKEQRPIRDLLRKRGHLVRLRTSLIVSLQNIIARNLGGRLKANDVKVLTTDRVTPLFQGNEDLALAGKVSKEAIDFMTRQIKTIEATIDGRIHLSDPYDRLLSIPGVGKILAFTIMLETGSIERFQKVGNYVSYCRKVPSGRFSNDKKKGTGNRKNGNKYLAWAFSEASDHARFFDAESRRYYQRKLQKTNAPIAHNALAHKLARAAYYIMKDGVVFMPDKAFA

SEQ ID NO: 339373 - protein, 419 aa, unidentified
MTTQSNPIEPPFAALIGLDWGDAEHALALQDVASGKTETSTLAHSPETVLAWLQSLEKRFGSRPVALALETSKGPLIHLFLNVPWLTVFPIHPATSTRIRKAFAPSGAKDDIPDAQVLLQLLVHYRDKLRPLLSEDVPTRRLAGLCEIRRKSVDQRTGLTNELRSVLKAYFPQALDLVGERLDSPMALALLQRWPDLISLKSARPATLKAFYHRHNVRRPEAIQERLELIRQAQALTTDEVIVAVAVRQVQRLMQQVQVLQEHIAEDEKLIQEAFRQHPEAALFRDLPGAGKTLAPRLLVAFGTDRSRYESASQLQRYCGVAPVKEKSCGRIWVHWRWNAPWFLRQTFIEWAGQTVLYSAWAKAYYEQQKSRGKRHWAILRSLAFIWIRILWKCWHTRTPYNENTYLEALRKRHSTLVT

SEQ ID NO: 339374 - protein, 453 aa, unidentified
MEREEKRLERFRQLRKEIRGSQDYLVVGIDISKDTHNALMRNTSGKILYRRLIFDNTGEGFETLLLQVEAVRIGHGLKEVVFGLEPTANYHKPLGEFLINQEKQVVLISPEAAKHNRPLLDGRWNKHDGKDCANIADLMCQGKCLYYEYPSADLRDLRHLLSLNRKLKKLEQGLRLRIRNHLVAQYFPELDQYCHWGANEGLALVRWCLDPAVMSGLSDEEFGKRLGTQGRTLAQRKRLSALKNKAQSSIGCHFGSSVEFEGQSVVKLLKEVRQTLASTQEQIEQVCLKFKEYSYLLSIPGFGPTLSAMVLGAIGNPWRFQNGAQVIKMVGLDLSASQSGKSQGAPIVSKKGKAEIRYALYQAAMVASSRDKHFVAYFTDQLRGREKEKGIKTKKRVKLAAKMLMIAWTLMKKQEHFDPRYLSGQTPPIVARKAVKTDNGGIPKVQPERDRGL

SEQ ID NO: 339375 - protein, 351 aa, unidentified
MKSINKQVQGEELFVGIDLHKHRWHVTVRTADVEIFSSSIAGRWQELKKVLSRYNGCPIHAVYEAGYFGFWLFDHLTQYGVQCIVTPPSLIPQEHGNRVKTDRLDSRKLARLLAKGLLKRVWVPSAEERFHRQVIRRRRQLVGDRVRTQNRIKSELCFYGIDLPTPRGPWTQVYFANLQRIKFNNRWMQQSFNQLLEQYEFLSAQIDKQTQLLKQLAQLPLYRDRVKILCSIPGIGILTAMEILLELQDFSRFRRAEQLAAYVGLTPSQYSSADKIRMGRITGAGKNTVRKALVESCWQLIRKDRAMRKKYEQIKARAGGKRAIVAISRKLILCIRRLLLDNRPYEYEPVR

SEQ ID NO: 339376 - protein, 343 aa, unidentified
MYFIGLDVHKKTISYCVKDAAGRVYQEGKIGSTRWELDEWIRTMPQPRTIAMEATIFTGWIYDHLLPHAEKVKVAHPVMLRAIAAAKKKNDRIDAGKIADCLRCDFLPECHMASTEIRDRRRTLRYRSLVIRQMVQMKNRVSGLLMETGVSYNKQRLHKVGYFAELMTTNEDVQESIRPLLKLSRDMIRRSQKLDYALVSSLERDPLLKERLRRLRTVPGVGPITALTWALEIGDFTRFSSIKQAISYCGLCGDEKSSADKVMRMPISKQRNKHIQRVLIEAAKLAPRESPELAVIRARELERGNPNRATLAVARKMVSYMLAVERRNQDFVPAEEFSRTAAA

SEQ ID NO: 339377 - protein, 457 aa, unidentified
MPDLKWFVGIDWGSQTHQACILDTNGEVRAEEAFTHSGAGFAALTDWILSGTEGAPADQVGVAIETPRGPVVEILLARGLAVHSINPRQMDRYRDRYSHAGSKDDRRDAMVLASALRTDPHRMLRVEPTAPEVIELREWSRIAESLTRERVRLTNRFRDQLWRYYPEFLDVVEDLNVQWAMAVWNRVPTPAAVRSVRLSTLDKLLKKHRVRRITAEELRDRLTTRTMDIDPSAVRAAVTHARIIAKQLTLVNKQLAEANSRLEALVTQLAEAGPDRDEESEAGQQREQRDAAILRSLPGVGTGVLATLFAEADDALQRRDYHALRCLCGVAPVTRRSGKSMRVSLRRAAHRRLRNATYHWARVAMQKDPVCKAKYQVLRSRGHGHARSLRSVADRLLNVACAMLRDQTLFDPRHAGAAPDSDREAVKKTSIETLVVVGPVELVGERRESVGKAVVNA

SEQ ID NO: 339378 - protein, 477 aa, unidentified
MSLVKLCYPVQKRAVFDSSPFRSCRLHLSEVGVMKQKKAVKKSKKLPKHLQHINQYAAGIDVGSRSHFVAVPEDADEQPVREFSTFTGDLERLAEWLIACGVTTVAMESTGIYWIPVFEILESHGLEVKLVNARHVKNVPGRKSDVLDCQWLQQLHTYGLLRGAFRPDEQVCTLRAYVRQRVTLVRSAASYIQRMQKALAQMNLQLHNVVADITGATGMRIIKAILGGERNPDVLAAMRDKRCKNSAATIARSLKGNYRPEHLFSLRQAVEFYEFHQSKIADCDRQILEQLKNFDAQDFPNDGSPSRLGEALQRMTGVDLTSIDGIDTNTALKVIAEIGTDMSRWKSAKHFASWLGLSPGARISGGKVLSSTTKPVANKAAAALRMAAFTLFNSKSALGAYLRRQRARLGAPKAITATAHKLARLIYVMLSHGTDYIDAGQEYYEERYRTRVLQNLKRKARELGFELVTLQEPAAVS

SEQ ID NO: 339379 - protein, 383 aa, unidentified
MRKIQETLQAQSTTDQDVMYIAFELSNSTWRLAFSDGNKKRHVTIKARDLKQLEREIEKAKRRFGLKDNVQIKSCYEAGRDGFWIHRYLLSNGIDNLVVDSSSIEVNRRKRRVKSDRLDAGNLLRLLMRYNGNERQVWKVVTAPTVKEEDARHLHREIETLLRERTRYRNRIRALLVQHGLDVKNPSRKNFLKVLNTLRTWDGQALPESMKARVVREHERLGMIEDHIKLLKKEREQRVKSKETASLQQVAQLRGLCGIGANSSWIFVMEFFGWRKFRNRREVAALAGLTPTPYDSGGSQREQGISKAGNKRIRTMAVEIAWCWLRFQPHSKLSRWFNERFASGGSRMRRIGIVALARKLLISLWRYLEHGVIPEGAIIKNAL

SEQ ID NO: 339380 - protein, 467 aa, unidentified
MSKKKLSLNVVNPNAAGIDVGSKTHFVAIGQSPKDVKSFGVYAQDLQSIASWLKSNDIVSVAMESTGTYWQNLFVELINSGLEVILTNGKFTKNINRKKTDVLDCQWIQKMHSLGLLPSSFLPDNITEKLRTLCRHRSNIIAQRADSSHKMQKFLKYLNFRLDVVVRDVTGLTGLKIIDEICNDNLDPVSLAKHRHYNCRKSEEEIAKALVSNKRKDYLFGLKQEYKRYRFYTNMIKECDEEISLFLKGITKNNAGKTEKLPENKWYKRQNKNSIEGIDLNLVSYHLFDGVDLYAIPGVSHSTILTIISELGPDGFKKFPTAKHFASWLRLAPNNKISGGRTLSNHIPKGSNRLKIALRNAANAVGNLKDSDLGQFFTKIAFRKGRQAAICATARKIAVIMWNMVIKKIQYYPKTEYIFLDQKRKIIRAMRKKITKFGIDPGELGLFGQDRDRIAFEKRKLITSNLT

SEQ ID NO: 339381 - protein, 495 aa, unidentified
MPEAVWQESKELHMKKRSIYPQQSQDLLRIYEAAGSSKKVLIGAIDYAKQDHMVLLCNGNGDMLHKPFSVKNTPQGVDYLSGEVQRSCAYHKIDPKNVFFGGEDCGSYTENFAACVRERGWLVAGVNAEDAKRQRANLQASTDRLDLLGIASMLVNRRGNCNPCQTGEYRNLRTVVRHRRKLVSMSTEERNRMHCQVDRLFPGFLNESHSGLTPFHEPSLKIMETRFSARQIARRKRSTLSELLARSGATLPEQKAAKLQEYAGNVLNPPSEYVSTLQLSLTEHVALYRCLLSNIDALEKEMAVWLAQTQGAFLTTIKGIGMVLAAGVSAEIGDPDTQKPVNNLVSYAGIIPCVFQSGGPDADTYVGSVAHRCNRVLKDYTVQSASHLGLHGVEELMRDHSRRNANGQHANYGIARRYLRIGMRLMRNSEIYMPPDLRRADATAEQRVEYYQTFWPYLLEKWKSYDAHQVAFAPDNPLGQWRNMVQEFYGIDLNM

SEQ ID NO: 339382 - protein, 356 aa, unidentified
MSSDVKYIGLDVHKEAISIAVLNASGKLVMESIIETKASSILQFLQGLRGELHVTFEEGTWAAWLYDLVKPRVSELVVCNPRRNALLKEGSKSDKVDARKLAELLRAGMLRSVYHGENGLRTLKELGRSYQTISKDLQRVMNRIKALFRGWGILCAGTEVYAPCHREEWLNKISQAGVRRRAELFYQHLDGLQILRRNARREFLAESRKHQAVKLLRQIPCIGPIRSAQLMALIQNPHRFRSKRQLWTYSGLAVETHDSGQYRYVNSQLQRSKKPQQLRGLNRNHNHEMKEVFKSTALSASRSAGPFSEFYARLLAKGMKPELARLTLARKIAAVTLTLWKKGARFDPEQLKTQAA

SEQ ID NO: 339383 - protein, 351 aa, unidentified
MNIIGVDYHPSFQEIAFLVEETGECGERSLMHSNGEVENFYRDLKARGISVRVGMETTGYSRWFERLLAELGFEVWIGDAAEIKTRRAKKKKTDREDARLLLKLLLEDRFPRIWVPSPENRDLRQLLWHRHRLVQMRTRIMNQLQALAMNENRCWKGKLWSARGRAELEQLPLAFWASHRRQGLLELLDRMNPAIDELTTAVEKEARKRPEALRLMTHPGVGPLTALAFVLIIGTPERFGCAKQISNYVGLIPSEDSSGGRQRLGHISKQGSSLLRYLLVEAAQAAVRCNANWRCRYRQLAMRRQRNIAKVAMGRRMGARLYWMWRNGCEYSPSLEFGSHAGKLDRGNGGQ

SEQ ID NO: 339384 - protein, 301 aa, unidentified
MEEVTTVGIDLAKNVFSLHGVDEAGKTVLRRTVRRERLVETVAALSPCLIGMEACSGAHEWGRRFQQHGHTVKLMAPKFVAPYRKSDKNDGNDAEAVCEAVSRPSMRFVPVKSTEQQALLAVHRVRQGFVVERTALINRLRGLMSEFGVVLALGSVTVRRQAAQAAEQLPELARGAIGDLLDQLRVLDERIAKYDKQIEAQAGLSEPARRLMQIRGVGPTTALAIVATVGDAREFKNGRQFAAWIGLVPAQHSTGGKSRLGHISKRGDAYLRNLLVQGARSVLQVAGAHQDRISRWALELQ

SEQ ID NO: 339385 - protein, 358 aa, unidentified
MDKLIRIGMDTSKSVFVLHGLNAAERPVLRRKLRRQQVLEFFARLEPTKVGLEACGAAHYWARELQALGHEVLLLPPEYAKAYLKRNKNDAADAAAICEAMSRPTMRFVPMKTADQQASLMLVGRRDGLIRRRTQLTNTIRGYAAEFGLTAAKGLDKIEPLLGRIAASDDVPELAKELFAAYGRDYAELETQICDIEAKVMDWHKHNELSRRLARAPGIGPIGASLLVMKVPDPHAFRCGRDFSAWMGLTPKDHSTAGKMRHGGITRAGDEALRAILIVGATAVIQQVRRGRGRPSSWLVDLLKRKPPKLAAVALANKMARVVWKLMVSGEHYDPAPRQARIAARLGLRETAAMMSNP

SEQ ID NO: 339386 - protein, 369 aa, unidentified
MEEYSEAFVAFDVAKKKHALAIAEGGRTGEVRFAGEVENSPATIERTIKKLGKKYDRLHVCFEAGPTGYGLCRQVRDLGHDCMVVAPALIPKRPGERIKTNRRDAVTLARLHRAGELTAVWVPDVVHEAVRDLVRARGTAADDLRRKRQQLLSFLLYHGRIYEGGGHWTLAHRRWLARQSFEHTAQQIVFQEKIDAIEDAAQRLRRLDEQLGAVVPTWSMAPLVDAYQAMRGASFLVAVIFAAEIGDVRRFDTPPQLMAFLGLVPGERSTGDKVRRSSLTLAGNRRARRALVEAAWTYRYPARVSETMRVRLEGLPKAVRDIAWKAQVRLCARYRRLSAAGKKPPVVVAAIAREMAAFLWAIGREVAPS

SEQ ID NO: 339387 - protein, 482 aa, unidentified
MKKRNIYQNQSQELLHLFEEAGSSEKVMCVPLDYAKKDHLAMFCNGHGDILRKPFSVKNTPEGIAFIDDQVTRSCRRRGIKKKHVFFGGEDANSFAKNFVSTLRCKGFLVANVNAHDAKKQRGNLQASTDRIDLMGIATMLLNGRANCSPAQSGIYRNLRTLVRHRRKLVQMLTEVKNRVHGIVDELFPGFLNEKNSGIIPFTQSSLYLMEDRFSPKQIRRRRRQKLIEILKRFGTSKAEKTAVKLQRYAAKVLHAPVEYVDTMQLSLAQHVKHIRCLKESVAQMDKEIALNLAKTQGAFLTSVRGIGLVLAAGVTAEIGDLNEQKPLNNLASYSGIVPRVKQSGGLDGKTYTGPVAKRCNRILKDYVVKSAYHLGLHGPQDLMVDYKRRDVSGQHADFGMGRRYLRMAINLMRTSQVYLPPNLRKGDFTLEERAGYYLMSWPYLREKWKKVGALEAAFAKDRPLGLWRQIVQELYDIKLKL

SEQ ID NO: 339388 - protein, 340 aa, unidentified
MKITTFGLDLAKNVFQLHWVEPETGEVKRRSLKRDQMIKFFAQRSASVVAMEACGSAHYWARKLIELGHEARLIAPQFVRPFVRSNKTDAADAQAIWEAAQRPERRFVAVKSVHQQAVLMLHRVREQRVKMRTMQINQLRGLLYEFGVILPAGRHKAMTQVAQALARLEDTLPAMALEALREQCASIEALSAQIEEIERKLAAWRKEDEAAKRLMQVPGVGLLTATAAVATVGDAKVFSSGREFAAFLGLVPRQSGTGGRVKLLGISKRGDGYLRRLLIHGARAVITHAKARDPWVEALLARRPLNAVVVALANKMARTIWALLAHGRHYEPRGQALGCA

SEQ ID NO: 339389 - protein, 344 aa, unidentified
MKIKLLGIDLAKNVFQLCALNQANKVLYNKTVGRAQFRGTIARLQATTIAMESCASAHYWGRTFEDMDHRVLLVPAQHVTPFVRGGKSDSRDALAICEAALRPGLHLVPIKSIEQQDLQLLHRLRQRQVQHSTALVNQIRGLGREYGVIFAAGIRALISQLPDVLEDASNELSPVARAALAEQLCCLRDAREAIKTFQGQIQQLAALNPAYTQLLEIPGIGPLSASAYIAAIGNGHRFQCGRQVSAWRGLVPRQYGTGGKIQLRGITKNGDRYLRTLLVHGARAVIARGVKNNAPLAHWVQPIIARQGFNKAVVALANKLARISWVVLTSGEPFDSKRAFKPAA

SEQ ID NO: 339390 - protein, 445 aa, unidentified
MHYKRLLTWIDGSSSYLSVGLDVGADFTWMSIALPNGAFIGKPFKIVHSDPRSRDLAVTKIKEAQETYSLKSRCFLESTGIYHIPLLCFLRDKGFDCSVINPIITKNSTNINIRKLHNDKFDSKKAALVGLNVSLKTSILPDDSVVDLRNLVRDYYYFKDLQSAVALKLTAELKVSFPAYAKVFSKVTTQSSLKLLSSYPLAGDMLEASKDDIVETIRSTARFGEAYALRKYDAIISAAQDAAVFGRALPSNAVRIRLYIDTYQEYQKHLDALLKELHETVEKLQDTLIYDQICLLQSLYGIGFLSAVVLVAEMGDFKLFSSPKKLYAYFGLDPAVKQSGKLNGDKVHMSKRGSSLARRVLHMAALNNVKVAKGSGTPVNPVIYDYYTRKCSGKKKPVAMGAVMHKICNIIFAMLRDNKPFEIITPEEHCQRFAAEYPDKIRKAA

SEQ ID NO: 339391 - protein, 350 aa, unidentified
MDIHTIGIDLGKTTFHVVGLNEKGEVVECKKFSRKQLLHFTANRKVYLIGMEACGGAHFLGRALREQGHEVRLIPAQYVKPYVKTNKSDFIDAEAIAEAVGRPTMRFVPIKSDDQLDLQSLHRVRERWVMRRTAVVNQIRGLLLERGITVRKGRSYIEAALPSILADTVEKLSGVVRELLIQLSLELDQLNVRLEEVDRLIRTTSQENEDCQRLDAIPGIGPLAATALIAAIGNGAAFHKGRDFAAWLGLVPREHSTGGKQRLLGISKRGSSYLRTLFVHGARSVLRVKETQAAGLSIWLTQIAARTHYNVATVALANKLARMAWAVLAKGEVYRPPLLNNAAQMKAYPT

SEQ ID NO: 339392 - protein, 347 aa, unidentified
MKYYCGLDVSLNSTAACIVNQDGTIIRESEVPSEPAGIDEWLKATGLPLERVGLEAGGLSSWLCQELLACGWPVICIETRHAKAAMKAQQVKTDRNDARGLAHIMRTGWYREVHIKSRDSQELRMLLNNRRCLLDKRLDIDSQIRGSLRTFGLKLGKVTPKTYEPRIRELVEDNEKFQDCIFPMLEVRRVLIEQCKKLEKLVLDYVKEDHVCQLFMTTPGIGPLTALAYKTFVDRPERFRKSKAVGPALGLTPRKYASGEVDYDGHITKCGDAFVRMHLFEAAKVLLSRTGKPSELKSWGLRLAKRSSKKKACVAVARRLAVIMHAMWRDGTVFQSTQVQAELAAAA

SEQ ID NO: 339393 - protein, 313 aa, unidentified
MASKSVRKPCEFANTPAGHRLLIHALRRAPHPVRVCMEATGLYGLDLALALHAAGIAFMMANPRSVRNFARAMMQRSKTDRLDAVVLREYAVRMPFVPWQPPSSEALQLMAVAHRIQALTRMLAAEKNRLHAASLSRAWPVLIRRDLVRSIQNMERAVKRLTQAALQRVIGDPQLARRNELLLSVPGIGVTSTLNLLAEILRLGPDATVRQWVAYAGLDPRHHTSGTSVAKKPAVNKFGNAHLRRALYMPALVASQHQPHFRGFYQHLLARGKTKFQALVAVMRKLLHAIFGMFKHNQPFDGSKIYALETSCP

SEQ ID NO: 339394 - protein, 344 aa, unidentified
MKDVRILGVDLGKNSCSVVGMDAAGRVVLRRRMRRESIIALAAKLPGCVVAMEACCGAHHLGRLLVAQGHEVRLMSPEYVRPYVKAQKNDDRDAEAIAEAATRPTMRFVALKSEAQLDVQVLHRVRDRLVGQRTSLMNQIRSILLERGIVVAQGRRKLLDALEALPLDNDNGAVGPRVRLLLNDMLDQWHALDTRITALDDEFADMARNDPAARRLATIPGIGVLNATALVAAIGDGRTFSRGRDLSAWLGLVPRQATTGGKPKLLGITKRGSKYLRKLIIQGARAALPSLARTATPLGGWLRGLLARAHGNKVVVALASKLARIAWALLRNETGFARGDLAAA

SEQ ID NO: 339395 - protein, 419 aa, unidentified
MSFKIFKFNCCGLDVHKTWIYACIGITDSNNRTEYKQARFSSFTKGLNELCDWLAKYNCKDVCMESTGKYWIPVFNILEQHSFWVTLSHPKYTKPMKGNKTDRKDAKWICDLYMCGMVKPSFIPPADIRELRDLVRYRFKLTCMITGEKNRAQNCLTVSNLKLDDVFSDVFGKSSRSITEHILQHPGEKFDIAPFVDSRCKTPITEIQAAVDGAISKEQVVKLRQCLDHIDELNKHISEVEQEILRLSDKYEAALNLIRTVPGFNKNPLTAIQVLSEIGGDMSVFPTAKHLVSWAGCCPRNDQSNQKIKSTRISRAGSYFKPVLVQVANALIKSKKHLEFTNRYKRIKARRGHKKAIIAICRMILTAIWHILSDLKPYTPEGFLESRPVKEGKVLSTSQALNLLKQRGYIIKGEPLAVS

SEQ ID NO: 339396 - protein, 357 aa, unidentified
MLWYFQQSTILLALIRRCHMPLYAGIDLHSNNNFIGICDEKDTRLYGRRHENRLEDILNILESFKSRLQGIVVESTYNWYWLVDGLMENGYCVHLANPCAIQTYSGLKFTDDKWDSFWLAHLLRLGLLPEGYIYDKKSRPIRDLMRRRILFVKQRTTQILSVQSMITRNLGKMFPGSSISRFNDNFVEKLFDSPELIFTAKAQVATIRFLDERIKAIETEILAKMSLQKEFQMLLTIPGVGNILGLTIMLEVGDISRFPQVGDYSSYCRCVESKRISNGKKKGKNNAKNGNRYLAWAYVEAANFARRYCQKAQRFYQRKSAKTNSILATKALSNKLARASYYMMRDHVAYDAAKLFG

SEQ ID NO: 339397 - protein, 358 aa, unidentified
MKIVGCDLHARQQTIAMVDTETGEFTEKTLSHEANAVREFYGSLEGPVVVGIEATGAMQWFLELLEELGIQCRVGHPAKIRAAETRKQKHDRRDARLVLDLLVMKDRFPEIWMPSTEQRDLRTLLRDRHQWVKMRARLQHTLQAIALNHALRHGHALWSATGQSALRALPLPPYTSQRRNELLSLYAQLQKRIQELDKEVEAQARQRPQARRLLTHPGVGPVTALATEVFLGDPSRFDTANQVASYIGMIPCEHTSGKRQRLGKLTKEGNSLLRYLWTEATLHAVRKDPELRRFYRRKLIQKGMGKARIAAARKLGIRLWIMMRDQIDYEEFCRRGKLRQKGEAHAGMPDFNSGPAQQ

SEQ ID NO: 339398 - protein, 353 aa, unidentified
MDLNLGWEIDMTINMLGIDIAKNTFQLHGADNSGKAIHKKRLARRDLAAHVANLPSCTIVMESCGGANYWARVFQRSGHSVKLISPQFVKPFVKTNKNDANDALAIVEAASRPSMNFVPIKQVEQQDIQSIHRVRTRVVISRTALINEIRGLCLEYGVVLTPGAARVKSSLNAAIVDGANELTVSSRECMQGLYEELVDVEARLKKLDTKIRQLCRDNESCKRILKIPGIGELTATAIVAAVPDPKEFRNGRHMSAWLGLVPRQSSSGDKQVLLGISKRGDRYLRTLLIHGARAVLSHCKDADNDYNRWVTRKKATLSHNKAAVALANKNARIIWSMLNTGKDFNYGAQATAA

SEQ ID NO: 339399 - protein, 370 aa, unidentified
MEKKFAYSIGVDLHKDSMTIVVLDANGVLAERKSISTKCKNKVREFFSSYGLQSQVTVESVGFYQWFWELVRPVVGKMYLADPAGVRACAGRKSKTDRNDAHLLALLVYDGRIPCAYVPEEPVRSLRELVRLRHSLARNLASSRKSLRWVSLKNNLPGPKEFTSDRAQKWILAQEDKFSAAAQIACRLNLDRIIHFERHVSDIERVIEKRILEFPELAKQYSLLKSVPGIGKISAATIIVETGEITRFGKPDELSSYAGLCPKVSQSGETVHHGHISKMGPPVLRWVLQQSAWVAIREDENIRKVFNRISRKAGKKKAATAIARKLLIYGWSVCKKGYPFKWPDKDVTKREVIKNKGIVKEDLSGWYCQL

SEQ ID NO: 339400 - protein, 346 aa, unidentified
MKILALDLSKFKSVGCVYEAESGAHRYRRVNTTPQALHDLLVEVEPDRVVLEVSSVSGWISDLVRALEIELQVVNTNGEAWRWRNVKQKHDQADALKLARLSAMNQLELVHVPAPEVRQWRAVIKYRQHLVGRRTDIKNHVRELLVREGVILPRGRKCWSQAGCGWLEEQARQWEEVGISELWRGELQSELQQLQDIQERIRKVEAKLETLAQADDRIGLLQTIPGVGPRLAEAMVTLIDDPHRFKRARDVGAYLGLVPRQYQSGEQNRLCRITKRGSKLLRSLLVEVSWVSLRYNPWLRSLYERMNRGSKTRKKIAIVAVARHLAIYCWAMLRDGTSWRPPCTNQ

SEQ ID NO: 339401 - protein, 357 aa, unidentified
MLSSNVKYIGLDVHKEAIAIAVVNGAGKLVMESIVENKSSTVLDFLHGLRGELHVTLEEGTWAAWLYDVLKPHVREIVVCNPRRNALLKEGSKSDKIDARKLAELLRAGLLRAVYHGENGLQTLRELARSYLTISKDLKRVKNRLKALYHSWGICCAGKQVYAARHREQWLSKIAQVGVHRRAELFYQQLDGLLVLRNTVRGELLAESQKHQAVKILRQVPSIGPLRAALLLALMQTPHRFRSKRQLWTYSGLAVVTHDSAQHRYVDGQLQRSKKPQQIRGLNQNHNHAMKEIFKSAALNASRCAGPLQDFYARLLAKGMKPDMARLTLARKIAAITLALWKKGGSFDAEHLKSQAA

SEQ ID NO: 339402 - protein, 429 aa, unidentified
MGSSKKGEIESEAVAAYIGIDWADKEHAIRMLVVDSGREESQKLKQEPESLADWVQGLRERFGGRRVAIAVEQRRGALIYALMSYEFLILYPVNPLTLARFREAFNVGGAKSDPSDAQLLLDLIRYHENKLRRWKPEDVDTRLLQMLVEERRHLVDQVTRLTNRLKSTLKQYFPQALEWAGELDSEQALDFLTRWSTVESVRKAGSNVIERFYREHGARNQNKLEQRLKSIKEAKSLTTDRAVVTASKIKAKGMVGQLRVLVKAIGEINEQIDELFEQHRDHEIFSSFPCAKKVLGPRLLVAFGGDRNRYESAVEIQSFSGIAPVTRSSGNSRTVNKRQACPNFLRQTFHEYAGQSIKKAGWARVYYKGLRQNGMKHHAAVRSLAYKWIRIMYRCWQEQEPYDEAKYLASLMRRGSPLVATLSPRQTKC

SEQ ID NO: 339403 - protein, 392 aa, unidentified
MYIVGIDIGKNHHEASIVSPEGKQIGHSLRFATTHKGADSLMSFIFNNIGNSSCIFGMEATGHYWYPIYSFLKARGYTIYVINPIQSDSLRKMYIRQTKNDSIDSFLIAEVIRFGQFTTTSMADENILAMRQLCRYRDSVISSRTEIKLRISTIMEQIFPEYEKQFSSLWLSTSMGILEKYLTPENIENAPIDELFEIIKDKSHNKLTMKKAISIREAAADTFGIKIAQDAFSFQLKQLIDRMNFLDKQIEALDCQILEYYEKFDCYLHTIPGIGMIAAATILAEIGDINRFNSSSALVAFAGIDPTVRQSGEFSSTHNHMSKRGSPYLRHAIFLAATTCSFHNSPLNAYYKKKREQGKHHLTATGAVARKLTTVIYAVLRDGKPYEPKSFC

SEQ ID NO: 339404 - protein, 408 aa, unidentified
MEVVHPRCAGLDVHKDTIVACVRCVSPPMHQEVRSFGTTTAELLKLADWLAEHSCTHVAMEATGVYWKPVWHVLEDEFELVLANAAHIRNVPGRKTDVNDAMWIADLLAHGLIRSSFVPPQAIQQLRDLTRTRKQLVREVSQHSLRIQKVLEDANLKLGSVLSDVLGKSGRAMLEAIVAGETDPARLAALAQGTARNKAAELREALRGRITEHHRTMLRLHLQVVDALQRTLAELDAAVGKALAPIRERTRLLTTMPGVSDLTASVVVAEIGVDMSRFPTAGHLISWAGLCPRSDESAGKRRSTRVRKSGTWIKTTLVTAAWAAVRVKTSYLRAQFLRIKARRGAKKAILAVAASMLTAAFHMLRDGTEYNDLGTQHFDRQDRSKTIRRLLKRLEDLGCDVPVGAHVA

SEQ ID NO: 339405 - protein, 377 aa, unidentified
MSKVRFVGLDVHAETIAVAVAEAGGGEVRSWGSIPNRPESVRKLIGKLGPGGKLKCCYEAGPTGYVLYWQLTQLGVACEVIAPSLIPTKAGDRVKTDRRDAERLARCYRAGELTAVWVPDEAQEALRDLVRARETAKQDQLRHRHQLGKFLLRHGRRPTDAGPAWSAKYLNWIKVHVRFQQAALEATLADYLHEVEHAAERIVRLEQCIEEAVAQASPQIRTVIEALQALRGVAHITAATVVAELGSLARFENPRQLMGYTGLVPREHSSGNRTQRGAITKSGNAHLRRVLVESAWAYRHRPAVNGRLLKRQKSLTLSDETKRIAWKAQQRLHKRYTAMLARGKHKHQVMTALARELLGFLWAIAVQTEAHFKKAAA

SEQ ID NO: 339406 - protein, 429 aa, unidentified
MKIIYPRVCGIDVHKQFIVAVICISESVEPIYLKKRFSTFHNDLIRFRNWLIQNDCQNVCMESTGKYYIPVYNILESHISNIVVANPKWVRAVKGEKDDDKDAKWIADLFKLGIVKSSFIPQKDFRILRELTRYKYKLVNMRSSEKNRYQNALTSGNCKLDMVFTDVFGKSASNIIDLILSDNPYTDEDILSKVHKNCKASPDMILNSINGTDLTSIQKSRIELVNDHIKQLSSNIQRLDKLIDLMIEPYEDYISFLCQIPGVSRNSAIIILSEIGVDMNQFTSTRRLTSWAGLTPSSNQSAGKKKSVRISRAGVYLKPCLVEVAHAAVKDTNHPYYANKFNKISKRRGKKRAYIAIARKILVAAYHMLLTGEIWNPADLAEVETPVEQRIKYVKNNLKSDIKQLLDIGLTVEELTLMIQQNANNIATQ

SEQ ID NO: 339407 - protein, 350 aa, unidentified
MLIIGCDYHPGFQEIAFADPETGECGERRLAHREEGEQFYRELKQRSLSVRVGMEASGHARWFERLLADLQFELWIGDAAEIRTKGVRKQKTDRQDAQLLLKLMIEDRFPRIWAADAENRDLRQLLWHRHRLVQMRTRVMNQLHVVALNEGLRRKKALWRPAGRSELESLVLARWASRRRQDLLDVLDQLTPKIQELTRALEEEVEKRPVTRRLMTHPGVGPLTAIAFELVIGTPARFHCGKQIASYVGLVPSEDSSGDRRRLGHISKQGNSLLRFLLVEAAQVTVRSQAQWRSKFFHLAMRRGRKIAKVAMARKLAVHLYWMWRQGWDYGQFAKFGSHAGEPGNRHGVQ

SEQ ID NO: 339408 - protein, 394 aa, unidentified
MIVACLLVGKAGGKVRKEVRRFATTTAGLLTLRDWLTDAGCSHVGMESTGVYWRPVHAILEDDFAVVVGNAQRIKNVPGRKTDVKDAEWIADLMRHGLIPPSFVPQRPLRILRDLMRFRRSLIEARSNCRNRILKVLESANIKLANVASDVFGVSGTAMLEALVEGTKTPAEIANLARGRLRKKLVQLELALHGSLSDDHRFMLDQLLRSLQEEDQRIAATEDRIATKLDPYRQQQLLLMTIPGVDWAVAATMIAEHGVDMARFGTPARLSAWSGVAPGNNESAGKHRRTGARKGNPHLKTALYIAAVSAGRTKDTYLRDKYHRIRARGGPGRAAGAVAHKIVIAAFHILTTGKPYHDLGGDYLDKRTERRTKQRLVGRLQRMGYHVTLQPVAA

SEQ ID NO: 339409 - protein, 315 aa, unidentified
MNESQGPYVGIDVSKDSLEVAVRPAGESWAAQNSPKGIARVIQRLVQLHPALVVVESTGGLERPLLAELCFAHVPVALVNPGRVRDFAKSTGQLAKTDKLDAAILAHFAEAVKPAAVVLPTEQEQLLSALMTRRRQLVEMLTAEKNRLLSTPRGARSWVERNIASLKQQLDELNQEIDDFIKHDPAFRDKEQILRSAPGVGPITAAILLSDLPELGKLDRKKIAALVGVAPFNRDSGPRSGKRQVKGGRSAIRAVLYMATVCAVRFNPVLKAFYSRLLQNGKQKKVALVACMRKLLTFLNAMIRDSRAWTPSHPI

SEQ ID NO: 339410 - protein, 308 aa, unidentified
MIAQNYVGCDISKQWLDFFDETSGRLRRIDNQADAIAAYVAGLDPSRDFVVMEATGVHDRLLRHALAKAGVPFSRHNPAHTHHYSKSTRRRAKTDPLDARMLSDYGRRYHPEAEPAPSEEVERLQSLAGHRDHLVEMRAALKKHLAEAFEEVVIADLEETIAYFDTRIKALENLIAEVIRQNQDTARDHALMVSVPGVSKVGALSLLALLPELGQRSPKAIAALAGLAPFDNKSGKLNRRSQIQGGRSRVRRALYMAALTAIRTCERFKTFYTALAARSGSKKLAIIAVARKLLVILNAIMRDKTAFA

SEQ ID NO: 339411 - protein, 404 aa, unidentified
MIFVGCDWSRHKHDLLVMDAKGSTLLEFTIPHGAQALDDLAQQIATLETDASQVHVGIELHDGALLAWLLDHGYTVYGINPKSAQRARDRYRPSGAKDDRKNAFILADILRTDRGYLRPLGTDSDACQELRAWVRFRARQVQDRTAACQRLRALLAEWCPALSALCDNFNRHWQRDLIRTFPLHADLCAAHGNRLRAFARKHRLRPASYDRILATRSHRPMPIPASRLRALRAEILALLERIEQLGQSVKEIEAELRRLVADHRDAGIFQSLPAHGTATTATLLSAFGEDREGAPSWRQRAARWGVAPVTVQSGRSRHIKRRRACDHVINQALLFFALRTAFTPGCWAADFYQTKRRSGVDHYTALRCLAQRWVKIIHRLWHDRTAYDEHLHQTNRQRQSLRAA

SEQ ID NO: 339412 - protein, 366 aa, unidentified
MNYRVYCGVDFHARQQTICCLKTETGVITTHQLKHQDKAALRAFYGELGEATVVALEASGYSPWFELMLEELGHEVLLGDAAEIRRCARRRQKNDRRDAELILDLLIHDEFPRVHRPTPGSREILRMLRYRHQLVRLRTSIKNSLQSLSIQSGLSRQSQLFTRAGLQQLQTVSMSPVMQEQRKQWLSLLEPLNQRLKEAEDWLKQQAKGDLRISRLRTHPGLGLLTALGLVHTLEPISRFPNQRKLTAYVGFDPREHSSAEKKRYLGISKAGSRMLRFLMVQAAQTTVKYDQDLQRFYRRLSQRHGKPKAKVAVARKLLVRSFILLRDQIDYAEFQRRAVAARLARQIHRPNVPGVLIGQPASPPQ

SEQ ID NO: 339413 - protein, 351 aa, unidentified
MQIIGVDLHTRQQTVAMLNVETGEIVEKTLRHEGESVREFYSSLPRPTRVGIEATGSMQWFLELMEELGIDCQVGHPAKIRAAEPRKQKHDRRDAALVLQLLVENRFPSIWMPSREQRDVRSLILYRHQWVRIRTRVQNALQAIALSHGLRRGSSLWSKAGQQAIASLSLTRYTAERRAALQSLYRHLEEQIEDLNRKVEALAWQRPQARRLMTHPGVGPITALATETFLGEPKRFMDGKAVASYVGLIPSEHSSGGRQRMGGLSKQGNPLLRFLWCEAVGHAVRKDAELQRFYQHKLVQKGLGKAKVAAARKLGIRLWILLRDQIDYQEFCRRGQLRQKHGGAHAGMPAR

SEQ ID NO: 339414 - protein, 342 aa, unidentified
MKDTIIGVDLAKRVFQVHGASMTGHVKFRKKQTREQFRRFMSAQPACVVVFEACGSASYWAREMEALGHDVKLIAPQYVRPFVKRQKNDAADAEAMVIAARQPEMRFVAPKTAEQQAKAVIFRSRERLVHQRTELVNALRAVLYEYGHVFPTGRVHLKRIEALLDDPASDLPSLIIAECQDLLAQIAEKTERVDLKTKGLKALADETDTARRLQTMPGIGPLTALAVEAFAPDMAQFKCGRDFAAWLGLVPRQHSTGGKQRLGRVSKAGQADIRRLLIIGAMSRLNWLGRRTIPEDSWLSRLAARKPRMLVAIALANKMARAIWAMLTKNEEYRAPAQGAVA

SEQ ID NO: 339415 - protein, 416 aa, unidentified
MEDEVYYERCAGIDVHKKLLVVCLRIGRKSEVREFGTLTHEIREIAAWLKSNGCQMAAMESTGSYWKPVYNIFEQERLPAMVCNAYHIKNVPGRKTDMNDAQWIAKCLSQGLLNPSFVPDREQRELRDMTRFRKSQIEERSRNINRLQKFLEGANVKLGDWLSDVEGKSATELLELVIGKPDFTVDDVAAHMHGNMKSTAAELFLSLEGSITPMQREFFAHVMTVIRQQTAQIEKTDVMIQNCLSANYKAAVQALDEIPGIGRVSAEQILAETGTDMSRFHNQHSLSKWAGVCPGNNESAGKRKSGKTPPGNKTLKSTLAQCAKSAKKNKNSFFSAQYSRLVTHRGKNRATMAVAHSMLIAIYFVLCGCPFRDLGADYYNQFNREKKIKSHVKQLSKLGVIIPDDLLRSIQERPPA

SEQ ID NO: 339416 - protein, 331 aa, unidentified
MTDAASRKSVPVPLDFVGVDMAQQRFEWALHGGMRGTHSAGNEETGFEALFEALKDRRIGLIVMESTGGLERPLAGFLLQHGLPVAVVNPRAAREFARSMGHLAKTDAIDAVALAHLAQTLAAKADQAGVRFAPPSAEVELLQAMVARRVQLLGMRTAEKNRLAGAVRVLHKSIEAVIKTLDKEIAKLDRDIDAHLEQHFTEQAQRFDAIKGLGLATCAAVLAFMPELGTISGARAAKLAGLAPLNNDSGKERGKRHIWGGRSIVRSALHMATLSAVRFNPVIKTFYDRLIAAGKPKKVALTACSHKLLRILNAMARTGQPWNEKFHAVTP

SEQ ID NO: 339417 - protein, 369 aa, unidentified
MKQNHKHVGLDVHKDRNEVAIAENRNGEVRLYGSVSNDLHALEKLVRKLGGPSVVLHFVYEAGPCGFGIYRRLAQLGIDCAVVAPSLVPKKPGDRVKTDRRDAVALARLHRAGELTPIYVPDQRDEAVRDLVRARSDAVRDQRASRYRLKAFLLRHGYKYTGKSSWTAPHLRYLRELVLPDPAHKIVLEEYLLAISQATERIVRLSEAIAAQVSQWRMRPVVEALMGLRGIQQLTAAALVAELGDLNRFTHPRQLMAYLGLVSGEYSSGPRRRQGGITKAGNSHARWFLVEAAQHYRLPPKVSKELATRWEPLPQRLKEISWKAQVRLHKRYWALAQRGKLVQKIQVAIARELVGFVWAIAREVKPLAD

SEQ ID NO: 339418 - protein, 393 aa, unidentified
MVVSVGIDVSKDKHDCFIVSSEGEVLADVFTIPNTMDGFAYLLQRIRECTTPQDKIKVGLEATGHYSYNLLGFLLDNGLATYVLNPLRTNLYRKSLSLRKTKTDRVDARTIASMLLSDVGLKPYTNTAYHNEELKSLTRYRFDKVKERAKLKSSISRLVCILFPELEKLVSSLHLATVYALLEEFPGSKQIAKAHLTRLKTLLGNASKGRYGRDMAVTIRSAAQNSVGSCMPAKSLELQHTIRLIRELDAEIAEIEAEIETMMDKIQSPIITIPGMGFRMAAMILAEIGDFSRFESPDKLLAYAGMSPSTYQSGQLKNCYPHMEKRGSRYLRYALYNAAKYVCHWDPTFAAYLAKKRDEGKHYNVALSHATKKLVRLLFALERSRQPYCSLAA

SEQ ID NO: 339419 - protein, 411 aa, unidentified
MTYKVAGIDIHKKVLMAVVTDAAAAEWEFESRRFGTTAREREHLVAWLQQRGVQEIVMESTAQYWKPIWLDLEPHFHQLHLAQAHSNRAPRGRKHDFADAQRLTRRLLAGELILSFVPDAEQRGWRTITRAKVQLVGDRVRLQNQLEALLEETRIKLSSVVSELLGLSGRRILRALAEGESDPAELAKLGDFRLKCSQEELADALQGQWQPLHRQMLQLFLQRLSLLDGQIQQLDRMAAETMRPYEAAVIRLAEVPGFGPDSAQQTIAEVGAQAKSFPSAARFASWAGLCPGREESAEHNHSSRSPKGNPFLRRVLTQAAQAAVKKKGSHFQMVFRRWMPKLGYQAAIWAIAHKLGRLVWKILHDEVHYQERGEPSNPTVQRRRAHKMVQALRRMGYKVEIAPLNPQPAQG

SEQ ID NO: 339420 - protein, 419 aa, unidentified
MSFKILKNNCCGLDVHKTWIYACIGITDSIKRTEYKQARFSSFTKGLNELCDWLAKYNCNDVCMESTGRYWIPVFNILEKNNIWVTLSHPKYTKPQKGNKTDRKDARWICDLYMCGMVNPSFIPPADIRELRDLVRYRFKLTCMITSEKNRAHNCLTVSNLKLDDVFSDIFGKSSRSITEQILQHPGETFDVTPFVDGRCKTPIEEIQAAVDGAVSQEQAVKLRQCLNHIDELELHKAEIEREIFRLSENYESVLNLIRTVPGFDKNPLTAIQVLSEIGGDMSVFPTAKNLVSWAGCCPRNDQSNRKIKSTRISRAGSYFKPVLVQVANALIKSKKHPEFATRYRRIKARRGHKKAIIAICRMILTAIWHILTDLKPYTPEGFLESRPVNKEKVLTTSQALNLLKQRGYTIKDDAVPVT

SEQ ID NO: 339421 - protein, 416 aa, unidentified
MKIVRPICCGMDVHKNIIVATIGITNKKTRITEYIQETFSTLNHDLLNLKQWLINHKCFDACMESTGKYWIPIFNILEDEINIYLTHPKYVKAIKGKKTDKKDSKWICDLFKHDLIKFSFIPPKEIRALREISRYRYKLVGMRSSERNRYQNCMTVSNIGIGSVFSDPFGKSAQAIMKEVLESDIIEDEKILKCIHGSCKNKDKILDSIKHCNIETDQRFKMNESMTHMEELQVHINNCEIEIMKRAAPMFDQFMHITQLPGISTLSAILIISEIGVDMKQFESDKQLTCWAGLAPANNESANKKKSVRISKAGQYLKPLLVQCALGAIKDKEGYFGIKYSRIKKRRGHKKAIIAIARMMLVSIYHMILTGEAFNPSDYESFRNPKPPIKQQDLTEESAIEFLKKSGFDVSKLTKP

SEQ ID NO: 339422 - protein, 551 aa, unidentified
MWPGRLSTSIVSWVCEPADKLGAGARPARVTHCRFEHAGQNFGSLDRGPRAAHPMEWNGFDWRASEVGARRKTKQNPAMVEPVEIPDAEHELVVERAAAIDVAKATGKVCVRLPGKSGRRFSRVWDVPARTGAITELAEQLVKLGIDKVTVESTSDYWRIWYYLLEDAGLDVQLVNSRDVKNVPGRPKTDKLDAVWLAKLTEKGLLRPSFVPPAPIRVLRDYTRLREDLIRECTRYWQRLEKLLEDAAIKVSAVASKLNTLSTRDMVEALIAGERDPRRLADLARGRMKAKRSDLITALDGRFDDHHGELARLLLSQIDALTAKIGALSARIEQLIDAMDESDPHTGDRGGSGGAEPPATGERTTALGPPTTTAIGVDSDTATVVEALRLTAVERLDEITGVGQRAAQTIIAEIGLDMTRFPTPEHLVSWAKLCPRTIQSGPVIRGGKTGKGNPYLKAALGEAAAAAARTDTFLGERYRRLVKRRGKLKALVAVARSILVIAWQLLSDPTARFHDLGPDYHTSRVVTERKIRNHIAHLTAMGFHVTLQPAA

SEQ ID NO: 339423 - protein, 416 aa, unidentified
MKYAPTVLAAEPVNGLTCGIDWARDDHAVSIVDNRGVEIHRSTVEHSTAGLRTLAALLDRTGVGEVAIERPDGPIVDTLLTAGVTVVVISPNQLKNLRGRYGSAGNKDDRFDAFVLADTLRTDRTRLRPLVPDTPATTVLRTACRARKDLIGHRVALANQLREHLNRVFPGAVGLFADLDSVISLTFLTRYDRQDRADWLTPKRLDAWLASVGYTGGMDPAVLHARLIAAPRGATGEEGAAHAHITGALVATLKTVVEQIKTLSDQIAEQLAAHADGHIFTSLPRSGKIRAAKLLAEMGDCRGRFPTPESLACLAGVAPSTRQSGTMRSVGFRWSCDKHLRDAVTDFAADSRHANPWAADLYNRARARKHDHAHATRIVARAWLHVIWHCWQTNQPYDPAQHRALQALLKDQKPAT

SEQ ID NO: 339424 - protein, 322 aa, unidentified
MSVTVLGIDIAKQKFDVALLLDGKTKHKACKNSAEGFETLMVWLEKQGIQKVHACLEATGNYGEDLAIYLHEAGHIVSIVNPARIKGFGQSELIRTKTDKIDAGIIARFCLAMKPESWSPPSLEIRSLRALVRRVDSLIDMRSQEKNRISTAHESVIFLIKEHIVYLNQEIEKIRQQIADLIGQDPNLKRKHDLLDSIPGIGKATIPHILAELDDLEKFDHVRQLVAFIGLAPKETLSGSSIKGKPRLCKIGHARLRKALYMPALVSIQCNPVMIAFYNRLKDKGKNGKVIVCAIMRKLVHVIFGVLKSGKKYDPNYKPAFA

SEQ ID NO: 339425 - protein, 401 aa, unidentified
MEGPIVSIDVSNGNSHYMCFIKNNKRFGKVKKIDHDIEGFKRLLEDIQKLEAETNEKVCAVFEATGVYTKPLERFLSKNSIKTYMINPLESARKRKEEIHNKKTDKLDPISISKVYYDKEEMMELKKKDETYNWLRKKNRLYEDQLNHLRKYKVAFQNQLSICFPGYLDLFKDGYSDIPMTILKKYPHPDLLKNKKAETVARYLEKNTCHTHKVSLEYALKIIEFAKKTYPGCEKDDVEVEIFKILLDKVIETQRECEKTLNEMITVASTLEEYRYISSIDGIGPNLAARIIAEIGDIEEFKSREALVAYAGLDPHIYQSGDQDGKHLKISKKGNKYLRCLLFLAVGCSIRGAKDNPVNRFYQKKKQQSNPLNSKAAKTACTAKLLKIIYGICKNKTTYKR

SEQ ID NO: 339426 - protein, 388 aa, unidentified
MNFEADKSEPLTAVHTDLGAIFVSLELSRSSWLITSLSPGGGEKMSKHSVPGGDFAGLMERFARLQEKARLRTGQSFRIIVVQEAGLDGFWIHRALQNEGIESHVVDAASIATSRRRRRAKTDKIDGETLVRALLAYKRGEPRVCAMIKVPTPGEEDRRHLCRERKALTAERVRHVNRIKGFLFSQGISGYQPLRRDRRQRLEELQTGDGRAFPQHLKALVNRELDRLELLLKQIKTVEAARDALLAVEQTAKPASAAMLLDIRGIGPEFAAILWSEGLFRHFENRRQIAAYAGLAPTPWQSGAVDREQGVSKAGNPRLRTTLIQLAWLWLRNQPRSALSVWFHERVSRNGGRLRKTTIVALARKLLVALWKYVTAGVLIEGVTMKVA

SEQ ID NO: 339427 - protein, 340 aa, unidentified
MPLYGGIDLHANNSVVVLLNAQDQVIYQKRLPNHLPTILEPLSLHHGEIEGLVVESTYNWYWLVDGLMEAGYRVHLANPAAIQQYNGLKYSDDHSDARWLAHLLRLGVLPEGYIYPKAERAVRDLLRKRAHLVRQHTANVLSVQNIMARNTGARFSVKRMHELTKQELQSWLTEESQVLAVTSSLAVLDCLKHQIKTLEQAVHKRVHHTPSYEQLLTVAGIGTILAQTITLETGAISRFPSVGHYASYCRCVDSHKLSNGKRKGTGNVKNGHPYLAWASMEAAQFALRFQPAAQRFYQRKLAKSRNNTILARKAVAHKLARACYYMMRDLVPFEATKAFG

SEQ ID NO: 339428 - protein, 379 aa, unidentified
MESITQNEKVLYVGIDVHKDTYALCCFDFHRNELSDEMSVKGTTKAVIRYLEAIKQKHREELVFVCGYEAGPTGYGLCRGLQQAGFGCVVMAPTTMANPEGKRRVKTDRIDARAIARILAYKSYRQVYLPSEAMEALKEYTRARDAKKRMYKKAKQELLSFLLRNGSTYPESGKYWTEKFFTWIKTVQFSEKWMQEAFSEYLAEVYSLKAKIALMDAKIREIAELEIIKDGVDKLVCFGGIDVTTAVETVVEINDFTRFATAAQFVSYIGLCPGQDSSGKSKIMLPLTKAGNRRVRALFCESAKAIKRTNPYGEKSKRIQMRQKNASAEIVAYADKATKRIRTKMKQLEWRGKNYNVASAAGARELACFVWGMMNGRIA

SEQ ID NO: 339429 - protein, 402 aa, unidentified
MNAVGIDVSKSKSVVAIMRPFGEIVSTPFEIKHTASDIHSLIELINSVEGESRIVMEHTGRYYEVLAHQLLEANLFVSAINPKLIKDFDNDSLRKVKSDKADAVKIARYALDKWQNLKQYNVMNELRNQLKTMNRQFGFYMKHKTAMKNNLIGILDQTYPGVNTYFDSPARSDGSQKWVDFASTYWHVDCVRKMSLNAFIDHYQNWCKRKKYNFSQSKAKEIYGKAKELVPVLPKDAITKLIIKQAVDQLNSASTTVESLRTLMNETASKLPEYPVVMAMKGVGTSLGPQLMAEIGNVSRFTHKSAITAFAGVDPGVNESGTYEQKSVPTSKRGSADLRKTLFQVMDVLIKTHPQDDPVYQFLDKKRAQGKPYYVYMTAGANKFLRIYYGRVKEYLASLPES

SEQ ID NO: 339430 - protein, 393 aa, unidentified
MPGSNVNTPITNGNSRIFVALELSRRTWLVTMHSPDRDKISRHKVEGGDHAGLLALIDRVRERAARALGAVPAVVSCYEAGYDGFWLHRLLMAAGIKNYVFDPSSIAVDQRARPVKTDRIDGEKILRTLMAFLRGEPRVVRIVRVPTPEQEDMRRRTRQRHRLIKEQTAHTNRITALLRLHGMAVGSPRRRDWLKWLATQRDWEGQAVRPEALAEIEHEHARLLLVRTQLDALATRAAAPAAAQATPAAAEMARRSEQLFQLKSLGPAFTTTLTEEVFYKDFDNRRQVASYVGLTPTPWQSGGTDRDQGISKAGNPRARCAAVELSWLWLRHQPDSELSKWFRQRTLNASKRIKRIAIVALARKLMVALWRYLTTGLVPAGAVLKATAEAQAA

SEQ ID NO: 339431 - protein, 339 aa, unidentified
MRYVGLDSHWRQSTICVLDHRGQKLLNRTIKGPWSKVLEEVGKIRKPFAVCFEASTGYGHLFESLQTVARRVVVAHPGQLRLIFRSKRKNDRVDAEKLAKLLFLDEVPPVYVPSSEVRSWRGFIGHRNKLVRERTRTKNSIRALLRGQGIQAPRGLWYGPGMKWLRSVSFANELDTVQRDLLYERLCFLTKMLERVETTLNRTASRNPGVQLLRTIPGVGPRTAEAVMAWVDNPGRFQRIKGAGRYFGLVPCQDASARTNRLGHITREGPAIVRWLLTEAAWQGVRRSPLIRTFYERVRRGDPERRKIALVATAHYLLRAMMAMLRTGEVWRSSEEAAV

SEQ ID NO: 339432 - protein, 342 aa, unidentified
MKDTVVGVDLAKHVFQVHGASTTGDVKFRKKLTREQFRRFMAEHPACVVVFEACGSANYWAREMEALGHEARLIAPQYVRPFVKRQKNDAADAEAIVIAARQPEMRFVAPKTAEQQAKGVLFRGRERLVHQRTELVNALRAVLYEYGHVFPVGFIHLKRIEGVVDEPGCDLPALIIAECRDLLAQIAEKTERIGVKTKALKALGAQTDMARRLQTMPGVGPLTALAVEAFAPDMAKFKTGRDFAAWLGLVPRQRSTGGKARLGRITKAGQTDIRRLLIIGAMTRIIGRARHKVPAESWIGRMLAKKPKMLVGIALANKMARQIWAMLRNGKDYRDPALAVAT

SEQ ID NO: 339433 - protein, 379 aa, unidentified
MNGPIYEQSVIVGVDAHKYSHTAAAVDAWGQEKGRLNFTNDSLTDCLAWLKTLGRREDVIVAVEDANSYGCHLVSALAEQQFAVRSVPAVLTERDRQHSTQRDKSDFRDAKRVAKVILAKYEETLPVIASLATSAELAAATELNLLLNERRDVVKEGTAIKNQLHSLLHQYYGDHYADGFSKAFNKQAMIFYQANLVQAISADSPNANQAGKALIAESILRRIRRLKLLQEQSAAILKQITKIGETSAPVAALHENIHGCGLLTAGAIMAELVTIRRFGGRDKLAKYAGIAPTLKSSGSHHRLYTNPFGNRLLNKALHTIALSQIAVKGDDRGKRYYRKKLKEGKTKLWALRCLKRRLINLVFRVLKQVEMGSAETAIS

SEQ ID NO: 339434 - protein, 387 aa, unidentified
MVLANDLSRSVTPFDQSSTLVAVIEMSANSWLVAATVPGIERQPMKKLKPDAPTVLKLLERWRMEALKAGRRIYRIVVAFESGRDGFWLARWLIVRGLETHVIHSASVAVSRERKRAKTDRLDATMLLRVVLGWLRGERGHCGMVAIPTLEEEDARRPSRERESLVGERTRIANRMKSALARLGIRGFKPHLRKAPQRLAALCTPEGTGLPPNILEELRRDMTRLALVREQIAAIEKSRIERIERAPNTGPHMMVRLLASVIGVGIETADMLVREVLSRKLRDRRAVARYAGLTGSPDESGTKRREKGLSKAGNARVRRGLIQLAWRFLQFQKESALSQWFLLRTKGPSGARRTTMIVALARKILIAFWRLVTIGEVPEGVVLRSSA

SEQ ID NO: 339435 - protein, 336 aa, unidentified
MNYIGLDIHKGSTQVTVMDGDGGIVEKSRIKTEKEAIEDFFSDKEGRVVMESTGIWEYVYELIEGKGLEVYLANPLKVRAIAEAKIKTDKIDSEILAHLLRANLLPTVWIGDKGMRDLKRLIMERAFLKRSSTMMKNRIHAELARRGTKTEGNIFTIKRRAYLRSLSIKSVDRLLTILDGIDEQIKEVNEELLDYYSNSEDAKILTTMCGIGFYSALSITAVIGNINRFSDSEHLCSYFGLVPSTHQSSLTTYHGSITKEGSRTIRWLLIQCAWVHVTKCKDTSLTTFYNRIARKKGKRKAIVATARKMVKIIYWMLKEKEPYHVEGYKPRSGHAR

SEQ ID NO: 339436 - protein, 332 aa, unidentified
MVAGTHGSLNKAGSTKMTHNSTAAGIDTSKAKLDVAVHGRDQHWQFDNTTVGWRRLAAELSKAGVTRVGIEASGGYESGVVGYLRAKGFTVLVLQPMQVKAYARLHLRRAKNDKLDAVLIAACAATIDEVRVAPDERLAKLAHHLTFVEQIEEDIARFKVRLEHVGDPRLRRLVMADIARLKKRRSAELSRIVTALRGHDDLARRLDLVLSVPGLGERTALALIIRMPELGQVSREHAAALAGLAPFDDDSGKRMGERHIAGGRRRLRRSLFAAALPAAFRWNKALIELYSRLTNRGKAHNEALIACARKLLIYANTVVQRGTPWTETPLSV

SEQ ID NO: 339437 - protein, 356 aa, unidentified
MKNTIKYVGLDVHPSTVSVAVLDAEGKLILQSILATHAAAILDFVHGVRGSLQVTFEEGTQSAWLYDLLVRHVAKVVVCNPRKNALLKAGNKSDQIDARKLAELLRAGLLSAVYHGENSYRILQELVRSYTTLTEDTTRIMARLKALYRSHAVVCGGKKPYGKRHRQEWLQQVRQPGLASRAQRLYDQLDAVQTLRRAAKHEMLAESQKSGAYRLLASIPYLGPVRASILMARAQVPNRFRSKRQFWAYCGLALETRSSAEYHVVQGQVQRSRKPVFIRGLNLNHNHDLKNVFKGAATAASIHDGPLRQFYDRLLAKGMKPELARVTLARKIAAMALILWKKGESFDPKYLMLPAA

SEQ ID NO: 339438 - protein, 407 aa, unidentified
MDLLKTVFGIDVSSRKSNVCIMVNGQKVNDYAISNDMVGFNQLLGDLKQVTNPQIIFEATGVYSRRLQAFLDMHELRYVMMNPLEAKRKTKDDLHQNKTDKLDALYLAKLQSEHPQRLAYVQSEEYQELMANNRIYEQASHDLITNRNRLHKAIQLTFPEIEHLMVNPRGKNYWSIVLRFPHPDIVLETKEADIIDFLKGLTGIGKKRANDIAQSLIRLAKVACPAVKKNSAHIRGLKMAINNILSAEEECQTALQEMAKLAPKRDLEILTSIPGIGENTALRIISELGDIRRFNSPSQLNAFVGVDPQVYESGNLTAHLSISKRGTAIGRKVLYLAINQIQSAKKVGNPCHIADYYEKRKRSSETASHKKAAIASIHKLLRTIFALIKNDQLYSYDVAKHNQRLLS

SEQ ID NO: 339439 - protein, 322 aa, unidentified
MRYIGIDVSKATFVVAYSSDKGGEIRTFNNTTAGIRQFIGTLPKDGSIHCVMEATGNYSALLLYMLNVAGITVSMENPLKVKNFAKALLSTVKTDKSDARLITLYGEKMNPRPFKVQGEAILRLRQKRTVIRQLTKQITAMSNLRGSLACLPVPDKGATHTVDETIEFLEKRRDRLQSELTDLVEVEFSRQLALLTTIKGIGITLATALIITTGGFTYFQNAKQVSRYLGICPTYEQSGTSVNIKGHINRNGDAYTRGLLYIAAWPASRFNAQCKETYTRLRQNGKSGKLAMIAVANKLIRQAFAVVAHDKEYIDGFVSNRP

SEQ ID NO: 339440 - protein, 362 aa, unidentified
MEYFAGLDVSIDETAICVVSDGGDTVLEISVATDPTVIADTLKPYAGRLRRAGHEAGALSPWLHPELLAAGVPAVCLETRHVRAAMSAQRNKTDAKDALGLAHIMRTGWYRQAHIKTESCYRIRLLLVQRRNLKRKFLDLENTIRHSLKAFGIRLGKVGRGGFEQAVRDAVDGDAMTVGLMECMLRARAALWAEYLVLNKLVVQLAMADDLCRRFMAIPGVGPVTALSFSTAIDDPARFKRSRDVAAYFGLTSKRWQSGTSIDVKGRISKAGDPDVRRALYEAASAMLTRFKGDDTIKTWGLKLAKSKCHAKARVAVARKLAVVMHAMWRDGTFYVGDPHATEEETAIWIAAKAKRLSYART

SEQ ID NO: 339441 - protein, 347 aa, unidentified
MMVIGIDAHKRTHTAVSADELGRKLSTKTVGTTSTDHLALLKWARAQPDPERLWALEDCRNMTRRLESDLIAAGERVVRVPPKLMAHARDSARTYGKSDPIDALAIARAALREPDLPVARLDGVERELRLLVDHREDLVAERTRVIARLRWHLHELDPGWLPPGKLERASAYDRVAAHLAQFDEFVARLAMTLIHHCRRLTVEIDELAGEIGERVQQIAPSLLAIVGCAALTAAKIIGETAGVDRFRSKDAFARHNGSAPLPVWSSNRARHRLSRTGNRQLNAALHRIALTQARCHPGARALLAKRKAKGDGGMEALRILKRRLSDVVYHAMIADLDHRSAETPTAA

SEQ ID NO: 339442 - protein, 393 aa, unidentified
MSENTRYVGLDVHKETISVAVAEPGREGEVRYHGTIPNSEPAIRKLVKKLGPVEALRCCYEAGPCGYVLYWALTALGVACTVVAPSLIPERAGDRVKTDRRDAEKLARLHRSGELVGVWVPDPEHEALRDLVRLRESAVKNRLRMRNQLTKFLLRRGRSKPKEWTSWTQKHMEWLGQQKFVHTSDEIVNDDLLSEVKHADKRIERLEQSIDEAMTRAPAEQQEMVAALATLRGVGRLTAVTLMVEVGCFSRFQKASSLMSYCGLVPSEHSTGGPGKARRGGITKTGNAHLRRILGEASWHYAKRPRLSPKLARRQKDASPALLELSRKAEHRLSSRFARLTLKGKPRPKAAMAVARELLGFIWDIGVRVEREQRERPQRERPQRERPPGRRAA

SEQ ID NO: 339443 - protein, 363 aa, unidentified
MNSVYHTELSSHEGTRCQFNGGRCAIKLGIDVHQDFYVVVMQEGGSNPKPPQRFHKEAFLQWAAKLARSGAQVYAVYEACGFGFSLQRQLSALGIECYVVCPQKLDEQNRRVKTDGLDARALCLKLDRFLQGNRHALALVRVPSIEEEQARALHRQREQLVKVRKVLEAQGRSLMLNHGIEPVQQWWKQRAFATLAVPQWIKELLGNSQPVVLSLQQKIDQLTLQLQSAAQYQPPRGLGKMTSVIIDREIGDWRRFNNRRQIASYTGLCPGEYSSGQKRLQSCVTKHGNPRLRAALVELAWRLVRFQPNYRAVCKWKDRLKKGQLTTGAARKKAIVALARQLAVDLWRVRTGRLTPEQLGLEI

SEQ ID NO: 339444 - protein, 337 aa, unidentified
METSASPVVGIDVSKSKLDVVLRMNGKVKSKALRNSSEVFESLLVWLRMQKVDPQMVHFCMEATGVYSEPIALWLHDNGLKVSLVNPGCIKGFGQAENIRNKNDEVDAGLIARFCEAKPPAIWIPAPREQRLLRGWSDQVQALKDIRQEQKNRLEACTFSQQNELAESIQKHVSWIDRELAELEKRIDDHIDRHPDLKRDADLMTSIPGVGRVTAAKMLGQLGDMRRFRSAKALAAFIGVSPKQRTSGTSVRGRTTMSRIGSTSLRCALYMPGWVATRHNPLLKTFADRLLASGMAKKAVTGAVMRKLVHLIYAVIRSGRAFDPNYLQSGLAKQDGI

SEQ ID NO: 339445 - protein, 401 aa, unidentified
MCTAISVWSAICEDGQVRSGGRVPSTPEGLRALAESLLATDRVALEVTASCWEVARILEPYVERVVVVSPDDTGISSARAKTDKLDARALAVLCWKGELDAVWMPDERCQILRRRLARRQQLVWGPTRCKNEIAAVLQRRLVERPPISDLFGVTGRRWLTRLELPVEERESVDAGLRQIAFVDAEIVAVDRLIAQQALAWPEIRRLMTVPGVNLICAASFMAAIGEPSRFLTSRKLVAYLGLDPKVRQSGDAPARSGRISKRGSANARWALVEAAWSAVKQPGPLRAFYERTRGRRGHGKAIVATARKLAVLFWCMLTRGEDYAHQRPALTKKKQRQLELTAGAPARSKAAAGIWSTNRAILHAERALAEQAEVSYKRMVTDQQAGRPSRKVGASATPERA

SEQ ID NO: 339446 - protein, 400 aa, unidentified
MVVLASLCNDVGYNGKTIKEPHTKEASTMDYTTFVGMDVHKDTITVAVAKEGNTEPVLLGTIPNRPDSLLKLLKQLAVTGNRLLFCYEAGPCGYGIYRFLKERNFSCIVVAPSLVPVRVGDRVKTDRRDAKKLARLLRSGELTPVWVPDEEHEALRDLVRAREDAYKDLQRKRHQLSKFLLRTGKRPPVGINPWTVKHRCWLDTVKYELHAQQLVLQEYRHAVDQAQERLKRLEQELIELGCKSVHAPVIAALRALRGIDYVSAITLVAEIGDFRRFDNAAKLMSYAGLVPCESSSGPRSRRGSITKTGNSHVRRIIVESAWHYLRAPNVGCTLRKRQEGVPESIKEISWRAQNRLNSKFRKLLARGKSRQTAVVAVARELLGFIWSVALQAKIEYEKAA

SEQ ID NO: 339447 - protein, 387 aa, unidentified
MPQPNDLSRSLVALDQDSTIIAVVEMSQSSWLVAGMLPGIERQPRKKLEPSPERLLGLLHRWRDEAIKAGRKITRIALAFEAGRDGFWLARWLRARGVEAHVIHASSVAVSREHRRAKTDRLDTELLKRGFLGWLRGERGHCTMARVPTIAEEDAKRPNRERECLVGERTRIVNRMKATLARLGIRNFKPTLRKAAERLATVHTPEGSALPPNVSAELQRDMARLGFVVSQIKEIEGARQERLEQEPETTSHAMVRHLARVVGVGIETADMLVHEVLSRPMRDRKAVARYAGLTGSPDESGAKRREQGLARAGNARVRRGMIQLAWRFLRFQKESALARWYQARTADSRAGTRKTMIVALARKLLIALWRFVTTGETLEGVILRPAG

SEQ ID NO: 339448 - protein, 425 aa, unidentified
MSEKIVVGIDVSKAFSDICILSPNNDIIKRLKISNDITGMKSLIYVLEKVEDKYEDRAVIIMEATAHYHQILANFFRKHNYEVIVINPIQSGALKNINIRKIKSDKTDAYNIALLYRIKNYNETITHSDTVNSIKKLCRQHKELTDEIVEHINRLIAFLDISFPDFKKVFTDLQGKTALSLLEKYPTIQEVLSPENKQDIIQLIKENSHKSSSYAEVKYEKLLKAAEKSIEVCIVSLSSAVLIQTTVRVIFSLQEALKAIDDEIKRLSLLDEKFHKEIVLLQSIPGVGEYTACVVLSELGDISNFSKPKELVAFFGLDPGVSQSGTYNRKNNKISKRGSPHVRSILHMLAKSNVYPNRNREYLNPVMRAYFEKKIAEKPYKVVMCAIMRKMVQIIFAVLRNQKSFELRTPEEHQKLIREKSKLVA

SEQ ID NO: 339449 - protein, 358 aa, unidentified
MTDTNIGLERSGHVVTGVDTHKHIHVAAALDPIGGLLSTLTIATDSGGFAALLEWALTFGRIIAFGVEGTGSYGAGLTSYLHRQGHKVIEVSRPDRRMRRLNGKSDTLDAQNAAQSVLAGLSTATAKTMDGTCEMLRELKVAHDTAVKARSQAMIALKAVLVHSEETLRKSTTKLTQIKLARHCAALRPSSLSSPVDANRHALKRLAKRWLFLNEEAQDLEKMIKTLVKDHALQLLDAYCIGPDTAAEILIAVGDNPQRIRSEAALAKLAGISPVPAGSGMNSGKHRINHAGHRQPNAAIYRVVIARMRYHQPTIDYVARRTSEGKPKRDIIRCLKRYVIREVYQLIKANPHTRQITA

SEQ ID NO: 339450 - protein, 345 aa, unidentified
MAEVSTIGLDIAKAVFHAHGADARGQLVFSRRLTRAKLLEFFAVQPRCVVALEACGGAHHWAREIASLGHEVKLIPPAYVKPFVKRNKNDAVDAEAICEAAQRPSMRYAAIKTEAQQAAGMVFRTRDLLVRQRTQLINAIRGHLTKFGWVAPKGPSHISVLASLLEEGEEIGASLPEAARTMFLVMTGQLEQLNEQVALLDKEIDRRAREDEAARRLMTIPGIGPITATALLALAPPVEGFARGRDFAAWLGLTPRQHSTGGKERLGSISKMGERTLRRLLIIGSSAVVLQASKRGTPRGSWLEQMLARKPRMLVTVALANKTARIIWAVLTKGEDYKAQVAAAA

SEQ ID NO: 339451 - protein, 331 aa, unidentified
MSVYVGIDVHRKRSQVAVINQDGKVLANRNVPNGVTPILSVIGGLPAGTKAAFEAAFGWGWLLELLEDYGFEPHLVHPLQCKAIASARLKNDKVDAAILAQLLRADLLPEAWIAPLEVRQLRALLRHRAQVVRLRTLRNRVHAVLADHGHGRPAGCWSGAGRAWLASLDLPDVSAEVISDALALIDARQSVIDRLDAEVRGRARSDPRVEVLTQLPGVGPFTALVLLAEIGDISRFGSARKLASWAGLTPTVRGSDRTVRHGHISKQGPTWARWVLCEAAQTAKRHPDFAPGYEALARRRGKKIATTAIARKLLTRACHLLTDASSGGAPH

SEQ ID NO: 339452 - protein, 343 aa, unidentified
MQTVTTIGLDIAKSVFQVHGVDAAGQVVIRRKLKRRYVLAFFQKLPPCLVGIEACASSHYWARELQALGHTVRLMPPAYVKPYVKRQKNDMADAEAICEAVARANMRFVPIKTPQQQSGLVLHRTRHLCIRQQTAVINAIRAHLAEFGIVAPVGRKGVEELLRVVADENDQRVPDVVRACLAALGTQLLSLKKQILEFDRMIMAWYRSNETSKRLHYIPGVGPLLATALVANVADPGAFRSGRNFSAWIGLVPKQHSSGGKDRLGSISKQGDRYLRSLFVAGALSVIRYAKAHSSKHRPWLTALLARRPAKVAAIALANKLARMAWAMMARGERYRNPVALAA

SEQ ID NO: 339453 - protein, 355 aa, unidentified
MNDAKYIGMDVHQATISAAVRDSSGNLVMEATLETKAETILEFVHGLRGSLRVSFEEGTCASWLHDLLKPHVTEVLVCDSRKNALLRVGNKNDREDARKLSELLFLKKLHPVYHGETGIRTLKELARSYLTITRDLTRVMNRLKAIYRGWGITCTGQQVYAPRYRAEWLAKIREAGVRRRAEIYYQQFDVLAALRQEARRELLAEARKHPAMRLLRQIPSIGPIRAALLIALMQTPHRFRSKRQLWAYCGLALRTYDSGEYRFVGGQLKRSKKAVTIRGLNKNHNHDLKNIFKGAATRAAATAGPFQKFYEARLASGMKPPMARLTLARKIAAITLLVWKKGVRFDAEQLKQQAA

SEQ ID NO: 339454 - protein, 338 aa, unidentified
MDKITTIGLDLAKIVFHAVCCDQHGKIIKKKMLRRSGLLAWFANLPPCLIGMESCASAHYWARALKAQGHRVKLIPAQHVKPYVRGNKNDYNDALAIAEAVTRPEMRFVSIKTPQQQDIQALHRLRERRLQDRTALCNQLRGLLGEYGIVFSRGVNVLRKRIPEILEDGENGLSDFFRRLLTQGYQQLTELDAHIEAYTQTLEAHSKHDDACQRLQTIPGYGPIVSSAYYSVVGDGKAYRRGRDVSASLGIVPRQYSSGGKNVLMGISKRGDRYLRSLLIHGARAVVIQAANKVDALSRWINKTRAARGFNKAVVALANKLARIGWAILANNTVYQAR

SEQ ID NO: 339455 - protein, 402 aa, unidentified
MNCVGIDVSKGKSMIAVMRPFGEVVVSPFEVLHTDSELSELARLLKSLDGETRVVMEATGNYHAPVAWLLHDAGLYVSVVNAMLVHDYGNNSLRRAKTDKKDAVKLANYGLDHWLTLQRYVPDEDTRLMLKTCYRQYQQYSKVQTMLKNNLISLLDTTFPDANRLFASPPRADGSEKWVDFVDAFWHCECVCGLSEKTFITRYQKWCRKHGYNFNENKALDIYASACGHFGVMPKTDTTKLLVEQAISQLRATSAALAALKQEMQSLAASLPEYPVVMGMFGVGPSLGPQLMAEIGDVRRFHSKKALVAFAGIDAPPYQSGQMDVRSRSISKRGSASLRRTLFLVMSVILQRAPMDEPVYQFMSKKHSEGKPYRVYMMASANKFLRIYYASVKAYLDSMEYD

SEQ ID NO: 339456 - protein, 342 aa, unidentified
MTIVAGFDVHRTQITFDALDTDTGEVTRGRIDATPTAVERWVGRFAGREVHVALEACTGWLFVSRALEHAGAAPHLAEPVETHALRGRKRRAKTDREDARWLRRLLCEGRLPESWMPPEHVREWRSRARLRKTLVDERTQWLQRIQATLFHHGIGGVPEKLNGSGGREFLGRLELPADARERIEISLAMIDSLEDQLRPLEAELRKLARRQTGCRALMGLYGMGELTSLVTLTELGDVERLSASRKAVRMAGIDIGVHRSDRRSRVGKLNRQGSPDLRWALYEAALSACRTTSPDHQDYLALKARGLSHTRASLTIARKLARRSFHILRELGPAALEPLPTT

SEQ ID NO: 339457 - protein, 409 aa, unidentified
MEEIHERCCGLDVHRDSIAACIMIGNGTQKRKEIRTFATFTQDIEELATWLKSLNIRRVAVESTGIYWKPIFNVFEGDFEVILVNPQHMKNVPGRKTDVKDSEWLCKLLKCGLLNKSFIPPRQIVRLRELVRYQQTLTRDLARAKNRIIKMLENANVKLSTVFSDVFGATAWGMICKLVAGVTKEEVLMEYIHKNCKSSREDIKKALRGTIREEDREILKMMMEHVASIEKVIVTVEQSVTKLLKPYEVQIELLQTIPGIRETTAAAVIAEIGVDMDQFKDAAHLAAWAGLCPGSNQSAGKIKSSRIRKGNKHLKVTMTQAAWAIAKTKRTYLGAKYRALALRRGKKRAIVAVGRKTLIVCYHMLKHNIPFYELGVDFLDKMEPERKAKYHEKRLEELGYHVTITKKIA

SEQ ID NO: 339458 - protein, 420 aa, unidentified
MNDIIAGIDVHKRVLMVVVGTVCGAAAEDGSEPREPIRFVQRRFGTTTSELLHLGAWLQQHGVQEAVMESTAQYWKPVWLALERHFRLSLAQAWSNRAPRGKKTDFKDAQRLVRRHAAGELTLSFVPDAEQRQMRTVTRRRTQLTRDRVRIQNQLESLLEETRIKLSSVVTDLLGSSGLRILTALGQGETDPAKLAAMGDARLQCAPAELADALTGSVSEIHRRLLQQHLAHLALIDAQREELSLLAADAMRQHSEAVIRLVKIPGIRVLSAQQIVAEAGPQASAFPSAAQFSSWIGVCPGREESAGENHSSHCAKGNTYLRRVLCQAAQAAVRTKNSYFQLKFQRLMPKLGYAKAIWAMARHISVVIWKILHDGAQYEERGLPTTPQAAKRRAQRLAKQLRALGYSIELKPLSPEAVVA

SEQ ID NO: 339459 - protein, 325 aa, unidentified
MAKRITVCAGIDTGKRKLDVAIDGSCEQLQVENTAEGHKVLLEWLQRHKVKRIGIEASGGYEQPVVAALRRKRFVVVVFQPAQVRAYAKFHLQRAKNDKIDAALIAACTAAVKQIYPAPDPRLSPFAEQLTMIDQIGEDIMKLKNRIETCRNERIRAVWKEDIARLAKRERTELKALVAAIRRCPDLAERLELIHSVGGAGLPTAVAILVRMPEIGQLTREQAAALAGLAPYDDDSGDQVGARHIDGGRERLRRALYLAALPASFRWNPQLIALYQRLRAAGKEHKRALIACARKLLIFVNTVVARGTPWQGEPPAARTANPSTA

SEQ ID NO: 339460 - protein, 361 aa, unidentified
MAERDHFEEGWTTVTIVADEFTHVIGVDTHARTHTYAAVEARTGEILGTAVFPTSPAGLARARSWINRRAPESMLVAIEGTGSYGATLTRALQAEGIEVREVKPPRRATRSAHGKSDEIDAIAAARTAIASPLSELSTPRAEGIRSALRVLLVARQALDSRRTADNNMLTALLRSFSLGVDARRPLTVSQVQTVGGWRERCTDDSVIGTIRSEAKRLATSILAATRQLDQNHAALAHHVQELAPGFLNIKGVGPVTGAIILAAYSHRGRIRSEAAFASLAGVAPLQASSGNVVRHRLSRRGDRQLNRAMDIIARTRMVSDAGTRAYVDRRTAEGKSRREIRRCLKRYVARQIFRQLNSLMG

SEQ ID NO: 339461 - protein, 387 aa, unidentified
MKKIYLNVACAGMDVHYKFSNVTFRDPSGKVVRRERLDHRHRQELQERLNRWPRGIPVVMEASFGWGWLSDLVEQAGQDVHLSNCYKVEQMRKARGWVKTNKKDADLVSLLAFEQSDWWKVWRAPPEVRNRREQMRFRGDLVGSQTRVKSRIHAIFHRHGIFHEFSDLFGGKGRKFLVELCLYNPANLPPEALLALRGQLKLLDHLRRQLADVERILHKQLLKTPLTTRLKTIPGIGLILAHVLAAEIGKIERFKNQKSLASYSLLAPRSNDTGEDNPGQSPLGRHLGLRGNRTLKWAFIEAAHGAVRSGGKWRAIFDRATNGGKKNRNRGYIKVARELVKVVYAVWAKGVDYQPIAPVRPGRKINKKKSRSETGQLLHPMVHALPA

SEQ ID NO: 339462 - protein, 400 aa, unidentified
MISVGIDVSKGKSTVCILKPYGEIVASPFEVRHTESELKNLIQMIQRLDGEIRIVMEATGIYHLPMLSSLQNQNLFVAVINPFEMKEYASRGLRRVKTDKQDSITIANYGIDNWYRLENHQGSDAVYSELKLLGRQYCHYMELHVKALLELTHMLDYTMPGVKKMFSSWSESNGKDKLSDFVERYWHFDNITAMTKDEFIEDYVSWAAEKKYHQNRSKAAELYDLASDGISTLPANTPSTKMLVLEAVRVLREIDSTLLKIITRMKELAKTLPEYETVRAMGGVGDVLAPKLIAEIGDIRRFHSGKALIAFAGIDAPPYESGQFVGTNRKISKRGSKVLRKIGYETMRVLKTHKAPEDDAVYRFILKKEAEGKSKRQAKIAGLNKFLRIYYARVSEVYKA

SEQ ID NO: 339463 - protein, 344 aa, unidentified
MSEQYVGRQIVGMDLHRRRSVLVRMNETGERLETVRIANDPEYLRAVMARAGEAPEVVLEATYGWYWAADTLAELGATVHLAHPLGVKMFGLRRVKNDERDAADLADLLRMGRLPEAWIAPPATRELRGWVRHRAKLVALRSCVKNQVHAVLAHAGVAVPMSDLFGPSGRTLLAAAPLVVESRSRVESLLRVITALDFEIDLYTQLVGGRLRTDPGYRAIQQIPGIGPVLAAVFVAEIGDITRFHRPTELASWAGLTPRHHESDTTVHRGRITKQGDRLVRWAAVEAVQRIPGHTRLGQVRDRVGERRGRNIGVVAAARELITLVFYGLRDHHLRCLPARARAA

SEQ ID NO: 339464 - protein, 363 aa, unidentified
MFSERMSVGLDVHARSVAVAAIDGVSGELVQARLRPAHEEIRSWIQGLQGPVAVTYAAGPTGFGLSRALNAAGIRCVVAAPSKLQRPSGDRVKTDAKDAIHLARLLRLDEVTAVVVPTVEQETARDLVRAREDCRGDLMRARHRLSKLLLRQGFVYSGGHAWTGAHDQWLRQIGRQQLDSPALRLTFESDYDAVLTVQARRARLDTAIEQMAANSEFTALVRRLGCLRGISTLTGFALAVEIGDWHRFTGNTIGAFVGLVPSEYSSGQSRVQGSITKTGNTHVRRLLIEAAWHHRARYRPGKTMRDRWDLASPAARARGDAGNQRLHQRWTRFTERRKRPVIANVAIARELAGWCWSLAVLEE

SEQ ID NO: 339465 - protein, 334 aa, unidentified
MQNITLIGIDLGKHSFHIHCQDKSGKALLRKKFTRTKLMQFLATCPPSVVVMEACAGAHFMARCISDFGHETKLISPQFVRPFVKSNKNDFVDAEAICEVASRPSMRFVQPRTETQQAMRALHRVRESLIRDKVKTTNQIHGFLLEFGISLPIGDAVIKRLSLVLAEHEIPEYLSRLLVRLHTHYFYLVEQIAELESELSQSINADDTAQRIMTIPGVGPITASLLSSQLGDGKQFSCSRDFAASTGLVPRQYSTGGKSTLLGISKRGDKNLRRLLVQCARSFIMRLERKHGKLAEWVREQLNKKHSNVVTCALANKLARIAWAITTQKKEYQA

SEQ ID NO: 339466 - protein, 447 aa, unidentified
MDTESATQYAAYIGIDWADKDHAYALRATEDKKVEQGKVEAKPEAIEEFVARLRQRFGGKAIAVALEQSRGSLLFMLSKYDHLVLYPVHSSTLDSYRKACHPSGAKSDPDDAALILDLLQKHPEWLQPFAPDTVPTRTLQFLTEERRDAVNDKTRYLNQLTAALKTYFPQMLEWLDVDSKVMCEMLQRWPTLEQLQQQKPSVVEEFLREHRYPVVRVKPLQEAMEKAIPATTDQAVIEAKKFTVQRTIAQLEALRANIAELDRRIEQITRLHEDYRVFASLPCAGKVMVPRLIAAMGTQRDRFQTASELQCQTGIAPVKEASGQREWIHWRWACPKFLRQTFVEWAWLSTRKSQWAREFYDRQRAKDKSHHAAVRALAFKWQRIIFRCWKDRCPYDEARYLATREQRARTAKASTDGSPQLKSSQAGGVEITWKNVSGFSRPDSISC

SEQ ID NO: 339467 - protein, 343 aa, unidentified
MEIQAVGIDLGKTLFHLVGVDSAGSVVVRKRCSRDQLLAYTANLRVQRIGMEACSGSHFLGRALRDQGHDVRLMPAQYVKPYVKTNKSDYIDAEAIAEAVQRPSMRFVPIKTEDQLDLQAVHRVRERWVMRRTAVVNQIRGLLLERGLTLPKGRSHVDQALPDILEDATLRLSDSFRVLLAQLNLELNQLTSRIEQMDAVLQQTAKENEACQRLTTIPGIGPVTATALIAAIGNGSGFRRGKDLAAWVGMVPREYTTGGKQKLLGISKRGNSYLRKLFVQGARAVMQRRHNQAPGLSAWLAQLLARSHQNVAIVALANKLLRMAWAVLCKNERYRPPVLMASS

SEQ ID NO: 339468 - protein, 318 aa, unidentified
MVNESFVGIDVSKQWLDLGWEPAGQAERLAHDEVAIAGLCERLVQERPTLIVLEATGGLETHLASALAAAGLSVAVVNPRQVRDYARACGRLAKTDRIDALILAAFARAIRPQVRAPKDDETLELGALLVRRRQLLDMRVQERLRLERASPVQRDSIKEHIAWLTERIARLDTDLMRRLRSSSLWHEQEDLLKAIPGIGPITRVTLIALLPELGKLNRREIAALVGLAPFNRDSGQHHGERVIWGGRAQVRQVLYMAALAATRSNPVIRTFYQRLRAQGKPAKVALVACMRKLLTIMNAMLKHNTPWNPNTLDLKHSC

SEQ ID NO: 339469 - protein, 349 aa, unidentified
MMSTTKAAITERILAIDLGKYKSVACLYHSCSGEVQFSSFDTTREQLTQRFNKHQPDVVVIEACALSGWVHDLCAELRLPCRVANTAPDAWKFKHTKRKTDRDDALRLAQLQALNQLPTVVIPPKPIREWRALIAHRQALVSRRVALQNRIRSILLVQGLPAPCGACAWASAGLNQFRALAQPLSDCSPSELWRGRLDRSLVEYSQVLEQIESIEATLDTIGRSNRSVQLLMTIPGVGPRTAEVVAAHLHDPSRFASGKEVSAYAGLVPRQFQSGDLDRRGRITRRGPAILRKLLVECAWCALRYNRWARGVSALESQRNRTEEASDRGTRPQTVGALLGGAARWRAVA

SEQ ID NO: 339470 - protein, 317 aa, unidentified
MSNHTPNTVGIDISKAHLDAHEWPSHRAARFANDAAGIQRLAEWIGAPVQCVIYESTGPWHRALEEALADTLPLACVNALRARRFAQAMGQPAKTDAVDARMLAAMGAAIPPRQVTPRSATRRDLHELQTAREALVKDRTAASNRQKHARHPLLKRQLKNRLAQIRRQLQALDEETATLIGDDEELSRQTEVLVSIPGIASVTAAGLLAEMPELGRIDAKAAASLAGLAPVTHESGQYKGRARIRGGRARVRETLYMAAVSASRHNPDLARKYADLLARGKPPKVALTAIMRKLLLLANALLKQDRTWTPNHADATA

SEQ ID NO: 339471 - protein, 333 aa, unidentified
MTTSTSKLKVKSHPPDTVWVGIDVSKNELQLHFPAPPKGLPAKIPYDKASLAKLTRHLAGDARFHVVFEATGGYDKPLRQCLHAHGIRCTRANPRHVRNFARSKGLLAKTDRIDAAVLADFGAAIKPPATPEPDPAREELAALIAYRAHLLDELGRERMQLEHPKPAAITTAIKSRIRTLQAQIGRFEKLIATFIAERPVLKQAVEALSSVKGIGALSAAALLAAMPELGTINRSQVAALAGVAPFNRDSGTLKGRRTTYGGRVEVRRAIYMAALSASRHNEVLSVAYRGMIARGKPKKVALIAIMRRLLIHLNSVMSRILKTANQPAIPISC

SEQ ID NO: 339472 - protein, 326 aa, unidentified
MQGKETPEQATSTKSNVGIDVSKAWLDVHVLPDGQTQRVANNKEGIRQLKRWLSRFDLALIVLEATGKWHRPAHRSLHASGLPVAMVDPYRVRMFAKAQGLLAKTDRLDARLLARFAAIMDPARRPPQPEAMETLAELAKARDSAVAEQTALENQRAAAASKFLTRHLTRRIARADKDMAAIEREIHRYIQADPALARRYAILTSIPGCGFVTAITLIARMTELGTCTVKQAAMLAGLAPVADDSGERQGVRVIWGGRPALRRALYLAAVSAKRFNADMKTVYDRLLANGKEPKLALIAVARKLVILANTLIAQDRTWQEKAPKPA

SEQ ID NO: 339473 - protein, 312 aa, unidentified
MIEQCFGGIDVSQDRLDVLLLPQGTGFSVANDEAGWSTLIGRLRGLLLTAIGLEPSGGYERGVLRALLAAGLSVRRINPNRLRQFARARGALAKNDRIDARLIAEYVATMPTHVVRHDPAAARIAEIVTMRRQLCDEHVAIENQAAQLEDAMLRRLAKRRLARIETDIRLLEKRLTETIAAEADLARRYARLTSMPGVGPVLAFTLIALLPELGRMSRKQIAALVGLAPYDFDSGKLRGHRSIYGGRMPVRNVLYMAALSACRYNPALRTFHKRLAAAGKKPKVILVAVMRKMITTLNAMLRDGASWQPQAA

SEQ ID NO: 339474 - protein, 360 aa, unidentified
MHATTVAVDLAKSVFQLAVADDQWRVVETQRLTRTQFERWFVNRSVGLVIMEACGSAHHWGRWLGGLGIEVRLLPAQYVRAYVRRNKTDATDATALLEAARASDIRPVRVKSVEQQALQGLHRIRSLWMGTRTSRINALRGFCREFGITIPQGARTGVETIGRVLADPRSAVPDLIRHTAGMLLEEIRLLEARIAQVERELAGVARHSPACTLLLSVPGIGLLTATALVAATSGDVTHFQDARHFSSWFGLTPREYSSGSSRYLGRISKKGDRYMRMLLTHGARSVLRAAKVADGAGKEVCGIRRWALDVQGRSNHNKATCALANKLARICYATLRDHAPFDEAVRLNKKQSRQSFIMPA

SEQ ID NO: 339475 - protein, 393 aa, unidentified
MGGLEPHPGISLTEASMNNNSTLYVGLDVHKESITVAYAINSEPVELMGKIGTTPTDIERLCKRLTSKAGQVQVVYEAGPCGYGLYRRLMKKGFDCMVCAPSLIPKKPGERVKTDRRDAARLVRSLRAGDLSAVYVPDVKDEAFRDLARAWASARDDLRHARQRLKSFLLTHGIHYVGRADWRAAHRRWLSKYSFEDAWRQLAFDEHRRTIEDRLAQCERLEAALREAVTEWRLYPVVLALQAMRGIQFITAVGLISELGDLSRFEHPSQLMAWFGVTPSEHSSGGTRRQGSITKTGNSYARKLLVEAAWSYRHTARISPQLQIRQENLPKPIIDRAWDAQVRLCRRCHRLVAKGKNANIAIVAVARELAGFIWDIGRLAMSLSLEPHNTRMA

SEQ ID NO: 339476 - protein, 327 aa, unidentified
MSDQLSNRTWFGIDVSKDFLDVYDQSQHRHIRYGNQSDGIATLIAALSEVHDKAFVCEASGGYETPVATQLAAQGWPVSVVNPRQVRDFAKATGTLAKTDAIDAAILARFGQLMQPPVTVFATELAQQLKDWVRRRQQLVELLSGEKNRKQQLTGLGSVPLQEDVEAHIEWLEHRIKQLDETIEQLSQQQSQWRDDKALLTSVKGIGPVISTLLLAELPELGHLTGKQIAALAGLAPFNRDSGRYRGQRTTWGGRATVRSALYMAVLVAVRHNPPIRTYYEHLLSRGKAKKVALIACARKLLTCLNAMLKHRTSWQDESVTARYAPA

SEQ ID NO: 339477 - protein, 346 aa, unidentified
MKKTIVGVDLGKRVIQVCVYTNKTVRSNEEMTPCEFTEFLAKSEPMMVVFEACASSNYWKQKALSFGHDANLISAQLVSSVRQNQKTDKNDALAIVQSAMLPEVNFISGKSVQQQQLQSMMRIRELCSKQKTALSNQLVSLLSEFNISTANRNGGLKSAVESTLEDAENDFSDLFRLALDSAWKLYLETIKSLAIYNDCLEKSIHEHSDCKKLLKLEGVGSINAINLYIALGCAELGTFNKGKDASACIGLTPLQHSSGGKTKMGSIGKHVKNSMLRSQLIAGAMSCVIQVVKREARTTKEKWIQGLVERRGKKCAAVALANKTVRTAFAMLTQGTEYKAKLISAS

SEQ ID NO: 339478 - protein, 319 aa, unidentified
MIKSTLFFGIDISKDCFDVYCSQTGHSSYSNDTKGFKVFLKAIPESSHCVMEATGCYHHQLAMFLYGRGICVSVVNPLVIKRYIQMKLKRVKTDKSDALMIYRYSCEQELEHWEPDPEYIESGRELLSLIQMYLKQSTALKNKLHAFESRGQNKGKMITSIKRQLRALKKERQLLEQEVEALIKANEPSLYARLQTIPGIGKKTAVLLMLSTANFKDFLSYKQVSSYLGLAPNERSSGSSIRGRSRISKTGDGLVRNHLFMCSFTAYIHNAQCKALFDRIVSKGKSKKLALIAVCNKLIKQAFAIAKSGLCYNANYMVK

SEQ ID NO: 339479 - protein, 342 aa, unidentified
MKQYVGLDVSQKETSVCVVDEVGQVLFEGKAKSDPGALTALLRKRAPQAERIGFETGAMASWLWHELRRVDLSVVCIDARHAHAALSVRMNKSDQNDARGLAELVRVGWYREVKVKSEESLKIRAILVGRSRLVAMRRNIEDQVRSLIKECGLLLPRAIGLQFRNRVCELLGKDHQLLGVIAPLLSIHEQICKQQSNFDNEVRQLAKSDETTRRLMTVPGVGVVTALTFRHTIDDPSRFRSASSIGAYLGLTPRRNQSGETDINGKISRWGDRLLRTYLFEAATVLLYRTKKWSSLKAWGMKLAKRIGMRKAKVAIARKIAVVLHCIWVDGTSFDWGLAKEA

SEQ ID NO: 339480 - protein, 343 aa, unidentified
MTKDTMIGVDLAKNVFQLHATSMNGQLQYRKKLSRQAFGTFMAEQPPAMVVMEACGSAHYWAREMVRLGHEVKLIAAQYVKPFVKRQKNDAADAEAIVVAAQRPEMRFVEPKSAEQQSRAILFRARERLVHQRTELINALRACLYEYGHTVPQGTHQIKRIAEILDAPNSDLPDLMREECTELLDQIAEQTTRINARTAKIKKLAAEADTARRLQTIPGVGPLTALAVEAFAPPMENFKCGRDFAAWLGLVPRQFSSGGKERLGRISKAGQADIRRLLIIGAMSRLNWMGRKSIPETSWLARMVTRKPRMLVAIALANKMARTIWALLTKNEDYRVPAQALMA

SEQ ID NO: 339481 - protein, 281 aa, unidentified
MNIIGLDISKDTIDATLHKTNGSIHYIKFKNNDDGLKQFRLWIKGNRIRKAYIGMEATGIYYEKAADMLSSYYTVYVINPLKIKDYGKSRFNRTKTDKADSNLIADYIKRHQDTLIPYQIPKNKALQKLINLKNQLQQHQKQIKNRLHSTEEDFIRNIHQDLIDTIQDKMEQVKIAISEQIKKQTDNNHYRNLQTIPSIGKDTASVLYAQLTEKHFKTANQFVSYAGLSPAIIQSGTSVRGRGRLSRYGNRRLKSTLYMPALCAYRFNAFPKLINNLKKSG

SEQ ID NO: 339482 - protein, 449 aa, unidentified
MGNASGVCRGDRNRNARLARLRALVPVDNAIVGIDLADAKQVVVVCDHDSKVLARRTFRCRAWDLGVALDWAADRVAAKGWAGVTVACEPTGHRWRVLGQLAADRSMPFVCVQPLQTSWARRSEDLTVDKTDDKDAVLIARLTGQLRCYLPEPVDETWGRLRHLGARREQLIVEMVGQIQQMRALLECVWPASLDTARQPFRSKTWAAAMTVIVDRDGGEFGRTRRLGLARFERAVRREISRRGGHKPSLRIARRLFTALSDPTGVTVHRRGALERVAFVLADWQAAADKLADTEQRMTGVLDELELTELVTSIPGLSAVGATAILAETGNPARFATARALVKHAGLAPRENTSGKFTGRTKLTGQGRPRLRVAAWRAVWGAQRANPIYAARYRHLTSREHNRLSPTQAQSVIAAAILRHLHAVITTGAAWDPSIATHGTRHRRIPVAA

SEQ ID NO: 339483 - protein, 422 aa, unidentified
MNVSPHTESPIVAWVGLDWADREHVVSLQVQGSSQVERLVIKPEPESLQHWIQQLRTRFAGGKVAMVLEQSRGAVLHALMQYDCFILYPINPKSLARYRESLYPSNSKDDPADADLLRELVQKHPDRFHAWVPDDSETRQLRLLVEYRRQLVDQQTRLTNQLTSLLKSYYPQALSWAGDLATLQACDFLECWPTLEAVQKASAGRLKKFYAQHHCRKRELIEKRIKQIRSALPLTRDRAILQSMSLMVVSLVRQLRPLLAAIEEFNQQIAELFGRHPDHDLFARLPGAGAALGPRLLTAFGSDRNRFQMADEVQRLSGIAPVTQKSGKTQNVFARWACPKFLRQTFQEFAGQSIRWSVWAKAFYRQKRSQGMGHHAVLRVIAYKWIRIIFRCWKNRTPYDESRYLAALQYRQRPQLKVLSPA

SEQ ID NO: 339484 - protein, 328 aa, unidentified
MQTETRPLHIGADVAKDEIVVACEEQHFAPHAIANRRPTLVAFLKTLPPGSRIGMESTGTYHELFATLAQKMGFVVYVLNPKDTRHYAKGVGQRGKTDRVDAKLIARFVDREHAKLHAWVPPTPEQRQLDRLLKRRAKLSSIKAALGQSLKGLSGFSTELKALVERVQRVIVRIDANIKALIEASTERQQNYTRLLSIPSVGSVVGSGVLVHLERLPFANADAFVAFTGLDPRPDDSGRHHGRRRLSKRGPSELRRLLYLAAMSAAHTKTWKPLYEHYLARGLPKTAALVILARRIARTAWSIYTHKTNFDAERLTKQPSTRNAPRHA

SEQ ID NO: 339485 - protein, 470 aa, unidentified
MDSRTGKSIFLWAFDPDYQTDYDHLEHKLLLPRAQIPNFRLSDGCALLRKEGYLLDAMRVCCAGLDVHQAMVVACIIKGPLESKPKVEIREFPTVLSGLLALQDWLSEEGCTDVAMESTGVYWKPINNVLESTCDITLGNARHIKNLPGRKTDVNDARWIAELHRSGLIRKSFVAPLAIRELRDLTRYRKKLKGYETSERNRIIKILEDANIKISTYMSDVFGVSGRLMLNALIHGEVIESPHLAELAKGKLRTKIPELTQALNGRVTKHHRYIIKQSFDHLLFLEQQIAEIESDMEHYFAPYQKEIGLLDTIPGVGVTVAQAVLAEIGVDMSIFPSEAHISSWAGLSPGNNESAGKKKSTRTPPGNKALKTALLEAAWAASKTRTFLGSKFWSMVGRKGKKKAATAIAHKILVIAYHILETGEPYNELGSDFLEKRRSISTEELMIRRLTKLGYNIVGTPQDKTEEKQA

SEQ ID NO: 339486 - protein, 318 aa, unidentified
MTQDLFIGIDISKAKLDVAASPGEHSWSVSNTEEGIQELIAKIRQLGTPKIVLMEATGGFERRPLAMLGAAGLPVAAINPRNARDFAKSLGLLAKTDKVDAKALALFAEKIQPPCRPLPDAQTRALQDLIVRRRQMVDMISAEQSRLAIVENPKVRRELVQHIAWLKKRIHIADYDLDQAIKNSPAWQPKSDLLKSVPGVGPVTTSTLLALLPELGVLTNKQVAALVGVAPFNRDSGTMRGRRCIWGGRTSVRNVLYMATLAATRFNPTIRAFYQRLCKLGKLRKVALVAAMRKLLGILNAMVRDQTPWRSDNVEISS

SEQ ID NO: 339487 - protein, 317 aa, unidentified
METTACFVGIDVAKARRDIAVRPSAEQWTARNDEAGIEQLVARLKELGPTLVVLEATGGLEIPLAAALTAAGVPRAVINPRQARDFAKAVGQLAKTDALDAQLLARFAEAVRPVPRPVPDAEAQALAALLARRRQLIGMLVAEQQRLGTALPTVRRRVEAHIAWLRQELSELDAELHETIRQSPVWREQEQLLRTVPGVGPVLAMTLVADLPELGQLGRKQIAALVGLAPLNCESGLLRGRRIVWGGRGRVRAALYMSTLVAIKHNPALRPFYERLLAAGKPKKVALTACMHKLLLALNALLRKGVAWQQPAPAAAS

SEQ ID NO: 339488 - protein, 326 aa, unidentified
MQYILGIDVSKDKLDLVLITERGKFHKVISNNVEGYKALDKWLVSRQVEQVHACLEATGQYGEEVAEHLYKQGHAVSVVNPARIKHYGESKLHRNKTDKADADLIAEFCLKENPTLWQPLSPEIKHLRALVRRLEDLKTNCQQEKNRLSSGEKDEWVVKDLSTHVAYLETCIAATEKEIQNFIKQTPNLKKQQDLLNSIPGIADKTSARLLAEIGDISTFESASQLAAYAGLNPKGFSSGSSVHKKTRISKQGRKELRSCLYMPAVVATNYNPVVRSLKVRLHDRRLANKAIIVAAMRKLLHIVYGVLKTQTPFDAEYHKQFNFSA

SEQ ID NO: 339489 - protein, 342 aa, unidentified
MKKSLFIGIDFSKKSFDVSVIRQSNLQAVDYHQFENNKEGCAALLKWVKSLTKEPSANWLFCGEHTGLYCICLSEFLIKKGLFVWLENPLQIKMSSGIKREKNDKVDSREIALYACRYRDKARAYRLPDKALKSLELLLSFRERLVSSKKTLLVSSAEIRRVLKRDSTAKFIYERSQKEIERLNKDIKEVEKRMLEQITSDESLQENYELVSSIKGVALINTVAILVATQNFTRFENSRQFACYAGMAPFGKQSGTSINTKPRVSGLANKKIKTLLTQAAKCAMIYDPNIKRYYERKQTEGKDKWLITNNVRNKIIHRIFAIVRNKQKYQIDYINPLQKNVA

SEQ ID NO: 339490 - protein, 309 aa, unidentified
MEHFVGIDVAKDRLDVHLRPSQETFAVARDGEGLAQFVDRLQTLAPQLVVMEATGGYETIVASAVVAARLPLAVVNPRQIRDFARATGKLAKTDRIDAAAIAHFAEAVRPPVRPIADAEAQALGELVARRRQVIEMMVAERNRRRRVTQSRVRRAIDRHLELLQTELSELEHDIDGAIRKSPAWQADADLLASVPGVGKATLRTLIAELPELGRLDRRKIAALVGVAPINRDSGTMRGRRSIAGGRPTVRTALFMAALVASRANPIIAPYYVKLRAAGKTGKQALTACMRKLIVILNAILRDRKPWQPA

SEQ ID NO: 339491 - protein, 365 aa, unidentified
MDQTARGEIVRVGVDLAKRVIQVHAVDSSGRVVVAKALTRERFIAWCAQLPPKVLVAMESCGGAHHWARKLAAMGLQPRLIAGHFVSPYRMEGKRGKNDANDAAAVCEAASRPSMRFVPIKTVDQQALLAVHRLREGYKEERTACVNRIRGLLTEFGFVFAQSPDALRLALPEVMEDAINELPAIARLALQRAQLQWLELDGHIAWCDERIAVHVRNDEQARVAVKLCGIGPVTASALVATVGDFRQFKTGAQFGSWLGLVPTQNSSGGKVSLGCITKRGDNYLRTLLIQGGKSAVMTAHKRQDRISRWLVQLLARVGWQKAAVAMANKNARILWAVLAKGRRFDPDHISIKPEGPAMVVPTMAG

SEQ ID NO: 339492 - protein, 382 aa, unidentified
MKTVTAKQAEKQVIPAVNSNAPPETHLPRYYVGLDVAQKKTQVCIIDEKGKVLVERQVSSRPQALESLLRHHCASSIERIGMESGNWSGWLFKELKKRGLPVICLDALQTSKFLSVRRNKTDANDARGIAELVRQGLDWVNAAWVKGAATYEIRGLLIMRSRMVKQRVENEMVVRGILKAYGGLIETKGDSDTWREKAYEAMVQILLRDEIDLRPRLAPVLDIIDQLRSSADKMEEELRTIAESHSVCKRFLEIPGVGPIVALSFLTAIEDPKRFRRSEDVGAYLGLTPKTFQSGETDTSGAVSRMGDHMTRTHLVQAANVILSHSKDWSTMKSWGIRLAKKVGYNKAKVALARKLATVMFAMWRDDKPFYYNQEALKMSMA

SEQ ID NO: 339493 - protein, 350 aa, unidentified
MEITTVGLDLAKRVFQVHAIGGSGEVVVRKTLRRAQMIPYFAGLERCLVGIEACGTSHYWAREIGKLGHEVRLMPPAYVKPYVKRGKTDASDAEAICEAVRRPTMRYVAIKSPEQQAALGMHRTRDLFVKQRTQLVNMIRSLLAEFGIEIRQGIGQALMVAKRAAADDMPDIPPLAAKVIAGLAGQVLDLQARLREIEREMLVWHRSNDVARRLATIPGVGVVCATALAASVTDPHQFRSGRQFAAWLGLTPLQHSSGGKERLGRISKMGDKYLRRLLIVGMTSLVRRAKYKPTTVDPRLADLLLRKPVRVVTVALANKTARVVWAIMTRGGTYRTPQPAGANVSQAAVA

SEQ ID NO: 339494 - protein, 391 aa, unidentified
MKSSHRIDTPAAGAKDGRLYVAFELSKSKWLIGILLSGESKLSRHLVPGGDTAAVLQLISKKRVQGEKKLGGPVRVVSCYEAGFDGFWLDRWLGEQGIENRVLDPSSIEMPRRARQAKTDRLDLERLMRVLIRHDGGEPRVCSVVHPPSPEQEDARRLSRERERLIGERTAHGNRTKGLLHGQGVRDVEPRRKDFHERLARARTGDGRALPDRLVAEILREHVRLKLIAEQIAEVEGQMKAEREAAAPDSRAARVNQLIELKSVGEVGGEGLVNEAFWRDFHNRRQVGAYFGLAGTPFDSGQSTREQGISKSGNGRARTLAIQLSWLWLRHQPDSALSRWYKERVGDQKGRVKRIAIVALARKLMVALWRYLTQGLVPENAIVRAAAPAGR

SEQ ID NO: 339495 - protein, 388 aa, unidentified
MTPTSGSLSHPITLDYENTLVLAIELSKTSWVLAAQVPGLPRVKAKQTIAPRTEALLAAIDGYRDRSRAAGRTIERVVAIYEAGWSGFWLARWLARHGVETHVVQPSSVPVDRRARRAKSDGIDAELLLRTLLAWFRGEPRVCSMVPIPDEADEDERRRVREREDLVAERVSLVNRVGAVLATLGVRDYNPLRRDRRARLEALRTALGDPLPPHARARILRMLDRLELVCAQIAELERQRDAVLEEEAPDKAEEMIQQLAGLRGIGVQSATVLVREAFMREFANGKTLGSYAGLTPTPFSSGATQREQGIGKAGNRRLRTVMIELAWLWQRYQPGSAQVSWFRERTAGTGRRMRKVMVVAMARRLLIALWRFATQGVVPEGAVISPAC

SEQ ID NO: 339496 - protein, 420 aa, unidentified
MKVVYNTCCGVDVHKKFLVATIIKTTDGVQPSYQKKRFSTFNSDIHHFKQWLLDNNCLDVCMESTGKYWVPVFNLLEDCINVTIANPKWVKAVKGNKDDTKDSKWIGDLFRLGLVHGSFIPSKEIRILREYTRYRFKLISCKRSEKNRFQNAFTVCNVALDAVVSDMFGKSASSITDYLIHSDSFDPDTCKSFLQKSLKKKGDQIIESIEGYQMTDSQKERMGIIHDHLDFVNQMIEKLDTKLDELVAPYENAITLLCTNPGIDRHSAITILSEIGTDMKQFNSSKRLCCWAGLTPGNNESAGKKKSVRITRAGVYLKPALVQCAHAAVRSKTNPYYKNKYERIAKRRGKKRAIIAIARMLLTAVYHMLSTGETWNPCDLYKVDMPPEMQEKQKQKAIKQAYRFLISVGELSADSLVQQT

SEQ ID NO: 339497 - protein, 410 aa, unidentified
MRLCVGDDWAQDHHDIEVMDEAGQVLAVRRLPEGVAGIGQLHELIGAFVPAGEDVEVQVGIETDRGPWVTALLAAGYVVFAVNPLQASRYRGRRGVSGAKSDGGDAHMLADAVRTDAHQLRPAAGDSPAAEAVKVLARTHKTLIWQRSAVVLRLRAQLREYFPAAVAAFEDLDARDALELLGKAPDPARAARLTRAQVSAALKRAGRRKIAERADAIVAALRSPQLGQPAALTAAYAATVRSLTAVIATLNEQVASLQGQVEAHFGQHPDAEIYRSQPGLGAITGARVLGEFGDDPHRYATAKNRKNYAGTSPITRASGKKKIVQARFVRNDRLIDALMLQAFGALRVSPGARAFYDAQRARGCAHNEALRNLASRLVGILHGCLKTRTRYDEAIAWGHRENIPQSDAAA

SEQ ID NO: 339498 - protein, 400 aa, unidentified
MYYLGIDWATEKHDLCLLDESGTILRQLTISQTDAGFERLQKLVEQYGAENVQVNIERSDGLLVDWMLEQGWALHVTPTLIVARRRPRRSKSDPSDAYLLAHLLRLKDPDCRRLTRSSSEVLYLRELARALDRVVSDQRRLASRLNYLLHQYFPAATRLFAHVETLICLAFLEAYPTPEAARRLTRYQLRQFLKSQKYTFLSRLDEIYQQLQIPMPTASVPDGYVSQVRVLIPLLRELHHTRARLERELPLCFSQHPEAAWWRSFPGTKGPLTPARLLAWIGDDRQRFPTAEALQAIAGTAPVTRRSGKSKYVEFRRACSRPLRKAIDDFARQSLRYSSWAREYRAAQIARGHGIARANRALANRWLKIIWTLWQRREFYDEAKHEANRQKQMMPALKAS

SEQ ID NO: 339499 - protein, 386 aa, unidentified
MHDSTDLPVPERTGIRGDSATLFVSLELSRSTWVATSLAPGSKKMSKHTLVGGDGRKLLDLLARLKTRAEQRIAAPVKVVAIHEVGLDGFWIHRLLEANGVESHVVDPASIAVPRRHRRAKTDAIDGETLLRTLMAWQRGEPRVCAMTVPPSPSEEDCRRVSRERATLLRERIQHTNRIRGLLFGQGITNYNPLHKNRRECLEELRTGDGRSLPTHVKAEILREIDRLELVLRQIGEVEAERDEILRPAEASSPAALLMRLKGIGAEFATVLYFEGLFRHFENRRQLAAYAGLAPSPWKSGSIDHEQGISKAGNPRLRTTMVELAWMWVRYQPDSALSGWFRQRVGSERGRIRRISIVALARKLLIALWRYVTHGEIPAGAVMKPV

SEQ ID NO: 339500 - protein, 462 aa, unidentified
MGRGENVAKKPKKDKKTDNAVLPVMLPDAAGIDIGATEIFVAVPADRAAKNVRSFPTFTQDLYALADWLALCGVKTVAMESTGVYWIPLFQVLEDRDFEVCLVNAHHVKNVPGRRTDVLDCQWLQFLHSVGLLRASYRPDQDVCAVRSLLRHRESLVQMAAAHVNHIQKALDQMNLQLHHVISDITGQTGLAIIDAILAGERNPLELAKLRNERIKASEAVIAKSLVGDYRPEHLFTLRQSLDAYRSYQKLIADCDREIRRLVEEFQSPRQPGVSAGETFPSQDKKGKASTGEGILRRELQRVFGIDLTKIPGIHTGIAQTLFGEIGPDFRKFRSASAFASWMGLCPDNDISGGKVLWAGTRKVNCRAATALRMAAQSLHHSKSALGDFYRRIRAKLGAPKAITAAAHKLARIIFHLVTTRQEFDDSRFGADQLRFQKRQEAKLRARAKAIGFELIPLVQPE

SEQ ID NO: 339501 - protein, 400 aa, unidentified
MRTVFGIDVSKASSEVAILVNGERIHGYTMPNDIIGFSRLLEDLKTVRNPEIIFEATGVYSRRLQAFLEENSYDYTRLNPLEAKKQLDGLRVRKTDKIDAEKLASSQFVLNRKPTYVQEEVYQNLHDLSRFYQNLTEDIVRTKNRLHKVLQIAFPEIENLLSTPTGEQYWNLVSIFPTKHWVLELSEVELKEAIRNSTSKRISENRVGNLTEKLVGLAKQSYAGISKTSPMVEEVKYDAQELIRLTNRREQVLQQLIALAEPLPEYEILLSIPGIAETTATSIIGELGDIRRFKSANQINAFIGIDLKHYESGDFLGQEHITKRGNPYARKILYKCIHNIASASHTNPCHIADFYEKRKRQSQITSTKPHTIASIHRLIRTMYYLIMHNKLYDYTLARSH

SEQ ID NO: 339502 - protein, 304 aa, unidentified
MTEAYDGRQVVGIDLHRRRSVIVRMTEDGRKLETVRITNSPAALRREIVKAGEHPRVVIEATYGWYWAVDVLEAAGAEVHLAHPLGVKAYSYRRVKNDERDSADLADLLRMGRLPEAWIAPPEIRELREITRYRHKLVKARTSYKDQVHGVLAKLGVPVTHSDIFGVHGQDWLDELPMPQPYAGKVASLRQLAGALTAEITLLDKVLADLLDGHEGYHAIQALPGIGPVLAAVIVAEIGDIRRFPGPGQLGSWAGLTPRHYESDTKVIRGHVTKMVCAGGMVPLRRPGGVRWRWLEDWICTGVS

SEQ ID NO: 339503 - protein, 397 aa, unidentified
MYIVGIDIAKRKHEAAVIDGDGAVIIKPFSFTNNCSGYNRLLAMLTKAKLPLDEVSFAMEATGHYWLALFTRLQKEGFRVQVINPVQTNSIRSFYIRQAKTDPRDALLIAEVIRFGHFSESTLHPENIYELRELCRGRHAIVSMQADVKRKVVALLDQVFPEYETAFTNMFSDTSMAILQTCPTPKELSEMPLEELCHLIEVSSHKRFRMAKAQELQELARNSFGFAMAGDVFSTMIRLYAKHLVFLKQQVQEMDRKIAEIMDTLDTPITTITGIGPTLGAYILSEIGDISRFSSAAKLAAYAGIDPTMRQSGEYNGVRNRMSKRGSPYLRHAIWLATSSAVLHDPALKLYFQKKRDEGKPYMASVGHVCRKMVSIIYAVMRDNKAYTPYIPNEISA

SEQ ID NO: 339504 - protein, 361 aa, unidentified
MQIIGCDLHTRQQTMAMLDTKTGELVEKVLVHEASNVRNFYSTLPGPVRVGIEATGSMQWFVNLMEELGIECQVGHPAKIRAAEPRKQKHDRRDADLILKLLLENRFPSIWLPSKELSDLRALLLHRHQWVRMRTRIQNALQAIALANGLRRGPSLWSQAGQCTIASLPLAPHTAHRRSELQAMYVKFEAEIEKLNQRVEEQACERPGARLLMTHPGVGPVTALATDVFLGDPTRFADGKALASYVGIIPSEYSSGGRQRLGGLSKQGNPLLRFLWCEAAVHTVRRDPELQRFYRRKLIQKGLGKARVAVARKLGIRLWIMLRDQIDYNEFCRRGQMRQKNGDACAGMPETRYGAEQSPAD

SEQ ID NO: 339505 - protein, 324 aa, unidentified
MIDGILGIDVCKNTLDVSISSYTKVRTKSFTNSPDGWRHLLDWLIAQKIQRVHACLESTGRYSLGIACALYEADHVVSIINPAQIRDFVRTKLGRNKTDGVDASHIREYCELFKPSPWVPPSEAHRRLGELQTIRSGIVAGLTEWKNRKNSGIVDGEAQALADATISHFTSQLGAVDKAIALTIDNDRDLQSKRDLLLSISGVGETLAGVVLAELPGPDVLRSSAEVVAYAGLNPRQHQSGTSIDRATRISKIGNAVLRAALYMPALRPMRYNSAIVALVARLKSRGRLKPKQIVVAAMRKLLVLCFGVLKTGRPFDAAIAMGG

SEQ ID NO: 339506 - protein, 351 aa, unidentified
MKYYTSQTEYNARVDLHSRNLYLCVMDRAGKILVHENIRDNDLTHLLRLIEPYRHDLTLTFESCFMGAWFADFCADQVLPYVMAHAYYLHTIQGSKHKNDKRDSQELADCLRTNRIPPAYVCPRAVRPIRALVRRRMAFVRNRSRLLGFSMIDLMAHGLKTPQIHARSRTRWCAALRSAFENPFEKLVAEANVATVEHYNRQIDLMEQALVRHAATEDSQDFNLLRTIPGVGDVLALTILYETIDIQRFPTVRDYVSYCRLAKGTEESGGKKLGSRGAKMGNPYLKWAFIEAACLAKRSHPALSKLGARLEKKKGPKKLVNGILAAKLARAAYFMLRAKTGFDPKRLAPAA

SEQ ID NO: 339507 - protein, 352 aa, unidentified
MGQVTMADQQSHVTVGVDSHKDVHVAAVIDQVGQILATTSMATTDRGSGQLVRWAQRHGQVDRFGVEGTGSFAAGLTRYLRARGYQVLEVNRPNRQTRRRRGKSDTVDAESAARAALAGQASTPKAADGTVEMIRALRVARRSAIKARTQAANQLDSLVITAPEELRVQLRGLATARRVEVAAAFRPGSLTTPVAATKLALRELARRHLALTAELERLDTELAKLVRKAAPKLVARRGVGTEVAGMLLVAAGDNPDRLRSEAAFAHLCGAAPIEASSGKTVRHRLNRGGDRQANNGLWVTAMCRMHSDQRTKDYVARRTKEGKSKKEIIRCLKRYIARELYRDLATAVLDKP

SEQ ID NO: 339508 - protein, 409 aa, unidentified
MNKVDIAPFEVFCGIDVGKSLNHIVALDRYDDKPLINRKVPQEEAEIRAALEEAGDFGLALVIVDQFGAFGRLVVGVAKSMDIPVAHMSPRRFRQVAETYGEDKFDEKDAFILADASRTTPRNIEFVGNRAESMAEIKVLSSRRDDIVEERTRCYNRLHDFIHQVSPPLEELFSKRKLHNDLEIRLIARYGGPIGFRQAGRARASTWAAELKYHCVDGPKKVEQVFDVLDRQTVMLPGAAVIEEQIRSIASRIIELLAEEKRLNLMIEQRAKMIPEVDLLQSIPGVGPVYAALIAVEIGDIGRFRDSNHLASYAGVAPRKEESGTSVHKRRKRKGGNRRLKNALMQSSQRSVQCDPLARAYYERKRAEGKKHLQALRALARHRVTVIFAMLNEGTFYEPPVEVDENGRG

SEQ ID NO: 339509 - protein, 344 aa, unidentified
MDTHADTHTAAVVDTAGRKLGHQQFEATAAGYRQLLAWLRSFGTLLVVGIEGTGVYGAGLARHLAAEGVALLEVDRPDRKTRRFAGKSDPLDAEAAARTALTGVRTGIPKDRSGAVEALRNLRVARRSAIDQRADCQRQIKSLIVTAPEALRAQLRGLSITRLIATCAALRPDAARVGEPEQAAKTALRALARRHQALSEEIGELDDLIAPLVTEINPQLLACTGVGADVAGQLLVTAGQNADRLHSEPAFAMLCGVAPIPASSGKTNRHRLNRGGDRQANAALYRVVLCRMRWDPRTRAYVERRTKEGLSKKDIIRCLKRMIARELYYLLRPAQRPENLAHAA

SEQ ID NO: 339510 - protein, 354 aa, unidentified
MLIIGCDFHTRYQQIAMAREETAEMIVERRLDHASGEAQAFYRSLQSFEEPVRVGIEATGPIHWFERLLTELGHELWIGDSAKIRASEVRKQKTDERDARLILDLLLSKRFPKIWVPTPAERDLRQLLWHRHKLVCLRTMLGNQLHALAMSQGLCRKRKLFTKKGRVELQGLGLAPWARRRREELLQLLDQLESPIAELDRAVSEEAKGREDAVRLMTHPGIGPINALAFVLAIGPVTRFPRSRKLASYLGLNPIEESSGGRRRLGGISKQGNTMVRWLLVEAAQQAMRFDPALRQDHLRLKFRRGHAVAKVAIARKLAVRMYWMLRSGADYARLVRRQGSPGGTLMNASSSLA

SEQ ID NO: 339511 - protein, 386 aa, unidentified
MKKNTTTKKSPKKAQTKEKNQIHRMAAKQKLTIGIDLGDQSSRYCIFADGQDPVSEGQLPTTKAGLDCLFAKMPASRIAVEVGTHSPWVSRHLRTLGHEVIVANARQVQLITHSVHKNDRVDARQLARLARADPGLLSPIQHRGEQAQLDLAVIRARAELMEARTKLVNSVRGMVKPLGERLKKCDADQVSVGLGKGLSEGAQAIIAPVLKAVEAISEQIGKYDEQLEQMEKRYPEVKLLKQVYGVGPVISLTFVLTLDDAQRFAHSRDVGPYLGLTPKQRDSGESQPELGISKAGDGLLRSLLVQGAHCILRKGAADSDLRAWGLGKIGNGGKRAKKCAVVAVARKLAVLLHHLLVTGEVYDPHYNSKAAEAAAAKAKSKAKAAA

SEQ ID NO: 339512 - protein, 319 aa, unidentified
MTTSSVVVGVDVAKDRLDVAVRPSGETWSEVNEEVGITALVARLRPLGPALIVCEATGGFERAAIAALAAAGLPVVVANPRQVRDFARATGQLAKTDQLDASILALFAERVRPTPRPLPDAAAQLLDAVLTRRRQLLEMLVAEKNRLGFAPKPLHRGIQAHIRWLERQLDDVTKELAALIEASPVWRAKDDLLQSVPGVGPIVSSTLLGELPELGTLSHKQIAALVGVAPLARDSGTLRGKRMIWGGRASVRTALFMAALCGRRWNPALKRFYERLKAAGKPTKVALIACARKLLTILNAMVRDDKRWAVPAPSVQYSC

SEQ ID NO: 339513 - protein, 352 aa, unidentified
MDTGYDGRQIVGMDLHRRRSVLVRMTEDGRRLGKARITNSPQELQAQIARAGTSPRVVLEATFGWYWAADTLTAAGAEVHLAHPLGVKAFTYRRVKNDERDAADLADLLRMGRLPEAWIAPAGVRELRELTRYRHKLVHLRTSCKDQVHGVLAKLGVPVTCTDIFGTAGSAWLDGLGLPQPYGGKVTSLRHLTGELTGEITMVSAVIADLLAHHRGYQVIQQLPGIGPVLAAVIIAEIGDVTRFKTAAQLCSWAGLTPRHRESDTKVTRGHITKQGSRPLRWAVIEAVQRIPRDSVIGTVKDAITARRGKEAKNIAKVAAARRLLTLVFYGLRDGQIRCLPQAPAGSPGPVA

SEQ ID NO: 339514 - protein, 351 aa, unidentified
MTMVGGFDVHRQQITFDYVDDDGLVHWGQIRPATRDMLRHWLSEHCRDGDAEFALEGCTGWRYVSEELAAAGLGVHVGDPAEIAVLRGPKKRAKTDRADAKLLRTLLLEGRFPESWIPPAHVLEVRTAGRLYCTLMDERRGWQQRIHAQLFHQGCPPIRALLSAAGRAALVAAELSAVGRQYVDAAVRGIDELTPEIEALRTQLVDFARRQAGCRALQAHYGIGWLCAAIMWAEIGDARRFTSSDQLVRYAGLDVTVYSSDTKRSPGHLSRQGCPELRWAAFEAAKCAARRGSPDYAYYRKLAAKREGHNGKNPTLAVERKILRRCYHMLRDLGDAALALPEARPQQEVAA

SEQ ID NO: 339515 - protein, 409 aa, unidentified
MNPLFVGIDIGATQNVVQTMDAHGTLVAKFTVTNDLVGTTGLVEQVVDSVARVGADTVRIGMEATNIYWWHLHQALYNSPALATLKPQVAILNAKVIHGFKKIYPDVVKTDTMDARVIADCLRFGRVRYTPPPDFRYAALQRLTRFRFHQAGSLAQEKNRALNLVFLRFSNYSQECPFSNVFGKASEAVLTELTPDQIADAAIDELIELILQHGNNRLQDLPVIAKNLQTIARKAYRLHPKMQNSVEVALAMSLETIRFFEQQLKKLDKVIAREVRAIPNTLRSIPGIGPVYEAGILAEIGDINRFKNHNALAKFAGLTWRQHQSSTFTAEDIPLSRSGNFYLRYYLVEAANSVRVREPEYAAFYQRKHAEARHHHHKRALVLTARKLIRLVFALLSEGQIYQPRRSIR

SEQ ID NO: 339516 - protein, 385 aa, unidentified
MRNKTIVPREYDVFAGLDVDKKSIAATFSGHQGFIRSLSMPYKVEDLLNHVRNHFADQKVAFVYEAGPTGYGLYDGLAAQGYTCLIAAPSMIPRAPGQRVKTNRLDSKALSESLRGGQLKSIHVPSPLYRQLRHLTQLRDTMMSEAVGMKQRIKSLLLFEGIAFPPAPAGSQWSFIVKAKLRKLPCSNTVRFKLDQLLDSLEFAEKQVFKSTKEIRRFCQTDPELSQCIEYMMTVSGVGWIVASQLLARIGDWRELENIRQLGGFLGLVPTEHSTGDKTDRGPITHTGDGRLRSKLIQASWSAIRKDGELREFFRSVCQRHPRKVASRVAIVAVARKLSVRISVVLMKQRPYEVRKKVHSAPLTQEETSPQGTTRRRAEPGGKNS

SEQ ID NO: 339517 - protein, 389 aa, unidentified
MHIVAIDIAKFHHDAIVVDDDTGAIVVEPFRFGNNDEGFTTLMQNIRPYLKGKHLIGFESTGHYGHNLMMFLLDHKLTVGIVNPLSTKAEREKKIRKTKTDRIDCYVIYKVLSSRDYARMSRKKLKLQEAKTLTRAYNNLMEDIRLYKNRLQKCVDIAFPELNGLVTPYTKRYNAILKEFGSAKVVAKTHLGTIKKVLSIKGRGNHTKVDPHELKTLAQRSIGQNIDANNLEIEYLLGMIEFLEEKKKIYTKKIEEYARQLNSPIFSIPGIGYTTGLSILSEIGDIALFSSATKVVAFAGVDPSVYQSGEYQGNGLAISKRGSRYLRKALYQCILTVCNNSSTFKNYYNLKKSQGKTHLCAQGHCARKLIRVIYKLLTQNIKFDETALV

SEQ ID NO: 339518 - protein, 451 aa, unidentified
MDIVNPRCAGLDVHKRTVVACCLVTGPSGEKVRHLRTFSTMTADLLALGDWLAGLDVEQVAMESTGEFWKPVYNLLEDRFTLLVVNAQHIKAVPGRKTDVRDAEWIAELLRHGLLRGSFIPPLPQRDLRDLTRQRTTLVRERVSVVQRLQKVLEWANLKLAGVATDVLGQSGRAMLEAIVAGQADPAALADLALGRLREKRAALEQALAGRVRDHHRFLLASHLAHIDFLDEQIATFDARIAAQIEPAAPDDPAGPGAEPAGDGERGTAADGPSTGQPATAAPVPWAEAVAWLDTIPGVGQRTAEVLVAEIGTDLSRFASPAHLASWAKVAPGTHESAGKRRAVGIGAGNRWLRETLVQAAHAAVKVKGSFLRAVYQRVAGRRGTKKAIIAIAHKLVTIIYMLLTKRQPYREVSATDLDERRREHLVHRMQRRLERLGYAVHLEPVAPAVA

SEQ ID NO: 339519 - protein, 402 aa, unidentified
MNAVGIDVSKGKSMVTIMRPFGEVVASPFEVTHTGTELSKLADSLLKLTGETRVIMECTGSYYLPIACSLHEAGLFVSAVHAKLIHGFGNNTIRRVKTDKTDSIKIANYGLAHWLELPKYIPEEDIRLMLKAFSRQYSKYSKLKTMLKNNFISLTDHTFPGVNELFTSPPRKSDGHEKWMDFAFKFWHCECVCGLSQNAFVDRYRRWCKKEGYRFGQAKAEDIYISSLGHCCVVPKNDTSKLLVTQTISQLNAVSESLAVTAREMKCLAEQLPEYPVVSEFYGVGDIFGPQLMAEIGEIGRFRNKGSLVCFAGLDAPPYQSGTFESANRHISKRGSPHLRKTLFQIMDVYLKHAPADESVYQFLDRKRAEGKHYYSYMTAGCAKFLRIYYARVTAFLDTLEY

SEQ ID NO: 339520 - protein, 313 aa, unidentified
MTLLNTVFSHFIGCDVGKSEIVIHNSFDGSTTSLPNRAKSLRAFAAKLPANCLVICEATGGYETLLLDTLLNADIAAHRADARKVKAFIRSFGIRGKTDAIDARALAQYGRERADKLRLWKAVEAAQRELQGLVLLRDDLVKERVAHKNRLNAPGPASVKAMLRPVIECLSKQIGKIEAQMKVLTLANAKMASDGKILRGVQGVGPAVANGLQGLVPELGSLNRREIASLTGLAPFPNQSGSRERRRKTRAGRPVKSLLFMAALAASRAKAGLGAFYRRLLANGKTKMVALVALMRKIIVIANARLRDARLNA

SEQ ID NO: 339521 - protein, 374 aa, unidentified
MAQGTRWVGLDAARVSALVAGQTQNDGLVKGEAGRLPIVMGLDQHRAQITAEWIDLSSGEISRGRVVPADRASVRKFLKRFAGRDLEVALEATTGWRFVAEELERVGAGVHLAEPAETSGLRGPKKRPKTDWADARHLRELLLIGRLPESWIPPDHILDLRARVRCRHTLSHQRTECQQRIQSVLYHHGCPQRRQPMTGEGREWLDAQPLPAAAREQITVAVAMINALDVQVAPLTARLYDYAKRQTGCKALIAAYYGIGGLTAVTILAELGDTRRFENSRDVVRYGGLDITVKQSDQHRAPGHLSRQGPPALRWALYEAAQQARHPRSPDREYYLQAAERIGGNRACLALARKLLKRCYHTLRDLGEDALTPA

SEQ ID NO: 339522 - protein, 342 aa, unidentified
MQIIGCDFHPSFQQIARLDTETGEYEQRRLLAEEAAEFYAKLPGPVLVGMEACGNTLWFERLLSECGHQLWLGDAGKIRAMAVRKQKTDRRDAELLLQLLREQRFPRLWVASEEQRDKRQLLLHRHKLVGMRRQIKNQLQHLALNQGVQQKRKLWSATGRKRLEQLALTGWTAQRRDELLSLLDHLEPRIAKLDQAALAAAQQHAVARLLETHPGVGPITALAYALTLGEVERFAHSRQVVSYLGLNPAEHSSGGRQHLGSISKQGNPMLRSLLVEAGQSAARRVPELQRAYQRLKHRKHSSVAKVMVARKLAVRLYWMWKTQQPYSAAPMQGSPSHPVAEP

SEQ ID NO: 339523 - protein, 345 aa, unidentified
MVVLGADLHKRSHTIVVIDGTGRQLAEKTIPATDAGHVELRRWAAQWSERTWGLEDCRHLSRRLDAELVRAGESVVRVAPKLMAGARRSSRAPGKSDPIDALAVARAVLREPDLPVATLDGPDREVRLLVDHREDLVGERTRHEQRLRWFLVELAILEPAPRSLGRIVVQVALRTALAERTEPIARFARDLLDRIVELSGAIRSLEREIEGHVRILAPMLLAMPGCGALTAAKIVGEAAGISRFHSKAAFAIHNGSAPLPVWSGNVVRHRLNRGGNRQLNAALHRIAITQIRLAGPGKVYLDHRLAAGDTRTEAIRALRRRISDEVFRRLRADETARSTGLAAAA

SEQ ID NO: 339524 - protein, 339 aa, unidentified
MEVTTIGLDLAKNIFQVHGITKDEEVAFNKPLRRAQLLPFFSKLEPCLIGMEACSSAHHWGRELTALGHDVRLIPPIYVKPYVKRGKSDAIDAEAICEAVTRPTMRFVAIKTVEQQALLSLHRARSLLVRQRTQLINGLRGMVAEFGVYIAKGLARVIGFAEDILMGEVLDLPEIANEVIHNLCEHLMALHTRIRWYENRLKLVAKEDARVRLLRTIPGVGAVTASAIIASIGDGHQFSNGREFAAWLGLTPANKSSGGKEKLGRITKMGDQYLRSLLVVGMTSLVRQTKSHPERASKWLISLLERKPARLATVAMANKTARIGWAVLTRNEPYTPHTA

SEQ ID NO: 339525 - protein, 416 aa, unidentified
MPFALPEAQVFTGIDWAAAAHAVCVMNAAGKIVAEFTIEHSADGIGALIRRLARFGDPGDVPIAIERPDGRLVDLLLEAGHPVVPVKPNAIKAWREGEVLSGAKSDAGDAAVIAEYLRLRCHRLAPAVPYSDETRALRTVVRTRGDLVDLRVAATNQLSALLEAHWPGAKAIFADVESPISLAFLARYPTPAAARHLGEKRLAAFLVKHGYSGRRPAAQLLDRLRSAPAGTTGEALTEALRDAVLALAAVLSALNSAVKDLDRSAAAHLGEHPDGPVFTSLPRSGQINAAQVLAEWGDARQAYEHPDSVAALAGVTPVTNQSGKHRGVHFRWACNKRFRQAITTFADNSRHASPWAAKIYNDARAAGKDHPHAVRILARAWIRVIWRCWHDGVPYDPTRHGAAAALAEHATGPFAA

SEQ ID NO: 339526 - protein, 369 aa, unidentified
MGDRITYVGLDVHKDGIVVAVAEGGERGEVREYGRIANTPAALRRLACKLGQQGVELRFCYEAGPCGYGIQRQLSALGHECIVAAPSLIPKRPGDRVKTDRRDAASLAKLHRAGELTAVWVPDPGHEAMRDLVRARLDAVRALRRARQQLSGFLLRQGCHYGRPAWTKLYRRWLAGLKFEQAVHHIVLEDYIEAVEAAEARRDRLTAQIAAMLPDWTLAPVVAALQTMRGMALVNAATLVAELGDLSRFANPRQLMAYLGLVPSEHSSGASVKRGGLTKAGNSAARRLLIEAAWTYRFPARVSRELRLRQEEQPRPIREIAWKAQLRLCARYRKLAHSGKPANVVTAAIARELAGFLWAIARSVPPAAG

SEQ ID NO: 339527 - protein, 341 aa, unidentified
MSELYAGLDLHSGNTYMGILEKGSSRRIFEKRVRNNLDELVRTLNPYREEIRGIAVESTFNWYWLVDGLQEAGYSCVHLANPAAIQQYKGLKYADDRHDAFWLAQMLSLGILPEGYVYPREERPIRDLLRKRSFLVKQRTAHIISLQSMIERNTGVHMNANALRKVKAEDIERILKEDHLVLLGTTSLETIAFLGKNIRNIEKAVKSEVKMWDAFEKLHMVPGIGDILAMTIMLEVGDISRFAKVGDFSSYCRCVPTGRLSNGKSKGKGNAKNGNRYLAWAFTEAAYLSLRQSPRIAGYYKRKASRTHRMVAIKTIASKLARACYYILRDGVEFKEEMLFC

SEQ ID NO: 339528 - protein, 274 aa, unidentified
MKIIGCDLHARQQTIAMVDTETGELIEKTLTHEGDAVREFYAGLEAPVVVGIEATGAMQWFLELLEELGIECRVGHPAKIRAAETRKQKHDRRDAHLLLDLLGMKDRFPEIWMPSTEQRDLRTLLRDRHQWVKIRARLQHTLQAIALNHALRRGPALWSAAGQNALQALPLPPYSSQRRTELLRLYVQLQKRILELDKEVEVQARQRPQARRLLTHPGVGAVTALATEVFLGDPNRFQTGNQVASYIGMIPCEHSSGKRQRLGKLSKEGNSLLR

SEQ ID NO: 339529 - protein, 349 aa, unidentified
MAEQYVGIDLHRRRSVIVRLTPAGEVLEIVRVNNDPVALSLELVKAGPDPEVVLEATYGWYWAADLLQACGAQVHLAHPLGVKMFGYQRVKTDARDSRNLAELLRMGRLPEAWLAPPQVRELRELVRYRAKLVALRSGLKAQVHAVLAKEGVRVPMSDLFGVAGSRLLDELHLGRAYGLRIASLRRLLVAYDQEIARLGQEISSVLAGDVGYLAIQAIPGVGPVLAAVFVAEIGDVHRFADAPRLCSWAGLTPRHRESDTTVRRGPITKQGPRLVRWAAVEATQRLPRASKQAADFHRIADRRGTGIGRVAAARKLLTLVYYGLRDGQVRCLTPAPRQGHDRLPHDVEP

SEQ ID NO: 339530 - protein, 453 aa, unidentified
MVKRISPGTKSKKHSRVFEQINHNAAGIDAGAEFHFAAVPEERARPSVRKFSTTTNGLYELADWIIAAGVDTVAVEATGVYCLPLLEVLEARGIAVLLAKPASLKSVNDRRKTDMLDCQWIQMLHSFGLLRGSLRPERLVAEFRAYSRQRRMLIEHASIAIEHMKKALTSMNVRVELAVADITGKTGMQIIRAIVAGERDPAALAAMRDHRCGKSERAITEALFGKYCNEQLFILEQALRTWDHYQALISQCTERLHECSARFSKVADRKNLPQPHVPDREHKHCLPLDSRALYFEMLGQDLTQIDGIGTSTVSTFIAEIGTNVDAFATCKHFTSYLRLSPGSSISGGKNKSGKNRSTTNRLATALRIAAQTLTRSQTALGAFYRRKRSQLGAPKAITATAHKLARMIYFTLKCQRPYVDPGPNAYAERHRDKIVRAMQKHAAQLGYRLVKAA

SEQ ID NO: 339531 - protein, 416 aa, unidentified
MSLALPEALFFTGIDWAAETHSVCVMDAGGKIVAGFTIEHSADGIALLVRRLARHGEAGVMPVAIERPNGRLVDLLLEAGHPVVPVSPNAIKTWRDGEVLSGAKSDAGDAAVIAEYLRLRAHKLKAAAPYSDETMALRTVVRTRGDLVEMRVAATNQLSALLDAYWPGAKAVFANVESAISLEFLTRYPAPAAAAHLGEKRMAAFCLKHGYSGRRTAAELLARLRAAPPGAAGGSLTEALRDAVLAAVGVLTALNASVKSLDRSVAAHLGEHPDGATFTSLPRSGQVNAAQVLAEWGDCRQAYGGPDSVAALAGVTPVTKESGKHRAVHFRWACNKRFRAAITTFADNSRHASPWAAKIYDDARASGKDHPHAVRVLARAWIRVIWRCWLDGVPYDPAAHGAAAALARQTSEQIAA

SEQ ID NO: 339532 - protein, 430 aa, unidentified
MTSTEHTSGGTALVAIDIAKGRNEILIELPEVRRRRRLTVTNCRGEHDRLVAELQALGRHVLNGLEPTGHYHRPLAWRLLQAGFDVRLVSSVALARTRDALHNGWDKNDPKDAQVILHMLRIGAAKAYHDPLAHGINDIQGLSMTHDMVSRAKTEVLHRIQTHYLPLYFPEAERFLNSTRSVWFFAFLERFPVPAAITATSKELFVEAAWNVVGRKVSKARLLADIYETAQASIALPIAPNAPAIAMFRLILAEARHLIRQRDAIEQMAVELLDSHADYHRLQQVPGIGPINAPTILAEAGDLRRFGHHRQFLKFCGLDLATHQSGQFRGRTKLSKRGNARLRRTFWMAAQVAIRQRKNSFRDKFERYVTRDRYDPDLRRKAFTAITAKMARVVHALVKAGADYRPFVEGPVPGGGTSLYRSRRGASATP

SEQ ID NO: 339533 - protein, 339 aa, unidentified
MKYTPVGVDIAKHLIQVHFIDEHTGEVIDKQLRRQDFLMFFCNREPCLIGMEACGGAQHWARELTKLGHKVRLLQARFVKAFVMGNKNDVMDARAIWMAVQQPGKEIAVKTEEQQSVLVLHRSRRQLVKFRTMQINSLHGTLLEFGETIHKGRAAMEREFPEALERMKERLPPYLITVLENQYNRLNELDSLIEDIEKQLTSVAKQNETCKRLLDIPGVGPLIATAAVATMGEASAFKSGREFAAYVGLVPRQTGSGGKIRLLGISKRGDTYLRTLFIHGARAAALLTKEPGPWVTELKKRRPASVAIVAMANKLARTVWAIAAHGSKYDKNHVSIRPY

SEQ ID NO: 339534 - protein, 340 aa, unidentified
MKTVALDVHAASFTLEVLTANGQIAKRVTRETSGRNLIEVIESVIGPKTLIVEESHLAQWVKRTVERYVDKVIVCDPQRNAWIAKDEFNDDSSSAHKLAVLHQGGFLKEIVHPDEEGAHLRALFLHYYDLNQQLTRFKNKLKGTFRQEAIATSGPGIYKEDQHDKWLKQLRGQKHLQHAARQRFELIDLLSDLKKQTFEAMVKAARKKKAFELLQSIPGAGPVIATGYLALIDTPQRFSRKNKLWRYAALGNTRHTSDDEVYQDRASKSGNRVLKWVVIEHFLHAVEISKDGNRFKRQYEALRKKGLDHTPARRVICRALLSTVRAMWMKEEKYREKPLS

SEQ ID NO: 339535 - protein, 482 aa, unidentified
MKHKRHEKTKKAICGPTQGNWQQMNRKQRREMTRKIQSEDISLEVIHPDAAGIDIGNESHYVAVPPPRDSQPVQRFGCTTAELKDMAGWLQQCGIRTVAMQSTGVYWIAVYDILEEAGLEVYLVNARDTKNLPGHKSDVQESQWLMKLHTYGLLRNSFRPSQEIRTMRTYWRQRNDLVQSAGRHIQRMQKTLTQMNLQLANVLSDISGVTGQAIIKAILAGEHDPDKLAEFRDPRVKARKGQIARSLEGNWQEDLLFVLQQEQDGYEFCQKQMTECDQRLEHYLQQRDDRSAGASLPEEKRKERRKKRKGNKPRFDLRTGLFRMTGTDVTRIDGIDVMTATTILSEVGWDMSKWETEDHFVSWLRLCPDNRTSGDKIIGKGRLPTNNRVSTALKMAASTLRTSQTYLGAQFRRLRSRLDTPVAIKAMAAKLARLVYRMLRYGMKYVDRGAEFYEAQHRQRQIKHLKSKASKLGFQIIQVPAA

SEQ ID NO: 339536 - protein, 382 aa, unidentified
MQPIDTVNPTILLAIELSASTWLVAARLPRLEKPHLHRIDGGDTAALLALISSLRARSARGLDATIGVVCCFEAGRDGFWLHRLLTAHGVACHVLEPTSILVNRRARRAKTDRLDAEGMLRVLAAYLRGDHQACSMVRVPTPEEEDAKRTHREREKLVQERLRIENRIEALLFTQGIRKRPSLRSWERDLAVLRTGDGREIPRHLRAELDRLRRRLVMALELIREVEAERDQAAETKPQDQACRKIAALCRIRGIGENFAAVLTREVFYRSFDNRRQIASYVGITPMPYQSGGMDRDRRISRAGNPRARTTMIQLAWLWLRYQPGSELAEWFRERVGTLAGRTRRIAIVAMARKLLIALWRYAETGVVPAGAEIRAETTVAA

SEQ ID NO: 339537 - protein, 483 aa, unidentified
MHPQTTNRILQTFDVYRFSFESAGALALDNEYSGFAVVPAHYIAFAERKQARPCRSIYHFGRADMKPTDTQPFTAYVGIDWGDAKHDICLQAAGSDRREFDCIAHQVPRIDEWAKALHQRFGSPIAVALELSKGPIVYALQKYDFLVLFPINPSTLAKYRVTFKPSRAKDDPTDAEMALDLLLHHPERFKPLQPQSVAMRTLLSLTEHRRELVDDKTRLTNRLTDNLKQYYPQVLDWFEQRDTILFCDFLSRWPMLTQVKRARQNTLKAFFYAHNGRRPQVINARLDSIKATVSLTDDRGVIVPCKLRTLTLVAQLRITLQAIDQYDHEIAGLATTLPDYALFQPLPGAGPHLTPRLLVAFGEDRERFQSADEVLKYSGIAPVTERSGKKHWVHWRLQCPTFLRQTFIEWAGQTINKSFWAGAYYRQQREKGSSYQVAVRALAFKWIRILYQCWKTQTPYDETKYLNALRKRGSPLIKNLSLI

SEQ ID NO: 339538 - protein, 353 aa, unidentified
MIERSKEQIAFVGIDLAKRSFHLYGADAAGREVLSRKLTRKQLSALVARLPACTIAMEACGSAHDWARRFRAHGHEVRLIAPQFVKPYVKSNKNDAADAEAICEAVQRPKMRFVAIKSVEQQDIQAIHRMRSLAVEQRTAQVNQIRGLLLEYGIEIAKGRAGVRGRLAEILEDADNGLSALFRAELHALAEQLRHLDERVAHYDRRIAQIAQDNAQARTLMTIPGVGPKGATALLAAVGEDPRLFKNGRGLAAWLGLVPRQHSTGGKPQLLGISKRGDVYLRNLLIHGARAVLRQVERKEDATSRWAGALKARRHSNIAAVALANKMARMAYAVLSTGKPYEPQAGAAPTAAA

SEQ ID NO: 339539 - protein, 355 aa, unidentified
MDNTKYIGMDVHTESISIAVRNGAGKIVMECVIETKASMILEFINGLRGDLQVTFEEGTWAAWLYDLLKPHVTELVVCDPRKNASMREGNQSDKIDARRLAELLRLNHLSPVYHGEHGLRSLKELVRSYLTITKDLARVMSRVKAIYRSWGIACTGTQVYAPRHRVEWLGKISEPGVRRRAEFYYQQLDALRALRQEVRRDLLAESKKHQAWKRLCEIPSIGPIRAAVLLGILQTPHRFRSKRQLWTYSGFGIETQSSADHRSVNGQLQRAKKQICIRGLNRNCNHDLKNLLRVRRSWHSSKPGPFQEFYTALLSKGIRPEMARLTLARKIATIALIVWKRGASFDAQHLKPQTA

SEQ ID NO: 339540 - protein, 330 aa, unidentified
MEYSYYAGIDVSLAKLTVVILDANLQARPALEFTNDAKGHQQLLRQLRRLQAGVHAGLEPTNVYHLAIARALHAQRRIDVSVISTTAARHFAQARMQRTKTDRVDARMLAEYLEACQPTPWQPPRDVAVRLRSLTRFIASQVERQTALKCQRHSAKRSQADLLVLQTINAELKTIEQRIAKLRQRALQMIKADPQFARWFKLLVSVPGIASVTATYLIGEYGMLPAGLSKKQWVALAGLDPQTRESGKSVNKPRHISKKGGKPVRRALFLPASIAVRRCAEVGRYCAKIQARCGGKLPALCAVMRKLLQAIWGMLHYDQPFNPARFCPNG

SEQ ID NO: 339541 - protein, 431 aa, unidentified
MSKYLNSLVVGIDVASEFSFAAFLTPNGDKYQKPFKILHTAEGFKYFLEQIKKAEEEFSTKPVFFMESTGVYHLTLFHFLKDNNFETFVINPLVTNCNKNKDIRKVKNDRNDALSIASLGKFEDIKVSSDSDIEILTLKLLVRDYYKLIDTRSIFKKKLSTSLCITFSGYQNVFANTCGLVSINILKKYPNPQAIISAPKQDIIELMLNSRKGIKWAEKKYTKLIASAENAQFVSLTSPWLSVSITTSISIYEAIDDEVAALLKKIEEFINSDQMTSAFRKNILLLMTIPGIGYNTAITILAEIGGIDKFITPKQLVAFFGVDPAVNESGKFKGDRVKMSKRGTRFGRRALYAAALASIRTKRNGEATNQVLLNYYKENLKGKKAKVALVAIMHKLIKYLFAVLRNQQEYQVRDPKIHQKMFLENKTIIAA

SEQ ID NO: 339542 - protein, 345 aa, unidentified
MLYIGIDVHKKNLQICVLDGKGKRMSDCRLENRPESVSGYFAKIDTPAGVALEATHNWGMLYDLLSDRGFDVHICHSREAKLIGLASVKTDRVDAFKLATLLRAGLLPECYVPGVESRELRSLVRGRASLMSHSTAIKNQIHAILRANWVSSPWTDTFGKSGRQFLENLDIGDSYKLVIVSKLLVLDKICEQVSLLNAEIVHRAHLDARAMLVTTAPGFAEFRAVMLLSEIVDISRFASAEKLVSYTGLNPREHSSGEKTRRGKISKEGSSWLRWIFVEAAQQAIKEEGKIQDLYLRVSEKRGHNRGVVAAAREMVVSIFWMLKRMEPYHASGKKASIVSDSEVG

SEQ ID NO: 339543 - protein, 340 aa, unidentified
MDEVITVGLDLAKSVFQAHGADASGEVVFRKKLRRDQVAPFFSKQQRCLVAMEACAGAHHWAREIGALGHQVRLIPPAYVKPFVKRQKNDAADAEAICEAAQRPTMRFVAPKSAEAQAAGVIFRTRDLLVRQRTQLINALRGHLAEFGHVVAKGPAHVARLVELVRDPSSGLPEEARSVLLVAAESLEALKAQITVLDRQIEARAKASPLARRLMTIPGVGPVVATALVALTPAPSSFRRGRDLAAWVGLTPRQHSSGGKERLGRTTKMGERSLRRLLILGASSVVKAAARSGARDPWLARMLARKPRKLATVALANKTARIVWALMAHGGSYRAPIATA

SEQ ID NO: 339544 - protein, 336 aa, unidentified
MTHTTVTAIRSPSNTNLPDHVVAFEVSKHQLVVHTLPADRQVVIANTPAAVRRLLSAQVRHNRRARLGSMLVLCEATGGYEAHVLEAAIELGIEAHKAHGTRVRHFAKYKGLKAKNDPIDARLIALYGLQTENLVRYVPPSAGLKALRALKERRHDLQVMLQAENNRLEHVTDARVLKSLKASIRSLAKALKAIEAEIALLLEREPTLARKAELMCTVPGVGITVATTLIAHMPELGTLPRAKAAALAGVAPYDDDSGERKGCRSIDAGRSAVRRCLYMAALVAKRTCPHLRDFAQRIIARGNPPKVAVTAVMRKLIVIINAVLASQQSCHYAKST

SEQ ID NO: 339545 - protein, 355 aa, unidentified
MKYYSSTTEFNCGIDLHAHQMYVCLMDRNGKKLVHANVRHNDFDYFLKLVAPYRHDLTVCCECMFGWYWLSDACQAAGLKFVLAHALYLKAIHGGKNKNDRIDSEKLAHLLRTNLIPPAYVYPAAQRPLRALLRQRIYYVWSRAELLARIQSHQLAYNRPVLRQTRPNRDPWEAQLLAQEPDPVRQLALHNDLALIRHYDQQITVLEEELNRLTKRTAPRDYALLQTVPGIGEHLGMTMLYEIGDIERFPTVKNFVSYCRLVKGTVASAGKIKGLRGAKLGNPYLRWAFGEAAIIAKRDHAVIGPLAQRLEARMNGNKFKANTVLAIKLARAVYFMLRQHTVFDPDRLVAALARN

SEQ ID NO: 339546 - protein, 412 aa, unidentified
MDRLVERCAGLDVHKDSVAATVRFPGPGGQRLQETRTFSTTTRGLLTLADWLASYGVTRVGMESTGCYWKPVYYLLEERFECWLLNAQHLRNVPGRKTDVADSAWICQLVEHGLVRASFVPPKPIRELRDLTRYRKAQIEERSREVQRLDKVLQDAGIKLSSVASRTLGVSVRLMLEALVAGTHDPELLAELACGRLRRKLPELREALTGRFRSDHHGLLVSQILAHIDYLDETIAFLSARIEQVIAPFSRERELLETIPGVARVGAEVLIAEIGVDMSVFPSSAHLASWAGQCPGNHESAGKRRSGKPRKGSKWLEKTLTESAKAAARTKGTYLAAQHARLRGRRGPGKATGATRHSILVAAYHLLERRLPYQELGADYFDQRRSLEQRTKRLVRQLEQLGHTVTLEPLAA

SEQ ID NO: 339547 - protein, 348 aa, unidentified
MKLDNRDYKGKKVFIGIDVHKKSYVIAAICEGVLVKRWTCRAFPRTLLDQIKSFFKGAEILSAYEAGFSGFELHRLLEENGIKNIVINPGSLALEANSRVKTDKKDAKKISEQLAAGLLRGIYVPSRQEEDRRSLTRGREQVVRRRQSIGNQIKMKLHYLGIRVSDTRISESLMKEVEVLELSPGHKMVLLELVEAWRTETQRIKRFNKALREQAKEDSLERIYRSAPGVGVLSARVLSNELGDMGRFNNVRELSASSGLTPSEYSSGEHIRKGHVTRQGNPRVRAIIVEVAWRAITKDKSLREVYENIKQRQGGKKAIVAVARKILIRLRRCLKEQVLWQDLSLKAA

SEQ ID NO: 339548 - protein, 361 aa, unidentified
MEQFIGCDAHKKYSVFVAINERGEASGAVRVDHERVPYRQFLERLPAGSQIALEAGGHYYWMVDEMEYAGHNPRLVHPLEAKKRMGKTGKKTDKVDAKGLGILLRNGTLPEVWIPPAELRDQRELLRLRMFLVQQRTRFKNRIQGALARYNIQLGVRDVFSVEGRRRLGVQLTELPQHTRASVELELVTLDFVDMQIEEAEKRLETVLQVSAEADLLKTLPYVGPILSMVMALEIGKVERFPSAAHLASYAGLVPRVHSSGGHTRLGQICGDVNQYLKWAFVEAGNLVVIHQKHLAGRHVVRLYQRVKRKRNYQKAVVAVARHLAEAAYWILKKQEFYREPQSKLKSSKAEIANALSSTHG

SEQ ID NO: 339549 - protein, 371 aa, unidentified
MKKARQAVDTLALEAVDEHGPPRQSFQSPNSCLGLTSPHLARMGQKGRSHYMTEAQFYVGIDVSKGYLDVAARPTGEQWRVSNTEEGLGQLVERLQGLSPALVVLEATGSLEVPVTAALGATGLPVAVVNPRQVRDFARATGKLAKTDRLDAQVLALFAERVRPTPHPLPDPQTQELNALLARRRQIVAMLVTEQNRLGTALPSVRPGIQEHIAWLEGKLGELNDGMGKLLRESPIWREKEDLLRGVPGVGPVVTLTLLAELPELGVLGRKQVAALVGVAPLNRDSGALRGKRTVWGGRARVRAALYMAALVATRFNPLIKAFYQRLLAAGKAKKVALTACMRKLLTILNAMLKHRSPWQPTVPQLSGLCS

SEQ ID NO: 339550 - protein, 343 aa, unidentified
MWHYVGLDVSLKQTSICVVNETGSVVREGVVDSDPDAIVAFVRSNAPGMLRVGLETGPTATWLWTELKRRGLPVICIDARHAKAVLKMQINKSDRNDAAGIARIMQIGWFKEVRVKDIHSHLVKALLVSRALLVKIKRDLENQIRGLLKNLGFVIGRAKFNVFAGRAEELIEDRPELIAIVAPLLKARKAIEQQIDDLDRRVLKLARHDPEVRRFMTVPGIGPITALCFKATIDNPARFKRSRSVGAYVGLTARRHASGEIDWSGRISKCGDAMLRSYLFEAAGVLLTRVPKWSALKAWGMRLAKRNGLRKAKVAVARKLAVILHRMWIDRSEFNWSKKEVAA

SEQ ID NO: 339551 - protein, 411 aa, unidentified
MEVLHQRCAGLDVHKKKVVAAVRLVEENKVITEVKTFATTTAGLLALADWLTQNGCTHVAMEATGVYWKPVWHVLSDGEIELILANAAHVKNVPGRKTDVNDATWLAELLAHGLIRASFVPDGQTQELRILMRTRKQLVHERSRHIQRIHKTLEDANIKIDAELSDLLGMSGRAILNALVAGETDPVRLAALAHPNVKAPQATLQEALRGRVTHHHRFLLKLHLEQIDGIEAALGTIDVEVEANLAPFRIAVELVSTHPGISKLGAHTIVSEIGADMSRFPTAGHLLSWACLCPRSDESAGKRRSTRLRKGARWLKTMVVQCAHAAKNKKGSYYQAQYHRLCGRRGPQKAICAVAASMLTAIYHMLKNGTVYQDLGADHFKRQSKTTQTMRLVKRLENLGYAVEIQRIVAA

SEQ ID NO: 339552 - protein, 342 aa, unidentified
MREKRSIGIDLHRRRFTCCVRLEKGRNYLSEWSLEQLPQFIRKLRATDEIAVEVTGNTRLFYEAVAPYVARVVVVDPHQFRVISHSVKKTDPHDARNLALYLAKGLLPEVRMKAKRQAEVASLTQTRDRLVKLRTALKNKVNNLLSARGIELDKESLSSEKGLAWVLEQKLEELAHLELEVIVEQIRSLNRSIARLERVIEEASQKLPGYRNLTSIKGIGSLGAGILLSVIGEVSDFAHEGKLAAYFGIVPRVQDSNETEHRGRITKRGSKLGRTTLVQCALIAKRYSPYLDRYYERIRARRGTGKAIIALARKFLSIVYYTLKNNWIFEDFPNFVLAEAKT

SEQ ID NO: 339553 - protein, 372 aa, unidentified
MRRQRAALERRGNIHPAMKNIIPSTTIGFDLGDKKHAICVLDQDGAIIDERTITNHHESLRRLSIKYPKARIALEVGSHSPWISRFLKELDHEVLVANPRKLRAIYANNRKSDQNDARMIARLARVDPELLYPIEHGTEQSQRDLLQIKLRDNLVRQRVDIISSVRFTLKSLGVALPSPNTECFAKRCRTLLHGGHAELLAMVEPSLQVVDLMTKNIRELDRAIEQLCAEKYPATTRLRQICGVGAITSLCYVLTIEDPERFDSPRDVAAYLGLVPKRDQSGNLDKQLRISKAGDAYLRRLLVGAAQYILGPFGPDSDLRRHGLELAARGGARAKKKAVVAIARKLAVLLLVLWKHPRDYEPLRQTPPPKAA

SEQ ID NO: 339554 - protein, 412 aa, unidentified
MQAIIERCCGLDVHQETVVACLLIGAPGAQPKKEVRTFRTVTRDLEALRDWLQEAGVTHVGMESTGVYWRPVYAVLEGYFELIVGNARHIRNVPGRKTDVKDSEWIADLVRHGLIAKSFVPPKPLRELRELLRYRRKLVESQAAERNRLLKLLETANIKLASVASDVFGVSGRAMLRALIAGEASPQAMADLAKGQLRRKRADLILALDGRPEEHHRFLLAMQLRRLEAIEADIAALDLRIGERLEPYSAPHALLMQIPGVDWVVAAVIIAEIGVDMSVFVSAYHLSAWAGVCPGNHESAGRQKSGRARKGNIHLRTILVSAAISASRTKGSYLKDKFHRLKARRGGLRAALAIAHKILVSAYHMLAKTLPYRDLGEAYLDQIGQTRTVANLKRRLERLGYRVILEPNAQPA

SEQ ID NO: 339555 - protein, 338 aa, unidentified
MFFIGVDPHKTSHTAAVLDAHEHLVSEVRVGADRSQRARLMAFAAGFEPRCWAIEGATGTGALLAQQLVAAGEIVLDVPPALSARVRLLDNARSDKTDAHDARSAAVVALRHSKLRTVGLEDHSVVLRLLAKRHHDLVAHRTRAVCRLHTVLCLLVAGGLPKGLSAARAASELRRIRPTDQVGIERRRLAGELLAEVRRADADLIELKARIAVAVTASSTTVTDVVGVGPIMAAYLIGYSGDVRRFPTAGHYARYNATAPIEASSGPNPRHRLNPRGNRQLNHALHIVAVTQVRNDTPGRAYYLRKQAEGKTRKEAMRALKRRISDAVYRQLLTDTPR

SEQ ID NO: 339556 - protein, 429 aa, unidentified
MNSTQNKKIEQVKETTMIVGIDVGSEKHYFRAFNWRGIELTRKPVAFSNSMEGFNSFYNTIVELMQKSELEEALVGIEPTGHYWFALGQFMGEKDIKFVMVNPHHVHKTKELDDNSPSKNDRKDPRVIAGLVRDGRYFYSYMPTGVYAELRNASNRRFVLVEEQTRAKNRLQKWIAVYFPEYKGIYTHIDAKGGLLVLKQAPTPEEIVKLGEEGIIKIWKDAKLRRNGNKKALKILNAAMRSIGLRTGLTEARMEIQDLIEDYELQTKRLERVNDLIKELCQQIRYADKLLEIKGIGITTVAGFIAEVGDITRFDSTKELQKLAGLELVADSSGKHNGKTKISKRGRKRLRYLLFEAAISVVGKNEEFKEIHRYYTTREKNPLKKMQSLIAVACKLIRVFHVILTKGVSYDASKMLEGIRHPGEQLKAA

SEQ ID NO: 339557 - protein, 391 aa, unidentified
MVYVGIDVAKDKHDCFIVNSEGTVLYDVFTIQNNADGFGELFFKIKSASKDLSKVKVGLEATGHYNCNLLGFLKNKGLTTIVLNPLYTSLSRKRTSLRKTKTDKVDARTIASMIMSDVSLKPYSDKLYYNEDLKSLTRYRFDKVSERSRLKQSVKRLVTILFPELEKLVSTVHGSAVYALLYEFPGAHQIASANLKHLTKLLADASKGHFKRATADEIREAARRSISYYLPAKSLELRHTILLIRELNAQISEIEVEIKALLDKIDSPIFSVPGIGPNLGAVILAEIGDFNRFSSPDKILAFAGCSPSTYQSGQLYSSHAKMEKRGSRYLRYALLNAAKRVCTWEPTFTAYLSKKMSEGKHYNVAVSHAAKKLVRLLYHLEITGDSYRRAS

SEQ ID NO: 339558 - protein, 343 aa, unidentified
MGEVSTIGLDIAKSVFQVHGVDVDGTVMIRKRISRAKVLEFFASLPSCLVGIEACPTAHHWSRKLQALGHTVRLMPPSYVKAYLKRSKNDANDASAICEAVTRPSMRFVPTKSEQQQSGLMLHRSRQLLVRQRTMLSNAIRGHLAELGIISAKGRNGTAELLAIIANKKDDRIPAAARLSLDVLARQYAAITTEIGAIEKHIHAWHRSCEESRRLEEIPGVGPIVATALVAEVGDWKAFSSGRSLAAWIGLVPRQHSTGGKDRLGRISKQGNRYLRWLLVAGAMAVIRYARQHGTKRAWLARLMDRRPIKVAAVALANKIARIAWAMMVRGERFNEPKLLPAV

SEQ ID NO: 339559 - protein, 314 aa, unidentified
MTQLTIGIDVSKDTLDVCRLPDHTHHRFANDRVGICALIRWIGATPVDRIVFEATGAYHRVLERSLSDTGLPLCKVNPWQARRFAEARGTRAKTDKIDAAMLAAYGAMLRPKPHEARSQALVTLGELTMARRALVKDRTATKNRLHVLTATLLRRQATQRLKQIELHIKAIDSQCREIIEADPTLRSRHRVLTSIPGLGDITIVTLLAEMPELGSMDKRRAASLAGLAPTTRQSGKWKGKSFIQGGRAKLRQALYMPALVAIRFNPVLKAKYRQLIEAGKPSKVAITAIMRKLITIANALVRDGRLWNQLPTLT

SEQ ID NO: 339560 - protein, 405 aa, unidentified
MLETIVKKVAGLDVHKMVIVATVLLTQEDGETRKETRKFGTFRKHRRQLARWLKRSGIELVVMESTGIFWKSIFETLETAGIKTYVVNARHVKNVPGRKTDVMDSEWLATLARAGLLKPSFIPPKDLRELRLIGRHRMKLHGMLAGEKNRLHKILDDAGIRLGGVVSDINGVSAKEMVTGLIENKPVEELVLCARGRLKAKAEELHDSLSESISERHKFLLQKIQNHIQHLEQEIWEMDDYLFAAMTPYQEQWGIMQTLPGVDKFSAAMLIIEIGTDMEQFGSSGQLASWAGMCPGNNESVGKRKSGRARKGNRSVRRVLCEVANAARKTNSQFKGKYQGLVIRRGHKRTIIAVGHKILRVIYSMLKNNQPYWDPEIDYEALTVKRNAPRWLRALTKYGYLPAGA

SEQ ID NO: 339561 - protein, 387 aa, unidentified
MDVLYQSCAGIDVHQANIVVCILHGPLTSTRPKREMATFDTTTKGLRACHDFLSQFHVEAVGMESTGVYWRPVWHALCDDFELILAQPAHMKAIPGQKTDKKDAHWIAKLTRIGLLPRSFVPDETIQELRELTRQRKHYVESRNRETNRIHKILQSGGIKLTTYIEDIMGLSGRNLLQLLVDGTPITPRIVHQSVYTSLKKKVPQLLEALDGYFSDHHRFMLKQSLEIYDFYQKQIELLEERMNVYLSQYENHVEILDSIPGIDVITASVIISEVGVDMSQFPTSGHLASWAGLCPGNNESAGKKRSTKIRHGNSYLKKCLCQAAFAARNQKGSPLAERYYQIQSRRGSQKATIALAHQLLKIAYILLKEQITYPEFLAQKKTTRDE

SEQ ID NO: 339562 - protein, 418 aa, unidentified
MKKIKKSRFIYNTKTMIVAIDIGKDKNSVRFRDKEGNDSNPFEFSNTRAGFDKFLGMIHWHKAKYDAERVVVGFESTGSYGIPLAHFLDKHNITTYMINPAHTKRVKEIRDNSPMKTDEKDPCVIADIMQLGCTLSVIIPKGAAADLRNLVHARERANEMNNSYHNRMQELVFEIFPEFHHHIKNLLSKTALYLLEHYTLPDQLAQLTIDELSAILCKVSRGRFSTEKATSLLEAARNHGGISEGTSIIAFEIRQLVQLINNIQDYMSELETHINDTLQTVPSSKPILSIRGIGAITTATILGETAAFAGFTHAAEIEKLAGLNLFEISSGRHKGQLRISKRGRSLLRKMLYFAALNVVKKRGAYHDKYQEYLKRGMPKNKALIAIARKLVRVIFAIARDNAEFDANYETVQAYKKAA

SEQ ID NO: 339563 - protein, 410 aa, unidentified
MNKQKANTVFVDHRNIVGIDIGKRKHAATAVTPKGAIIASLKSFDNNKAGVDLLERQVLVPATGKCKPRVAMEATGQYWNALHDELQRRGYPCVVLNPIQTGNRGAKRIRKTKTDPTDSELIARTILAGDAQATLVPDESIYELRLLVRHRWRMIRVHGVILRYAIGLLDRVFPECDGVFCKPFLTSMRALIREVGLTPKMLVANKAKAMKTLEKASRKRLATETINELLKRAEQSIGTRQGDSVINAQFRMIADYLDFAESQVQTINKELKERMTALDSPLMSLGIGAEVAATIFAESGDITRFPGPGEYAAFCGLDPSVRDSGDSIRGISHISKRGSPLLRWALYVSAPTMVTKHRDFTKIYERHLNKKRGHRFAMTVVAHKLARVIWRLFKDGRSFAKRPPKRLSKK

SEQ ID NO: 339564 - protein, 420 aa, unidentified
MRGLRTKRVRTVKEGTLMATVDIGMASNTGYCITADGRDVKPFKFSNTREGLDKFWDMIVIIKNRFACGEVIVGYESTGPYAEPLAHYLMNKPVKIVQVNPMHTKRMKEVNDNSPLKTDDKNPRVIADIIRLGHALTVIVPEGDAAYLRRLNNARERHIGERTALLNQLQQLVFLIFPEFKTVMKDIKVKTAIHVLKKYTTPDAVGKLNIELLGEEMRKKSYGRFGIKNAESLINHANNTVGIKEGIKGLALDIRHILMQLEIIDGFIAEIESEMEAVLEKIPYSPKLLSIKGLGIVSVAGIIGEVGDFMKFGTQSEIMKLAGLDLYEISSGKRRGERRISKRGRSLLRKILYYAAIQTIRKNGIMCEYYAHLITGGMKRMMALVAIARKLLRIIYAIVRDNSEYKADYELTRKVIKRAA

SEQ ID NO: 339565 - protein, 359 aa, unidentified
MLEPFNPSKSLTALEQDSTVIAVIEMSRSKWLVAAVILGVERQPLKKIDPDEEMLLKLLHRWRNKAGRAGREIKRIVVAYQAGRDGFWLARWLRARGIEAYVIHPTSVAVLRDRRAKTDRLDTELLKRAFPGWLRGEKRHCSMAAIPTLEEEEEEDARRPNRERENLVTERTRLVNQMKAILVRFGIRTFKPTLRKADEKLEGLRTVEGSRRTRVPRCAANSCACASCASRSARSIRNGYANSRRLQLKRGPHAMVRLLARVPGVGVETADLLVNEILLRHLRDRKAVARYAGLTGSPDESGRRRRERGLARADSARVRCGMIQLAWRFQNDDRLKQSLGFSDNDIRLLCANTAPRTTG

SEQ ID NO: 339566 - protein, 503 aa, unidentified
MLRDAIGLDPDAKGFASAYVKTVAEKVKIKTFLSDQENLAKFITWVKKQGDVIIAIEGSNGQSKPIEKALRSEGIVFYSFKPADVSKFRKAVLGQNKNNERDAESVARYAMALESQGKLESLKRVWFPNEELRMLTRGYEQKSKAVTSEVNSLWKLIRAASVDLYLTLGGNNPESKISENIIQKQGILQLLSEKPDLLEWKMLSEEDFLRAMGNRNYTGRKELIKELKKITKAFVPQSAVLTYMIKNSADQVLSLSRQMKEIRQLLDTITQKNESVQILKGYKGISTITATTVMAEIIDIRRFTTDDNLASYSGLCRREYSTGEKRGEVANSIFNRRLKDAFMNAAKNFVRFNPDSHLSGYCRNLIKGGMKVTEAYKRVARALARRFFRQLTSLHQAEREDVGADEMKMRESDMASGNTNRSDNNNHSSNISSFSQSHNKGESQKKSSERHSFSIRGEKVNLLVGEKPLPLTGSKTHSLSGKIKISYSPVTVPNSVITNREEE

SEQ ID NO: 339567 - protein, 378 aa, unidentified
MSSDSVVLVGLDVHKDSIMVAYSVGFGDVENLGKISPRATDIDRLCKRMQSKASQVVFVYEAGPCGYGLHRQLTDKGHRCMVCAPSLIPRKPGERVKTDRRDAARLVRSLRAGDLSPVHVPSIEDEACRDLVRAWGAARQGLKQARQRLKAFLLVHDVRYTGRANWGPAHRHWISQYSFDLPWQQIAFEEHRRTIEDRLTQCARLETTLREAAPQWRFYPVVEALQALRGVQFTTAIGLMAELGDLSRFDHPRQLTAWLGLTPSEHSSGEKRQLGSITKAGNSYARRLLIEAAWSYRHPARVSPAIQKRHDGLPKNVIDRAWDAQLRLCKRYRKLTARGKHRNVAVVAIARELAAFIWDIARMTPVTAAMQEGRANQA

SEQ ID NO: 339568 - protein, 346 aa, unidentified
MSVYVGIDVHRKRSQVAVVDQSGEVLVNRNVPNGVEPILRVIGGLPPGTAAAFEAAYGTSWLVELLEGYGFTPHLVHSLRCKAIASARLKNDKVDAATLAQLLRADLLPEAWIAPPPVRQLRALLRHRVALVRLRTLLRNRIHAIVADYGHDRPAGVYWSGPGRAWLGSLDLPAVSRELVEDDLGLIGALQERIDRLDWEIRQRARSDPRVKVLTQLPGTGPFTAPVILAEIGEVSRFGPARKLASWAGLTPTVRGSDRVAHYGHISKEGSVWLRQVLCEAAQTAKRSPQFAASYQAIAKRRGKKIATTAVARKLLTRAWHLLAAAGRTPAPQPAATAAVAQAGTR

SEQ ID NO: 339569 - protein, 319 aa, unidentified
MFNLGIDVAKAKLDCALRLPNGKHRNKVVENNHKGFIALSEWLLKQDASSPRVCMEATGTYWEKVAEYLAGCGMLVSVINPAQIKAFGASRLVRTKTDKVDAQLIADFAHERQPEPWLAPSPAEQALRAMVLRLEALQTMRQQESNRLDVAREAVRQGIVDHITWLDGQIKELIRAIKRHIDDDPDLRGKRELLDTIPGLGERTIPVLLSYYANPERFDSAKQAVAFAGLDPRQHESGSSVRGKPRMSKVGHSFLRKALYMPAMVTVYRTAWGKRFGQRLRAAGKAKKLIIGAMMRKLVHVAFGVLRSGKIFDPTLHAA

SEQ ID NO: 339570 - protein, 387 aa, unidentified
MDVRTVNNLPPAAAHDEAVRCLLAIELSKKSWIVAVNTPLSEKISRYRLKGCDWKGLLELIEKIRARVARELNRPVEIISCYEAGYDGFWLHRLLEAHGVRNYVIDPASIQVDRRARRAKTDNIDVAQLLRSLMAYLRGDPKVWSVVRVPSVAEEDARRLHRERDRLINERVQHVNRVKGLCAVHGIYDYEPLRSNRMLRLEQLRTGDGRKLPPYLKAEIVRELQRLELVLTMIKTIEAERKAIISDKSPHLNVKKIQDLIKIKSIGPGISTVLVGEVFYRKFNNRQRLGSYVGLTPSHFQSGPMSRDQGISKAGNPKARTVMIELAWIWLRYQPNSPLSVWFHQRVGTAKGRIRRIAIVAVARKLLIALWRYLETGLVPTSAVVRG

SEQ ID NO: 339571 - protein, 341 aa, unidentified
MDVSVLGIDLGKNSCSLVGLDATGKVVVRRRMRRDTVITYAGTLPACVVAMEACCGAHHMGRALARQGHAVRLMSPEYVRPYVKAQKNDDRDAEAIAEAATRPTMRFVELKTEEQLDMQTLHRIRDQLVGDRTSLMNQIRSLLLERGYIVPQGRAKLAVRLGEMLDGDKPVLGSRIHRLVSDMRLRWIALDDRIADLNAEFTEAARSDERTRRLLTIPGIGALNATALVAAVGDARTFGRGRDLAAWLGLVPRQATTGGKPRLLGITKRGSRYLRKNLIQGARASLPTMSKSDTRLGAWLRGLLSRSHHNTVVVALAAKMARIVWALLRHERTYDPAAQAA

SEQ ID NO: 339572 - protein, 446 aa, unidentified
MKQKIEMTVKNLNAAGIDIGSKSHFVAIGQNAEEIKEFGVYHSDHVAIVKYLKDNNIKTIAMESTGSYWQGLYVVLVEGDFEVLLVPGSQTKGFRKTDVKDARQLQQLHSLGLLSSCFLPDNFTYRVRELSRHRKSMVRDGAKYSNRMQKCLRMMNLRLDVVISDITGVSGLKIIKAILNGERDGKVLASMADCRVKNSKEKIEDALQGNFHVELLYELKDNLELYETIQAKINNLDSQITKLLNEAPEIKNSEVNMDEIQLTKKHVRGKKQTKIPIQKLSYLLYDTDLSAINGVSINTILTIVSELGTSTDKFRNSKAFVSWLRLAPNNKISGGKVLSSRTPKGSNPLTIAFRDAANVIGNQRSGELTIFFKGIAFKKGRCAAITATARKLATIIFNMIKNKEPYNPKKDEVIKIKIEQKKVNNAKKILEKKGFIVIDNQGVMVS

SEQ ID NO: 339573 - protein, 357 aa, unidentified
MWALIRLPLFRGATHADDHDNRSRHCQISFPVHGVDAGGQVVVRLQLKRRSVLAFFQKLSPCLVGIEACASSHHWSRELQAVGHTVRLMPPAYVKPYVKRQKNDMADAEAICEAVARANMRFVPTKTPEQQSCLMLHRTRHLFIRQQIAVINSIRAHLAEFGIVAPVGRKGVTELLHIVADPSDKRVSEVARACLAALGTQLLSIKKQILEFDRMIMAWHRSNQTSKRLHYIPGVGPMLATALVASVADPSTFRSGRNFSAWIGLVPKQHSSGGKERLGSISKQGDRYLRGLFVAGALAVIRYAKIHGIGHRPWLTALLGRRPTKVAAIALANKIARMAWAVMAKGERYRNPVALAR

SEQ ID NO: 339574 - protein, 428 aa, unidentified
MANQADRTPGCVLVAIDIAKWWNAALIEYPDGKRQRFQFKHVREDYDRLVKLLQSTGSSCRIAFEPTGVYHRTLAYRLLQEGFHVCQVSSVAGARYRDAMFNSWDKNDPKDAQVILELLKQGVTQQYHDPLVKGTHDLEEISKTYELISRARTKLRHGIITHYLPLHFPEIERFWYSSRNDWFVRFLMQFPTAAAVAALTREEFVAVAWEVVGRKVDKRRQLEEIHELAQKSIALPLATDSIAVETFRLQLSRYDALNQQRNALEARAHALLRDRRDYQHLCEIPGIGPIIALVILAEAGDLRRFSHHKQFLKYCGLDLAKAQSGVSRGHERLSKRGNARLRCALWQASISAIRMRENAFRDKYTRYIAADPENRDRRRKARTAVTAKLARVAYSLVKFDRPYRGRFEVGLPSGSISLHAALEATRTS

SEQ ID NO: 339575 - protein, 333 aa, unidentified
MKKIIHFIGIDVSKDTFDLALIKNNDPGQIMQKLFSNNITGFKNLAFWMKQQSVCYEDTVFCIEHTGYYSKPLAKFIQAQKGNLWMEMSLKIIRSLGIQRGKNDKIDARRIAQFAQRNQQDYKPYNPPRVIIEKLKVLLMLRQKLIDNRTSIVVPVNELQYIDKQAGKEALHIVSSSLKAIKKNITGIEKKIDDLIAADKALSEQCNLVCSVPGIGKITFCYLTYFTNEFQNYSQPKQLACYCGVVPFEYTSGKSVKGKPKVHNMANKFMKKLLHLGALSAVNYYPEFKAYYERKVNEGKNKMLVLNNIRNKLIIRVAAVIRNNQPYKINISA

SEQ ID NO: 339576 - protein, 426 aa, unidentified
MKNLDVLSTLFVGIDVSAASNVVCAMDFHSNKLLEFSVSNNHPGAVNISERICTLMDGSSFKTVVFALESTSFYSIHIANFLASDQSLIPFNPFVYCLNPKMTANYRKSFIGMDKTDPKDAFLLADFARVGRINTQPWRGSQFLALQRLTRHRLHIVEAMSREKAYMVSNIFLKFSELSVLKDDQHPFTSNYTATAEAVLTEMLTVDELVNIPVEELISFICNTSRNRFHDPEKVAAILQKAARDSYRLDKCLYEPLTISIASSFNLISAYQSEIKSIEKAIEKTIRGLNPSEYQCLLSIPGIGPVYASGILAEIGSVSAFHSQDAIAKYAGLVWKQNQSGNFQAQDTSLSKAGNRYLRYYLIEAANSVRRHIPEYNDFYHKKFAEVKTHQHKRALALTSRKFIRLIYGLLDKNQLYSQLKVILTT

SEQ ID NO: 339577 - protein, 391 aa, unidentified
MKVTRIGLDIAKQIFELHGVDQRERAVLRKTLKRDRVLEYFAQLEPCTVALEACGGAHYWYREISKLGHTVRLLPTNKVKPYLDGNKNNANDAAAICEASGRPSMRFVEPKTGVQQDLQALHRVRQVNVRHCTLLANQIRGLLLEYGITIARGLAALNRALPELLEYDEQRLSPMLKQLIAAQWRMLKLHRRQIEVYDRRIAGIAKNDASCRALLKIEGIGPITATALVAATGKGQQFKNGRHLSAYLGLVPGHSNTGNKTVMLPITKRGNRYLRTLLIHGARSALYAARNKDDSRSLWLQRLQSRRGNNIAAVALANKNARVAWAVLRFGQTYRPDMGHARQSSATPLQQLQRQPQGRLTLKPHGAPSRVQNRHFPGPPPSGEGRAGKML

SEQ ID NO: 339578 - protein, 341 aa, unidentified
MAIVGGLDVHRGQITYDHVDTVTGEVEVGRIAPANRAEFRNWLGRFDGRGDVSFATEGCTGWRFVVEELEAAGVVAHLAEPADTSTLRGRKKRAKTDRADARHIRSLLVEGRLPESWIPPAQVLETRIVSRSYVALMDQRRAWQQRIQAQLFHQGVDKQRGLLTEAGRTHLTDADLSPAGREMVEMALRIIDTLGGEADLLRRQLQSFARRQPGCRALVNELYGVGGLTAAVIWAEMGDTRRFNSSDQAVRHTGLDITVYESDGKRSPGRLARQGPPALRWALFEAALTACRESSPDHSYFLEVAERVGRKRAYLSVARKLARRVHHILRDLGDQAWQEVT

SEQ ID NO: 339579 - protein, 363 aa, unidentified
MKNYIFVGCDSHEKTLVNKIAHNDGPLETKRFSARRAGRQKLIENLRERSRQAGGAQVVVAYEASSHGFILCDELRAAGFLCHVLAPTKIERSIKQKRNKNDDRDAERLLDIVRGHYLAATKMPAVWVADLQTRDDREPVRARQDLSEKQTTVKTQVQMLLKRQGIEKPEGVGTSWTKRYRLWLEALSGEGPAIQSGMRQTLKTLLRQLQFLEHEIEQMDQAMRELANTPRRKPIVDELMKEKGVGLATAMKYVTDIGDFKRFNRGRQIGAFFGLVPSTAESGENNDRKGHITREGSPSARKVLCQATWSRVQHDKQEREVYRRLVARNPKKKKIALVACMRRLAVRLWHIGFQAQLKMEAAG

SEQ ID NO: 339580 - protein, 368 aa, unidentified
MKEVTTYVGIDAHKKDLFIAMLIGHQTVPVTWQLANEPNGVRRLVRKLEREAPGPVSVFYEAGPCGYALQRQMTTPRVSCEVIAPALIPRKPGDRVKTNRRDARKLVELGRAGLLTAVQPPTPEDEAVRDLARARDDAREDLQRCRHRLGKLLLRRGLHFCGRNWTRAHRQWIDGLAWAHAAERAVVDDYRLAIDQTEARLQELDTRLTEVAETEPYREPVGWLRCFRGIDTLTAMLILAELHDFRRFASAPALMAYLGLVPGENSSGDKHRRGRITRTGNALVRRLLIETAWHYQHRPSVGVALTRRRKGQPARVIAIADRAQQRLCRRFRKLAAEHKPAPKIAVAIARELAGFLWAALQPVYVPVK

SEQ ID NO: 339581 - protein, 454 aa, unidentified
MAKSKRSSSMPSIHPNAAGIDIGSRFHVAAVPLDRTEEPVRTFKSFTGDLHELARWLKSCRIETIAMESTSVYWIPAFEILESYGFEVFLVNAREAKNVPGRKTDINDAQWLQKLHQFGLLRASFQPSENIAELRAYLRQRERLNDYKASHIQHMQKAMMQMNIQLHHVVSTITGRTGMEIVRAIVAGQHNPDELVKFRDIRCHNSVEVMKAALTGNYKAEHLFALTQALELFDIYTEKIENCDRIIALVLQRLQELTPDPQQIMPKAKHQECNKNAPSFDVRAALFNFMGKDLTQIHGLGPYLALKLVAECGTDMSRWPTSKHFTSWLCLAPGNKISGGKVLSSRTRRTASRATALLRLAATTIGKSDTALGAFYRRLASRTGKAKAVTATARKIATLFYNTLKYGMDYVDKGADYYENQYRDRVLINLRRRAEAFGFTLQEKVLPGIAVEVS

SEQ ID NO: 339582 - protein, 343 aa, unidentified
MDHFAGLDVSVKETSVCIVDDTGKIVREVKVASEPVALLAVLTPAYHFKRIGLEAGPLSQWLFSALAEAELPVVCVETRHMQAVLKAQINKTDRNDARGIAQMMRVGLYRPVHVKTLRSQKLRMLLTHRKLLQSKAIAIENDLRATLRNFGLKVGMVGTARFEARIKELVENLPDLVALVEPLLIVRRVLREQIVILHRRLLAVVRDDEVCRRLMTVPGVGPVVSLTYRATVDVPARFRKSKAVGAVFGLTCSKYQSGEIDRSGRISRCGDEMMRVMLYEAAQSMLRSKKWSWLKAWAMQIARRRGMKKAIVALARRLAVIMHRIWVDGTEFRWTREQAPAAA

SEQ ID NO: 339583 - protein, 338 aa, unidentified
MRLYCGIDLHSTNNYLGVYDEQDRGVLCQRLPNELGVVLSSLEPYKAELVGVVVESTYNWYWLVDGLREHGYRVLLANPGGNEQYNGLKYTDDRHDSRWLAHMLRLGILATGYIYPKEERPLRDLLRKRMRLVQHRTAHVVSVENTITRNTGRRLSWSRIEELTDDQINKLLGAELIRMAARASFEVIKILDEQISEIEKTVKARARLRDEFELLKTIWGIGPILALTVMYETGEIKRFPGVGDYCSYARCVGSARWSNGKKKGENNTKNGNRYLGWAYVEAAHFAARFYPRAQKFMQRKLAKGNRALAAKALGHKLARASYYVMRDQVEFDPAKLFG

SEQ ID NO: 339584 - protein, 411 aa, unidentified
MDKIYDSCCGIDVHKKLIVACLRKGNRQEVREFGATTRELLELADWLKTSDCKMVAMESTASYWKPLYNILESSDLNAMVVNARHMKAVPGRKTDVKDAEWIADLLQHGLLQPSYIPDKDQRELRELVRYRKSLVGERTRELNRLQKMLEGANIKLSGTVSDINGKSARSILEYLLTGECIDGAKYDEMYEQKVIAHNLKATKEQIIDDLNGVMTPLQRRMMKELLSHLDELNTHIKNLDDEIDNFMKPEEKQASQAIQDVTGIGNTSAQAIISVIGTDMERFSTDRHISSWAGLCPGDNESAKKRKSGKTRKGNSLLRTTLITCAHAAVKNKKSYFYAQFMRISAHRGKKRAYVAVAHSMLIAIYHILKDGVIFKDLGADYYNQFNKERKINAYLKKLKALGWEAPVVAA

SEQ ID NO: 339585 - protein, 361 aa, unidentified
MHATTVAVDLAKSVFQIAVADDKWKVIEQQRLTRSQFERWFHNRDVGLVVMEACGSAHHWGRWLNRLGIEVKLLPAAYIRAYVKRNKTDAADACALLEAARCADIVPVRVKSVEQQALQGLHRIRSRWMGTRTSRINTLRGFCREFGLVVPQGARTGVEAISRVLADPNSAIPILIRESMKLLIEEIRLLEQRISQLEKELTSLARQSPACTELLTIPGIGLLTATAMVAATGGSVSHFKDARHFASWFGLTPKEFSSGNSRKLGRISKKGDRYLRMLLTHGARAVLRAAELARRAGKTLDGLRTWATEIQARAHHNKAACALANKLARVCYAVLRDHTPFGNPQPRQEKKLTRTAFAIAA

SEQ ID NO: 339586 - protein, 322 aa, unidentified
MNTVAMPLGIDVSKAKLDCALWLGSKYRSKAFANTPEGFARLSEWLHQHGADQVHACMEATGVYWEAAALYLADAGQRVSVINPALAKAHGQSLGLRSKTDAVDAKLLADFCREKQPPTWTPPSEAERRLRALVLRHQSLVEMQIQEKNRCESLREEVRASVETHLVWLASELERIEQAIAKLLDDDDHLRGQRELLASIPGLGERTIAVLLAYGVSGERFQSARQFVAFAGLSPRLHESGSSVRGRPRLSKIGHAFLRRALYMPAMVTLYKTAWGKRFQHRLAAHGKPPKLIIGAMMRKLAQVAFGVVKSGKPFNPALHGA

SEQ ID NO: 339587 - protein, 337 aa, unidentified
MSLYIGVDGSRDTLAVALFRAGQDSSPQYLGSFPNRLEKFETLFRQVQQQSRGEEVIWVIEPCGGYERPLMYWLYEHRQCILYPNPRQVRQWQQGRGYRAKTDPLDSQMLALYGAEHRQDLHPWKPWPEPAGHLLRLAKRWRELEVERQREQNRLEAYLSQGISPDAPEVRDLQEHIQFLEGLIRRTKKHIGRLYRDFPDLDGLRRRLLSVPGVGEKTVHALVALLIRWAQLGRRDAKGLVAYLGLDPRIHQSGKRPPRGRISKQGDTRWRSLLVAAARGGLKGTSSPLARFYRRLRQRGKPHMVALVAAARKIVVWAWAVYCCGEPFDLRRHIARV

SEQ ID NO: 339588 - protein, 467 aa, unidentified
MVHGVPPLFGLSHIHNLAMGLTEVAALLALEPFLAMVVLGWPPFFNCQTCILRTLKLCAELLPKAPLRAPCAFIGGIHTRKYAAVAANPDPVAVIRFDVVDGARSRHRCAIGCFVGSESHEGAVQMQISTIGLDIAKNVFQVHGINANETVVVRKRLRRSQVLAFFKALPPCLIGMEACATAHYWARELTKLGHRVRLMPAKDVKAYVKRNKNDAADAEAICEAVRRPTMRFVQVKSAEQQGQLMQHRTRDLLMRQRTQSINALRAHLAELGIVAAQGDKGVKELLSIVADEKDARLPIDARASVIVLAAQLQAVQTLIGSIEKRIKTQHRSNEASKRLETIPGIGVIGASAIAATVADPTVFRSGRNFAAWIGLVPRQDSTGGKQKLGPISKQGDRYLRRIHVVGAHSVLRRAKQNPEKYFWLTQLLARRPFKVVAVALANKMARMAWALLAHGGTYRAPVLAAAA

SEQ ID NO: 339589 - protein, 296 aa, unidentified
MDVHNRYLTVAILDDDSTDPEECRIKAERDELEEFAREHQGARAAIEAIRNHWFVYDCLEPNLDVSVANPHETSLIGDQKVKSDRLDAKRLAVLIRVDALSASYIPPDEFREARKLVRRRKALVDDRTSAKNRVRAALADRGITYDGDLFGEEGREFLADEELPLSSADRHIIEADLEVIQSLDEQIDRLQQEMDEIAATWSETQLLMTVPGIGPCLAVTIAAEIGEIERFDNKKQVVSYAGLDPRVRQSGEKETTDAITKEGPPVLRWALGQAALIISKINLYRLNTSRYSVRQL

SEQ ID NO: 339590 - protein, 412 aa, unidentified
MDVMHPRVAGIDVHEAFVMVCCRIVRPDGQVDKITQRFSTMTRDLLALGDWLSDDRVTHLAMESTSVYWKPIWNLLEDRFTILLVNARHVKQLPGRKRDVSDAEWLAQLLQHGLLKASFIPPQPIRELRDLTRHRTTLQEERTRVVNRIHKVLEDANVKLSAVVSDIMGVSGRAMLRAIVAGETDPRRLADLAQRRMRAKLPALEAALTGRVRAHHRLLLTTLLDQVTFLEQQIADYDRHIAQAAAPFALALTQLRTIPGVQGRTAENLLAEIGADMRAFPSERHLASWAALCPGHHETGGKQKSGRTRKGNRWLRAVLTQAAWAAARTKGSYPAGQFRRLAARRGKTRALIAVAHSMLIAVYHMLRHNVPYTDLGAAHFDRLAPQALTRSLVQRLERLGYDVTLQPTNTAA

SEQ ID NO: 339591 - protein, 339 aa, unidentified
MGLHCAVDLHGNNGYYGIVDETGKRVFKQRIPNSLPSVLTALEPYREQLEAGVVVESTYNWYWLVDGLQANGYGARLANPAAMQQYNGLKNTDDETDAFFLTEMSRLGILPEGHIYPKEDRSVRDLLRRRLLLVRQRTAHILSFQNLIARERGEQISSNGIQKLWPNEVARFFDDERLVLMGQTNIEMIRFLTKHIRRIEKVVLDAIKLRPEYKKLLTVPGIGKILALTIMLETGDINRFEKVGNYSSYSRCVKSSRTSNEKKKGENNRKNGSRYLNWAYIEAANFIRRYCPEAKRWHQRKAARSKQVVATKALASKICKACYFIMRDQEDFDVSKIFG

SEQ ID NO: 339592 - protein, 410 aa, unidentified
MEVLYPHCAGLDVHKDTVVACVRHMANGEVRREVRTFKTTTKELLALSDWLAGEGCSHLAMEATGVYWKPVWHVLSDGDFALLLANAAHVKNVPGRKTDVNDATWLADLLAHGLIRGSFVPDEQTQEMRTLLRTRKQLVRERSSHVQRLQKTLEDANIKLDSVISDILGLSGRRMIEALIAGETDREALAALAHRRIKATPDELEAALRGRVTRRHRFLLRLHLQQIDAIDAAIEEIDREVDADVEPFRGAIALLTTIPGVSVLSAEIILAEIGRDMSRFPTAGHLISWAGLCPKNDESAGKRRSTRMRKGAPWLKTTLVQCAWAASRRKASYLQAQFHRLRARRGAKKAIGALAASILTTVYHMLISGEFYHDLGPDHFDRRANGRQTMRLVTRLQNLGYAVQITPLAA

SEQ ID NO: 339593 - protein, 378 aa, unidentified
MGKLIRIGMDTSKSVFQLHGVDSAEQPVLRKKLRRHQILSFFEKLEPTRIGIEACGAAHHWARALKALGHEVVLLPAQYVKPYVKRGKNDAADAEAICEAMSRPSMRFVPVKSVEQQAALMLAGTRDRLIRRRTQLTNMIRGCAAEFGLTAAKGLSKIEPLLLRIDTDGTLPELAKELFAAHAKEYAQLKGQIEKIEAKLMAWHRHNELSRRLVKVPTIGPIGASLLAMKVTDPKAFRSGRDFAAWIGLTPKDHSTAGKTRLGVITRAGDEALRSTLVAGATALIQQVRKGRGHPSPWLVELLKRKPPKLAAVALANKTARVAWKLMVSGETYNPARARPVSREGRAAALHEGSASHPSLAPSTTPGRASFAVATSNA

SEQ ID NO: 339594 - protein, 346 aa, unidentified
MTIVETRAITGGVDTHADVHVAAALDPIGGLLGVEEFPVSPAGYARLLGWLGGFGAVALVGIEGTGSYGAGLARHLACAGVRVVEVDRSDRQDRRRQGKSDPLDAVSAARAAQSGRARGAPKGRDGAVEAIRALMVAKRSAAGERTRTINQARALLLTGPDDLRARFAKHAPAALVTGIAALRPRPGAAAGYATRIALRELGRRAVFLDGQLERLDELIVPLVTARAPGLLALYGVGPNTAALLLIAAGDHPGRLRSEAAWAHLCAAAPIPASSGKVTRHRLNRGGDRQANHALWRIVFTRMGSDPATRAYVERRTKEGKSKAEIIRCLKRYVARQVYPHLRPAGD

SEQ ID NO: 339595 - protein, 343 aa, unidentified
MEHYVGLDVSLKQTSICVVNQVGSVVREGVVDSEPEAIVTFVRSKAPGAVRIGLETGPTATWLWTELKQLGLPVICIDARHAKAVLKMQINKSDRNDAAGIARIMQTGWFKEVRVKDLDSHSVRALLASRALLVKIKRDLENQIRGLLKNVGLVIGRAKFNVFAVRAEELIEDRPELIAVVGPLLKARKAIEQQTDDLDRKVLKLARYDAQVRRFMTVPGVGPITALCFKATIDDPTRFKRSRSVGAYVGLTTRRHASGEIDWTGRISKCGDAMLRSYLFEAAGVLLTRVPKWSALKAWGMRLAKRNGLRKAKVAVARKLAVILHRMWIDGTEFNWSKKEVAA

SEQ ID NO: 339596 - protein, 430 aa, unidentified
MCYRIAGIDVHKKMLAVVVADVEVEGEYEFERRKFGSNPEHLRLLAEWLLEREVEEAVMESTAQYWQPVWGALERYWRPSCQKREGAGPMSGKLHLAQAHSNRGRRGRKRDFPDAERLVKRLVAQELVLSFVPDPEQRLWRTVTRRKLQLRRLLVRMQNQLEALLEEAHIKLSSFVSDLLGVSARRMMHAIAKGETDPAVLAAMADKNLRATSAQLADALGACTELNPVYRRLLKMALEELEFLERQIGLLDQEMANLLRPHEDAVKRLAEVPGLGADSAQQIIAEVGPTAATFPSSKELSSWVAICPGDDESAGVNHSHRSPKGNRQMRRLLNQAANAAVKTKGSIFQIVYRRLVPRMGHNQAIGAIAHRLCQLIWILLHRKVRYEERGPAVTESSKRKRTARMVRELRRLGYRVETATSQLVQLANPA

SEQ ID NO: 339597 - protein, 310 aa, unidentified
MSETKYVGVDLSKLECVVDLSAEAKPRAFANDASGHAALIGRLPVGAHVVCESTGGYQRGLVKALRAAGVKVSVVMPGRVRAFAYARGLRAKTDPIDARLLSAFGAALELVAPPPPSDAQLELQALVRARQALIAQLNDEASTAEHCTLAFVQAQAEERRALLRRQVRDIERELRVRIAANADWKWRSERVQEVCGIGEVSAWIVQGDMPELGKLARGQPGALLGVAPDPNDSGPRQGRRHISGGRSAARKVLYMAALTASQRNPVLAPLYRRLVEERQKPKRVALTAIMRKLVELLNHLLADPHFKLVT

SEQ ID NO: 339598 - protein, 310 aa, unidentified
MDAIVVGIDVSKNRLDVAVRPTGEVFAVVRDAEGLDALVARLKPLAPVAVAVEATGGYETVVAASLAAADLPVVVVNPAQVRSFAQALGKRAKSDPIDALVSAHFVEATRPEIRPLPDAETRLLGDLVSRRRQIVGMITAERQRQKILTGKRLQRSIARLLAALQKELSSLETDIDQAVRGSPAWREKEDLLASVPGIGKIIARTVMAELPEIGTLDRRQIAALVGLAPWTRQSGTWKGKSFIGAGRAAVRDALFLGAMVAARHNPELKLFRDRLVQAGKPKLVALVATARKLLTILNAVIRDRKPWQPA

SEQ ID NO: 339599 - protein, 330 aa, unidentified
MSKKIIAQNEEVVIGADVSDKTHHIAVSIGGKVIRDKALKPTNGTWEEFLRTRLPGCRVKVVYEAGPQGYTLYDVIRALGHEAVVIAPVKNPGVKTNTRDARMIVHDYLAGRSSAVCVPSFEKRVARQTLRVRDMLMKEVKRTQNRINAIMRFHAISGTMRAVKEDSAGALSNCLAMLADMLAQLRVKINEIDQALAAIAESEPFREQVEKLTKIKGIGTLSALEIVLGVADISAFRNAAAFASYTGLCPGEWSTGEKRRVGRITRRGPGRLRGVLVQCSWSRVRFDAAEKERYTALKQRKGGKKAIVAIARRLAVIIWRTLNSPAPCAA

SEQ ID NO: 339600 - protein, 394 aa, unidentified
MGMFAGIDWGGKSHQLAVVDDDGRTVTNQAFDHDVAGVAGLVDTLDEHRFKLEGVAIERAEGLLVDAIQEAGLTVYAVSPRISARARERYQAAARKNDRFDAYVLADTLRLEGWRWRPLAVPSPLLAELSAVVRHRRQCARSQLAVEAQLRATLEAYHPGVVALFSSVDRDATLAFLRDYPTPQAASRVGTARMERFQDRIGYSGRVAPDVLVERLREHLLSAGPGSVAGHRHGALALADQLELLNTQLRGYDRKVAELFEQHPDAEIYASFPAAGDVIAPELLTEIGEDRPRFPTPQVLLAEAGLAPVTLASGKVQRVRIRYACNRRLRSTCTNWAYVLKRIDPPTRTRYLAGLDRGQLKHRALRGVGASWMRVLWRCWQDHTTYNPERHRSN

SEQ ID NO: 339601 - protein, 415 aa, unidentified
MSLGGYIMQVTFGIDVSKSTSTVCELIGESKNELTITNDRPGFIQLLHELAAFSKHPQIIFEATGVYSRTLQSFLEDYGYDYVILNPLKAKKEMDMGLRHNKTDKTDAYHLALIQRLYHHPINQLQSQTYKQLNALSRFYDQLTADLVMAKNRLHQALQSTFPEIENLFSSAKGKNYWQIVVRYPHCDLVRREDKKQLINWLMSLKGIAFKHALRTADKLIELAYQAYPVVSCSSIEVEQVQYYAHRLLNLSDQRENLIARMVKLAKSLPNHDLENLESIPGFAQTTAVRVLAELGDLRRFSNPNKINAFIGIDPGRYQSGEMDSNLSITKHGNAVARKLLYRAIGQIDNAAKTNPCHIADYYESKKLSSQTKGFKKIAIASIHKLIRTIYALIINDQPYDYNVATHNQKDFSRN

SEQ ID NO: 339602 - protein, 347 aa, unidentified
MAIVGGFDIHRRQVTFDYLDTVSGQVRRGRIDPACRETLRVWLARFADRGDVTFAVEGCTGWRFVVEELQRAGITALLAEPAETAHQRGPKKRAKTDRADARHLRTLVAEGRVPVSWIPPGQVRELRVLLQLYRDLREEHTAWVQRIHATLFHQGVPGLAGRLADPQARALLEHGQDIGLSPAGAQAVAVALRRMDDLEAALGPVHAQIAAFARHQAGCKALAAELYGVGPLVAAIVRAFLGDTRRFSSSAQAVRHTGLDVTVYSSDDKRTPGHLSHQGPPILRWALFEAGHQGSRASSPDHLYYTDVAARIDANRAALSVARKLARRSHHILRRLGDQAYAPLPGW

SEQ ID NO: 339603 - protein, 465 aa, unidentified
MRTDKMLWRNRKLKKELARRLQSENPGLEVVHPHAAGIDVGNSAHYVAVRPDRDSQPVRRFECFTADLHRLANWLQDCGVKTVALQSTGVYWIPLYDILEERGFEVYLVNARHTKNLPGRKSDVQESQWLLKLHTYGLLNNSFQPPSKIRILRTYWRQRLQHVTGAATCVQRMQKALTQMNIQLANVISDLSGVTGQLIVRAIIGGERDPWKLAELSHPRIQASRGEIAKSLEGNWRPELIFVLQQEMEMYNTYQRRVAECDQELQKHLGAFADTVPPPVKEELPPRKKKKQNKNNPHFHLAEELQRISGVDLTRIDGVDVMVAQTVISEVGLDMSRWKTEAHFASWLGLCPDNRISGDKVLARGTRHVLNRAATALRLGASTLLRSQTYLGAQYRRLRSKLGAPKAITAMAHRLARLVYRMLKYGQQYVDKGAEYYEQRNRQQQIEFVRKKAAQLGLQVTAAHA

SEQ ID NO: 339604 - protein, 482 aa, unidentified
MKTRPVEKARKTTHGAKHVHWNEMNRKQRREMMRKIQSADLSLEVVHPDAAGIDIGNESHYVAVPPDRDSQPVRRFGCTTAELKAMADWLNRCGICTVAMQSTGVYWIAVYDILEAAGLEVYLVNARDTKNLPGRKSDVQESQWLMKLHTYGLLRNSFRPSQEIRTMRTYWRQHNDLVQSAGRHIQRMQKVLTQMNIQLANVLTDISGVTGQAIIKAILSGERDPHKLAELRDPRVKANQEQIARHLEGNWQEDLLFVLKQEQEAYEFCQKQMAACGDQLQQYLKQRQDRSQGTSLPEEKRKGRLKKRKGNAPQFNLRAELFRMTGTDLTQVDGINVMTAMTILSEAGSDMSKWPTEDHFVSWLRLCPDNRISGDKIIGKGRLPTNNRITVALKMAATSLKASDTYLGAQFRRLRTKLGAPVAIKAMAAKLARLVYRMLRYGMKYVDKGMEFYQTKHRRLQIQHLKWKAEQLGFKVIEAPAA

SEQ ID NO: 339605 - protein, 351 aa, unidentified
MLIIGVDYHPSFQTIAFLMEETGECAEQELKHSDGEAERFYRELKQRGVSVRVGMEATGYSRWFERLLAELGFEVWIGDAAEISRQRVRKQKTDREDARLLLKLLLENRFPRIWVPSPENRDLRQLLWHRHRLVQMRTRIMNQLQAVAMNEGYRWKKKLFSEQGRALLEKLSLAPWASRRRKELLELLDQLDPKIAELTAAVVQEANQRPEVLRLMTHPGVGPVTGLAYVQVIGTPDRFPCGKQIGSYIGLIPCEDSSAGKQRLGHLSKQGHALLRYLLGEAAQAAVRCNPHWRRRYMHLAMRRHKNIAKAAMARKLAVRLYWMWRNGWDYSQLVSFGSNAGKLATGHGVK

SEQ ID NO: 339606 - protein, 354 aa, unidentified
MTRILAIDLGKFKSVSCLLDTTTNATEFWTLSTDRHYLQTVLKNYTPDLVVIESCGLAGWVHDVCTAEGYKVLVCNPNQEAWKWKNVKRKTDRDDALKLAKLAALGQLVPVYVPSQQQREYRRLVKYRKVLVGRVNRVQNNIRAIFAQRGIDMVRGQKAWALERHDQIADHRKPLAECALDELWRGELDLELQQLASLREHQHEVHKKLKSLAAADERVQLLQTIPGVGRKTAEVVVAYIDDPHRFQNARQVSSYAGLVPRRYQSGEMDRQGRINKRGPRQLRSALVEAAWLMLRYNPWAKSVYDRLTSGQKTRKKKAIVAVARKLLVRCWVMLLRKEPWKETLTTNTVAANAA

SEQ ID NO: 339607 - protein, 394 aa, unidentified
MRYAGIDIASETHVLAIVAADGTVAVKPTAFAEDDLGYQNALTLLDTPGEVLVSMEATGHYWKNLFAVLVAAGHAVALLNPLRTHRFAGVDLERTKTDAIDALAIARFAAQKRPPTTPLPDALAEELRELVQLRQRLMQDFGDRVRQLHRLVDLGFPEFTRYVRTLDSELATAILRDYPTAAAFRGVSARRLAAVRYDGRHQVGPNLARTLIDAARRSVGQHHSATYRLQIRYACDDLDTLRGRLRTLDRDLDGKLRQHEVGRLLTSIDGIGPQTAARVIATVGNPAHFRSGSALAAYVGTIPALKQSGKRQSLRGGHTPIGNAQLRAALWMPTLSAVRCNPWLRAHYQRLIARGKLPKVALLACMRKLLLVIYSVAKHGQPFAPRLQPPQAAT

SEQ ID NO: 339608 - protein, 450 aa, unidentified
MLPRDGAVIGIDLAEDKQAVAVIDHDVRVLVRKTVRVKAFRLGEALDWAVGQARAKGFTQVTVACEPTGPRWLQVQRLCAERGLPLVCIQPLMSHIAREQQDYTTHKTDEADCVLIARLAVELHCYIPEELDETWAHLRHLGRRRQQLITAATASAQRIRDFLSVAWPAVTETCAGPLESVTWLAALQVVTSRCGADPGKLAAMGQEAFTALVWSAVPGWGGKKGWGPICARIFAALTSTEGVVVASRRGLLRRCADELGDLQRTRAQLRAVETDMAAVLDELGLSRLADIPALTAVGAAAILAEAGDPRRYDSSSSLVKHAGMSPSDNASGAFYGEAHISRRGRPGLRLTVWRAVWPMLRYNPVMAAKYTAMTSAAADAAQAAASQADAGSRQVTAAAAAARARRAKARVACAASLLRWIYSLVVHGTSWDPGIASGPPSSQHAPAEAA

SEQ ID NO: 339609 - protein, 351 aa, unidentified
MPKARMESKPSSMIVVGGVDTHADTHTVAALDQVGRRLGCAVFPAHRAGYRALADWLAGHGEISAVGVEGTGSYGAGLTRWLCAHQITVVEVNRPNRAERRRRGKSDPVDAEHAAAAVLANTATAVPKARTGLVESIRLIHATRAGAVKARTAARNTFTNTLRTSPDAVREQLQPLTRARQLTAATGYRATGDDPDSTVKRCLRRLAVRISQLSEEINAADHELDRLTRELAPTMRSRPGFGPETTAQLLITAGDNPDRIGSEAALAGLCGVSPVSASSGRTRYHRLNRGGDRQANRALHMIILNRLRHHPPTRAYLASHSLQGQATPHLRRVLKRYLVREVYQLLSQLQR

SEQ ID NO: 339610 - protein, 462 aa, unidentified
MPGREDSETGESSRRQLQGLPVIRRNVAGIDLGSERHWVCAPTRDGSGREIASFGATTAELLRLAGWLKARQVESVAMESTGVYWIAPHEVLEAQALQVLLVDTRQLARVPGRDKKTDPSDCEWIQRLHSCGLLRGSFRPEEAVCMLRTLVRDKANLVAESGDWLRRMQKSLDQMNVRVHRAVSDIDGVTGMAMLRAIAAGERDAQKLAQLRDRRCSKTQQEIAEQLTGHWREDHLFSLQQALKMYDAVQQRIAAYEQEILRQLGEMEEPGQQGQTAPPLHNANKTKAIKKRGQESKRQALYRMSGVDITQIDALGVETVEVVLSEYGPDLSRFPTEKEFVAHVTLAPRVPSSGGKPLKKKKRNSASTRVAAALRMAALSLRHSQTALGAYYRKLAQRLGGDVAVFATARKLATLIYRLLRWGQPYVDEGAAAYENRYLQQRIKSLTAKAKQLGYELTAVNA

SEQ ID NO: 339611 - protein, 337 aa, unidentified
MDHFGIDLHQKHSEICGLDGEGGVKYQKRVTTSEASLRRVFGKRKASRVVIESGCQTAWAARLLQEMGHEVVVVNPRRVRLIAESTRKSDRADAEILAWLSLQDEGLVRPVYQRSEAAMELRTRLRVRTSLVRARTALINSVRGTLRSQGYRMSSCVAARFAASFCEQKLAPELRQVLAPLAEMIAQLSEQIERLEKDLVEESHSDELLHRLQEVPGVGPLVCLSFIGWVDRPERFERSRDVGACLGLRPMMRDSGERQWRGSITREGDSEMRRLLVQAAHAALNCHRDSTLKRWANQVAERAGKRKAVVALARKLAVLLHRLWVTGSSYQAFPKAA

SEQ ID NO: 339612 - protein, 340 aa, unidentified
MSSMQIGVDLAKSVFEVAVSKVPGRVHERRRLSRAALTAFFAARPPAEVLLEACGSAHHWGRELQRLGHTVRLLPAGDGARYRAGNKTDRADAKALLEAARNETISRVPVKSVEQQAVVALHRIRQGYLQTRTARINAVRGHLREFGCVIPVGAAQVLPRAYAALDQDAVPVLLRPALQTVLEEIAALETQAEAVRTELIRLAAQMPDVQLLFTVPGVGILTATALVAFVGDIHRFRSGRDFAAYLGLTPREHSSGPVRRLGAITKRGNSYVRMLLIHGARSALRAGTVTSHPDDLRTWARALADRKGHNVAAVALANKLARVCWRVWHDQRPFERREPR

SEQ ID NO: 339613 - protein, 355 aa, unidentified
MASITLLGIDLAKDVFQLHGLDELGRPQLKRTLRRRALVQFVAKLPACTIAMEACSSSHHFSRKFQQNGHEVKIISPQFVKPFVQGNKNDAADAEAICEAASRRKMRFVATKSVVQQDIQCLHRVRKRLVHNRTALTNEIRSIVGEFGIVFAKKRSALVEGIKGLLNGSCPREELSSEGLTLLQDLYSELLELDQRIENCELKLKKISSQPQCQRLFKVGGLGLLSVTALAVALADPGQFKNGRNFAAWLGLVPRHQGTGGKNRILGISKRGDMDLRTLLIHGARAKLRGINAKCRAERKLDPLEDWAYRLCQRQGYNKATVALANKNARIAWSISAHKTEFESHQAVASLKKGA

SEQ ID NO: 339614 - protein, 338 aa, unidentified
MKVYAGIDLHSNNSVALVLDEQDRVLVERRVPNELERVLSLLEPYRDDVVGVVVESTYNWYWLVDGLMQAGYRVHLANTAAIKQYEGLKRTDDAHDARWLAHLLRLGILPVGYIYPKAERALRDLLRKRSQLVRQRTANVLSVQNLVARNTGARISGNAVKRLDAEEAVKLDVDALRGQAIEANVVVMNCLEEQIARIEREVLSQAKEQPEFALVCTTPGIGKVLGLTILLETGAVSRFAKVGRFASYARCVDSERISNGKKKGMGNVKCGNRYLAWAFVEAAHFAVRYEPRIKRFYEKKRAKTNAVVAIKAVAHKLARAVYHMLRNQEGFDVTRAFG

SEQ ID NO: 339615 - protein, 362 aa, unidentified
MFTERTSVGLDVHARSVAAAAIDGVTGELVQAKLTPSHEHIRSWLAGLHGPVAVAYEAGPTGFGLSRSLNAAGIRCEVVAPSKLQRPSGDRVKTDAKDAVHLARLLRLDEITAVTVPSVDQEAARDLVRAREDARGDLMRARHRLSKLLLRQGYVYSGGQAWTGAHDVWLRRTGAQLDAAATRMTFESDYDAVLSVKARRDRLDDAIATMAADCEFTPTLRRLGCLRGVGTLTGLALAVEVGDWDRFTGKTIGSFIGLVPSEYSSGQSRVQGSITKTGNTHLRRLLVEAAWHHRPAYRVGKTMRDRWELAGPAARARGDEGNRRLHHRWNTMRARHKRHTVANVAIARELAGWCWSLAVLEE

SEQ ID NO: 339616 - protein, 318 aa, unidentified
MNTPVVLHIGVDVAKDEVVVACEEEAFAPRVLANERRAILGWLKTLPAGSCIGMESTGRYHRLLAGLAFELGLVVYVLNPRDCWHYAKGVGLRAKTDRVDARLLARIIAREAGKLHPWCAPSMQQQELEQLLRRRASVSRIRAGLVQSLEELSGFGPERQRPLLQQLKGLIACFDGRIKTLIEASGERLAAYRRLQGICGVGPVVAAALLNALERMAFARADAFIAFTGLDPRADDSGRRRGRRRLTKRGPSELRRLLYVAAMAGARTGPWKPRYERERAKGLSSTEALVVLARCIARTAWSIYTHKTEFDPKRLSMA

SEQ ID NO: 339617 - protein, 321 aa, unidentified
MSANVQDRIVVGIDVAKDRIDVATDPPRRVLSIATDKDGLRQLKEYLQSYDVALVVVESTGGYERTIVAALRAADLPVAVVNPARVRDYANACGAFAKTDAIDAAILASFGRRIQPAPSALRSAVVERIDALLTRRRQLVGMRTMERNRIQQVIERFSKKQITQHIKFLSAQITAIEGQVDDEIDSDPTLREKVKIMTSVPGVGDGTARALLAELGELGEASRQQIGALAGVAPFDKQSGKSDRKRTTRGGRTGARTAGYMAALSAQRCNPIIKAFAERLKAKGKPFKVIMVACIRKLFTLLNALLKTGQMWNPRTAQTNL

SEQ ID NO: 339618 - protein, 483 aa, unidentified
MKSKPEEQNKRATNHPTQHHWHEMNRKQRREMMRKMQNEDLSLEVIHPDAGGIDIGNESHYVAVPPSRDSQSVREFGCTTAELKAMAVWLKQCRIRTVAMQSTGVYWVAVYDILEQAGLEVYLVNARDTKNLPGRKSDVQESQWLMKLHTYGLLRNSFRPSPEIRVMRTHWRQRNDLVQSAGWHIQRMQNALTQMNLQLANVLTDISGATGQAIIKAILAGERDSHKLAQFRDPRVKASEEQIAQSLEGNWQEDLLFVLKQEHEGYEFCHKQMAECDRQLKQYLQQREDRSQGAPLPEEKRKGRLKKKKGNAPQFDLREGLFRMTGTDLTRIDGIDVMTATTIISEAGWDMSKWKTEDHFVSWLRLCPDNRISGNKVIGKGRLPTNNPISIALKMAASTLRQSKTYLGAQFRRFRTRLGAPIAIKAMAAKLARLVYRMLRYGMKYVDQGAAFYELRHRELQIKRLKAKAEKLGYRVTPIPAAA

SEQ ID NO: 339619 - protein, 349 aa, unidentified
MLADEVDFVVGVDTHRDQHVLSVVAAPTGAVVAQRSVAASGHGYAQALRFANEQAQGARVWAIEGAGHYGSGLARYLSGRRETVLEAGRGPRGERRLQGKDDGLDATRAARAALGNDELAVPRAGQRREALRLLLVARRGAVEVRRRALVQLRSVIVTAPNRLREELQALPERRLLERCSHFRRSSSLPVDELAAKLVLRTLARRIEAATAEATELEREILAHIRALAPQLLEEAGVGPIVAADVIVAWSHPGRVRSEAAFARLAGVAPVPASSGRTIRHRLSRGGDRQLNRALHTIVLQRRQHDATTQAYIARRVAEGKTRRDATRLLKRYLARHLYRLLQQTEPLMT

SEQ ID NO: 339620 - protein, 400 aa, unidentified
MTAASGSVVIGADTHLNTIHLAAISDTGKPLGDKEFRTTAAGYKAALKWADAWGTVLAAGVEGTSSYGTGLTATLTAAGIEVCEVTRPERASRRNQGKSDPLDAYSAARAALARDRVAVPKDPRTTALKALRTAYKSAVKARVAATVQITSMLVTAPIGLRERYRHLSAKALIKALATADPGVESDPVAAAVLASMILLAQRIGFLTAQERDLSAHIDVMVTAMNPALRAAYGVGPITAAQLLITAGANPERIGSSAAFAALTGTAPVQASSGKITRHRLSRGGDRDANNALHRIALVRMAKDPRTRAYVAAQTANNRSKKEILRLLKRAIAREIFRLLTRICAFDDYADLRPARQAKNITITTVADHFNIGSITISRLERGQHRNHELATAYRQWLTAA

SEQ ID NO: 339621 - protein, 397 aa, unidentified
MYIVGIDIAKRKHEAAVIDGEGAVIIKPFSFTNNCSGYNRLLAMLAKAKLPLDEVSFAMEATGHYWLALFTRLQKEGFRVQVINPVQTNSIRNFYIRQAKTDPRDALLIAEVIRFGHFSASTLHPENIYELRELCRGRHAIVSMQADVKRKVVALLDQVFPEYETAFTNMFGDTSMAILQTCPTPKELSEMPLEELCHLIEVSSHKRFRMAKAQELQALARNSFGFVMAGDVFSTMIRLYAKHLVFLKQQVQEMDRKIAEIMDTLDTPITTITGIGPTLGAYILSEIGDISRFSSAAKLAAYAGIDPTMRQSGEYNGVRNRMSKRGSPYLRHAIWLAASSAVLHDPALKLYFQKKRDEGKPYMASVGHACRKMVSIIYAVMRDNKAYTPYIPNEISA

SEQ ID NO: 339622 - protein, 395 aa, unidentified
MCECRSPAGGKRRLQEVATYSTMTQALTELANRLVEMRVQRVVMEATSSYWKPVFYLLEAHGLDPWLVNARDVKHLPGRPKTDVLDAVWLCKVAERQMLRPSFVPPWPIRRLRDLTRYRTDLVAARTAEKNRVEKLLEDACIKLSVVASDIFGVSGRAMLAALVAGERDPKVLAQLARARMRGKIDRLEQAFDGHFDDHHRFLLSRMLARIEGLDADIAAVDAQIDVQLAPFAEAAARLDEIPGIGPVAAAAIIAEIGVDMSRFPTAGHLCSWAKFAPGINSSAGKSKGSASSGHGNPYLARILGEAAVGTTKTNTFLAARYRRIARRRGQPRAVVAIGRSILVIIWHLLHDPDTRYRDLGSDHYARHVDPTAKKRSHIRQLEALGYTVTLTPAA

SEQ ID NO: 339623 - protein, 402 aa, unidentified
MNCVGIDVSKGKSMIAVMRPFGEVVVSPFEVCHTASELSELARLLKSLDGETRVVMESTGNYHAPVAWLLHDAGLYVSVVNAMLVHDYGNNSLRRGKTDKKDAVKLANYGLDHWLTLPRYIPEEDTRLMLKICYRQYQQYSKVQTMLKNNLISLLDTTFPDANRLFTSPPRADGSEKWVDFVATFWHCECVCGRSEKAFTTQYQKWCRKHGYNFSEDKALDIYASACRHFGVIPKTDTAKLLVEQAISQLQTTSSALAALKQEMQSLAASLPEYPVVMGMFGVGPTLGPQLLAEIGDVRRFHSKKALVAFAGIDAPPYQSGQIDVRSRSISKRGSASLRRTLFLVMSVILQCAPIDEPVYQFMDKKRSEGKPYRVYMMASANKFLRIYYASVKAYLESLEHD

SEQ ID NO: 339624 - protein, 408 aa, unidentified
MKRYYLGVDWSDEFHQVCAIDPVGKKVIEKKVLENVDGLAEFGRWLHERQAQGIELWAAIEKPAGRIVDYLLDHGVVVYPVNPKALDRVRDRFRMSQSKSDSFDAYVLAEFVRTDHGHLRALEPSSEQAQELKLLTRDHHRLVRHKTRIHNLLDRTLKEYYPRPLEVFADLESKIALDFLTQYPTPEALSNLNRRQWNRFAKRDHHLGEARCKELWDKLNQPQLGIPPHVVRAKAQLLVVLVAQLRSLSQAVESYSERVQSFFASMPASELLHSLPGGKSGTILPMLWAELGDTKSRWQSFRHLQAEAGGVPVTKSSGKSHVVLFRYACNKLLRYASYWFSFVSLNRSEWANKYYRDQRARGKSHHQALRALAAKWLKIIFVMWRDHKPYDENYHLADIARQVIRQAA

SEQ ID NO: 339625 - protein, 359 aa, unidentified
MDGSRERPKVTAGLDLGDKYSYLCLIDTDSGEVIEEGRLRTTPEALRRRFASERPPMRIALETGTHSPWVSRLLEGLGHEVLVANARKLRLIYSNKRKTDEVDAENLARLARVDPKLLYPLKHRGEDSQAHMAIIRSRQALVDCRTQLVNHVRGAVKSFGARLPKCPARSFHKRAPEHIPEALMPALKPLLEQIGSLTERIRQYERQLETISKEHYPETDLLRQVEGIGPLTALTFVLTLEDPYRFEKSRSVGAYLGLVPATDRSGERDPQRRISKEGDEMLRKLLVGSAHYILGPFGSDSDLRRHGEKIAARGGKNAKKRAAVAVARKLSVLLHRLWVSGEIYDPLHNAHRRQRKEAA

SEQ ID NO: 339626 - protein, 414 aa, unidentified
MLYIGIDWATASHTVTFLAPSGEVLDSLAIENRLAGFLKLLEAIRKHLRKLEPTATPDAVLFAIEDQNQRLTDFLLAQGFQGYLIEPSRMKGYRLRYRSSGNKTDPDDSFVLADVLYRDHDQLPRIAPDSDVVRALKTLLRDRESFVHDQTRLTNRLTACLRQYYPEALDFFEDVAGKTVLDFIAAFPDFAAASRLSRREVKRFLVEHHCHREAQLERIMTVLGSSPTPVPTVVVRTKRQQALAIIQQLRMVQTTVAGYDAEIERLGKENDEVKRFRGMPGGGPITGAGLATLFGEDRSRFNSAMAVQSLAGTAPKTIQSGQFRTACFRFGCSRFYRLLAQQMALGALRSAVWAKQYYRGKRKEGKTHQHALRCLANLLLKIAYAIWRDRTEYSEDHHLAQIMRHRLRPTSNSV

SEQ ID NO: 339627 - protein, 518 aa, unidentified
MVAARKQKRMSAQVVEDEDYQLRYEVAAGIDVAKESAVVCVRMPPAAGRKHRTSHLQTVPATVPAITELAAELVALGVQMVSMEAASDYWRIWFAVLEEAGLAVQLVSSSQARNLPGRPKTDKEDARWIARLTEMGMLRSSFVPPPQIRALRACTRHIWDLTADRTRYWQRLEKLLEDALCKLTSVISRLAGHQTARAVIEAMIAGELDPQALAALGQGRTRNEKLPALAEALSGMRFGPQHAHAAASLLRSIDLLDAELRDLQERVTAHLAAIPGSWGVDAGGVTGPQAGRAAGAAALPAAERLDEIPGLGRESAMALIAETGLDMSRFPTPQALVSWAGLTPTARQSGPRKGRGKKGHGNTYAKRIAVLAAYAAANTGTFLGERFRRLGSRPGGGGRKKAGCTVGRSVLVIVWHLLNDPGRPLPRPRTRLARPPHRPQPQGPQRPPPARGHRLRRHHHPAGGRRLTRPGDNRISATAAPGRGCHGVISSCPNRGHARRLRWLFLGQPYPPARATRR

SEQ ID NO: 339628 - protein, 372 aa, unidentified
MASIIYVGMDVHTTNFTFCCYTADSDRGFAVAQTEPDYRQVIKYMERVQKQRGEECKFVCGYEAGCLGYSLYHQLTRCGVDCVILAPSTMHQEKGKRIKTDRRDAENIARCLAFSLYSPVYVPTTEDDAVKEYIRMRDDIKADLKRVKQQIIAFTTRHGFDFDGKSYWTQKHLKWLETLVFEHPLYKETLQEYLILYYMLDEKVAVYDTRIEEMSHLEHYEENVQKLCCFRGVAAHTALSLLVEVGDFQRFRSAKHFAAYLGLVPGEHSSSDKQIRTSITKAGNTHLRRLLVEAAQSYNRGAIGKKSAALKARQGGNPAEVIAYADKANERMQRKYYRIAFKSRHNIAKTAIARELACFVWGMMTGNISNAA

SEQ ID NO: 339629 - protein, 405 aa, unidentified
MNAVGIDVSKGKSMVAVMQPLGVVAVKPFEVQHTAAALENLGYSLKELSGETRIIMEHTGRYYEPVAQALHERGLFVSAVNPMLINEYGNNSLRRTKTDKKDALKIAKYGLDNWADLREYTPMEAIRQQLKNASRQLDLYSKVKVALTNNLIALLDQTYPGVNTFFDSPIRPDGHQKWVDFATVFWHADCVSSLSEEAFTEKYRKWCKRRGYNFSVAKASDVYIESLGHIIMLPKNASAKSLIQQAISALNAVSTTVESFRAETQRLARLLPEYPVVMAMYGVGDSLGPKLIAEIGDVRRFANKRALVAYAGVDPEPSQSGKRNTKSNAISRKGVPAIRKAVYLVMGVLLQNAPADEPVYQFLDKKRSEGKPYFVYMTAASNKFLRIYYARVKEYLDSLESTDPA

SEQ ID NO: 339630 - protein, 316 aa, unidentified
MKTNTNQNINVGVDTGKFQLDIYIRPLDIYFTVKNDEKGIAEAIKKIKIHSPNRIIIEATGRLEMPFIIACAKANLPFVIANPIHIKRFAGAIGQRAKTDKLDAQLIAHYGEAIKPTLSTLKPDIMQTMSDLVARRNQLLVMQTMEKNRLQILPKELISTIKPILTAFKNQIEKIENKILKLIESCPEYSAKNTVLQSMKGIGKIAAASIISNLPELGYMSNKEAGALVGVAPMNRESGRYKGLRKIQGGRHQVRTVLYMAMMSAIQSNPVFKSTYQRLVAAGKPKKVALIACVRKMIVILNSMLRDGVMWEAPKV

SEQ ID NO: 339631 - protein, 444 aa, unidentified
MEVVYERCCGLDVHKKTVVACLIVPDEKERRHKEIQTFGTTTRELLALRDWLVLAECSHVAMEATGVYWKPIYNLLDGAVELLVVNARHIKAVPGRKTDVRDAEWIADLLQHGLLTSSFIPSAAQRELRELTRYRTSLVQERARAVNRLQKTLEDTNLKLGDVASDIMGKSARMMLEALLAGQTDPARLADLAKGRLKAKREQLEEALVGVLKPHHRFMLTEHLALIETLEEAITRASQEIERRMGPPDPAPQPPPCEAKEGAEAEEQVQESQEQAPLAWDEAVRLLDSIPGINSRAAQAILAEIGTDMRRFPSAKHLASWAGMCSGNHESAGKRLSGKTRKGSPWLRQQLAEAAHAASRTKNTYLSALYRRLASRRGAKIALIAVGHAILVIIYHLLSEHTSYHDLGGNYFDERDRQATGKRLVRRLEKLGYQVELQAVSQVA

SEQ ID NO: 339632 - protein, 316 aa, unidentified
MSKMMIGVDVAKEWVDIAVAGESRVRRVENGERAIEAWLAEVGPGSIELVAFEPTGGYERIVRRCLSRAKVAFAQVHPNEVVAFRRRRGIKAKTDRIDARLLADFAAEELSRRELAAVPEADELLRELTARRRQLQALLHAEACRRDVADSAVVRKSLQAITAALERSLAAVDAAIAERIAGSAHAETSRRLQTFCGVGPVIAETLIAELPELGHLSGKQIAALCGLAPHSRDSGKRRGHAAIGHGRPGIRKVLFNGARSAIQFNPVMKAFYQHLVEDNHRLGKVALTAVMRKILVTLNAMVRDGSDWKHAAQPAG

SEQ ID NO: 339633 - protein, 339 aa, unidentified
MKFAGIDLHKQTITICVVDQSRNILLRKRLYCANEESIKEFFESLGEFRAVVEATASYEWLVKLIEPLAEKVILAHPKKLRVIAESTRKSDKLDAQVLAEFLALDMIPTSYRPTPRQRDHRRLVRQRDWIQRRITSVKNRTRRLMSNYNADRQNLFSQAGQRYAKKFPVSAADRFALNQMTAQLEFFCLQLAEANKELVAFAAKAPVGERHARELLLTIPGVGFVTTEVVLAGVADISLFDSQKQVVAYAGLAPGQRESAGKSKELHIEKTGSKHLRWILVEAAWQLVRYSPRWKAIYERLRKRVKAKKAIVAVARGLLGMMTAILKSGEPFSATHASA

SEQ ID NO: 339634 - protein, 345 aa, unidentified
MKHYTGLDVSVKETAICIVDETGKICREVKVSSHPDDLIAVLRDPAWNLERVGLEAGPLSQWLFEALARAGLPVICIETRHVKAFLKAQPNKTDPNDARGIAQMMRVNLYRPVHLKTLTSQKRRALLTARKLLQGKAIAIENDIRGLLRNFGLKVGNVGVVKFEERIRELVDNMADLQEVMDPLLTARHKLREEFSRLHKKVLDISRNDEMCRLLMTIPGVGPVVSLAFTSTIDIPQRFKNSKAVGPILGLTPKLNESGESKRVGCISLCGDAMMRTLLYEAAQTLMINVRKWSWLKAWAMNIAKRRGMRKAIVALARRLAVIMHRMMSDGTEFCWTRDDLPAAI

SEQ ID NO: 339635 - protein, 446 aa, unidentified
MRNASTMSVIHYHAAGVDIGAEFHVVAVSPDADPEPVRTFQSFTGDLQRMADWLKSCGVTSIAMESTGVYWLPAFEILEAAGFDVILVNARDAKNVPGRKTDVNDAQWLQKLHSFGLLRASFRPDHDIAILRSYLRQRERLTEYRAAHIQHMQKALMQMNVQLHHAVADITGVTGLSIVRAIVNGERDPEVLIQYRDVRCKKPPEILLRALTGNWQPEHLFALEQAVSLFDFYQEKIRECDVKIEESLHQLCQSSSEPEGTLLPARHRTKQPNQLAFDVRPLLWKITGVDLTQIHGFGPYLALKFIAECGTDMNRWPDASHFTSWLCLSPGNKISGGKVLSSKTKRSSSRIAAALRLAATTIGRSDTALGAFYRRLSSRIGKAKAVTATARKLAILFYNALKYGQKYTDPGANYYEERHRNRVLDGLKRRAKSMGYILHEDPDSCI

SEQ ID NO: 339636 - protein, 341 aa, unidentified
MNITTVGLDLAKNVSHVVCCNQVGKIVKKKILRRKEILNYFAQLDGCLVGVESCASAHYWARELEKLGHRVKQIAPQHVKAYVRGNKTDFNDALAIAEAVVRPEMRFVRTKTQTQQDIQSLHVLRKKCERDRTANSNEIRGLLYEYGIVIPLGVHNVYKALPELYDREANNGLSELFKELLEQHYKKLSELKAHLDVYTQKVHDLSKDDACVRLQSIPGIGPLIASAFYQYVGNGSEFNNGRAVSASIGLVPRQHSSGGKQNLLGNSKRGDGYLRTLLIHGARAVMRVSANKDTPLAKWIKRIEQTRGRNKAAVALANKLARVGWAILKQGGRYNDDLVTA

SEQ ID NO: 339637 - protein, 415 aa, unidentified
MRVIRKRCLGLDLHKKQITAHLRVHRSSSEEPEGQDVRFGTMPDELEQMREWVREQQITDVVMESTGVYWMHVYELLEGVTTAAVVNASHVKKVAGRKTDMSDAQWLAELHAHGLLRLSFIPPKEIRELRAVTRYRTKLVAIRTGAKNRTIKLIEMAGVKLSSVVSSSFGKTGRGILDALCSEGRPDAAKIATLAKGTLRGKVAELERAVRHPLSGQQRELLKMHLQAYDAIDAQVAATELKLAQLAQPYREVIELLDQIPGINPLSAITLLAETGVDMSVYRDASHLTALAGLAPGNAISADKRRRVSVRAGNRYLKRILVQIAWAASRKKDSFQRMRFLRLQTRIGRNKAIVAVARQILIVVYHVLSTSKPYEDRGMDFYDRRNKEKVIARYTKRLAQLGFTVQLTKKDELTQ

SEQ ID NO: 339638 - protein, 462 aa, unidentified
MSVACRLLIYFYEHGTLTLVKQFSSFQMEIYSQCPLTKYFRKEYTMLKTIFKNCAGIDVHKTNIVVRIAKTDDHDVTEYQLKKFSTLTEDLIRCRDWLVENGTYDVCMESTGKYWIPVFNILEEKCHCVLTHPKYVKSIVGKKTDNKDSLRIVDLFKYGLVEPSFIPPADIRQLRDLMRYRNKLVNMRSSEKNRFQNSLTVSNIQIANVVTDVFGKTSQSILKLMLEKPNLTLDDIIPLLDWRLKSSPEDILKSINGSFDESQSSKMAVCLKHYESLNDSIDLLEQSILKLANKYVSEINLILTVPGIKEISAIFIIAEIGTNMEVFPDDKHLISWAGLSPRCNESNKKKKSSRINKAGAYIKPLLVQCALAAIKDKNCPYIRARYESLKKRRSHKKAIIAIARLLLTSIYHILKNKEPFDYERFKKLQNRNFKSKKKNFKTEDDMINYLASLGYNITKQNT

SEQ ID NO: 339639 - protein, 360 aa, unidentified
MSNLTTTTSSIVVGGVDTHKELHVVAVVDAHDRVIGTESFSTTRAGYRALVRWMRTYGDIARVGVECTGSYGAGLMRHLDTAGIDVLEVTAGDKVDRRKRGKDDTIDAEQAAHAAYARVWTVTPRAHDGMVESLRALKIARSSAISARRVALQLIHATIISAPEELRDQLRNMTRMQLIRTLASWRPDLSGYRDPVTATKISLRSLARRYLELHDEIADLQVPMHALVDELAPDLLARVGIGYESAAQLLITAGDNPERLASEASFAMLCGAAPLPASSGMTTRHRLNRGGDRAANSALHMIAISRWRIDPTTQAYVARKKTEQHSNPEILRCLKRYIAREVYYLLRNQQRAIHQIAPAA

SEQ ID NO: 339640 - protein, 410 aa, unidentified
MTKEDFIYVGIDLHKETHTAVMIDCYNNKLGEITFPNRPADFPKLVTKVKKCNTDAKEVVYGLENAYGYGRALAVWLIDKGYFVKDVNTAISHRQAKHRGAMYRKSDSDDAEAIALATLNMLDKLPDACPNDAYWSLVQLVHRRDNIMKQRTRLVNQLHEQLCIAYPSYKSFFNDISRPTALYFWEHYPSKKYLKGKSVEDLRAELVPVSHNKCSTKTCEKILDAVASDKVKNNAYQDARDMVTLSIVSDLQHYGSQLTEVDKMLEQMYKMLGCTLTTIPGVNVITAVKILAEIGDIKRFANANKLAQFAGIAPLHLSSSGKGKDLATKQGNRRLQATIYFLAIQMVQVSSKGTPRNSVVRAYYEKRKAEGKTSQQALICISRRLISIIYGMLKHGTEYRMPVVESAGEK

SEQ ID NO: 339641 - protein, 458 aa, unidentified
MKAISNDVEEIDGDEVERVLTCAAAIDVAKASGMVCVRRPHPSIEGRRSARVWEVGSTTNSILALGEDLVALGVERVVLESTSDYWRPFFYLLEATGLTVWLVNARDVKQVTGRPKTDKLDAVWLAKLNERGMLRPSFVPPREIRALRDYTRLRTELVEERSRHKQRLEKLLEDALIKLSSVATDLLGVSARAMIEALIAGQRDPKILADLARGKLNAKRAALLEALDGRFDDHHADLSRLLLDQIDACTDKIDRLTAGIERLVAELPEPSPPTDRGPRPTPASDVPVAHDPDVRSLTTVERLDEVPGIAERAAQVIIAEVGLDMAQFPTPAHLVSWAKLSPQTVQSGPRTKAGKTGKGNRYLKGVLGEVATAAAKTDTFLGARYRRLVRRRGKQRALVAVARSILVIVWHLLNDPDARYIDLGSDYHTTRLDPDRKTRDLVRQLQALGHTVTLAPAA

SEQ ID NO: 339642 - protein, 457 aa, unidentified
MNRKRTKSKVDRTMPMVHPNAAAIDVGATIHMAAVSADRTPEPVRSFGTFTTDLHRLVNWFKECGVEMVVMESTSVYWIPIFELLDARGFTVFLVNARDAKHVPGRKTDVSDAQWLQRLHSYGLLRASFRPKGQIAELRAYVRQRERLLEYAASHIQHMQKALTEMNLQLHHVVADITGTTGLRIIRAILAGERDPKALAHLRDYRCHASAETIEKALTGSYRAEHLFALDQALALFDAYHEKVSACDVRIEAVLKELSISRSRGSGSLPSSRRRTDQTNAMAFDVRAALFALLGKDVTQINGLGPYLSLKLIAECGDDLSAWPSAKHFTSWLCLAPSNKISGGKVLSSRTRRSGSRASALLRLAAVTVGRTDTALGAFYRRLSARIGKAKAVTATARKIAVLFYNAVRHGMEYVDPGASFYETRYRKRVVENLHRRAKAFGFVLHPAEPTPSVAVS

SEQ ID NO: 339643 - protein, 343 aa, unidentified
MEQYAGIDVSLESVSVCVVDADGRIMREAKLACEPEALITWFGKLEVDMARIGLEAGPLSQWLYARMREAGLSVELLETRHVRDAFKAMPVKTDRTDARGIAQLMRLGWFRSVHCKSLPAQELRAILTARKLVQTKRHDLEMSLRGILRGFGLKVGQTTPRSFEARVRELVDGHPTLTVVADAMLLARAVLVEQLGKLQKRLVSLARQDMRARLLMSTPGVGVLVALTYAAAIDDPARFRSSKAVGAHFGLAPRKYQSGETDVTGRISKIGDAGVRTALYEAANVILTRPVKGSSLKSWAMRVAKRAGMRKAKVALARKLAVVLHRMLANGSAFVAGKAAAKA

SEQ ID NO: 339644 - protein, 314 aa, unidentified
MYPLPATDYVGVDVAKDSLAVCSTLAAKVVNVPNCPQAMDSWLAGLPAGVHLLCEATGRHHRLLQQRCALNAIALTCLNPAQVRAFAKSLGTLEKTDPIDARVLLRLGIEGHPAPSPVPSDALRRLGDLLMARHAIVEQISAFDMRNNLLSARSALQLKRVVRALRSHRLALELDLQAWLYSEQAAPWLERIHTLCFAPGVGILSALSLIAYLPELGSLNRRQIAKLADLAPLPWDSGKLKGLRIIQGGRAPARRVLYQCAMVAARWHEPSRLHYQQLRARGKPPTVAYVAIARKLLIFLNSLLRPAYAAALPS

SEQ ID NO: 339645 - protein, 428 aa, unidentified
MNTPTSNPPVVAWVGLDWADQRHEIRLQAAGSPRLESFSVEQKPEAFQAWVAELRARFPQGRIALALEQSRGAVIYALMNYDFFLLYPLPPKTLARYREAFASSGAKSDRSDADLLLELVRTHGDRLRAWQPDDALTRQLRLLVEYRRKTVADRTRLTNRLTDLLKTYFPQALDWLGDLRSLAACEFLGAWPTLQAVQGANRPALRRFFHDHRRLSAEEREKLLDQIRHARPLTQDRAVLEASELMTQTLVEQLRAVITALARLDQALEELFGQHPDQQLFDRLPGAGEALGPRLAAAFGTDRDRYQSAEEIQQFSGIAPVTAASGKMRWVHWRWACPKFLRQTFHEFADASRKKSLWARAYYQQQRQHGVSHHAAVRALAYKWIRILYRCWKTRTPYDEALYLRALQRRHSPLWLAAASLSTQEAHP

SEQ ID NO: 339646 - protein, 378 aa, unidentified
MKVIKQAASPVGEWTANVVGIDPHKRTLTATVVDGRGGIVASEHFRVSGDGHRALSAWARSFGPIARWGIEGASGWGRHTAVFLAGRDHDVRDVCATRTARSDRARQRGKSDTLDSERIARETLAHPLLPRAFKRAGDDRGPDEQQELLALWHNARRSILTSRQHLLNEAESLLSALPLDLREQLPDSTAVRPRLAALARRNRRRRHDAPTTLRLRLLDAHHARIAQLDREEQAAVKQLQALVRSSASTLDELCGLSTRSVAEQLVEVGDPRRFTEGGFARFNGTAPLAASTAEGPGEPVRHRYNPGGNRRVNAVLHRMAVTQLRCEPRAQAIYENARARGHTKREARRILKRHLSDIVYRRMMRDLKAAAARPLLAA

SEQ ID NO: 339647 - protein, 344 aa, unidentified
MKNTTIAIDLAKSVFEIGISDRPGHVARSYRLSRVELSSFLAAQPPATVVMEACSSSHYWGRKFQSFGHEVKLLPPLYVRPYVQRSKTDKTDVKGMLEAWRNSDIRPVPIKTESQQQLTSLHRVRSTWMAARTMRINSARGLLREFGFVFPAGASSLPGHVRALIENADEAVPIQLRDLLHELVLEIGELETRIKVVEKHLEALARQTPVVERLQTIPGVGLLTATALVGFVGDVARFPSGRHFACYLGLTPREHSSGGRRSLGRISKRGDAYLRMLLIHGGRAVLWGARSKTDPDRLRSWALDLQHRRGHNKAAIGVANKMARIVWAVWKSGTPFASRPQPVG

SEQ ID NO: 339648 - protein, 389 aa, unidentified
MLLDHPSDEPTAIRTHIGAIFVSLELSRSNWLVTSLSPGKGEKMSKYRVAAGDMAELLTLFAELRRKAEIRTGQSYPIITIQEAGLDGFWLHRVLQQNGIESHVVDPASIATPRRRRRAKTDRLDGEALLRALLAYKRGEPRVCAMVVAPSPAEEDRRRICRERTTLIAERITHVNRIKGLLFAQGISEYGPLRRDRRARLEALRTGDGRELPSYLKAQIGRELDRIELLQEQIKAVEAERDAVLAAARKPASEEAAPEPVAMLLALRGVGANFAAVLWSEAFYRSFSNRRQVAAYAGLAATPWQSGGIRHEQGVSKAGNPRLRTTMIQLAWLWVRHQPQSTLTRWFKERSQQGRKRAIVALARKLLVALWKYVTQGVVIEGAVMKPAA

SEQ ID NO: 339649 - protein, 488 aa, unidentified
MKFRKDQAKQKQRKPAHSARGPESAGWNQMNRKQRREMARRIQAEDLNLEIVHPDAAGIDIGNESHYVAVPFTRDEQPVRRFGCTTAELKAMAAWLTQCGIRTVALQSTGVYWIAVYEILEAAGLEVYLVNARETKNLPGRKTDVQESQWLMKLHTYGLLRNSFRPSQEIRTMRTYWRQRQDLLRSASRHIQRMQKALTQMNIQLANVLSDITGKSGQAIIHAILQGQRDPYELAALCNYNVKASEEEIARSLEGNWQQDLLFLLQQEQEGYEFCQKQMAECDAQLQHYLTQRKDRSAGGNLREEKRKRRQHRNNKNHPQFDLRQQLFRTTGTDLTQIDGIDVLTAMTVISEAGWDMSKWPSEDHFVSWLRLSPDNRVSGDRVIGKGRLPTNNRLNVVLRMAAISLRQSDSYLGAQFRRLKRRLDAPVAVKAMAAKLARLIYRMLRFGMQFVDQGAEVYDAAHHQREIHNLKRKAASLGFQIIEAAAS

SEQ ID NO: 339650 - protein, 342 aa, unidentified
MEYYVGLDVSLKQTSICVVDQTGSVVREGVVDSDPEAISVYVRSKAPDAVRIGLETGPTSTWLWTELKQLGLPVICIDARHAKAVLKMQINKSDRNDAIGIARIMQTGWFKEVHVKDIESHSVRALLASRALLVKIKRDLENHVRGLLKNLGLVIGRAKFNVFAVRAEELIEGRPELVAAIRPLLEARNAVGQQVSELDRKVMKLARHDAQVRRFMTAPGIGPITALAFKATIDDPARFARSRSVGAYVGLTSRRHASGEVDWSGRISKCGDAMLRSYLFEAAGVLLTRVPRWSAVKAWGVRLAKRNGLRKAKVAVARKLAVILHRMWIDGTEFNWSKEITA

SEQ ID NO: 339651 - protein, 353 aa, unidentified
MKTKIPCITIGLDLGDKKHAICVLNKAGEIVEERSITNRRESLRKLSQKYPKSRIAMEVGQHSPWISRFFEGLGHEVLVANPRKLRAIYTSTRKSDQSDAYMIARLARVDPTLLHPIQHSTEEAQRDLLQVKLRDNLVRQRVDIISSVRFTLKSMGVMVASPNTNCFAKRCRKTLDTLDAKLLVMCEPSLRVVDELTKSIRELERKIEELCVETYPETEFLQQIAGVGPITALSFVLTIGDPARFESMRDVAPYLGLVPRRDQSGETDKQLGISKAGDAYLRRLLVSAAQYILGPFGPDCDLKRHGLQLAARGGRGAKKKAVVAIARKLSVLMLTLWYNEDIYEPLRNDTLAA

SEQ ID NO: 339652 - protein, 321 aa, unidentified
MQKDLLYCAIDVSKDKLDVDGAALALPAQLGNDQAGFRQLIKAAKKYPGAVQFVFEATGPYHLGLALALWEAQIPLSVLNPARVRYYAKAQGKAKTDPLDKQVIGDFARSFRPPPTPAPDPVRRELTELLQRRDGLISTRAAEQNRLGQCRHKIIKGQIRRLMAQLAEQIGQIDGLMKKLVNSSQELKAKVKALCQVKGVGHLTAVTLLITLPELGTLGRNRIVRLVGLAPLNDDSGTQKNKRYIQGGRARPRCALYMPALSASRHNPVLKEVYERLLKAGKLKKVALTALMRKLLICLNALLRKLVDPHASQEGLCLAKP

SEQ ID NO: 339653 - protein, 307 aa, unidentified
MTTQDYIAIDIAKDTLQVQIDERQQSFTYDAAGLKALIGAIAPHMPATVVCEATGGYERALMNLLFEKDIPVALVNPARVRAFARSEGVKAKSDPIDTRMLLRFARYKQPAPTKAPKPEEAELVALLDRHDQLSGHLAREKNRLQKSPATIERSIKKMIRFIEKELEAIDNRIRKLVESESSMRERSRIMQSVVGVGEITAWSILGQLREITAVGRNQAVALAGIAPYDRDSGKFKGKRRIEGGRAKVRRCLYMAAQSAAVHNPHIKAYVDGLRARGKAYKSAIVAAMRKLLLHLQSLLRNYEKCLA

SEQ ID NO: 339654 - protein, 372 aa, unidentified
MNYNTVYVGMDVHKESFTLCSCKYEDEKASHYQRTPASYKNVLRYLAFLRTIYGEYTRFVCGYEAGCLGYSLYHQLENFNVECVILAPTTMLEQRSKRRIKTDKRDAEIIARSLAQHNYSPVHIPTETDNQTKEFIRMRDDHKAELKKIKQQILAFCLRQGYQYDGSGNWTAKHVKWLRSLKPAGLYKEILDEYLLTYTILTDKLNRLDQRIEELASEEEYKEPVSKLTCFLGIKTHTALSVIVEVGDFQRFVSARKFAGYLGLVPGQHSSGDDRNGLGITKAGNTHVRRLLVESAQSYTRGKIGYKSRVLRSRQAGNSPQIINYADRANERLRRRYYQMVLKDGKKYNIAKIAVARELACFIWGMMTDNIY

SEQ ID NO: 339655 - protein, 366 aa, unidentified
MKKSSTLAIEGMQIFKDNQLTIGFDLGDRTSRYCILNEAGEVILEQELPTTPKGIEQVFRKIPRSRIALETGTHSPWVSRQLTQLGHEVIVAHARNVRLISESSRKDDRLDARTLARLARIDPGLLSPVRHRSAKAQIHLTVIRARAVLVSARTALVNAARGLTKSYGARLPKCGSEQMNREITKDLNCELREALNPLLEEIESLNARIAEYDTRIEQMAKEVYPEVARLKQVKGVGPLIALTYVLTLDNPHRFRRSRDVGCFVGLRPGRRNSGMSEPQLHISKEGDRYLRTLLVQGAHYILGPFGQDSDLRRWGLKLSERGGRNAKKRAVIAVARKLAVLLHKLWVSKEVYEPLRNSRNQIAQVA

SEQ ID NO: 339656 - protein, 345 aa, unidentified
MMVIGIDAHKRSHTAVSVDEMGRQGFVKTVGTTTQDHLRLLKWAVGLAKERLWAIEDCRHLTRRLERDLIAAGESVVRVSPKLMAHVRDSARSYGKSDPIDALAVARAALREPDLPTARLDGVERELRLLVDHREDLVAERTRIISRLRWHLHELDPGWTAPTKLQRGSAFDKVQAHLSGRNDGTIVRRLALRLVEHLRLLTDEIDELTAEITARVTTIAPSLLTIVGCGALTAAKIVGETAHAGRFRSKDAFARHNGTAPLPVWSSNKQRHRLSRTGNRQLNAALHRIALTQARCYPPARELLKRRTNSGNGGMEALRILKRRLSDVAYRAMLADQTDPPTVAA

SEQ ID NO: 339657 - protein, 334 aa, unidentified
MSSLVCGLDIHKDGVYATLMSYGGEVIVRKRIPYDGVAGFLEDYPIDTIAMESSTSIVPIYRALREKGYNILVSHPKKTKLIAESRIKTDRVDSWAVTELARLDALPLSYMPPPEIAALREKVRRRAFLVRMRTKLKVKIRAYLTINGIKPPGEYGLFTAKGVEWLHSLNDEAVESYLPVISTLDIQVGKLSRELRMTASGDEDVTLLMTIPGVGYYSALLVKSEIGSIDRFPDGEKLCSYAGLVPSVSISGQHRRYGSITKEGSRWLRWIMVECVHTHLKYDTSITRAYHAIAERKGKRIAKVAAARRLLMCCYSVLKNRRPYHDPAGRYESS

SEQ ID NO: 339658 - protein, 313 aa, unidentified
MNTTHNIPQNPVYIGVDVAKATLALHGARMPAEVSNDGAGHRRLLRALPPGAHVVLEATGGYERALVLALHDAQVALSVLNPRQVRDFARAQGRLAKTDKIDAAVLAAFGACMRPGPDAPPRAAEVALAELVSRREQMVAWRVAEQNRAEHHRLAKVRAQARALVKTLEREIKRLETWIAEAMEADAALKSRSERLQQVQGVGPVVAASLLGQIPELGTLDRRTAAALVGVAPFNFDSGPQRGQRHIRAGRSAPRATLYMAALTASFHNPILKTFYQRLLSHGKPFKLAITAVMRKLIVLLNHILKNPDFVLA

SEQ ID NO: 339659 - protein, 329 aa, unidentified
MSKQLMYVGVDVGKDEVWATLATTKPKSFAQSTAGVQALRAWMKKNATGARVHVCMEATGIYSQALALRLLTGADDLEVSIINPAQIKAFARAQLRRTKTDQVDAAVILAFAETQTPRPWSPEPSALHTLSRLVAHRDALTEDLRRWTNRQHAASCDPRVVQAVDRSQAAMVRILTRELTKIEQALAALMAAEPTLAEQRAVLQTIPGIGPVSSLELLAAAKGCLTARTSRQVTAHAGLAPAHHHSGSSVRGHSQIAKQGNVRLRTCLYMPVISAIRHNPVIRMFYQRLRTNGKPKKVALIACMRKLLVIARAILISKKPFDPAYQPLT

SEQ ID NO: 339660 - protein, 322 aa, unidentified
MPSNSPSNIGIDVCQHKLDVAVYETNEHFVVSYELPECIDLIERLKRLNPVRIVIEASGGVEHFIVSLLATAGLPVIVVNPRQIRDFARATGKLAKTDRLDAFAQARFAAMVKPEVRPLKSEETQALDALLTRRHQLVEMTVAERQRMTQARQQRRLEVAEDIKAHLEWLQERLTKCEAELANAIRQSPMWREREQLLRSAPGVGRITALTLMADLPELGQLEHKQITALCGLAPHPNDSGKSHGRRSTHGGRSRVRATLYMATLTAIRNNEIIQTFYQRLLANGKTKQLALTACMRKLLVILNAMVKSNSPWRSDTNPQIS

SEQ ID NO: 339661 - protein, 340 aa, unidentified
MNATTYGLDVAKQVFQLYWVDGQTGEIVNRRFGRNELIGFLAQRPAGRVALEACGSGHWWARKVKALGHDVVLLHAKFIRPFVQTNKTDAADARAIWTAVQQPEMRRVAAKTEDQQAILSLHRMRALLVKFRTMQVNQLRGLLYEFGATFRTGRVAGLAEIRARMAELEDALPGAMICSLQDQLQRIDTLEQDIDRLEQRIGAWQKQEAECQAIAKVPGIGKLTATALVATMGDAKTFKSGREFASFLGLVPRQTGTGGKIRLGSISKRGDPYLRTLLIHGARSVMYHANAPSAWQREIQARRPANVAAVALAHKMARTAWAILAHGQKYQKNYVSAKPA

SEQ ID NO: 339662 - protein, 323 aa, unidentified
MTGVICGVDVSSSTLEVRIGRQGATGSFPNTAAGIAALASFCRAHEVELVAMEATGGYEKQPFTVLAEQGLPVTILNPRAVRRFAEGMGLLEKTDTIDAGLIAWFAEVKKSQPRPLPSAGQQQLRALVTRLRQLTQIRTAQRNQRRLVSDPVVEASFDQLLAVVNGQIKQLETAIAALISQDPLWRELDPVFRSIKGVADRTIARIVADMPEIGTLSNKAISKLAGVAPMARDSGKHQGKRITRGGRAAVREILFIVASVAGRYEPDLVAFQQRLNAAGKPPKVIRIALAHKLLVRLNAKARQVRKQMEAARSPSPVLAFATN

SEQ ID NO: 339663 - protein, 431 aa, unidentified
MNRSVGFLSVGIDVGADFSLMAFALPSQELLGKPYKIIHSSQHSLNGAVEKIKTLSQKYQLPARVFMESTGIYHYPLYHKMKDAGFNVFVLNPLVTHAGRDLNVRNIHNDKYDSQKIALLGLRPGLKTSLIPSDQVISMKVILREYYAVKKEISMYICRLKNQLRQAFPQFLPLFSKVNGVTAMAILCEYPNPESLLNAGEHAVADFMKSVSHNGPLKVQKKAAALIQAAQDARSFGHWNHGISILIRHYIEMIRLLDIRAKTLLAQAKALLAEQDSKTLAHQTELLQTIPGIGFLSALTLICELGDFSAFKRPKQLFSYFGLDPIVRQSGNYNVTNLKLSKRGSPFARRCIFVIALQSISLNIHKEPKNPVLRTFYEEKCMCKAKMTAIGAVMHKICNLIFAVLRNDAPFVLQTPEQHNAAYLSKTHSVV

SEQ ID NO: 339664 - protein, 412 aa, unidentified
MRLFAGDDWAEDHHDIEVMDEAGKVLARRRLPEGVAGMAQLHGLIGQFLPEEDPDSVEVIIGIETDRGPWVAALVAAGYTVFPVNPLQASRYRERHGVSGAKSDAGDAHMLADMVRTDSHQLRAAAGDSPEAAGIKVLARTHKTLIWERTRAVQRLRHQLREYFPAAIEAFDDLDAADTLELPGKAPDPARAAKLTRAQVSAALKRARRRNIPDKATAILAALRSEQLRQPEALTAAYAATVRSLIAVITTLNEQVKILQGQVEEHFGRHPDAEVYLSQPGIGAILGARVPGESGDDPSRYRDGKARRNYAATSPLTRASGKKKVVAARFIHNDRLVDALNAQAFAALNASPGARAYYDELRTRKIEHNDALRRLANRLVGILHGCLKTGTLYDEATAWGHRENLPQSSAAA

SEQ ID NO: 339665 - protein, 317 aa, unidentified
MGKAQAMVIGIDVSKARLDIAGLVDSVEQCPNEPQAIGALIARLEAAKVSLVVMEASGGYETPAASAIAAAGLRVAVVNPRQVRDFAKATGRLAKTDRIDAQVLVEFARSIDPNIVRLPDEQSQQLEALLSRRTQLVAMRVQESNRLGQTRDDAMRRHIKAHIAWLSQAIKELDVDITARLRSSPAWRAKDELYQSFKGIGPISSGTLMVMLPELGELDRRKISALVGVAPFNRDSGTLRGRRSTWGGRAPVRRLLYMAATSAIRCNPVIKSFYQQLTGRGKPHKVALVACMRKILAILNAMARTNTPWNPNFQAGN

SEQ ID NO: 339666 - protein, 319 aa, unidentified
MQSKLTFGMDIGKNEVVVACHEGAFAILKMANAVAGLRRWLGSVPAGSRLGLEATGGYHEPVAELAYSLGFTVYILNPKDVHFYARALGARGKTDRLDAQIIAAYVAEHCARLHPFTPLSADEKLLRELARRRATLVNAKSMLQQSLRVLPGFEREGRELLRAMGSFADRLERKLAQIAARSSERATLVKRLQTIDGVGTLTSIRCATLFTRVPFHSSDAVVAFFGLDPRPNDSGQHRGRRRLSKRGPSEDRRLLYNAAMSAIRTPAWRPLYLHLRNRGLASTEAIIIIARRIVRIAFAMYRNHSDFNPRLVPRPCCAA

SEQ ID NO: 339667 - protein, 457 aa, unidentified
MGNARARKVSAQLVEDEDYQLRYERVAGIDVAKAKADVCTRLPPAREGGRRASRVETVPATAREVMALAGRLAAGGVEVVVMESTSDYWRIWYYLLESAGLSVQLVNSRHARQLAGRPKTDQKDAQWIARLAEMGLLRPSFVPPPEIRALRDLTRTRLQVMKDRTREWQRLEKLLEGALIKLSSVVYSMARNKTAWSILEAIAAGERDPRALAALTHGNIKGGSSAIEQALEGMLLGDHHPVLIRLHMDHITLLDRLAAGIDDEIEAAVDAMPAAWGVSADGIRSADPGPDAAVLPAAQRLAEIPGVSLKLAREIIAETGLDMARFPTAHHLVSWAGLAPVARQSGPRQRKPSKGQGDVYLKTYCAQAANGTGPTDTFLGERLRRLTRRLGATKAMCAVGRSILVIIWHLLADPTARYTDLGPGWHDQQAGRDRKIRSHLRQLKALGLDVTVTPAAA

SEQ ID NO: 339668 - protein, 392 aa, unidentified
MKKKALKPSQDFVNMPLVHPHAAGIDVGDTLHSVAIPEGIFDERVKTFGCMTCDLDTLAAWLSSANITSVALESTGVYWKPLFSVLNKKGFEVYLVNARQTRNVTGRKTDETDAMWIQKLHSCGLLKSSFLPDDEQDSLRSLVRYRHTLVQDCSRFKNRMQKSLELMNIKFHTLFSEISGKTSTSFIEAILKGERSPQNFLPLVDSHIKASREQILKTVEGNWRSEHLFTLSQSYEMSKIFQQKIAECDIEIESRLQCYLAFINDGEYQALEEQKVIGKPEAKKRKYRGAPIFNVRNYLKNIYKVDVLSIYGISEMSGLEILAETGVDLNKWPTVNHFKSWLNLCPNNKISGGKLISSKLLKKKPNQQVKPSELQLILFSEVIIGWEITLGV

SEQ ID NO: 339669 - protein, 341 aa, unidentified
MEQYVGLDVSMEETSVCIIDKNGEVMFEGEVPSQPGAIAELLRQRAADAVRVAFEAGALSSWLWHDLKALGIPVVCLDARHAKAALSMRLNKSDRNDARGLAELVRMGWYREARVKSMESRYIRALLIARAKLVNLKRDIENQMRGLLKSLGIVLGKVAGRPFLGKIVVVLRQAPHLRPIIEPMMTAHSALVTQILSYDEHVRALAKNAPTVRRLMTVPGVGPVTALAFVSTIDDPKRFASANDVGAYLGLTPRRHQSGEVDRTGRISKHGDRLMRYYLFEAANVLLNVVRRGSPLKTWGTTLKKRIGHKKAKVAVARKLAIILHCIWTDGTEFQWERDAV

SEQ ID NO: 339670 - protein, 391 aa, unidentified
MTKPKTKTVNDFSRCLDPLDMDATVIAVIEMSQSSWLVAGIVPGVERQPLKKLAIDEHALLNLLKRWRAEAEKQGHRITRIAVAFEAGHDGFWLARWLAAQGVEAHVIHASSVAVTREHRRAKTDRLDTELLKRAFLGWLRGERGHCKMVAVPTLAEEDAKRPSRERETLVGEASRIITRVKSAFVRLGIRGFNPKLKAAATRLETLRTPEDEPIPPNTLAALKRDLERHQIVKKQIREIEQTRLDVLKQAPEKGPHAMVLLLARVIGVGVETADMLVQEVLSRTMRDRRAVGRYAGLTGSPDESGAKRREKGLARSGNARVRHGMIQLAWRFLLFQKDSALAQWYRQRTADAPSTRKTLIVALARKLLIALWRLARDGVVPEGVRMRPAA

SEQ ID NO: 339671 - protein, 393 aa, unidentified
MVEDVHWFVGIDWATQSHRAVLLDAEARQVGEREFSHGGAGLTELRDWLLQKTAAAPGQIAVAIEMPHGPVVEMLLEHGFAVFAINPKQLDRFRDRFTVAGAKDDSRDAHVLGDSLRTDRKAFRKLATDNPVVIELREWSRIADELQQERTRLANRLRQQLWRYYPQMAELTDDVGDAWFLALWHKVPTPAAAAKVTEKAVARILKDHRIRRLDAATVLLTLRKTALFVAPGTTEAACVHIRSLAARMHLVNQQIKEACNALDSLCAKLGAPDEESPSGQSHEQCDVTILRSWPGIGRIVLATLLTEAAQPLQARDYHALRALAGVAPVTRQSGRQRFVIRRLACNRRLQTAVHHWSRVAIQHDAAARRCYDALRQRGRGHAAAWPGPCTCFA

SEQ ID NO: 339672 - protein, 349 aa, unidentified
MVILGIDAHKRTHTVVAIDEAGRQLGAKTTLATTTEVHLELVRWSDRFGSERRWAVEDCRHLSRRLEADLLAAGEQIVRVPPKLMAHARDSARTYGKSDPIDALAVARAALREPGLPIAQLDGHSRELRLLVDHREDLVRDRTGHINRLRWHLHELDPSWDPTPRSLVRYKSLDALTARLEGLEGTLPRIARDLVARIRELTIQANALEVEIVQRVSALAPSLLELSGVGGLSAAKIVAETADVRRFKSKDAFARHDGTAPLPVWSGNRVRHRLSRTGNRQLNAAIHRIAVTQIRCHDSAKAYLERRMANGNTKTEALRALKRKLSDVVYKALIADATPTVAARSGEAA

SEQ ID NO: 339673 - protein, 355 aa, unidentified
MNDAKYIGMDVHTATISAAVRDSSGNLVMEATLETKAETILEFVHGLRGSLRVSFEEGTCACWLHDLLKPHVTEVLVCDPRKNALLRVGNKNDREDARKLSELLFLNKLHPVYHGETGIRALKELARSYLTLTRDLTRVMNRLKAIYRGWGIACAGQQVYAPGYRAEWLAKISEAGVRRRAEVYYQQLDALAALRQEVRRELLAESRKHPAMRLLRQIPSIGPIRAALLIALMQTPHRFRTKRQLWAYCGLALRTYDSGEYRFVGGQLKRCKKAVTIRGLNKNHNHDLKNIFKGAATRAAAAAGPFQNFYEARIANGMKPPMARLTLARKIAAITLLVWKKGVRFDAEQLKQQAA

SEQ ID NO: 339674 - protein, 341 aa, unidentified
MMKLYCGIDLHSNNSVVVILDEADKVVYQKKLNNDLASILGQLSIYKDKITAIAIESTFNWYWLVDGLMEAGYTVKLVNTAEVQTYSGLKHTDDKDDARWLAHLLRLKILPTGYIYPKEERAVRDLLRKRSQLVRQSTTNILSLQNILARNTAQSLSSYKIKKLDDVQAEKLLDDPNTTLALKCNLNVIRCLQSTIAEIETTVLQQARIRAEFKQLLTVSGIGEILGLTIMLESGDMSRFPKVGNFSSYCRCVKSERLSNGKKKGEGNRKSGNKYLAWAFIEAANFAIRYNDKIKAFYQKKKVKTNGIIATKAVANKLARACYHVLKDQVPFDVNKSFSRW

SEQ ID NO: 339675 - protein, 410 aa, unidentified
MRALGRAIGLDVHRDFCEVAICEEGKVRSAERVDSSPEALEMLAASLGPDDRVALEVSGGAWAIVAILEPPVAKVVVVSPGDTGIAQARAKTDRLDARTVARLLWAGELEGVWAPDELTRLLRRRLARREQLVRARSRAKNEIHAVLLRCLAGQTAVRRPVGQERPAVAAAARAAGRGVRDGAGVHAPHRVPRHGDRRRRAGHRPLRAGVLRRSAADERPRRQCDLRRHLPAAVGDIGRFRTSRQLVGYLGLDPKVRQSGSTPAKSGRISKRGAGTVRWALVEAAASVIGQPGPMHAYYQRLRARRGHQIAVVAGARKLAVLFWCLLTRQQQYAHQQPSPTAKKLRLLEIRGGAPDLKGQRTGTFATREKMRAAERALALQAEASYVRMVRDWQAASPKKPGASVTPERA

SEQ ID NO: 339676 - protein, 347 aa, unidentified
MLIIGCDFHPGFQQVAIFYNRTGEIQEKRLQHRAEAEQFYRGLAGQEVLVGMEACGHYPWFEGLLQELGMGLWFGDAAKVRASVVRKQKTDRRDAEHLLDLLRQDRFPRIWVPSLEVRDVRQLLVHRHKQVQARTRTKNQLQAMALSHGVQKKRKLWTKAGRAELEQLPLLAYAAQRRKKLLEALDELDVEISELDRRVAEEARERPEAVRLMTHPGVGSVTALAMVLTLGPAERFGSGKQVGSYFGLIPSEESSGGKQRLGKISKQGSSFLRFLLVEAGQTAARYDPQLKRFYRRLAVRKNRSVAKVAVARKLATRLYLMLREQWTYAQLSQAVMQVSPSHSVAGE

SEQ ID NO: 339677 - protein, 342 aa, unidentified
MNIPVRIGMDTSKSVFQLHGVDENEVVVVRRQFRRAEMIRYFERLPPVLVAIESCGSSHHWARLLQSFGHEVKLIPPQYVKAYVKRGKNDAADAEALCEAVTRPSMRFVPVKSKERQAACMLMTVRERLVSVKSQLSNAFRSYAAEFGIVGPAGRQNVTALIKRVLEDDSLPEMARDLFRLQAEEYAAVQARLAKIEAKLMKWHREDDVSRRIATIPGVGPIGSSMLSMKAPPPETFRSGRDFAAWLGLTPKDHSTGGRQRHGGITKAGDSALRSTLIVGATALLRHIRKGRHKPTPWLASLLERKPPKLVAVALANKFARIAWRLMISGGVYNRPVADMPI

SEQ ID NO: 339678 - protein, 341 aa, unidentified
MSDYSYFCGIDLAKNHFSLHAVDQNGKVILHKSVTRSKLLTTIANMPLMRIGVEACGGAHYWARTLNKLGHDARIMAVKYVVPYRTKGKNDLNDAVAICEAVQRPSTRFVPVKSPEQQAILSVHRMREHWVRERTALMNRMRALLPEFGLIIPVGRSSLMKQIPLMLEDAENELSHLARTVIADAYHHLGELNQRIADTEQVFDSFAKVSANVQRVMKVRGIGPQTATAILASIGNGSQFDKSRDFSAWLGLVPKQYSTGGKPRLGRITKHGDKYLRTLLVHGARTVIANLGDKQDKLSQWCRGVLERRGMNRAIVALAAKNARIIWSLLHNQTEYENYAA

SEQ ID NO: 339679 - protein, 411 aa, unidentified
MVKENFIYVGIDLHKETHTAVMIDCYNQKLGEITFPNRPADFPKLVTKVKKCNTDAKEVVYGLENAYGYGRALAVWLIDKGYFVKDVNTAISHRQAKHRGAMYRKSDSDDAEAIALATLNMLNKLPDACPNDAYWSLGQLVHRRDNIMKQRTRLVNQLHEQLCIAYPSYKQFFNDISRPTALYFWEHYPSRKYLKGKSVEDLRAELVPVSHNKCSTRTCEKILDAIAGDKVKNNAYQDARDMVTLSIVSDLQHYDKQLAEVDKMLEQMYKMLGCTLTTIPGVNVITAVKILAEIGDIKRFSNANKLAQFAGIAPLHLSSSGKGKDVAAKQGNRRLQATIYFLAIQMVQISSKGTPRNPVVRAYYEKRKAEGKTSQQALICISRRLISIIYGMLKNGTEYRMPEVENTGENM

SEQ ID NO: 339680 - protein, 339 aa, unidentified
MVEGTEGSHHKEGSTKMAKRTTICAGIDTGKRKLDVALDGSLEQLQVENTSEGHKALLDWLRFHRVKRIGIEASGGYEQAVVAELRRRRFVVVVFQPAQVRAYAKFHLQRAKNDKIDAALIAACTAAVKKIHAAPDPRLLPFAEQLTMIDQIGEDIARLKNRLETCRNPRIREIWKEDIARLAKCERSERKALVAAIRQHPDLAQRLDLIISINGIGLPTAVALLVRMPELGRITREQAAALAGLAPYDDDSGDQIGVRHIDGGRERLRRSLYTAALPASFRWNPHLIALYQRLMAKGKEHKRALIACARKLLIFANAVVARGTPWQSTSPATVALAKG

SEQ ID NO: 339681 - protein, 340 aa, unidentified
MNFTPVGVDIAKQVFQVHWVEPETGEVISRQIRRAAFLEHFANRAPCLIGMEACGGAQHWARRLGEMGHQVRLMPGKAVKAFVSGNKNDVADARAIWTAVQQPAVRSVAVKTETQQAVLALHRMREQLIKFRTMQINGLRGLLTEYGEVMAVGRAALNRAMDGVLARLSERLPAMLVDTLREQWQRLNVLDEQIAQIERRLSEWMKAERACMQIAQIPGVGLLTATAAVATMGDPKTFSSGREFAAWLGLVPRQSGTGGKLRLHGISKRGDVYLRTLLIHGARSVLARTKEPGPWIEQLRRRRPNNVVTVALANKLARTIWALLAHDLKYEKAHVSVRPV

SEQ ID NO: 339682 - protein, 407 aa, unidentified
MDVINPRCAGLDVHKQTVVACVRIAGDAAPLQEVRTFATTTSGLLALSDWLDSHGVQVVAMEATGVYWKPVWNVLEGHFELVLANAAHVKNVPGRKTDVNDAMWLADLLAHGLIRASFVPPVAVQELRSLTRTRKQFVRERAAHVQRIEKILEDANLKLSVVISDILGKGGRAVLQALIEGQSDPERLASCITTRVKASRAELLEALRGHVSAHHRFMLKLHLGHIDALDQAIATIEKEVGLGLEPFRQAAKLLSTMPGLSTVSAHVVVAEIGIDMSRFATPAHLLSWACMCPRNDESAGKRRSTRLRRGGKWLKTTMVQAAWAAIKVKGSYLQAQFHRLRARRGAKKAIIAVAASMLTAAWHMLRNGTEYHDLGAAHFDRADAHKTATRLIRRLQQIGYAVQVTPV

SEQ ID NO: 339683 - protein, 387 aa, unidentified
MAQVIIGVDPHKRSVTIEIINGREKTLGQGRFGTDRDGYQAMLAAGRKHKDRLWAVEGCNGIGRHVAQRLVADGETVVDVPAKLSARARVFATGQGRKTDPVDARSVAVVALRTEGLRQVVTDDTTVALRLLVDRRDQLGRARTEVVSRLHHLLLELVPGGAKKDLSAQQARALLGTVRPRDVVGKTRRRLASELIGELVVIDKKIKVAKQELTDLVNSTGSRLMNLTGIGPSGAARLLGDIGDIARFASRAHFASWNGTAPIDASSGDQNRHRLSRAGNRRINRALHIMAIVQLRRDTEGRRYYRRRLAAGKTPMEALRALKRRLSDIVYRQMVADAKLLGTGPGGHAGATLQSSAADLNPEIDTSEKSLPGPATPQPRTTLAAAS

SEQ ID NO: 339684 - protein, 377 aa, unidentified
MSSQSATARSIIYLGMDVHKDSITIAVLPAGAKTPTRLERLPNDLPKLKKWMDRVVRDGEIRACYEASGAGYVLHRALREWGYACDVIAPSLIPRRPGVQRKHDKRDATDLARLYRAGELVTVRIPTEAEERVRDVVRCRETFQREILKSRHYILKFLARRGFVFREGTNWCTPHLQWLQHLTTEGSALAAHDRLVFREYHALLMYKLQRRDELDRQIEELALLPALAPMVSRLQCFRGISLHSAMVLATEIVDWRRFERPAQLACYLGLVSREDSSGDRTRLGSITKAGNTHCRHVLVQAAWSYRHRPQTSVDLKRRQQGQPPAVITHAWKAQQRLHQRFMHLSDRKRPQIAVVAVARELVGFLWAVMSDLEPIAA

SEQ ID NO: 339685 - protein, 350 aa, unidentified
MPKRNVPRPAAVYGIDIGKNIFHVVALGSDGTVVQRVRFRRDTLLQFFQRAGPAIVGMESCAGSQWVARKIQALGHKVRLIPAQFVKPYVKSNKSDIIDAEAIAEAATRPTMRFAALKTEEQADLQALHRVRDQMIGTRTRLINQMRAFCLEYGVALRQGAGLFKLDLPEALEDRANDLSQAMRKLLGDLFDDLRQLEKRIADVTREIEAIADREDAARRLMTIPGIGALGATALLAAIGNGRQFQKARDLAAWLGLVPREYSTGGKQKLLGISKRGNRYVRKLLVHGARSCFRHLDRTKDRLGSWLDGLQARMHPNKAVVALAAKMARIVWVVLTKPGALYERRDPAFA

SEQ ID NO: 339686 - protein, 353 aa, unidentified
MRFAGIDIAAETHVVAVMDAAGAVLVKPTPFTEDAEGYARLLDRLGPPSELLVVMEATGHYWKNLFVTLAAHGVAVALINPLRTHRFAGEDLARTKTDAIDALGLARFGAQKRPAATRLPDAATEELRELVRLRDRLVQDFGDRVRQLHRLVDLGFPEFTRYVKGLDSELATALLQDYPTAQAFQGVSVTRLARLRYDGLRRRLRTLEGDIERTLNDHEVGSLLTTIDGIGPQTAARLVAELGDPARFRSAAALAAFVGVVPALRQSGKRTGTRAGLTAIGHGPLRAKLWMPTLTAVRKNPWVRAYYDRLRARGKLPKVALVAAMRKLLIAVYTVAKHRRPFISTPVAAESRP

SEQ ID NO: 339687 - protein, 327 aa, unidentified
MPKYIGMDVHLRTCHATVMDDQGTILKQENLPNEKQELERFLESIGDAKVAMEACYCWQPVYEILESRGYEVKLAHPLKTRLIAEAKIKTDAVDSEALAHLLRADLLPTSYVPPREIRDMRELVRLRTYLVRERAKLKSKIRAELAKRGIHFMKSPFAKRRVTLLRDLGIQTVNYCLDVIGELDERIRQLSRELKAKAEESEEAGLLMTIPGVDSFSALAILAEIGDISRFSNPEKLCSYAGLVPSVHQSGATRYCGRITKQGSKLLRWVLQECMWTHLRYDTHISRFFYRLARRRGKQKASVAAARKLLSMIYWMLVRKEGFHARP

SEQ ID NO: 339688 - protein, 377 aa, unidentified
MKRVKFVGLDVHAETIAVAVAEQNGEVRSLGVIPNREDSVRKLVRKLGPVEEPRFCYEAGPTGYVLYWQLTRMGAKCEVVAPTLVPVKSGDRVKTDRRDALKLARNYRAGELTPVWVPDAAHEALRDLVRAREAAKKDELRARHRLNKFLLRQGRRPPMGVKLWTIKYLEWVKREVHFEQMAQEATLLDYLHEVEHAAARIARLDGAIAEAVKLAPPKMRAVIAALQALRGIAHVAAVTVVAELGELSRFARAKQLMGYGGIVASEHSSGEHTRRGGITKTGNAHLRRVVVEAAWTYRHRPAVGTSLRKRQEHVSEEVKEIAWKAQQRLHQRYKKLLANSKNKGVVVTAIGRELLGFIWAIGIKVEAAQKESLQRAA

SEQ ID NO: 339689 - protein, 342 aa, unidentified
MQITTIGLDIAKNVFQVHGIDVAEKVVVRKQLRRGQVMKFFEALSPCLIGMEACATAHYWARELTKLGHQVRLMPAKDVKAYVKRNKNDAADAEAICEAVRRPTMRFVRIKSAEQQGQLMQHRTRDLLMRQRTQSINALRAHLAELGIVAAQGDKGVKELLAIVTDEQDTRLPIDARASVIVLAAQLQAVQTLIGSIEKRIKTQHRSNEASKRLETIPGIGVIGASAITATAADPTVFRSGRDFAAWIGLVPRQDSTGGKQKLGPISKQGDRYLRRILIVGAISVLRRAQENPGKYPWLTQLLARRPFKVVAVALANKMARMAWALLAHGGTYRAPVLAVAA

SEQ ID NO: 339690 - protein, 462 aa, unidentified
MLGREERETSEKSRRQLEGLPVIRRGVAGIDLGSEQHWACAPTLDRSGREVAHFGATTAELIRMAEWLKARQVESVAMESTGVYWIAPHEVLEGQGLQVLLVDTRQLAQVPGRDKKSDPTDCEWIQRLHSCGLLRGSFRPEEAVCMLRTLVRDKANLVAESGDWLRRMQKSLDQMNVRVHRAVSDIDGVTGMAILRAIVGGERDAQKLAKLRDRRCSKTQQEIAEQLNGHWRDDHIFSLQQALKMYDAVQERMAAYEQEILRKLGEMEREEPHEPTAPPLQNASKARTIKKLGQEAKRQALYRMSGVDITQIDAIGVETVEVVVSEYGSDLSRFPTEKQFVSHVTLAPSVPKSGGKPVRKKKRNSASTRVAAALRMAALSLRHSQTALGAYYRRIAQRRGGDIAVFAAARKLATLIYRLLRWGQPYVDEGAAAFETRYRQHRIGRLAATAKELGYQLTPVPA

SEQ ID NO: 339691 - protein, 343 aa, unidentified
MRHYAGLDVSVKETSVCIIDESGKVCRETKVPSHPENLARALHDRAWCLERVGLEAGPLSQWLFSGLAATGLPVVCIETRHTKAFLQAQVNKSDRNDARGIAQMMRVNLFRPVHVKTLTSQKRRALLTARKLLQEKALAIDNDIRGLLRNFGLKVGPIGASKFETRIRELVEGMPELAEIIDPLLEARRKLRELFAVLHRKLLVIVRDDTVCRRLMTVPGVGPVVSMAFTATIDVPARFKSSKAVGAALGLTPVLNQSGESKRIGRVSLCGDGMTRTLLYEAAQVMLTRTTKWSWLKAWAMKVAARRGLQKAIVALARRLAVILHRIWVSGTEFRWTRDAQST

SEQ ID NO: 339692 - protein, 358 aa, unidentified
MNKIKNNKFDFTGQPIYVGLDVHKKSWSVSISTEHGQYKSFSQPPEVEKLVHYLHQHFPGAQYASAYEAGYCGFWIHDRLKEKGVGCLVVNPADVPTKNKERRMKRDPIDCRKLSRSLRNGELEGIYVPPRGKVEDRSLIRTRLNMVRKQTRCKNQIKSMLLFYGVVIPEKREMGHWSRRFIRWIEGIRMERASGDTALQIHLEELCHLRQIIAKLNRAVLVLSRTEEYRSWVLLLRTVPGISTLTAMILLTEISEITRFPSIDELTSYVGLIPDTQGSGEKEHVGGVTQRSHSQLRWLLIEASWKAVKTDPALMMAFNQYCKRMRKTKAIVKIARKLLNRIRYVLKNRSEYVPAVLE

SEQ ID NO: 339693 - protein, 298 aa, unidentified
MRIMILGIDLGKNSCSVVGVDATGAIVTRRTMRRQTLIDYVTKLPACIVAMEACCGAHHLGRLFTGRGHEVRLMSPEYVRPYIKAQKNDDRDAEGIAEAASRPTMRFVDLKSQQQLDIQTLHRVRSRLVAERTNLINQLRAILLERGVIFPAGRRKLELGVDSMLAEDVKLLSSRVQQLVPELRAEWQELDTKIGALNTELIQLARNDAATRRLTTIPGIGVLIATALVAAVGNASSFAKARDLGAWLGLVPRQYSTGGKPRLLGISKRGNTYLRTLLIHGARASLPSLSKSDTPTGR

SEQ ID NO: 339694 - protein, 395 aa, unidentified
MVFVGIDVSKDYSSAQGLDREGKKLFYLDFPTNGEGFSRFLDRVKRQVEDLSEVMVAMESTGCYHINLFAFLCSEGIVCMVINPLLIANFARLSLRKTKTDKKDALTIAQFLLAHHRTLSQVSYSQSSQDLKDLARERESLAVMIAGLKNDVRRLLQMTFPELEHRCKLFTETMLRFLMKFPSARAIHSAKAKEIAKALIHVEGKRKRVWISAQEIIAMAKSSVAAESVAKEWILSDKIETLLYLEGKKKRITEVLVEACRSTRVEDLDIITSVDGISTITGSTFLAELGDIKTFSSSKHVIAFAGLDPSIRQSGQYEGISRISKRGNRHLRRVVFLMTLCAVRSQNVFREYFLKRKEEGLPPKKAILATAHKLLRVLFAMLTSKSHFRKEVVEV

SEQ ID NO: 339695 - protein, 345 aa, unidentified
MYSRKDIILAVDYHAENSEIRWFNCASGEERCLNLPSTRGGILTLVEKAAEAASVGGKVVWIMESTTGWARVKELIGARVEFVMANVLQMPLPPKGYRRKTDKIDTGRMLREFLNGSLPRSYQPAARWRELRRLVDSRQDLVERQTAVKNWIVHFLHHETWADREGLWTQKGLRRLRGLRLSAGDRMVLDLKLQELEQLAHRREQLEAAMQAVYDQWPEAQWVDEVRGIGMVTAVSMLAHVGPIQRFPTAEDLISYAGLAPGHRQSDQRQHNGRIGGGGTDSQLRYFLIESMHWVCQIPRYRDAYQRASAKHGKNIARIIVARMLLRSLFKMLKDKVRFNQAPAA

SEQ ID NO: 339696 - protein, 375 aa, unidentified
MGVVVGIDAHKASHTLVGVDCAGRKLDELTVPATTAGHLKALVWACKVFGGDVVWGIEDCRNLTLRLEHDLLDAGQRVVRVPPQLMARTRASARSRGKSDPIDALAVARAVLREPDLPVATHDQLSRELKLLVDRREDLILYRTATMNRLMWRVHELDPLRAQRRMGLDHANNRAALRNWLAHQSGLVAELARDELADITWVSEEIDVLHRRIAVRVRAAVPSLLTMVGCAELTAAKIVGETAGVFRFRSEAAFACHAGVSPVPHHSGGKAVRSRATHFGNRQLNAALYRIAITQLRAGPGADYYRRRRDGGDSHWEALRRLERRIARKVFTHLRADEGNRDESVTVHWRPDELERINAEWSRALEQAMHDPGDP

SEQ ID NO: 339697 - protein, 413 aa, unidentified
MGRAARMATSSLHLTMECRDAPAERPRLSPGQALSRSLVALDQNSTIIAVIEMSQSSWLVAGMLPGIERQPRKKLEPSPERLLGLLHGWQDEAVRAGRTITRIAVAFEAGRDGFWLARWLAARGVEAHVIHASSIAVSREHRRAKTDRLDTELLKRGFLGWLRGERGHCSMAHVPTIAEEDAKRPNRERDSLVGERTRIVNRIKSTLARLGIRNFKPTLRKAAERLAAVHTPEGMPLPPNTLAELQRDMARLGFVVSQIREIEDARQKRLEQHETGPPAMVRRLARIVGVGVETADLLVHELLSRPMRDRRAVARYAGLTGSPDESGARRREQGLARAGNARVRRAMIQLAWRFLMFQKDSALALWYRARTADSRSGTRKTMIVALARKLIIALWRFVTTGEPLEGVVLRPAS

SEQ ID NO: 339698 - protein, 357 aa, unidentified
MGKSISNYSSVTVVGLDIAKNVFQLHGVDAEGALVVAKPVRRGGLLKFFASLPPCLVGMEACSSAHHWARALIELGHDAKLIPPAYVKPYVRRNKNDAVDAAAICEAVGRPAMRFVPVRSVENQAQLMRHRARELLAGNRTRMLNALRGHLAEIGIVAAQGAQNAYALKRLVADGLDDNGEIIVPDCVRRALAPLVHQIDVVDEEIAAIDEELKALVKSDETARRLMTIPGVGPVTAQAIVATVRDTSAFSSGREFAAFLGLTPRQSSSGGKERLGRITKMGDRYLRKLLVIGACATLSHRKGHNDALRVWASSLLERKAVKYKFKLTAVALANKVARIVFTILTRGGEYDERPIAV

SEQ ID NO: 339699 - protein, 320 aa, unidentified
MVASQDAPVFVSFVGVDVAKASAEAHLLPEGRAVTPKSPADLVRVAKAAAGPVLVVLEATGGYERPWVAALAEADLAVAVVNPKRVRDFAKSLGLLAKTDRLDARAIARFAEAVQPRPREKTPEKQGELRDLVARRRQLIDMRTMEQNRQKTAAGAARTSIRQVLRTLQEQVDEHDAAIATLVESDDDWKAAAGRLASVPGVGPVTAATLVAEVPELGKLNRQQIAALVGVAPVNRDSGQFRGKRFIAGGRAAVRSVLFMAAFTASRFNPALKRFAERLKAAGKPHKVVITACARKLLTLLNAMAKAKTSWDPKKCPQPA

SEQ ID NO: 339700 - protein, 356 aa, unidentified
MSSVTQLDHLGVVVGVDTHKDEHVAVAIDERGARLGECRLTATGEGYARLASWARALGPIVAFGVEGTGSYGAGVARFLTGAGHTVVEVNRPDRSTRRRIGKSDPIDAEMAARSVLAGVATGRPKSGSDRVEMIRMLKVAKDSAVRARTQAVNQIKALVVTAPAELRASLTELPNRQLIARCAAARPGPLTTPMAAAKHALRSLARRHLELGRELDELETQIATLTAAVAPRLRTTFGIGADTAATLLVAAGDNPHRLHSEAAFAALCGTNPVPASSGKTDRHRLNRGGNRQANAALHRVVVVRLRWHQPTKDYAERRLKEGKTKAEIMRCLKRFVAREVFAILRDIDTETAVRVA

SEQ ID NO: 339701 - protein, 344 aa, unidentified
MLYVGLDVHSRQSSLCILNANGGTVNQIQLKGPRAAVVDRLRQLDQPFSICYEASCGYGHLYEALRPLAHHIAVAHPGKLRLIYGSKRKNDRVDAQKLAKLLLLDMVPPVHVPSIDVRAWRSLIILRQRVMSQVVRCKNQIRGVLRENDIAGAKWLWSRRQLAWLQSLELHPVARLRLELAVEEFQTLDARIKRIERELQTYADRHPAVTVLMTIPGVGIRTAETFVAWVDDVTRFRNNRQLGSYFGLVPCQDASADKNRLGHITRDGPPVMRKLICEAAWTAIKKDKTFRAYFEQVMGGKPERKKIALVATMHRMIKVMGAMLRSGEPYHGETLKRRCAAVVE

SEQ ID NO: 339702 - protein, 421 aa, unidentified
MQVIYERCAAIDVGKDEIAVAARLPGRGRDGRQTEKRTYRALYGVLREMARWLTSQGVTHVAMEATGVYSMPVYYALMEHGDFEQVLVCNPGHVKNVPGRKTDLADAEWLAQLLECGLMRGSFIPPAGVKAVRDVIRYRKKIAQQRVSEIARLGDVLQDAGIKLDSVASSIATKSGRAMIEALIDGERRGPVLADLALGRMRSKIPDLSVALEGRFAEHHAMLCRLHLGHLDHLETMIAELDARIEAMMQPFHAACDLLVTIPGIAALSAAAVISEIGTSPRDWFPTAAHLASWAGVCPGNNESAGKRHSGKRRPGNKHLEPVLVEIAWSAVRHEGYLKSLYRRHVQRNGGFRNPVAKNKAIVTVAHAVLIIIWHVLTTEKPYHDLGAGYFDRYADPEREAARLIARLQALGKHVTLDGAA

SEQ ID NO: 339703 - protein, 348 aa, unidentified
MSMVGGLDLHRGQITFDVVSTETGEVWRGRVGQPTRLRFRQWLESELAPRADGRLVALAVEGCTGWRYVVEEITAAGFEAHLAEPADTQAARGRKRRAKTDRSDARLLRTLLADGDLPESWIPPECVLEWRERVRLYKSLVDQRTQWTQRIHAELFQHGLPVPDGEIATPATRAQLCDPALAMSEAARQRIRTGYAMIDATNAEALPLKAELARFGARQPACRALVRDHFGIGKLTAVAIWSELGDCRRFSRSMQVVRHAGIDVTVDSSDTHRASGHLSHQGPGILRWALYEAAKCSARPAAPDYAYYCSVKQRHDGKLAALAVARKLARRCYHTLRRIEPEEVYATV

SEQ ID NO: 339704 - protein, 362 aa, unidentified
MDSRRFVAHRWSGIGESPWETVMAAKTYGIDIAKNVFQIHGVDEDGQVVVKKRLSRAQLKRFFSNHPPALIAMEACCGSHYWARVLSGEGHDVRLIAPQFVKPYVRGNKNDGNDAAGICEAVGRPDMRFVAVKPPEPTSILMLHRVRDRLIGQRTALINQIRGYLAEFGIVIRKGARCVRRELPSILEDAENGVPWSAREMFAGLYEELVALDDRLKKQDGRLRAVFDADPQCKKLAAVEGVGVLTATAFVATIGDPAVYKNGRQVAAWLGLTPREHSSGGKQRQFGITKRGDCYLRKLLIHGARSALRVTPRRQDRKSRWVESLRARTHDNVAAVALAAKNTRILWSLLANEGEYNPALPA

SEQ ID NO: 339705 - protein, 354 aa, unidentified
MDEGENRQLVIGVDTHKDLHVAVALDALGVRLGQLLIPATTAGYAQLEQWGRAHGTPTAFGVEGTGSYGAGLTRFLRQRDYRVIEVNRPDRAARHRQGKTDPLDAEAAARAVLAGVATAVPKAGDGTVELIRVLKVARDTAVRARSQALITLKTLLVTAPAELREELAGLADTALLHRCAGLRPGAVTTPQAAAKHALRALAHRWLDLHREVHLHDGELDRLTQEQAPELRAAFGVGPDTAAELLIVAGDNPRRVHSEAAFAALCGVAPLPASSGQTTRHRLNRGGHRHANAALYRVVIVRMRWHPATLAYTKRRLAEGKTKPEIIRCLKRYVAREAFRHLLHRSGVDASPPAA

SEQ ID NO: 339706 - protein, 352 aa, unidentified
MSCYYVGLDVHKASICIAVLNAGGKLVMESVIETSAATILGFLKELRGEVHVTFEECTHAAWLYDVLKKIKAQVIVCDPRKNRLLQDGNKSDKVDARKLAQLLRAGLLSAVYHGEHGTRDLKELVRSYEYLVEDSTRVMNRIKALYRSRAIACAGTDVYKVRQREAWLAKLPEAGAQARAGRLFSELDHLTSLRREARRALVAECRRHPASKLLLKVPTLGIIRIAQLIANIVTPHRFRGKRQFWSYCGLAVVTKSSADYRVAGEQVRRTRKAATRGLTQSYNRTLKYVFKSAALTASRCGPFKAWYAELVERGLRPELARVTIARRIAAITLAVWKSGEVFNAEKLIRPTA

SEQ ID NO: 339707 - protein, 397 aa, unidentified
MASGHVNRANRPNTWPLRPTPQSEDSPCQPGANGMDPALAAVESRTSTAVKEDVMQVVRIGLDLAKYVFEVHGVDNHGKVVVRKRLRRDAVAGFFANLPACLVGMEASNGAHYWARVLTELGHQVRLISPQFVTPYVKSNKNDQNDAEAICEAVGRPSMRFVPPKSTDQLAVQAVHRIRRRLVADRVRLVNQIRGLLSEHGIVIARDIAQLRRGLAVIVGSINDGLGEMLRALMRELQEELSELDTRIAAHDRRIREIFRTSEQCQRLGKIEGVGPVTATALIAAVGDRSCFKNGRQFAAWLGLVPKQRSSGGRARLFGISKRGDRYLRTLMIHGARAALSRATGKQDPRSLWLGKMRQRRHPNVVAVALANKNARIVWAMLTGDAAYEPALSVKAA

SEQ ID NO: 339708 - protein, 352 aa, unidentified
MTVTIVETRAPARAITGGVDTHAGAHVAAALDPVGGLLGVQEFPATPAGYAQLLGWLGGFGAVCLVGIEGTGSYGAGLARYITAAGVRVVEVDRADRQDRRRAGKSDPLDAVSAARAAQSGRAAGAPKGRDGAVEAIRALMVAQRTARSERTQTINQARALVVTGPDDLRIRFATHAPADLVAELASLRPRPGAVVGYATRIALRELGRRAQFLDRQLERLDEFIVPLVTARAPGLLALYGVGPDTAALLLITAGDHPGRLRSEAARAHLCATAPIPASSGKVTRHRLNPGGDRQANHALYRIVITRMSSHPPTRAYVARRTKEGLSKKEIIRCLKRYVAREVYPHLRGPAG

SEQ ID NO: 339709 - protein, 355 aa, unidentified
MKQLCAGVDVSAASLEVAWRGKDGRIVRRTVRNDVTGHRALIKELRRAGSGAPVRVAMEATGIYGLDLAVALDGAEGVEVMVANPRVIANFGKALLQRSKTDVLDAETILMFVERMPFIAWHSPSAAALQLRAIARRIAALTKMASGEKTRRRHAAASEVIGTLLERSARQTAALLEREIAKLRKAALALIAADTQLARRMSLLTSIKGIGEVSAVQILAELMLLPADMTDRQWVAHAGLDPRLFESGSSVRARTRISKAGNHYLRASLYLPALVASRYEPNVKAFREHLSARGKRPKSIIVAVMRKLLHAIHAMFRNDALFDGAKFYRSTPAPVAATSGIPPSAIFEVSSALSS

SEQ ID NO: 339710 - protein, 318 aa, unidentified
MSNHTTVAAGIDTGKDKLDVAIDGSDRGLQVNNDAAGHRSLLVWLRQHGVTRVGIEASGGYERAVVAQLRGNGFTVIVFQPIQVRAYATFRLQRAKNDKIDAALIAACTTAGEDKIRPAPDPRFAAFAEHLTLIEQVEEDIVRYKTRREAFLDKTNLQLIENEIVRLRAGRRRELKRLHDALCAHADLNQRLKLVRSIPGIGERTALALLVRMPELGSISREQAAALAGLAPYDKDSGHLTGQRHIAGGRKRLRKSVYAAALPAAFHWNPALIALYRRLITAGKPHRLALMACARKLVIFANTVLTRGTPWTDRTAIA

SEQ ID NO: 339711 - protein, 342 aa, unidentified
MKNLIIGVDLATKEIQVCVYVNKKVHSNREMTPSQFSDYLANLSPSLIVFESCAGSNYWNQLATELGHQSRLISPRLVSVIRQNQKTDKNDALAIIQASQLPDIKFVSGKTNSQQQAQSMLKLREQAIKQKTALKNQLKGLMREFNLPVGRSHQSFILMIELTLEDAENGLKSEFRHMLNTSLDLYLVLCKAIESYDDLLNQWVCQSSECKKLMKIEGIGKLNAMHLYIGLDSGELGQFKKGKDAAACIGLTPLQHSSGGKVKLGSIGKRKNTSLRSLLITGAMSVVQQVVKREPRTSKEAWLKSLIDRRGKKCAAVALANKNVRTAFSILRNQTEYRAVTL

SEQ ID NO: 339712 - protein, 314 aa, unidentified
MSPLVFVGIDVSQARLDIAVRPGASSSHPHNESAIAAVVEQLCALSPTLIVLEATGGMEIPLTSALATAGLPVVVVNPRQVRDFAKASGHLAKTDALDAQVLAPFAEVMRPQPRPLPDAETRALAAVLTRRRQLVEMLTAEKNRLLSAAAPIRKRVRVHIAWLERELDHTNTDLAEAIRHSPVWREKDDLLQSVPGVGPVLTSTLLASLPELGTLTHKQIAALVGVAPLNRDSGTLRGRRTVWGGRTQVRAVLYMGAIVAARFNPVIRTFYQRLLRAGKAKKVALTACMRKLLTILNAMLKHRTPWRVVEAHHA

SEQ ID NO: 339713 - protein, 340 aa, unidentified
MSEKEAILGIDISKDKFSSALLKGEKKSQVKEFANNFEGFEELKQWLEQNQLEKVHACLEATSTYGHSVATYLHSLGHTVSIVNPSRIKGFAQSRLSRTKNDQADATTIARFCAALKPQAWIPPSPEMAQLQSYSRRLRALEQMTTQEKNRLKTTVDGSLIEDIEAHLVFLETQINNVKKRQKELLNEYSSLKSQADLLTSIVGIGEPTAMTILAEIGDINQFSSARQLAAFAGLTPQEHQSGTSVKGKTRLCKIGNPHLRKALYFPALSSMRHCPPMKGLRERFLEAGKNKMQIVGVVMHKLIRIVYGVLKSGKPFDQTKLAIPVAVSEEGIDFSPISP

SEQ ID NO: 339714 - protein, 320 aa, unidentified
MMAQNDQIVVGIDVAKDKVDACIRSLSQRHTFPNTAQGHRKMIAWLHKHKGNKAVMEASGGYERDCARVLRLAGIEVRIVDPKRVRSFALSAGRLAKNDVIDAEMIAWFAETFSEAPSQTHDAAHEELLALVKARKGLLDLKTRLQSQNEHAAPGPVQKAHARVLKSLAAEIAKLEAAISAKIKATPDFAERAEIIESVPGFAETTSANLIAGMPELGQVSDEIAAALIGLAPYDDDSGHRRGERHIKGGRRWVRNAIYMPCLGAATQNNPVLKAFYHRLIAKGKEPKVALIACMRRLIVILNTMIARRQKWDPSRYALN

SEQ ID NO: 339715 - protein, 341 aa, unidentified
MFIIGCDFHPTFQQIAYMNTETGEEHELRLAHPIEAELFYRSLKETQVRIGIEATGNFRWFRRLVGGLGFVLLVGNPTEISASAPRRQHTDKRDAQHILRLLLEDRFPVVWMPPVADEDQRALLVHRCRLVRLRTRVKNQLDALAKNEGLVRIRASSGEGREKVEALPLSGWQQRRRQDLFALLDDLDERIKPLDQAVAQAAEARPEAKRLMTQPGVGPVVALAYVLTIGPWERFPRGKYVASYLGLIPAEASSGQSRRLGKLSKQGNSMLRWLLVEAATIAQRKDVAWHRQYLRLSQQKHHGVAKVAIAHKLAVRLYWMLRSGQDYEQVKERGSHAGQSE

SEQ ID NO: 339716 - protein, 418 aa, unidentified
MAEVMIGIDPHKSSHTAVAIGSGEEPLSELQVAACPSQAGTLLAWAAAWPERTWAVEGAAGLGHLLAQQLVAAGEQVVDVPPKLAARVRLLQAGNTNKNDPNDAFSVAVAALRSAAKRPVLAEDHAAVLKVWAKRHRDLARLRNQAVCRLHAVLCDLVPGGVPKEITAGQAARILEQVTPAGAVARARCELAAEFLTDIRRLDAQRREAGTKLAAAVKASGTSLTGIFGVGPVIAGTVIGDVRQVFRFGSRGHFAACNGTAPAEVSSGGRKVFRLSLRGNRRVNHAIHMAAVTQIRHKHSQGRAYYERKLAEGKTHKEALRALKRRISDAIYAALAADARHAAAICSKGPGGQPGNHSVSRAASSHPARQLFGQATPGPVTTLRPSATAGPLLTQPSRAPRRRSGHPPAASKKPQTTT

SEQ ID NO: 339717 - protein, 345 aa, unidentified
MEHYAGIDVSLESASVCVVDVTGRIVREAKVASEPEALIAWFGSLGFAVTRIGLEAGPLSQWLHAGMRKAGLAATLLETRHVRAAFKAMPVKTDRKDARGIAQLMRLGWFRPVHCKSLPAQDVRALLRARRLVQAKRHDVEMSLRGILRGFGLKVGATTPKTFETRVRELAAGSTTLTVIVQALLAARAVLEREFQGFEKRVRALARADQRARLLMTTPGVGAIVALTYASAIDDPKRFTSSKQVGAHFGLTPRKYQSGETDVTGRISKIGEGHVRAVLYEAANVILTRPVKGGALKSWAMRVAGRAGMRKAKVALARKLAVILHRMLASGTSFVAEKAAAARAG

SEQ ID NO: 339718 - protein, 343 aa, unidentified
MQTMTTIGLDIAKSVFQVHGVDAGGQVIVRRQLKRRYVLTFFQKLSPCLVGIEACGSAHHWSRELQALGHTVRLMPPAYVKPYVKRQKNDATDAEAICEAVTRANMRFVPTKTAEQQSGLVLHRARHLFVRQQTSVINAIRAHLAEFGIVAPVGRHGVEELLSVVTDPNDKRVPDIARACLSALGDQLQSIKQHVLEFDRLIRAWHRSNEMSLRLEAAPGVGPVLATALVAAVADPKSFRSGRNFSAWIGMVPKQHSSGGKNRLGNISKQGDRYLRGLFVAGALSVIRYAKVHGTKHRPWLTALLTRRPTKVAAIALANKIARMVWAMMATGERYKEPVALAR

SEQ ID NO: 339719 - protein, 464 aa, unidentified
MKDKRRPQVPRRPGRGLAPLNPNVAGVDCGATTHYVGIPTDRPGPTVRSFPTFTTGLQALVDWLVSVGITSVAMEATGVYWIPLYDRLEARGLEVVLVNARHIKHVPGRKSDVADCEWLRDLHSVGLLRGSFRPAAAIVGLRTYVRHRQTLVESAGTYVHRMQKALIQMNLQLPVVVSDITGVTGLKILRAIVAGQRDPLQLARHRDYRCRATPAEIVDALTGTYRPEHVFVLQQNLELFDTCQQQLTACDRALEAELQRLVADRPSPATPLPAPRVVRRRADNDPACELRTPLHHLTGGVDLTQLDAIGPYNALKLIAEIGTDMTRWPTEKHFTSWLTLAPSNKISGGRLLSSRTEPSANRAAAILRIAAMTLGRGSTALGAFYRRLAGRIGKPQAITATARKLAILVYRALKGDLVYRDPGADAYDRQQRSRTLTRLRRTATTLGFDLVDRDTGEVLTPASS

SEQ ID NO: 339720 - protein, 366 aa, unidentified
MKKDSIRIRNGKGDWEGNQLTIGMDLGDRTSRYCVLGEEGEVLMEASVATTQKGLSEAFGVLPPCRMAIETGQHSPWVSRHLSGLGHEVIVAHARNVRLIGESTRKDDRLDAKTLARLARIDPALLSPVRHRSAEAQAHLIRIRARAVLVGARTALVNAIRGLTKAYGERLRKCHPEQIRKELAAELSPELRTALEPLFQEVQSLTERIQHYDHEIEKIAKQHYPEVAQLQQVNGVGPLIALTYVLTVDDPHRFGKSRDLGCYIGLRPGRRNSGNSQPQLHISKEGNRYLRTLMVQGAHYILGPFGKDSDLRRWGLKLAQRGGRNAKKRALVAVARKLAVLLHKLWVSGEVYEPLRNHREEKRAAA

SEQ ID NO: 339721 - protein, 350 aa, unidentified
MPNAPLQPIATLGIDIGKNSFHLIGLDARGAIVLRQKLSRGQVEARMANMPSCLIGMEACVGAHHLSRQLLALGHDVKLIPGQFVKPFRKSHKNDFRDAEAIAEAVLRPTMRFVPTKTVEQLDLQALHRVRSRLVSQRTAVVNQIRTFLLERGIAVRQGLRSLRQALPDILAKRTDVLTPRMGHLIEGLVQDWHHLDERIEAVTEEIEALVAADEACQRLMSVPGVGPIIASAMVAAIGNGAAFSRGRDFGAWLGLVPRQNSTGDGTVLGRLSKRGNSYLRSLLIQAARVLLLWPAKWRQHSFGAWLTAASMRLHHNVLAAALANKLARIAWSVLSQNRVYEPRAAAMAG

SEQ ID NO: 339722 - protein, 366 aa, unidentified
MKKISTVAIERIGIFKQNQLTIGLDLGDRISYSCFLNEAGEVIWEDKLPTTAKGIEEVFGTIPRSRIALETGTHSPWVSRQLTQLGHEVIVAHARNVRLIGESSRKDDQRDARTLARLARIDPRLLGPVRHRSAQAQIHLTVIRARAVLVSTRTALVNAARGLTKSYGARLPKCGTEQMNREIAKRLSQELRDALDPLLADIESLNQRIAQYDGRIEQIAKEVYPQVAVLKQVKGVGPLIALTFVLTLDDPHRFRHSRDVGCFLGLRPGRRNSGMSEPQLHISKEGDRYLRTLLVQGAHYILGPFGQDSDLRRWGLKLAERGGKNAKKRAVVAVARKLAVLLHKLWVSGEVYEPLRNNRKVMSAVA

SEQ ID NO: 339723 - protein, 393 aa, unidentified
MFYYLGIDVGKFSHSLCLLTEAGKKTIFQINNNREGFEKLRIKLSELNCDKNILVGMEATGHYFLNLYDWLLQCGFDSEQIALLNPLQVKSFRNTNLRGAKSDNVDSERIAVLLKFGEFKRCNVATDEMMNLRELTRLRADLVANIGDLKRKIISVMDRVFPEFMTVFSNRFGKTVMSLLNSYTPEEMAELSLEKLTDVIKNLSGRGRGISQKKIQALHEASRNSIGITFGRQAFKIELDILLTRLKVFKEQVEKLENEIQLIAEKFDSKIFTIPGIRATTGAAILSEIGNIQNFSLAVKLIAFAGLDPKLKESGKYQGRTPISKRGSKYLRNAIWYSAMVACRVDDKFKKFYQDRRNKGKSHRYSVTAAANKLTKVIYHVLKNKCEYDSKLV

SEQ ID NO: 339724 - protein, 367 aa, unidentified
MCVGLDTHKAKIAVAVAEPGRSGEVRFRGEIANRPEAVRQLLERLAERHGRLRVCYEAGPCGYGLHRQITALGHDCTVVAPSLIPRKPGDRVKTNRRDALTLARLHRAGELTPVWIPDPTHEAMRDLVRARTAAMEAVRRARQQLQGFLLRHGRVFTGRKAWSPAHRRWLAGLRFEHPAQQIVLQEQLDVIDEAERRRDRLEAQIRELVPGWSLAPVVAALQAMRGVALLSAVVLAAEVGDFRRFATPRQLTAWLGLVPSEHSSGAKVERGGITKAGNGRARRVLVEGAWSYRFPARVTGELQARLEGVPEKVRAIAWKAQLRLCARYRRLVAAGKNANLVTAAIAREMAAFAWAIAREAQPAGAAA

SEQ ID NO: 339725 - protein, 368 aa, unidentified
MGWTPPTASMRQSGGVKHHLREASVSEVIIIGLDIAKYVFHVHGADERGRAIFSKRISRGKLLDFFAAHPRCRVALEACGGAHHWARQLAQLGHEVRLIPPAYVKPFVKRQKNDAIDAEAICEAAQRPSMRFVAVKSEQQQAASLVFRTRDLLVRQRTQIINAIRGHLTEYGWIAPKGPSHVTMLADLLEEEEMANSLPEAARAMFRLMLDLLAGLNGKIAALDKEIARRAREDAVSRRLMTVPGIGPISATAIAALAPPAETFAKGRDFAAWLGLTPLQRSTGGKQKLGATSKMGERTLRRLLIIGSSAVVLQASKRGAPKGSWLEQMLARKPRMLVTVALANKMARIIWALLVKQENYRAPVAAEA

SEQ ID NO: 339726 - protein, 339 aa, unidentified
MDQFTKKKYFIGIDISKDQLDVALLKAEELDVFKDKKVDNSFTGFDAIHNWLLKQKVKLEDCLFCMEHTGTYGLLLFAWFSQLGVDYCVEPGIKIKRSSGITRGKNDKVDARRIADYASTNRTKLNPFQMPSSLLLQIKQFLTYRDQQTKIKVSLKNSLKSHDLYQRVSGVQSISDEIQHQITECDQRIDKIDVQIIELIKTDETLKKNFELATSVKGVGLVIAAFMLVTTNNFTSFENGRKYACYAGIAPFENSSGKYQGKTKVHHLANKRVKVLLSNGANSARQWDPELHAYYARKTDEGKEHKLVINSIRCKMVNRVFAVVKRQTPYVNTYQQKIA

SEQ ID NO: 339727 - protein, 410 aa, unidentified
MEQQVKFDQVIHCGCGMDVHKKTVVATIRRSDTDFETREFDTYTRSLKELREWCKSEGVTHIAMESTGIYWRPIYNIMEEDFEIILVNARHIKNVPGHKTDKKDSRWISKLLLSGLLKGSFIPPREIREIRDLVRYKKKIIGQISSEKNRVIKILEDCNLKLSSVFSDVSGASASKMINDIIEGNDEVEGLMEHIHGKVQAPRSEIRKALEGTLTNHHRNMLRLVKMSIEGKEKIIEELDRQIGEAVEKYAVEIDNLQTIPGVGKESAIRIVSEIGVDMSRFPDENHLSSWAGMSPGSNESAGKKKSTRVIHGNKHIQTTLVECGWGATRKKDGLLKRKFASLVTRRGKKKALMAIGHKIIIAAYFVIKNKAEYREPLLNDDPKRKNKQVKNYLAKLKELGYEVEVKNVA

SEQ ID NO: 339728 - protein, 351 aa, unidentified
MLLIGVDYHPSFQTIAFFDEESGECGEQELNHSDGQAERFYRGLQQRGICVRVGMEATGYSRWFERLLAELGIEIWMGDPAEIKAKRVKKRKTDRNDALLLLRLLRENNFPQIWVASPENRDLRQLLWHRHRLVQMRTRIMNQLQALAMNEGYRWKKKLFSEQGRAQLEKLVLAPWASRRRQELLELLDRMNPTIEELTAAVEQEAKKRPEVLRLMTHPGVGPLTALAYVLIIGTPTRFQRGKQIGTYVGMIPCEESSAHKQRLGHISKQGNSLLRFLLVEAAQAAARSHPDWRRRYLHLALRRHQSIAKVAMGRKLAIRLYWMWRNGSEYSRSLEFGSYAGQLGTGHGVK

SEQ ID NO: 339729 - protein, 347 aa, unidentified
MDTIGLDLHKRESQLCIIADDGTIAARRLVTSRERFTAVLGDRPRARILLEASTESEWVAQHLESLGHEVIVADPNYAPMYATRARRVKTDKRDARALAEALRLGAYHAAHRVSAARRHVRAELAVREALVRTRTRYIALAKALVRRDGLRVAASESHLVAKRIAALELSETLAAELLPLFHVLAPINEQIKAADHRIATLTTSDPIVALLATAPSIGPITASAIVATIDDVTRFQSAHHFEAFLGVVPGERSSGEKRQVGRITKAGNARVRYLLVEAGWRILRSKDLETAALRAWALNIAGRRGKRIAVVALARRLAGIVYAMWRDGRPYDASQLRMPRPRVSQAS

SEQ ID NO: 339730 - protein, 350 aa, unidentified
MEYVGIDWSYRRAAWCALSDAGAIVGEGAVSTDEDGLARLVIKRGTEVRAVVEMMSGAIWVRDTLATAGWEVQIAHARKVRDVAPLACKTDKVDARVLAELCRRDLVPELWVPALADRELRERLRRRMHLVRMRASAMNRIFGLLTQWGLRLSLKRLREPDAMTLLEQRGVPLVWRRSIAEALDVIELLDARIGPIDAELGPLARADTRVALLDTIPGVGALLGLTIASEIGDVARFGSPRKLVGYAGMAPKVSQSGDRSRTGALSKAGSRTLRWAAVEAAQHAWRPTNPWHQLYTDVAKRAGKNPAKSAVARKILIATWHVLSRQQPFKPAAPRRPHPASASSRCFLAA

SEQ ID NO: 339731 - protein, 439 aa, unidentified
MKALPILNEKATGIDVGSELLHVSIGGGVPKVFHTLTREVQALVGWLREEGVGTVAMEATGVYWMYLYEALQAGGLEVVMVNGGHVRNVPGRKTDMADCQWLATLHAHGLLRPGFVPCEAIRRLQDYMRLRDDHVEMASSHVQHMQKALERMNVKLHDVISDLTGVSGLKVVRAIVAGEREPVRLLELCDVQIKRHKAERVVESLRGTWKAEHLFALRQALSGWEFYQGQLRECDQAIEQVLRAIGGPAQEGDSSRSGASKPGGTNTPQIQGLHRLLVQMCGCDPTTLPGMADYSLLRVLSEVGTELNKWPTEKHFTAWTGLAPGSAQSGKRRKNQTRRRNRVGQFFSAMARSAGNSIDTALGGCYRRLKARRGGLVANKALARKLAAMFWRVMVHGIEYVEQGLKHYQARAALSEQRVLRKLASKHGLELVPRSATAT

SEQ ID NO: 339732 - protein, 405 aa, unidentified
MAVFVGVDWAEAHHDVCVKNDLGAILLKRRVPDGIEGVRRFHELVAPLIEDPSEVLVGIETDRGLFVGALVAAGYQVYAVNPFSTSRYRDRRSSSGAKSDPGDAGVLADLVRTDAHQHRRVAGDTDLAEAVKILARAHQSMIWTRQRQTSTLRSTLREYYPNALVAFAEHLDSAEALQLLEVAPTPVLGRQLSRSKIQAILRRAGRQRRVEERAVEIQAALRAEALEAPALIAEAFGSSVKASAGVVVELQRQIEVLETAMAEHFEQHPDSKIVQSLPGLGTVLGARVLGEFGDDPERYASAKSRKNYSGTSPITRASGTKRVVLARFARNRRLADATYLWAFSALTKSPGARALYDRHRAAGDTHHQALRALANRLVGILHGCLASQTLYDEHIAWDITKSNVA

SEQ ID NO: 339733 - protein, 345 aa, unidentified
MQIKSIGIDLGKTTFHLIALGSRSQVVIRKRFSRSQLLVYTANLPSSLIGMEAGVGSHFLGRALREQGHEVRLIPAQFVRPFVKSNKNDYRDAEAIAEAVERENMRFVPIKTEDQLDLQALHRVRDRLVARRTSVINQIRAFLLERGISFRKGPASLRRQLPEILENADQKLSSRMRRLLDFLWQEWKGLQAQVESLNADLEQIASSDAACVRLQQIPGVGPLVSTAVVSAIGNGAAFKKGREFAAWLGLVPRQWSTGGKPKLLGISKRGNPYLRKMFIHGARAAVLRVKREGSSLGKWMSGLETRAARNVVIVATANKLARISGAVLASGNDYHPTHKTLVFSN

SEQ ID NO: 339734 - protein, 457 aa, unidentified
MTASKKRSRTSEGDGLPVVHRHAAGIDVGATFHVVAVAAERDAKPVRTFRSFTGDLHRLADWLTQTGITTVAMESTGVYWIPVFEVLEARGFEVLLVNARDVKNVPGRKTDVNDAQWIQRLHQHGLLRGSFRPRQGIVALRAYLRHRERMVEYAASHVQHMQKALMQMNVQLHHVVSDITGVTGMRIIGAILSGERDPEVLAGLRDVRCKESRDTIAKALAGNYRPEHLFVLQQALELYEVYQERIRSCDRKIEGTLRVLNEHQDAPPESLADRRSKRQKNEPGFDIQPALHVLLGVDPTQIHGIGPYLALRLVGECGDDMSRWPTAKHFTSWLTLAPGNKISGGRVLSSKTRRSANRAAALLRMAAISVGKTHTALGAFYRRLGARVGKAKAVTATARKLAVLFYNTLRYGSAYADPGAAYYEERYKERVRKNLQRRAAALGLQLVEAVPSGMGVS

SEQ ID NO: 339735 - protein, 374 aa, unidentified
MMVRVHADVRRVPMVNMQPHRRIVMKYYKSTTEYNCGIDLHSRQMYVCLMDKEGTKLLHTNIKGNDFDYFLKRIEPYKHDLTIVCESTFNWYWLADACCDAKLEFVLAHALYLKHIHGGKNKNDRIDSEKLAHLLRANLIPPAYVYPAEYRPLRALLRQRMKYVWARASLIGHLSMDQHAEGVVPVSTSSNREDWEQRILEQYTDPLHRLAVESDMELIRSYDKLIKRLENELEQRAKKFFRCNYVLLTTVPGIGKIMALTILLEIDTVERFPTVKDFTSYARLVKGSVASAGKVKGLTGGKMGNAYLRWAFGQIAILAKQHDPLINIYGERLVAKHGKFKGNAILSNKIARAVYFMLHNKTVFDVEQLIATSI

SEQ ID NO: 339736 - protein, 340 aa, unidentified
MSLYGGIDLHANNSVIVLINEQDEVLYQKRLPNDLTTILGQLAPYHTEMKGLVVESTYNWYWLVDGLMAADYRVHLANPAAIQQYNGLKYTDDHSDARWLAHLLRLGVLPEGYIYPKAERAVRDLLRKRAHLVRQHTANVLSVQNIMARNTGGRFSVKRIQELTKQELTTLLTEETQVLAVTSSLVVLDCLQQQIKTLEKTVHKRLQHTPSYEQLLTVQGIGTILAQTIALETGAISRFPTVGNYASYCRCVDSTKISNGKRKGTGNVKNGNPYLAWAYMEAAQFAMRFQPAAQRFYQRKLAKSRNNTVLARKAVAHKLARACYYIMRDLVSYEVTKAFG

SEQ ID NO: 339737 - protein, 339 aa, unidentified
MQVTTIGVDLAKNIFQVHGITESDEVAFNRPLRRAQMVPFFARLDPCLVGMEACSTSHYWARELTKLGHEVRLIPPMYVKAYVKRGKSDAIDAEAICEAVTRPTMRFVEAKSVEQQALLSLHRARSLMVRQRTQLVNALRSMLAEFGVYVARGLARAISFAQDMLAGAELELPEIAQDVVHNLCGQLSVLHGQVRWYEVRLRLEAKRDPRVKLLQTIPGVGPVTASAIAASIGSGHQFNNGREFAAWLGLTPTNRSSGGKERLGRITKMGDQYLRQLLVVGMTSLVRQKKSHPERANKWLTSLLERKPARLATVAMANKTARIVWAVLTKNEPYMPRTT

SEQ ID NO: 339738 - protein, 343 aa, unidentified
MDKVSTIGIDIAKNVFQVHGIDDAGEIVVRRQLKRVQVLKFFTKLPACLVGIEACATSHHWARELSKLGHDVRLMPPRYVKPYVKRNKNDAADAEAICEAVQRPNMRFVPIKSPEQQSVLMVHRTRQLFVRQRTSLINAIRAHMAEFGIVAGVGRNGVEKLLEIIARGHDERVPETARECFLALAAQLELVKRQILQADRRVLAWHRTSQTSKRLEAIPGVGPLIASALVASVPDPSVFRSGRDLSAWIGLVPKQNSTGGKDRLGSISKAGNRYLRQILVVGALSVIKRAKQLGYTRHPWLVKLMERRSPKIAAIALANKIARIAWAMMVRNESYRTPLPASV

SEQ ID NO: 339739 - protein, 343 aa, unidentified
MLEEYDGRQVVGIDLHRRRSVIVRMTEAGERLGCVRIDNDPLVLAAEMAKAGEHPEVVLEATYGWYWAVDVLQEIGAQVHLAHPLGVKGFAYRRVKNDQRDAADLADLLRMGRLPEAYVAPPAVRELRELVRHRAKLVALRSGLKAGVHGVLAKQGVHVPVTDLFGVGGRRLLAAVGLDGAYLARVNAYCRLIDAVGFEVDAVSGQLRARLCAHPGYLAIQQVPGVGPVLAAVFVAEIGEAARFPDAARLVSWAGLTPRHRESDATVRRGPITKQGSGLVRWAAIEAAQKMPASAGWLVSSRARIGERRGRNVATVAVARKLLTLVYYGLRDGHVRALARAAA

SEQ ID NO: 339740 - protein, 324 aa, unidentified
MIDGILGIDVSKNTLDASVSSRSKGRARSFANSPDGWRHLLDWLITQRVGRVHACLESTGRYSLGIACALNEAGHVVSIVNPAQIRDLARTKLGRNKTDGVDAAHIREYCELFKPQPWAPPSDAHRRLGELQTIRAGIIAGLTEWKNRRNSGMVDAVAQSLADVTISHFTCQLGAVDEAIAQTIDNDSVLRRKRDLLLSISGVGETLAGVVLAELPGPDILRSSAEVVAYAGLNPRQHQAGTSIDRVTRVSKIGNAVLRAAFYMPAMSAMRYNPAIVALVTRLKSRGRLKPKQIVVAAMRKLLVLCFGVLKTGRPFDPAIAMGC

SEQ ID NO: 339741 - protein, 353 aa, unidentified
MIVVGVDAHKGVHVAVALDEAGRELSEWRGPNNAAGWRSLIEWATALPTPRVWGIEGAWSYGRGLAQQAVSEGETVYEVNPRWTALGRRRARKPDKSDRLDARAVAHFVRQEASSLPQVAAEDVTAVLDLLTTEREGALAEATRLRNQIHALLLQVEPEYRARLKKFRSKAALDALETYAPAGDGLLHAHRVTAVRMLAKRLRLALSQVDELARRIETLAAEDFAPLTRLCGVNLLTAGALAGILGPGNRFSSEAQLAAYAGAAPLEASSAGRIRHRLNRGGNRRLNCVLYRIVLTQASHLPEAKAYIERRVSEGKTRREARRALTRYIARAVWRLWQECQSTSVSVSMDEAA

SEQ ID NO: 339742 - protein, 355 aa, unidentified
MKRTVKYAGLDVHQATIVIVVREESGQIIARQILPTDATAVTEFFRGMRGNIHVTFEEGTQAQWLYDLLMPRVARVVVCDRRNARRHGNKNDWQDAAELADLLRRDAVRPVYHGGTPQTAELKELARTYVNLVQDSTRVMARLKAVYRARAIRTRGRTVYSPRHRATWVAQLPTEAVRFRADALSTELELLQDLRGQAKTALLTAARRQPAWSVLRAIPGFGLVRVALLLAFVQTPWRFRTKRNLWAYAGLAVTTRATAQYELDGRIPVRRRRAPLTRGLNRNHHPLVKALFKSAAMTATTRPGALHDFYHRLVAGGMREELARVTLTRKLAALTLRLWKTGEAYDPAKLTQAMC

SEQ ID NO: 339743 - protein, 424 aa, unidentified
MNFTQNEKLNQVTADTLIVGVDIGSQTHFARAFDWRGVELAKRVFKFSNTGVGFLTFVKWIDEVQVRSSMKKVIVGCEPTGCYWLTFQSFLEKQGIKLVTVNPYSVKKSKELDDNSPEKSDLKDPKTIAGLVKDGRYSISYIPKGVYAEIREASVCRDQIMKQHVRLSNQIQGWLQKYFPEYMECYKDFDSTSGLMLLQNAPLPHDIIRLGAGGINEIWRNAKVRAAGLKRAQTLIEAAQNSVGLEGGEAAKLEIWILVNDYIAKKQQLERLDGYLAQKVMEVPNVEKLLAIKGVGLSTVIGFIAEVGDIGRFTDPKQIQKLAGLEITKISSGKKKGQSGISKRGRSKLRRTMYESARALMNWNPAFADVFLYYRNRTRNPLGGMQAKIAVACKAIRVFYTILKTGCDFDEVKFREDIIRPEAA

SEQ ID NO: 339744 - protein, 357 aa, unidentified
MEKQLKQSLGIDVSKLNLSLSLGFLSKRLVKEFKSHSDVPNDIKGYKELLKWLKASVDHEVELLVVMEATGVYHQRIAHYLHERGYSVCVMQSGRVKRYAQSLDQRSKTDALDSRMLSMLGLERSIRLWHPPSEELQELKGLSRERSSLLNDRTMETNRQGAIASGVHSNARALKRHKIRLKLLNTQIAAVEEEMRILISKNEVLKRKLDYLISIPGVSFISAATVIGETLGFESIVNAKQLVSYAGYDVVLRESGNFKGKTRISKKGNSHIRAVLHMPSMACVRCNPTLKQFYNRLKPNKAKPLVALVAVQRKLLILMYTLWKNEEVYDAKFETKKQQKHEALAARDNNLINQPVS

SEQ ID NO: 339745 - protein, 476 aa, unidentified
MKRKSIPSSRGPKTSRQSKCKKQAWKVVHPHAAGIDIGATEHYVAVPPDAVAAGESTVRSFGCFTQDLDALVEWLKACGVDTVAMESTGVYWIVPFQKLEAAGLEVVLVNAHTLKHVPGRKTDVQDCQWIQQLHTYGLLRASFRPDELTCRLRTLVRHRANTVSSGAEYILQMQKALTQMNVQLHHVVSHLTGETGLRILRAILNGQRDPLILVELRDPQITRSTKEEMRKALVGDWRPELLFVLKQSLRGWEFCQEQMRECDGQIEQLLKEMPSAVAAKTPAARPQPDPLASTNPRPKGKQSRKRNDPEKDLGPELARICGVDLTAAHGLRLLTVLTLVSEIGVDVSKWRSAKAFVSWLGLCPNNKISGGRILSSRTRKVINRAANAMRMAAVGVGDTDTWLGSFHRRMRAKLGPAAATTATARKIGTVVYHLLKHQEPFIDRDLMAYEAKVYRHKLARIKKQAAALGYALVKTE

SEQ ID NO: 339746 - protein, 342 aa, unidentified
MTAPDRSESASFSCPSVGIDVSKASLDVALLGNGEKATVSRKVPNSKEGFEALLSWIEKQTNRSLEESPEQIHVCLEASGGYQRPVARFLHERGLTVSVVNPQRTSAYADSQLARSKTDRVDAHLLARFCEREEPTPWEPSSCEHRSLKEMTRGLEQLKKERDRLKNQIGQSENPTVTDSLESVLESVNEQIDRLEDRIDQHVESTDTLARNRDLLETIPGIGQTTAALVLAELGDYERFESARQAAAYAGLTPSHHESGSSVHRNPRLSKVGSSRLRRALYFPAITALRCNAAIEAFGDRLADRGKEKMVIIGAAMRKLLHICYGVLKNGTPFDASLHPGT

SEQ ID NO: 339747 - protein, 351 aa, unidentified
MKKRNTVGMDMGDKNHRICVIGDDGRIIAKQDVKNDVEAIRSHFKDYEPCLIAMEAGTHSAWVSRELSAMGHEVLVGNPRKLRAIWDSDEKDDDRDAEMLARIARFDRSLLHPIHHRGKEVHADLAVIKARDILVQARSRLVAHARGAVKSFGRRISTCSAESFHDKAMEEIPEELRDALTPVVKSIEDMTVRIRHYDKMVTELCEKKYSETERIRGIRGVGPITSLAYVLTVGESSRFKKSRTAGAFLGLTTKRDKSGETDKQLHITKAGNVYLRRLLVGSAQYIIGPFGPDCDLRRFGMKLAQRGGKNAKRRAVVAVARKLAVMIHHIWASGEAYDPLYQKNHKQRKAA

SEQ ID NO: 339748 - protein, 460 aa, unidentified
MIMNKKNQKTFIVEEGFDMINPDAAGIDIGSKIHYVCVPEGRDNERIRSFGCFTEDINKMASWLKKCKVKSVAMESTGVYWIPVFQILEQAGFEVNLINAQYIKGVPGRKKTDVEDCSWLQKLHSYGLLKASFRPNDQICVLRSYIRHRARLTENASTHVLRMQKALTEMNIQLHNVITDIMGVTGTAIITAILEGQRDPLELAKLRNERIKSSEDVIAKSLQGNYREEHLFILRQEFESYQFYQNQIQALDKVIEACYQTFDQQGNREPLKTKKKPKSKHTPPFDLRERLYVLTGVDFTAIPGLNELTVQTILSEVGTDMSKWETEKHFTSWLGLSPTNKISGAKVLSSRTRKVKNSAATAFRIAACCAGKTQTAIGAFMRRIKSKAGSPKAITATARKIACLFYRLLKYGSDYVEQGLEYYEKKYEENLVEKVKKAAKRLGYELVKNLEKPAMEANVS

SEQ ID NO: 339749 - protein, 451 aa, unidentified
MKKEKQKTGVVKMGSGLPVFNPYAAGIDIGDTLHCVAINDGNGSHEVKTTSAFTCDLHEIVDYCKTNGVTTAALESTGVYWLALYLLLEEAGIEPYLVNAKHAKNVTGRKKDDTDSIWLQKLHTCGLLQKSFQPDNEIRMLRDYTRQRKNLILLGSDSIRRMQKALELMNIKIHTVISDILGKTGMKMVKAIIAGERDPQILCTLCDPRIKASHEEIIKSLQGIWKEEYLFMLEQAVENYEFLQKQIKRCEEKIQQQLLKQVAIINEGDITCLEGTLKKKLKAKKNQFDFAISPYLIAIAGVDLCKIPGISDVTALEFISEVGVDMSKWESAKHFAAWLNLTPNTKISGGKIISSKMMKKNNKAGQYLRQAASCLSTNKTPIGDYYRRMRARLGGRGAALTTAHKLSRVIYTMLLKKTEYNQGLLIENQEKLKEEKIKNLEKQLARLKQVA

SEQ ID NO: 339750 - protein, 368 aa, unidentified
MGQKSSKLYVGMDVHKDSIDIAVADEVGEVRHHGQIGGDMNALWRAVRKLESQGRELVFVYEAGPCGFGVYRGLIGRGHACWVVAPSNTPRRVRDRIKTDRRDSLKLAGLARAGELTPIYVPDVRDEAMRDLVRTREDAVVMQRQARQRLAALLLRNDVRYAGKTAWSAAHRRWIAELKLPQSAQRLAFEEYVQAVEEASARVQRLGQCIEQELATWRWRSVVAALQACRGIQVIHAVRIVAELGDLSRFSHPRRLMAYLGLIPSEDSSGEHRHQGAITKAGNSSARRALVEAAWAYQYGAKVSTQIARRQTDVPKAALDIAWKAQVRLCARFRRLAARKVNRNKIVVAIARELAGFVWAIAQHVKPI

SEQ ID NO: 339751 - protein, 326 aa, unidentified
MSRMQGKTSSTQPATPPVYVGIDVSKSHLDVYIHPAGIARRVTNDKSGLKALTALLQSQAPDVTVVEATGRYHRPCHRHLHAAGFCVAVMNPFRTRKFADMMGQLAKTDEIDARTLALFGAMVKPETTPPPTQEVAQLSELLTARRQVGTEMTTLKVQGGQCESKLVARQIRARLKMCERHQKALETEIRALIQQHPELQRRFDILTSVPGIAFVTAATLIAELDELGAANAAQISALVGVAPMNCDSGAWRGQRKIRGGRQNVRNALYMAAISAIRANPDLAAFYSRLREKGKPFKVAVTAVMRKLAILANSLLSENRQWKPQRP

SEQ ID NO: 339752 - protein, 324 aa, unidentified
MIDGILGIDVCKNTLDVSISSYTKVRTKSFTNSPDGWRHLLDWLIAQKIQRVHACLESTGRYSLGIACALYEADHVVSIINPAQIRDFVRTKLGRNKTDGVDASHIREYCELFKPSPWVPPSEAHRRLGELQTIRSGIVAGLTEWKNRKNSGIVDAEAQALADATISHFTSQLGAVDKAIALTIDNDRDLQSKRDLLLSISGVGETLAGVVLAELPGPDVLRSSAEVVAYAGLNPRQHQSGTSIDRATRISKIGNAVLRAALYMPALSAMRYNSAIVALVSRLKSRGRLKPKQIVVAAMRKLLVLCFGVLKTGRPFDAAIAMGG

SEQ ID NO: 339753 - protein, 347 aa, unidentified
MPAAELVDGVIVGVDTHKHTHTAAAVTATGAVLEHVTVAADPAGYRRLLTFGRGHEASAWAIEGTGSFGAGLTTVLLAQGERVFEVDRPQRPARRAGVKSDDIDAVRAARQVLAGVGLADPRSRGEREAIRVLLTTRAQAVDFRTRAIAALHAMVTSAPQQQRERLRDLPLASLLRTCAGLRGSNRQSFEEFATVTALRATAKRALACENEAAELEAQLVTLVERAAPWLLDQVGVGPIVAGQVLTSWSHRGRVHSEAAFAMLGGVAPIEASSGMVVRHRLNRSGDRQLNRALHTIVMVRLRQDPQTKAYAQRRLAEGKTMREVKRCLKRYVARQLFRRLETLPKTA

SEQ ID NO: 339754 - protein, 388 aa, unidentified
MDVLYQSCAGIDVHQATVVVCILHGPLTSTRPKREMAQFDTTTKGLKACHDFLSQFHVEAVGMESTGIYWRPVWHELCDDFELILAQPAHMKAIPGQKTDKKDAHWIAQLTRIGLLPRSFVPDETIQELRELTRQRKHYVESRNRETNRIHKILQSGGIKLTTYIEDIMGASGRNLLQLLIDETPITPRIVHQSVYTSLKRKVPQLLEALDGYFSAHHRFMLAQSLEIYDFYQKQIDCLEERMNGYLNLYERPVEILDSIPGIDLTTASVIIAEIGVDMNRFPTAGHLASWAGLCPGNNESAGKKRSTKIRHGNSYLKRCLCQTVFAAKKQKGSPLAERYCQIQSRRGPQKATIALAHQLLKIAYILLKENLTYQEFVLQKRLLETSQ

SEQ ID NO: 339755 - protein, 370 aa, unidentified
MKKRITFVGLDTHKNSIEVALADEGANSEVRLYGSIGGDLDSLDKMIRKLRQPGAELRFVYEAGPCGYEIYRHLRAQGLHCDVVAPSMVPRRSGDRIKTDRRDACNLARLYRAGELTTVYVPHEDDEAMRDLVRGRQDAINAQRKARQQLGGFLLRHGVRYPGKCLWSQAHGRWLAGVKMPHPAQQIMMQEYIHTVQECTQRVLRLNEQIQHLLPDWRMHPLVAALQALRGVAPVVAATVVAEIGPMGRFQNPRQLMAYLGLVPSERSSGGSVRHGAITKTGNGHARRALIEAAHSYRHPARISRTILKRQETLAEPVRQIAWKAQLRLCARFRRLIARGKSRNRVVAAVARELSGFMWAIAKQVPVPQG

SEQ ID NO: 339756 - protein, 346 aa, unidentified
MEHYAGIDVSLELSSVCVVDAQGKIVKEAKVASEPEAVVAFFEALGFAVKRIGLEAGPLSQWLHAGLKEAGFETVLLETRHVKAALSAMTVKTDRKDARGLAQLLRMGWFQQVHAKSMASQEVRALLVGRKQLLGRLIDVELSIRGILRGFGLKVGAVTRKGFEARIRELVTGHATLERIAEAMLSARAALKAEYEKLHKAVLAIVREDAVCRRLMTVPSVGPLVAITYKSAMDDPSRIAKSKAAGALFGLTPKKYQSGEKDVTGGITRTGDEMVRTALYEAANVLLSRITRFSKLKRWGMDVAKRRGSKRAKVALARKIAVILHHMWIDGTTYRWAEAKPIAAQA

SEQ ID NO: 339757 - protein, 335 aa, unidentified
MDGQYVGIDLHRRRSLIVRKDADGVTQATTRIANDPMRLAEVIGEAGPHPAVVVEATYGWYWAVDLLQELGCDVHLAAPSGLNWGQRRVKNDERDATDLIDLLRVGRLPEAWIAPPTTRELRELVRYRFKLVGLRTGLKAQVHAVMAKNGVLPTRVDMFGPGGTAQLDALKLPAAYTTRLESLRGLIDTLDAEVKTMERQIHDVLRGGAGYEAIQHLNGVGRVLASMFCAEIGDVHRFPSAKALCSWAGMTPRHHESDTKVIRGRVTKQGSRLVRWAAIEAVAHMRGGPKLQVDYHRIAERRGVNKARVAVARKLLTLVYYGLRDGEIRAIREAA

SEQ ID NO: 339758 - protein, 345 aa, unidentified
MKIVGCDLHTRYQQVAMLDRETGELVERRLEHESGEARAFYAALSSPVRVGIEATGHTRWFERMLAELGHELWIGDAAQIRASMVRKQKTDARDAAHVLELLLSERFPRLWRPTMAERDLRQLVWHRQKLVWMRNAVGNQLHALAMGEGVCRKKKLFTKKGRVELEGLGLGVWASYRRQELLTMLDRFDASLQELDRAVAEQAQQNAAAVLLMTHPGVGPVTSLAFVLTLGPVERFERSKQVVSYLGLNPREHSSGGRQRLGAISKQGNPMMRSLLVEAGHTAARLDGELRQDYQRLKLRRGSGVAKVAIARKLAVRMYWMLRRQASYAQLVRMQGSPWATLVEQ

SEQ ID NO: 339759 - protein, 367 aa, unidentified
MSSVIYVGMDVHQDSFSLCALAASSGEIIRETRCSADVKNVVKFINHLPENESNQVTLGYEAGIWGYSLHNRLVELGYDCVILAPSTMYSNAKHQMVKNDHQDAQMIAHNLASGTYKVVYVPDQEDDEVKEFIRLIKAMKKELKQTKQRIRAFVLRNGFRFERTPWTGVYLEWLSQLQLPRIKKMVLDEYLIHYHELTDKIERLSRLLGDLSHQERYQEPISKLRCFKGIDTVAAMTIHVETSDFSRFPNARAYMAYLGLTPSEHSSGKNVSLGRITKQGNSTIRTTLVESAQGLVRGNPSKKSKKLKARQINQSGRVINYADRAVNRLHERYERMIHAGKPRNVAIIAVARELACFIWGMENGKIA

SEQ ID NO: 339760 - protein, 407 aa, unidentified
MEVVYRCCCGIDVHKKVIVACLVNGGEQELREFGTTTSEIKTLANWLTESGCEMIAMESTGVFWKPLYNLFELMDLDAMIVNTAHMKALPGRKTDVKDAEWIADLLRHGLLKASYIPNREQRELREITRYRKSLTEERCREVNRLQKILEGANIKLDSVVKDITGKSARKLLQRIIDDDIPDSDEVSKLVHGRMRPKLEQIVASIEGITTPLQRKLLAQIIDHIDDLNRRIGELDKLVQEYMAEYEAAIEAIDEIPGIARRSAEVILAEIGLDMGRFPSAAHLCSWAGVCPGNYQSAGRRKHGKTTKGNKALKTILTQCAKSAKTVKSSYFFAQYQRISARRGKNRATLAVAHSMLIAIYHILKNKTAFHDLGSDYYDSFNRDRKINSYLKRLKALGWEPDAIPSSA

SEQ ID NO: 339761 - protein, 428 aa, unidentified
MTNRQPIPTDALLVAIDIAKVRNEVLIEAPNHKRRRRLSVLNTRAEHDRLIETLRAYGKPVICTFEATGNYHRPIAWRLIEAGFDVRLVSSMALARTREALHNGWDKNDPRDAQVILHMLRIGATQRYHDPLRAGINDVQELSKTHEAIAKAKTEIQHRILTHYLPLYFPEIERFRGNSRSDWFFAFLDAFPTPASIMALSKEAFIEAAWDVVGRKVSKERLLADIYETARTSIGLPLPIDAPAIRMFQMVIAEARSLIRQRNEIEDMADAMLRDSADYKALRKVPGIGPVIALTILAEGGDLRRFRHHRQFLKFCGLDLSTQQSGQHRGQTRLSKFGNARLRRTLWIAGQVAIRQRENGFRHKFERYIAKDRDNPDLRRKALTAITAKMARVVHAIIKSGSDYRPFVEGRVPGGRISFCGAVRAPKG

SEQ ID NO: 339762 - protein, 340 aa, unidentified
MEHIVGIDLHSNNGYYGIIKPDGKRVFQKRLPNDLQTVLSALEPYKETITSIVVESTYNWYWLVDGLTENGYKDRVQLASPAGFNPYAGLKHGDDKSDAFFLTELKRLGILPVGYIYPKEERPVRDLLRRRMMLVQQRTKHILSFQSLITRQTGTNMPCNNIRKMKEDYVETLLDEEHLILAGETNISIIRFLTEKIRLLERAVLKRIKLKPEYENLLTVPGIGKILGLTIMLETGAIGRFVKAGNYTSYSRCVKSKRISNSKKKGEGNRKNGNKYLEWAYVEAANFARRFCPEAKKYYQRKLARTNRMVASKSLAGKISKACYFIMKDQEVFKKEKLFG

SEQ ID NO: 339763 - protein, 422 aa, unidentified
MRVLFERCAAVDVGKDVIAVAVRLPGGGPDGRVTDKRVYKTFYGVLAEAARWLVSLGVTHVAMEATGVYSMPVYHALIEHGDFEQVLVCNAGHVKNVPGRKTDLADAEWLAQLLECGLLAGSFIPPADVKAVRDVIRYRAKISQQRVSEIARLGNVLQDAGIKIDSVASSIATKSGRLMIEALIDGERRGQVLADLAKGKMRAKIPDLSMALEGRFGEHHAMLCRLHLDHLDHLDGTLAKLDAQIESMMAPFRAARDLLITIPGIGVLSAAAVISEIGADVREFFPDAGHLASWAGLCPGNHESAGKRRSGKRRPGNKHLQPVLVECAWAAIRHDGYLKALYHRHVMKWGGYRSHIAKSKAIVVVAHAILVIIWHVLATGKPYGELGADYFTRRQDPERETLRLIAKLEALGHRVTLQDAAA

SEQ ID NO: 339764 - protein, 345 aa, unidentified
MKHFAGLDVSLEETAICVIDEAGTMVREARVPSEPEALVAFFQGPGLVMERIGLEACSLSAWLHESLVAAGLPAVCIETRRAKAAMGAMPNKTDRNDARGLAQIIRTGWYRAVHVKSPACRSWRALLAARRLVLNKMRDVENGLRALLREVGLKLGTPSRKEFAARVRELATADPVLSVLVEPWLTIIAAMTRELAQLTKRVLDIVRDEPVCRRLMGVPGVGPLTALAFRATLDQPDRFRRSRDVGAHLGLTPKRYQSGETDVQGGISRCGDELARTALYEAAHSLLIRSRRWSTLRAWGMQVAKRRGMARARIAVARKLAAILHRMWADGTEFRWGKDDAAVAA

SEQ ID NO: 339765 - protein, 428 aa, unidentified
MDEVETIRLEQFRQLKKEIRGSERHLIVGIDVAKDKHHAFFGTATGKTLLKRLVFENTLEGFEKLLLHVEAVKGKHALEKEVFGFEPTANYHKPLGEFLIKASHMVVLVSGVAVKRNRELLDGRWDKHDTKDSSNVADLISQGKFMYYDYPVLPLRDLRNLLSLKRRWKRQEHGLRVRLRNHLVAQYFPELDRYYRQWGSEGLALARWCLSPSVISGMDYEQFTRLVAPGTRRIAQRERLKAVWQRAARSIGCEVGEALAFEAKMMVEALAQVRESIDAIDGKIRDICVRFPEYHYLLTIPGFGPDVSSKVLAAIGNPFRFGNHREVLKMAGYDLSANRSGKNADGITPVISKKGKAELRYALYQAAHIAATGNQYFVMYFTNKLRGRERERGIKTKMKVKLAAKLLIVAWTLMKREEPFNPEYLNIE

SEQ ID NO: 339766 - protein, 342 aa, unidentified
MSTIKTIGVDLAKNVFSIHGVDAYGKCVLRKTVKRNKLLDTFAKLPPCLIGMEACSGAHHWARELLKLGHNPKIMASKFVIPYRQNEKNDANDAEAICEAVSRPKTRFVSIKSEEQQAVLCLHRIRQGLIKTRTATINQLRGLLSEFGIVMPQGRYSAQNTIGSVLEDAENGLPILARELLQDLSNKIQNLNLEVLHYDRRVSALVHEMASAKALMDIPGVGEHSASAIIATVNDAKQFGSSRQFSAWIGLVPRQYSTGGHVHLGRISKRGEKHIRTLLIHGARAVIARCKEKTDRNSIWLNQLVERRGYKRAAVALAAKNARIIWALLTTGKEYKINYVNG

SEQ ID NO: 339767 - protein, 394 aa, unidentified
MKLVGIDVGKNSHHFCVMDKETGEFNVTPSSFSNNKEGFDFLINSLKPYSKKSILLGMEDTGHYHVALLKFLLSNGYTVALINPKTTDLTRKMEGGITKNDKLDTITICDVLDTPERKKQYRITKVDRFDLYEQRQLTRHHHNLKEELNIYCNRLQKSIDLVFPEFNTLFGSKYGVVYMNLLKTFGSAEAIASTDIRTIRKCFEIKGRGGRISLTAEKLKECAKNSIGISSEVETIQIKHLVSQIMLIKEQIAEIDKKIEEFSIKNNSPILSIPGISHFSGTSILAELGDIGNYSKPSRIIKFAGVAPYHYESSQYNAQHTAITKKGSKYLRKTLYQVILPVINNNPVFQKYYRLKISQGKGHRCAQGHCIRKLLRVIYHLLETGQSFDPALLR

SEQ ID NO: 339768 - protein, 349 aa, unidentified
MTQAITETIGLDVGDRYSRYQVLGQADGEDAGGGRVPTTPSRLQQLFAAYPQARVVLEVGTHSRWISEIAEASCAEVLVANPRKLRFIYGNDRKSDQVDALALARVGRLDPNLLAPIRHRAESTQRDLATIRARAGLVQARTKLVNTLRGVIKSFGFRFPPMATERIGPQALEHVPGELRSQLGPLLVAIEALSGEIASYDAQIKELAASHPEAALLTQVHGVGALTALAFLLTIEDRDRFRSSRTVGAFFGLVPRRDQSGAVEKQLPISKAGDRMVRTLLVQCAHRILAKNGPDSDLRRAGERIASRGGATAKRRAVIAVARKLAVLMHALWRSGEVYRPLENHVPTA

SEQ ID NO: 339769 - protein, 335 aa, unidentified
MDNLVFCGIEVSAQELVVAWTGKKGQAVMQRFANSAAGHRALSAALTRGGKRVRACLEATGLYGWDVALFLSTQAGLELMVANPRAARHFALARMQRSKNDRLDALGLWEFAKRMEFTAWRRPAEHCLTLWALARRLQALTQQRVAEKNRQHAAGVSQAIPAAVRRSVARTLRFLEREMQQLREQARRCIAGDARLQQRYAQLCSVPGIGENSAMQILAEVALLPEDRDVRQWVAYAGLDPREYSSGTSVHKHTRISKVGNRHLRRALYMPALVASRREPHLRGFYEHLLARGKKKRQALVAVERKMLHAIFGMFRTNQPYHGALVYQLPAEKVA

SEQ ID NO: 339770 - protein, 353 aa, unidentified
MEQFIGCDAHKKFSVFVAVNEKGRAGEAMRVAHDRQLYREFLGRLPPHSMIAVEASGHYSWLVDEMERLGHYPKLANPLEAKRRMALTKKTDKLDARGLAILLRNGTLPEVWIPPSELRDQRELLRLRIFLVRLRTRVKNRIHGTLARHNVQIPGADLFGVAARLKLGARLPELPIHSREAVEQELATLDFLEIQIESAEQRLEAIMNVSVEADLLKTLPCVGKILSMVLMLEIGRVDRFPTAAHLASYAGLVPRVHSSGGRTRMGQVCGNVNRNLKWAFVEIGNLIVINQTRLAGTHVVRLYQRIKCAKNHQKAVVAVARHLAEAAWWLLTKQEVYREPQGPRQRTLSSTLG

SEQ ID NO: 339771 - protein, 323 aa, unidentified
MANVAVLGIDIAKNVFQLHGVDCDGQVALKRRVMRDQLLQITEAMPPCLIGIEACTGAFHWQRHFESQGHTVKIIAPQYVKPFVKGQKNDGNDAQAICIAVQQPHMRFVPKKSIIQQDIQGLHRARQRLVNHRTALISQMRGLLLERGVAIPKSASVAQRTIPEIITNPRIDITELTRDIIGTLHAFLLQLNEKIKYFDRQIEAVFRESEVCQRIAKIRGVGPKTVTAVVAAVGDGEDFKNGRHLAAWMGLVPGQHSSGDRRILLGISKRGSQHLRTLMVHGGRSVVRTAQRKSDPASEWVNELRERRGYNRAAVAVATRTQG

SEQ ID NO: 339772 - protein, 413 aa, unidentified
MSQKAYLGIDLAKASSRVAAVDESGDEIVSPFNISNSREGIQKLLLKLSSYKKNLVVAMEISSNYWENMYSYLNGKDIKCILLNPYQVKKYRQALGSKIKTDSIDAISIAQLLRAKNYDSLCVSDDKVLELRELVRISHSFERRVKDLKKSVLALLYLTFPEYSKVISYPFSKVSMQILSKYPTSCHMAKEATIGRLVKIFRRYQGCNFGADKAKELIAAAKDSFYSGKASRSRGMSISMQIEEISSLSDKIKDIEAEIKSILDPDDKKDGNMLDFDILNSIKGVGLGTIAAFIAAVGDVNRFSSSDKLISYIGFYPKIFESGKYKKKNPTIVKAGPKDLRYMLYMSSVAAIKHNICLKKYYHDMVSVGMPVKKALIKVAVKIARMMYSMLKNKQYYDSSRVFLQQSPAVVAA

SEQ ID NO: 339773 - protein, 353 aa, unidentified
MRKQYNTVSFKNQTVFVGIDVHKKQWTVTIRHCGLAQKTFSMDPEPEKLAEYLKRNYPDAEYRSVYEAGFSGFEAHRTLCRLGVRNIVINPADVPTSGKEREKKNDSCDSRKLARELENGSLEPIYIPTPENLMLRNLKRREDQLVQNLTRIKNRIKGHLYFNGIKFISWAGGSLKIMEEEARKRNDWTLLSDLRELRFLRMERLQVIRDERACLKLLNREKIQENIQSVSGIGFRTGVALQAELWDMNRFKTNDHLNSYVGLAPHTFGSGEDVIAKCGNRKKKQLHYLMIEAAWRAVRYNLEYKARYGALLGRGMSSQKAIVVIAKKLMQAIRAVWLQDRKYKNYLETSKVK

SEQ ID NO: 339774 - protein, 331 aa, unidentified
MNKTTEPVLLALDIGARKHTFGWELGEHRESGSVDNTPASLRAFLTGLMHRASGLRVLMEATGVYYLDVALLAVELGAEVSVVNPRATHNFSQAMRQRNKTDRLDAVMLLDFLKRMPFIAWTAPRKALLDLRSYGRYLVQLTKEKTAAANRLHALVSTQASPAYLRADLKRFIASLERRIDRIRAHALALIKSDAPLRQSFEVMVSAVGVADTSAVSLLSELMVLPETMNSRACACHAGLDPQVFDSGTSVHKAPRISRRGNRYLRAALYFPALTASERDPLAKAFKQRLLDRGKKPIQAIVAIMRKLLTALWAMIRHHQPYDAHKLYATA

SEQ ID NO: 339775 - protein, 338 aa, unidentified
MFIIGIDPHKGSHTAAVLDHCETVIGELRVSADRRQRDRLLEFAASFTPRTWAIESASGLGALLAQQLVGAGETVLDVPPTLSARVRLLDAGCTDKTDPHDARAAAIVALRHSRLRRVTPVDHTAVLRMLADRHHDLTGLRTQAICRLHALLCGLTPGGAGRLLSAQQAGRILRGVRPTGPVELERKRIALELLGDVRRFDNQLLTVNERIVEAVLASATTVTDIHGIGPLGAAIILGHTGDIDRFPTSGHYARYTGTAPIAASSGPKQRHRLNPRGNRQLNRALHVAAVTQVRNDTPGRAYYRRKLDEGKTRKEALRALKRQIAKTVYRHLIADAHR

SEQ ID NO: 339776 - protein, 453 aa, unidentified
MNLKEKKVAVSMDTISLMHANAAGLDIGSEEIWACIPADRDIEPVRKFGTYTPDLHALAHWLKRCRIKTVAMESTGVYWIPVYEILEAEGFRVYLVNARHLKHVPGRKSDVEDCQWVQQLHSYGLLNNSFRPEGEMCVLRAYLRHRAGLIEHRAPHIQHIQKALLQMNVQLTQVLSDITGVTSMAIIREIVAGNHDPVKLAELRDPRCAKPESEIAKALTGNYRAEHLFALKQALALYDVYTQKIAECDEEIERQFSAVKPIHDDDLPPLDTSDKRNTHSKNAPSYDVRTMLYQILGVDLIAIQGLNAGTAETIISEAGTDMSRWPSVKQFCSWLGLAPHNDISGGKVLRSRTLKTRNRAGQAFRLAAQAVGKTQSAFGAFFRQMRSRKGPRQAIVATAHKIARAFYFMLKYRKPFHNVTSQEYDRGQQEREIHRLQKRAAKLGLLLVQEAAA

SEQ ID NO: 339777 - protein, 338 aa, unidentified
MKLYGAIDLHSTNNVTVVINEHDQVVCQKRLPNDLSMIAQQLSSYRRSLEGIVVESTYNWYWLVDGLMEKGYRLHLANTAAIQQYNGLKYTDDHSDARWLAHLLRLGVLPEGYIYPKEERAVRDLLRKRGQLVHQRTANLLSIQSLISRTTGNSISAKYIKALNIDRVDGVLPNPDLVLALKANLAVMNSADAQIEILEKSVRDRAKLRPQFKFLKTVPGIGPILALTIMLETGEIERFASVGNYASYCRCVGSQKISNGKRKGSGNTKNGNKYLAWAFVEAANFAIRFNSRIKSFYQKKKSKSHAIVAIKAVAHKLCRACYYIIKDQVAFDITKAFA

SEQ ID NO: 339778 - protein, 398 aa, unidentified
MTESSDYESVQVFIGVDVGKDTHHAVAINRSGKRLFDKALPNDENKLRSLISDLKQHGQILLVVDQPATIGALPVAVARSEGVLVGYLLGLAMRRIADLHAGEAKTDARDAAIIAEAARTLPHALRTLKLADEQIAELSMLCGFDDDLAAQTTQASNRIRGLLTQIHPALERVLGPRLEHPAVLDLLQRYPSPEKLASLGEKKLAAQLCKLAPRLGKRLAADIAQALAEQTVVVPGTNAAAVVLPRLALQLITLRKQRDEVALEVEQRVLAHPLYPVLTSMPGVGVRTAARLLTEVACRAFASAAHLAAYAGLAPVTRRSGSSIRGEHPSRRGNKALKRALFLSAFAALRDPLSRAYYTRKMSQGKRHNQALIALARRHCDVLFAMMRDGTFYTPQGS

SEQ ID NO: 339779 - protein, 338 aa, unidentified
MKTHVGVDLHQRFCYLTAVDASGKTCKQGQVVNEGAALRAWLRQVPGPRQVVVEASGFWPAFARAVAPEQERLVMVHPQRVKAIASAKLKNDRVDSETLAHLSRCDLLPEAWMADEATQQLRLRVRLRITLGRQRARAKNQLQAVLHQEGFKKPVTDVFGKRGRAWLAGLELSAAGRLVVDTWLREVDHLDVELAEQTRELERMAKADARAICLRTMPGIGAYAAMVILAELGDVERFQNKRALASYAGLTPVVRESAGKRKRGGITHQGSNTLRWMMLQVAQVAARYSPGARSYYARLRQRKPAQVAKIALARKLLTVVWALLRHGECFDEELFSRG

SEQ ID NO: 339780 - protein, 422 aa, unidentified
MLGIGIDWAEEFHDVALGTQEKGVIEQFRIDHGPTGVAALIERALRIEPDPAEVRVVLETRHGLLVEALLDAGFTVVPVNPDLVARRRGPARKKDDAEDARICCLLALDRHAALKTLIPHGELGGELRAIGRDDERAARDQRRLLNRLRADLQTTYPAALVLAGKDLGAPTVLRLLQRWPTQPELAGACREELVEFARAGRHGWPEKFADRVAAALAAPSLPTRDYLVRAKAAGIRLAAVQLLALHEARRGWQARMAELLLGGPRTGRDHTVKDPDPGKAFPGGEIYLSMPGLGDLLAARVAGEIGEHIDQFDHPAGLQCYAGSAPVTRRSGKSDFVVARRLAHNHHLGAAVHQWAFCSLTRSGWAREFYDGKIAAGKSHHNALRALSNRWLEILWHCLTKGVLYDEAVHVANRNRALGHAA

SEQ ID NO: 339781 - protein, 410 aa, unidentified
METIVERAAGLDVHKARVTACVRVPARGGGRTQEVAEFQTTVRGLLSLRDWLTAHHVSQVAMEATGVYWKPVWAILEDEFDCLLCNARHVKQVPGRKTDVSDAAWLCQLLEAGLLRRSFVPEKPIRTLRTVTRYRKALVGERQREATRLHKLLEDTGIKLDCVATNILGVSGRAMLEALVAGTTDADVLAELARGRLRAKIPALREALEGRFEPEHALIVSTILAHLDFLEEQIELLSEAIAEQLRPFEAAVELLCTIPGVGRRTAEEVIAEIGTDMSRFPSPGHLASWAGQCPGNDRSAGRRRSAPTLHGSKWLDRALTESAQAATRTKGVYLAALYQRLRARRGHGRALGAVKHSMLVACWHMLSTGELYREPGADYFVHRDPERTTRRLVAQLERLGHRVTLETAAA

SEQ ID NO: 339782 - protein, 389 aa, unidentified
MLLDHPSDGPAAIRTHIGAIFVSLELSRSNWLVTSLSPGKGEKMSKHGVTAGDVAGLMKLFAEFKRKAAIRTGQNYPIITIQEAGLDGFWLHRVLQQERIESHVVDPASIAMPRRRRRAKTDRLDGETLLRALLAYKRGEPRVCAMVVAPSPEEEDRRRLCRERATLIAERVAHVNRIKGLLFSQGISDYAPLRRDRQLRLETLRTGDGCELPSHLKAQIGRELDRIELLLEQIKAVEAERDALLAAARKPASEQAAPDAVTMLLALKGMGANFAAVLWSEAFYRQFANRRQVAAYAGLAATPWQSGGIRHEQGVSKAGNPRLRTTMIQLAWLWIRHQPKSPLTRWFKERSQQGRKRAIVALARKLLVALWKYVTQGVEIEGAVMKSAA

SEQ ID NO: 339783 - protein, 315 aa, unidentified
MTACLAQNVGVDISKDFLDVAFFPPTESWRFTNDNKGFRALLKKLGKRVIERIVYEPTGAYHRLFERTLAKAHMPLVKVNPRHARRFAQASGKLAKTDRCDAAMLARMGAALQLEPRCVVSDAVDALKELQIARDALVKDRVAALNRQKTARSKLIKTQLGERLQQIDAQIEEIDREQKKLRNVDPTLTQSFDIITSIPSFGAVTANLLLVDMPELGHVDEEQVSALSGLAPIAEESGKHKGKRSIGGGRARVRQALYMPALNAIKPNGIFHKKFTAMIDAGKPAKVAITAIMRKMLILANALIRDQRKWTPTPP

SEQ ID NO: 339784 - protein, 348 aa, unidentified
MAYFVGLDVSVKETSVCVVDDSGKVISEQKVLTEPDNIITLLTSIGETYARIGIEAGPLSQWLVNALIAADLPVICVETRHMKALLTAQQINKTDRNDARGIAQMMRVGLFKPVHVKTLVAQEQRMLLTSRKLLQRKLLDVESDLRGTLRNFGLKVGAVSGGRYDARVRELVEGFPGLAAIVEPLLAVRRVMRQQFAVLHKMLLDTVRDDPVSRRLMTAPGVGAVVALTYRATIDQPQRFVHSRAVGAHVGLTPKRYQSGEIDYDGGVSKCGDALLRTMLYEAAQTMLTRAKKWSWLKAWGMRVAQRRGIRRAIVAVARRLAVVLHRIWVDGTEFRWSKDSATVLNAA

SEQ ID NO: 339785 - protein, 391 aa, unidentified
MIYIGIDVAKDKHDCFITNSEGEVLFNAFTIPNNADGFHDLFQKISSLTNDFSNVKVGLEATGHYNYNLLGFLIDKGLPTFVINPLHTNLFRKSLSLRQTKTDKVDAHTIALMMMSGVNLQSYSNTSYHNEELKSLTRYRFDKVQEQAKLKTSISRLVNILFPELEKLVPSLHMVSIYALLAEFPSSAQIASCHLTRLTNLPANASKGHYNKEKAIEIRNAAKHSIGSNMPAKSLELKHTIRLIQELTSEIDEIECSIKSIMDEIRSPILSIPGINYRMGAMIIAEIGDFNRFSSPDKILAYAGLSPSTYQSGQLDGCYSHMEKRGSRYLRYALFNATKFVCIWDNQFSAYLAKKRSEGKHYNVAISHAAKKLVRVIYQLEKSGQLYHRAA

SEQ ID NO: 339786 - protein, 389 aa, unidentified
MFYLGIDIGKNTHVASLIDSRKKVLFKAFSFSNSIDGAESLICKLEPFKNQLEIGMEATGHYWLSLYSYLSEKNFTVRVINPIQTDGWRQGIEIRKRKTDIIDSLLIADLLRYGDFVETSLSNEDYLSLRNLSRFRAYLISSIGDLKRKTIALLDQVFPEYASSFSNIFAKTSKEILANFSSPSDFEDINSEDLQSFLNNVTMKKFATRKLEELSKKASKSFGVNFCMDSFSLQIKMLIGQISFIQNQVLDVEKEIKSLLEKLNSPITTIPGIGAVNAATILGEIGDIKRFSNPSKLVAYAGLDSTVSQSGEFESTSNHMTKRGSPYLRRTLFQSALRAEFCDPVFSDYYQKKITEGKHHLVATNAVARKLVHTIFAVLTKDEPYQVQS

SEQ ID NO: 339787 - protein, 410 aa, unidentified
MEVLYPHCAGLDVHKDMVVACLRHVVDGTIKREVRTVKTTTKALLDLSQWLASEGCTHIVMEATGVYWKPVWHILEDGDFDLALANAAHVKTVPGRKTDVNDATWLADLLAHGLVRGSFVPNAQTQEMRGLLRTRKQLVRERTSHVQRLQKTLEDANIKLDSVISDVMGVSGRTMIEALIAGETDPNTLAALAHRRIRAPAEELCEALRGRVTKHHRFLLRLHLQQIDIFDAAIVAIDQEVDANVEPFRAAITILTTIPGVSDLSARTIVAEIGTDMSRFPTDGHLISWAGLCPRNDESAGKRRSNRMRKGAPWLKTTLIQCAWAATRKKASYLQAQFHRLRARRGAKKAIAAVAASILTAIYHMLTNGTLYQDLGADHFDRRGKTAQTKRLVAKLQNLGYAVQITPLAA

SEQ ID NO: 339788 - protein, 353 aa, unidentified
MRIVVALDVHRRQITYKTLDCESGEVRRGRIAPATRGAVREWLERFVGREAEFVLEGTTGWRFVVEEIERAGHRAHLADPAETASKRGRKRRAKTDNADCDLQLKLLLAGELPESWIPPAHILELRTRVRTRKLLIDQRTAWQQRLHAQLLHQGVAAGLKPRTRAGREALARAELSPAGRELVALALRTMDAIDRELAPLDRALRSFAHRQPACRALIANLYGVGAISATAILAELGDCRRFASSDDAVRHSGLDVTVHQSDNKRSAGHLSHQGPELLRWALFEAAHQSARRGSPDHDYYLQVARRIDHNRACLSVARKLCRRSHHILRELGDAALAPVERERQTDEAIQAAA

SEQ ID NO: 339789 - protein, 345 aa, unidentified
MQITTVGLDLAKRIFQVHAVDASGDVVVRKALRRSQVLPFFTKLPPCLIGMEACGTSHHWARELTELGHEVRLMPPSYVKPYVKRGKNDAMDAEAICEAVTRPSMRFVVMKSAEQQAALSLHRTRNLLVKQRTQLVNMIRGLLAEFGIDIPEGLERALKLARQIAAKKSTLDVPAMALQILCILCEQVLNTHARLQTIDRSILAQQRTNEVARRLSTIPGIGPIGATALAASVADPGQFRSGREFAAWLGLTPSQNSSGGKDRLGHITKMGDRYLRKLLVIGATSLIRRARHKPEAADPRLLALLARKPARLASVAMANKMARVVWAIMARGETYQARHAPNLAA

SEQ ID NO: 339790 - protein, 351 aa, unidentified
MPDRRDAALEMEEHVTDVHILAIDLAKRSFQVCATAAGGAVLFNRMVSRVKLEAVLRDQTPCIVAMEACATSHFWGRFAQGFGHEVRLIPPIYVKPFVKRQKNDAADAAAIAEAALRPNLHYVAVKSAEHQARAVAFRTHQSFVGQRTQLINALRGHLGEFGLVVAQGPTGLKTVAGVIDDDATDLPDAVRDIVRLYLDQIAVLTQKIDDLHFKLRAATKVDDAMRRLCTVPGVGPVTAGAIMAFAPDLRAFASRRNFAAWLGLVPRQRSTGGKTRLGGVSKMGQADIRKLLIVGAMSRIRWIIRRGVLPDNWLGRMLGRKPRMVAAVALANKMARMIWAMMTREQNYRMA

SEQ ID NO: 339791 - protein, 344 aa, unidentified
MPHYVGLDVSQKTTAICILDEQGRRLWRGACVTDPGAIAARIFRHAGVVDVKVGVETGSMTPWLVHGLRSAGLDVECLDARRVKVALQMRLNKTDENDAEGLAQIMRTGWYRPVHVKSFDAHRARALLGARAQLVGMRTQLSNMIRGVLKTFGLLPGAGRGLRFDRTVEALLESAPEVSLIVRPLLATWRQLREQITTFDKAVEQRVRVDPICHLLMTVPGIGALSSLMYVSTVEDPGRFSRSRAVGAHLGLTPRRYQSGETDRSGHISRCGDALARTFMYEAAVVILHRVKRSLHLKDWALAIEQRSGPGKARVALARKLSVILHSVWRSGEPFRWAPSTTAA

SEQ ID NO: 339792 - protein, 308 aa, unidentified
MIVQNYVGCDISKQRLDFFDEASGRCQRIANQGDAIEAYVAGLCADRDFVVMEATGVHDRLLRHALAKADVAFSRHNPAHTHHYAKSTTQRAKTDRLDARMLSDYGRRYQPAPEPAPCEKGEHLQSLARHRDHLVEIRARLKRYLSEAFDADVVDDLQDVIADFDTRIDALESRIVKTIRQAEDTALDYALMVSVPGVSTITALSLLAHMPELGQRSPKSIAALAGLAPFDNESGKLKHRSKITGGRPRVRRALYMAALGAIRANDRFKAFYVALAARSGSKKLAIVAVARKLLVTLNAIIRDKTAFA

SEQ ID NO: 339793 - protein, 438 aa, unidentified
MSNKVIFNLDELFISVGIDVGADFSWMSIALPNQQFVGKPYKILHNSIDSLTTAVSKIKEAEELYSLESRIFLESTGIYHYLLFCYLRDKGFNCSVINPIITKNSTNINIRKVHNDRFDSKKAALVGLKPDLKVSLMPSDLALNCRNLCREYYDLMDNRNAYVNKLQGELRMVFPQYLGIFSKVTINTSLTLLETYTSPSAFLKADKQEIIDIIKSTARFGLTYAQNKYNAIIQAATDANQFGYIIDSNIKRIRLYISFIRKYDEEINSILESLHELVDANEDADFVKQIHLIETFKGAGFLSAVSIMGEIGDFSAFSKPKQLFAYFGLDPAVKQSGKFEGTKVQMSKRGSAIARRVIHTLTLQSISISRNGEAKNPVLREYYLKKCDSKPRFVAMGAVSHKVCNMIFAILRDNKPFKIIAPQEHIKQYNAAKCDIAA

SEQ ID NO: 339794 - protein, 341 aa, unidentified
MEEISVVGIDLAKHVFQLHAVDGAGRIVIRRAVRRHELSGVVASLPACLVAMEACAGAHHWARQFQAMGHQVRLIPPSRVKPYVGRQKNDAADAAAICEAAQRPAMRFAAVKTEQQQALLLDHRARDLLIRQRTMMVNALRGHLAEFGIVAAKGPAGAQAVLAAVEAEAGPPGVPPVALPALRVLAAGVRGLSEQIEAIEKRLKAARAEDPQVRRLMSILGVGLIGATAIAATVPDATLFRSGRDFAAWLGLVPRQHSTGGKTRLGGITKMGDRTIRRLLISGALSAIYRCKRGADFAATWLGRMLARKPVRLVAVALANKMARIAWALMVRGETYRPASA

SEQ ID NO: 339795 - protein, 361 aa, unidentified
MKYFAGLDVSLDETAICVVDEKGRIAREVRAASEPDALVEALQGMGLALERIGLEACSLTAWLHEGLTQAGLPAICIETRQAHAAMQTMPNKTDRNDARALAQIMRTGWFRQVHVKSRQCRLWRSLLVARRTVLNEMRSIENVVRAILREAGIKLGTPSRTGFVHRVRELVGGDALVMPIVEPLLTILATMLRELARLTKQVFDIVRVEKVCRRLLGAPGVGPITALAFRATIDQPDRFRRSRQVGAHLGLTPARYQSGETDIQGKISRCGDELARTALYEAAHTLLVRSRKWSSLRAWGMKIAKQRGMARARVAVARKLAVVLHRMWSDDSEFCFGKEQRNSPGKVSQIVPWGRRARRSR

SEQ ID NO: 339796 - protein, 341 aa, unidentified
MQIATIGLDIAKNVFQVHGIDATENVVVRKQLRRSQVIAFFKAFPPCLVGMEACATSHYWARELTKLGHQVRLMPAKDVKAYVKRNKNDAADAEAICEAVQRPTMRFVAIKSAEQQAHLMQHRARDLLIRQRTQLINALRAHLAELGVAAVQGRTGVKELLTLIAEEEDQGLPVDARASLMVLAAQLQAVQTMIGSLEKRIVKQHRLNQGSKRLQTIPGIGVIGASTITAVVPDPTVFRSGRDFAAWIGLVPREDSTGGKRKLGPISKQGDRYLRRILVVGAHSVLRLAKQNPEKYPWITRLLARRPFKVVAIALANKMARVAWALLAKGGTYRAPRIATV

SEQ ID NO: 339797 - protein, 341 aa, unidentified
MNVTTIGIDLAKTVFSIHGTDQHGKVVVRKRLNRPKLLPYIAQLPPCLIGMEACSGAHYWAREMTKLGHDVRIIAPRFVAPYRKSSKNDDNDAEAICEAVGRPNMRFVPIKTEDQQAVLCLHRIRRGLTKERTAQINQVRGLLAEFGLIIPQGRYAARRRVPEILEDAENGLPMLTRRLLNDINQRILQLDEEILAYDREIEAMARRDEQARRLMAIPGIGPQTATALLASAPDPRQFKSGRHFAAWLGLVPRQYSTGGKVRLGRITKRGDKYLRMLLIHGTRAVIAKLPDRNDRLSGWARDLVERRGYKRAAVALAAKNARIIWALLMNQTEFKTQPVEG

SEQ ID NO: 339798 - protein, 363 aa, unidentified
MRRLVLKPAGKQYLPVRPAAGESVIIGVDLARSKWVYACRWSELEQRRLSTPGEICHLQALAGEYRGEGCRVHIVYEACGFGYEIAWWAQAQGLDVLVVPPSTVEKAPGSHVKTDGHDASGLALRYERGMLKGIHIPTRECHQLRQLSRTYGAALCDRKRQQARVRMLLQEHGHTPPAPRAGWKALEPWLAAQEFAPAVKACVEQLLILRHSAARSTKVLKAQLLGLAALPQYKPLVQALSAQSGVGTFTAIRFVLEVGDIHRFATADSIAHFYGLTPQEHSTGETVRRGRIRKCGPAFIRSWIIQCAWAARGRHGDAELREFYAKLWPRIGKKKAIVAVARKLALRLRARWLAHERSLAQAA

SEQ ID NO: 339799 - protein, 423 aa, unidentified
MKLAAEQPFTALVGIDWSDKKHDFCLQGADSRQREFGVVAHRPEAIDSWAKALYQRFGGSIAVCLEIAKGPLVHALQRYPFIVLLPVNPATIAKYREAFVPSHAKDDPTDAEIALELLLRHRDKLQVLKPQSAAMRALTTLVEQRRNLIGDKTRITNRLCSTLKEYFPQALDWFEDRDTALFCDFLQRWPSLKHVKRARQATLRSFFCEHNMRRTELIEERIRGIRSARALTEDVAVIGPHQLLVLALIAQLRVTLQAIDQFDAEIAAVAKRLPDYALFAALPGAGAILAPRLLVAFGEQRERYASAAQLQQYAGVAPVLERSGNKCWVHWRIACPTFLRQTFVEWAGSTIPRSFWASAYYQRQRDKGCSHQAALRALAYKWIRIVYRCWQTRTPYDESTYLHALKRRGSPLIAALSVALQSP

SEQ ID NO: 339800 - protein, 444 aa, unidentified
MRRKEQAQPHLKAVPMLLQESLYIGVDIGKHQHVAGFVSKTLLQRHERFEACPALAFEQSREGFRALIDRIRELVPLEQAYILLESTGHYHRALVQYLQELDLPVYIMPVQKRPAGMIKTDKRDALGLANHLYNQLELGVQLSDKTHLVRRLLPAREAALQLKGWIRHRYELMHESTQRKNKLTAICDELFPEFTWVLKDPNGVAALALREHFPTPHAMVTAPLTMLAQHRVSHHPSVQQLVELQRLASQTIGTKDAVRQRGLVLEQQQLIRELRMLQEHVQQLDVEIVKLVERSREGQILTSMGIGPIQAAAIMAAIGNVLNFENGAALKAYFGWAPKREQSGTTLDYDQLAHTGTRTMKQTMFLVVANAIQRKDCEWAKLYERLVPRMCSYDERKRAYSEKLKVMVRIAGQRTEMIYALLKQDAEILSKVPPRARATASDPL

SEQ ID NO: 339801 - protein, 379 aa, unidentified
MTHQTDVHKVCCVALELSKTIWVCAVSPPDGGRTNTYKLKAGDVDRLLSILDQGRARAMQSVSGPVDIVVCYEVGYDGFWLARVLERRGLRTIVFDPASFLRPRRGRLAKTDRLDAEEMTRILRTWLFGDTSIARAVRIPTVEEEDAKRIARERKHLVEQRTRVVGRIKGLLALHGVWLMSKRINKSLQQQLDVIRTGDGRPLPPFLRRDIERMLRHYAFICEQIAEVEAERSATLDDQASSFPHRDKVRRLATLGGVGETAATVLVAEVYHRSFASRRHLASFIGLAPSPYASGDVSRDRGINKAGTKLARQTLVELAWFWLRYQPQSELARWWRTRWSNQGMRGRKVGIVALARRLAIAFWRFVEHGVVPEGATLKA

SEQ ID NO: 339802 - protein, 382 aa, unidentified
MRAVCGLDVHKDSIFLCILRDSGEIIERVFGVLTFQLEQMRRLMQSYGVTEVTMESTSVYWIPVWRVLEPHFLLRLVNPYFIKQLPGRKSDVKDAEWIAVCTMKELVRGSFVPPERIQQLRQYDRRIFDLGAEIVRKLCKLDGVMQRCNIRLSNYVSNTDTKSYKDVVRKLCEGVTDPEQLIEGIHGRIIKRHGRETILASLAGVVSEAEKDAMRQLRDEIDLAEMHKQECQDKMLHICKTYYPEELRRLMTIPGIKERAATSLIAEIGVDMTKFQTAAHLASWSGLKPRNDESNKKVKSRRITHGNVYLRKTIIECAWGASRTKDCFFSRFSYHQTVVRRKNKMKVLVAVARKLLIAVWHVLHDKTDYKDFNKSDCGTSAA

SEQ ID NO: 339803 - protein, 337 aa, unidentified
MEDSIYDHYIAIDWAATNMAIARMTKKSNKITAIDVPSDIVELQFYLKNLKGTKILAVEETTTSQWLYTELKDYVDKLLVCDPYRNSLLQEGPKTDKIDATKLVQLLRANLMKEVFHSTDKFIYLRRIVSGYEDLVKSGVRLKNQRYSMLRVCGKSGYEKKGIKLTSRDEQYVLECLDRQTQNYEEEKKGYEKEFARLARKHPEIRHQKSIPGIGLINAVKIVARVVTPYRFSGKGHYLSYSGLIKHEKMSGGRSYGKKNPRYCRMMKCVYKSGVIAAIGGNNPINDYYEYLISEKGYPAYNARNKACRRLAILSFGVFKSGKKYKLYRRDHVKKGK

SEQ ID NO: 339804 - protein, 416 aa, unidentified
MKHPKMRYTYVGIDSHKDNHTAVFLDCFFDKLGEIIFDNLPSKYDAFLKDAEKLRQDDTELLFGLEDTGSFGRTLTVYLTDTGQQVRHVNSILVARERKNQNITQKTDSIDAECAARVLLSKFGELPAADPNDKYWILRTLVLRRDQTVTNNVRSKMILHDLLTQHYPNYRKFFVDTFRKTALAFFKKYPSPKNLEYVTIEELADFFYAESNSVLGGENAWEKAKFILESLEDTTVEYQDIRDEAVRSVIRQIEFNLGEIERMELQMAIYLDKFDCTLTSMAGIDVVSACQMMSCIGDIRRFPTPAKLARYSGIAPVTHASGKKDLQFANQRGKRELNSLFYMLAVRLTSPTGPNYKIINPFFYEYFHRKQAEGKTKRQALKCVQRRLVNIIWTMLINNEEYVNPPVMDKPEDKAE

SEQ ID NO: 339805 - protein, 343 aa, unidentified
MENVHYIGLDVHKKLIAFCIKTYDGDIIRRGTIPATRIALKKWLESLTEPWIAALEATLFSGWIYDFLKPHAKVIKVAHPEMLKAITAAKKKNDRDDAEKIADLLRVNMLPECYMAPEGIRELRRILRYRNYIIRTSVKEKNKISGLLMEVGAQYNKKRLHGRKYFTELLDNVEDVPESVINMLRLSRSNLEIFTDIQRRIIRALKDNALIRDRVKRLMTIQGVGDITALTWVLEIGEPERFSSIAKAVSYCGLCAGQKESGGKSYRGPISKKRNKHIQTVLIEAAKLAPQWNPQLAEVHQKELKKGNRNKATLAVARKLVAYMLAVDKSGLEFEVKETDMAS

SEQ ID NO: 339806 - protein, 344 aa, unidentified
MNGTTIAIDVAKSVFEVAISEHPGQVRERHRLTRERFHRFLAEQPAALVLMEACGSAHHWARHAQACGHRAILVPPHVVRPYVLRNKTDRSDAKGLLEACRNEDLRPVPVKSETQQALAALHRLRSTWLATRTARINTVRGLLREFGLVIPTGARQVVPHVWTLLEDVDSGVPGLLRPALAAAVREIREIEERLHAVERQLETAAAETLIVRQLRTIPGVGLLTATALVATVGDVQRFPSGRHFASYLGLTPRESSTGQRRRLGAISKRGDTYLRMLLIHGARAVLCHAKAKTAPTPDRLRTWALQRERLRGHNKAAVALANKLARIIWAVWKHGTSFSGVPTM

SEQ ID NO: 339807 - protein, 319 aa, unidentified
MNTTSKIQKKHTQRHVGIDVGKSTLDIYIFEKDEYFQVENNPSGITQLTKKLKRYKLTRVLVEATGGYERAVAEACAEQALPIIIITPIRIRQFARAQGIIAKTDKIDARLIAHFGVVMQPEVRELPTKKVRKVKDLNARKRQLMESRTQELNRQHKAQPYMQSTHRRMIKVLDKEIEWINQQLAKEVDKIDEWKRTQDILLSAPGIGCGVAYTLLGELPELGQLSHRKIAALCGLAPFNHESGSIAKKRRIRGGRAPIRTVLYMAMMSAIQHNPIMKTFFNKLVAQGKHKKVALTACMRKMITMLNAMVRNNQEWDMA

SEQ ID NO: 339808 - protein, 442 aa, unidentified
MRSTLSAPGQEEVMCYRIAGIDVHKKMLAVVVSDVEVDGEYRFERRKFGSNPEQLRSLAAWLLEQEVEEVVMESTAQYWKPVWGALERYWKPICEKREGARRRSGTLHLAQAQSNRGRRGRKRDFPDAERLVKRLVARELILSFVPDAEQRLWRTVMRKKYQLSCNRVRLQNQLESLLEEAHIKLSSFVSDLLGLSAQRMLKALADGETNPAALAALADGRLRATPEQLCDALGACTELNAVYRRLLKMVLEELRLIDEQIGELDKEMAGLLSEHQDAVERLAEVPGLGVDSAQQIIAEVGPTAATFPSEKCLSSWVGACPGDDESAGVNYSHRSPKGNRHMRRLLSQTANAAAKTKGSIFEIVYRRSVPRLGHNQAIGAIAHRQCRLIWLILHQGVRYEERGPAVTKQSKQKRTARMIRQLRSLGYRIDPPNPQPSQAQAQ

SEQ ID NO: 339809 - protein, 423 aa, unidentified
MTEETEDIEWFVGFDWASETHVVCLLDRDGRTIGERKVAHGGEELGESCDWLLAKSGAPPARIGVAIETPRGPIVETLLERGFAVFAINPKQLDRFRDRFTAAGAKDDRRDAHVLGDSLRTDRRAFRLLAVDDPTIIELREWSRIADDLTQERARLANRIRQQLWRYYPQMLQVADDLTAENFLALWECAPTPARAAQIDEAGLAKVLKAHRVRRIGPAEALRILRQTPLRVAAGATEAAVAHIEFAAERVRLVNRQLKDAHQKLEALCARLERPTAGERENEPGQQSEQRDVTILRSLPGVGRTGLATLLVEATEPLRRRDYQVLRVLSGVAPVTRRSGKARLVTRRMACNERLREAVYHWARVAMQIDPESKRRYAALRQRGHSHGRALRTLGDRLLAMACAMLRSQTLYDPDRKAVSPAA

SEQ ID NO: 339810 - protein, 409 aa, unidentified
MKIAGIDVHKKVLMVVVVDASVPEEKPARRRFVTLPSELQRFRIWLQEQGVEEAVMESTAQYWRSVWLELEPHMRLHLAQAFSNRAPRGRKHDFKDAERLVRRLIADELILSFVPNGEQRIWRSMTRMKVQLTRDRVRLQNQMECLLEEMRIKLSIVVSNLLGASGLRILQALAKGETDPKMLAQLGDERLQCTEEQLVDALTGRVQPMHRAMLALQLQRLQLIDQQIAHLNGLIAQAMKPHQEAVMRLAEVPGLGVDSAQQIIAEVGAQATTFSSAPELTSWVGTCPGKEESAEQNHSSRSAKGNKYLRRVLNQAAHAAVAKKGSHFQVVFRRLLPRLGYQSAIWAVAHRLCRVVWKILHEGVRFIEQGREVGPREKKKRAQMLARALRKLGYEVTITPINQLAPKPA

SEQ ID NO: 339811 - protein, 343 aa, unidentified
MDYFAGLDVSLKETSICIVDDAGKIVREVRVASEPEALLQVLTNTIYRFKRVGLEAGPLSQWLYSVLAEAGLPVICVETRHMRAVLKAQINKTDRNDARGIAQMMRMGLYRAVHVKTLRSQKLRMLLTHRKLLQSKAIAIENDLRATLRNFGLKVGMIGTVKFETRIRELVEKLPDLAMLAEPLLIVRRVIREQLDILHRRLLAVVRDDDVCRRLMTIPGVGPVVALTFRVTVDVPARFRNSKAVGAVFGLTPAKYQSGENDRTGAISRCGDEMMRMMLYEAAQSMLMRSTKWSWLKAWAMKIARHRGMKKAIVALARRLAVIMHRMWVDGTQFRWTREAAAA

SEQ ID NO: 339812 - protein, 427 aa, unidentified
MSYKVAGIDVHKRMLAVVVSDVEGDGEYQFERRLFGSNPEQLRLLAEWLLEQEVEEAVMESTAQYWKPVWGALERFWKPARQKREGAGPMSGTLHLAQAQSNRGPQGRKKDFPDAERLVKRLVARELSLSFVPDAEQRLWRTVMRRKYQLTRNRVQLQNRLECLLEEAHIKLSSFVSDLLGVSARRMLKALADGETNPASLAALADRRLRATGEQLCDALGACQDLNPVYRRLLKMMLDELRFIEEQIGKLDQEMAGLLQPYQDQVKRLMQVPGLGVDSAQQILAEVGSLAAAFPSAKHLSSWVGACPGDNQSAGVNYSHRSPKGNRAMRRVLNQCANAAVKAKGTIFEVVYRRSVSRLGHKQTIGAIAHRQCRLIWKILHDGVRYEERGPAVSQGSKQRRAWRMIRELRSLGYRVQLENLQQPNPA

SEQ ID NO: 339813 - protein, 473 aa, unidentified
MTAYFGRPSRASMTLPPPASPEPLIDDRGTRRRAPVSDRSTVGSFASAWVLPRAASRKATGLSLEDGPLFFVGVDWATTEHAVSVLDRAGAKVAAFTVEHTAAGFARLTARLAKLSGTESIPVAIERPDGRLVDALLEAGHPVMPVKPNAIKTWREAEVLSGAKSDPGDAHVIADYLRVRIHRLRPAVPYSGSTKALRTVTRTRDDLVDARVAAVNQLAALLDTHWPGAKAIFASLSSAIALAFLTKYPTAAAAASLTEARIAAFCTKQGYSGKKPAAVLLARLRSAPAGTTDPDLCEGVRAAVLAQIGVINALNTAIKNLDRVIAATMDTHPDGKTFRSLPRAGTVNAAQILAEWGDARAAFEHPDAIAALAGITPVTKASGKQRGVSFRWACNKHLRQAITTFADNSRHASPWAADIYNRARASGKDHPHATRILARAWVRVIWRCWKDNTTYNPTLHGGNQHHTKQQLAA

SEQ ID NO: 339814 - protein, 385 aa, unidentified
MGSQAFIARDYDVFAGLDVDKKSISVTFTDHQGLLKSMRMPYSVDHLVNHVRKHYGDKKVAFAYEAGPTGYGLYDGLVAQEYPCLIASPSMIPKAPGQRVKTNRLDSLGLAENLRGGQLKSIHVPTTLYRELRHLTQLRDALVSEVVAMKQRIKSLLLMEGLEFPPAPPGSQWSFLVKAKLRKLPCSSVVRFKLDQLLDNLEFGEKQVLKVTREIRRFCQNDPELSQCIDYLKSLPGIGWIVASQMLARIGDWRQINNIRELPAFLGLVPTESSTGERTTRGSITHSGDPRLRSKLIQASWSAIRQDGELLKFFRTVAKKHPRHLGPRVAIVAVAHKLCMRAAVVLMKQRPYEVREKVQSAPLTQEETVPRGTTRRRRVPGEKIS

SEQ ID NO: 339815 - protein, 344 aa, unidentified
MDHFAGLDVSVKETSVCILDDTGKILKEVKVASEPQALLKVLGNPAYRFKRIGLEAGPLSQWLFSALAEAELPVICVETRHMQAVLKAQINKTDRNDARGIAQMMRVGVYRPVHVKTLRSQKLRMLLTHRKLLQSKAIAIENDLRGTLRNFGLKVGIVGMVRFEARIQELVETIPDLAILVEPLLVVRRALREQIIILHRRLLAIVRDDEVCRRLMTTPGVGPVVALTYRATVDVPARFRKSKSVGAVFGLTSSRYQSGEIDWSGRISRCGDEMMRVMLYEAAQSMLHSKKWSWLKAWAMQIARRRGMKKAIVALARRLAVIMHRIWVDGTEFRWTREPTATAA

SEQ ID NO: 339816 - protein, 387 aa, unidentified
MTEQRRSYAGECVYVGVDVHKETYTVTCVCHKQIVKTATVQAEPASLAASLRRWFPGATLASAYEAGFSAFVLHRALTQAGISNIVVNPASLAVAANDKVKTDRRDSKRLAVDLADGRLRGIYVPTEEEELARLLPRTRAQLVEHRATLARQIKAKLHQFGLIAPSSRRLLSHRYLREIESWTLPPELRASLQMLAEQWRFVTRQLIEMRRLLREQATAQAAIDKVYRSVPGIGEVVARTLATELGDMTRFANERALFSYTGLTPSEYSSGASVRRGHMSRQGSSRVRHLLVETAWRALPYDAVLQTMFERIAATRGKKRAIVAIARRLIGRIRACFRQGTMYAVGTLASVPRHPWQEAWLKRSHALVARPHAEQLPTIMNRIEQEE

SEQ ID NO: 339817 - protein, 317 aa, unidentified
MDVETMADRFVGIDVSKARVDVHVRPDGTAFGCATDPEGLGALVVRLQPLSPCLVVLEASGGYESVVAAALAEAGLPVAIVNPRQVRKFAGAIGRLAKTDAIDAAVIAHFAQAVRPTARPLPDDLSVRLAELMARRRQLVVMINAEKQRLAKAQDRTAQRSFKALLKSLEAERVRIDKAIDKLIEASPLWCAQQDLLKSVPGIGDVVARTLIAELPELGRVDRHQIAALAGVAPMNRDSGRYRGRRRIQGGRVEVRAPLYMACLVAIQHNPALKSFYRRLRDAGKPARLALVAAMRKLLTILNAMLRDRKPWASAQS

SEQ ID NO: 339818 - protein, 341 aa, unidentified
MQEQVSRQQYVGIDLHRRRSVIVRIDDTGKVLGKKQVLNDPVEFALAMAEAGEGPEVALEATYGYYWAADLLKENGAHVHLVHPLGLHWENRRVKNDELDATELAKRLWRDDLPEAWVAPPEVRDLRELIRYRAKLVAFRTSAKAQVHAVMAKCGVLPELGEMFGPAGQVLLDKMELPQPYRYRVDSLRRLIAVFDDEIDIAESQVRKRLRGHRGYRAVQALHGVGPVMAAIFVAEIGDVSRFASARRLCSWAGVTPSHHESDEKAYRGHITKQGSTLVRWAAIEAVVRYHGGAPIAPTFRRVQERRGTMIARVAAARKLLTLVYYGLRDGQVRCLAKQAA

SEQ ID NO: 339819 - protein, 340 aa, unidentified
MKITTIGLDISKTIFHMFAVNQAGKLVKKRAIKRADLLSVFARLERTLIVMEACGGANHWAREFIKLGHQVKLIAPQYVVPYRRKNKNDFNDAEAIAEAAQRPNMTFVPIKSVEQEDIQMVLRIRKRHVKTMVAINNQVRGFLAEYGLCAAKGKTALAARLPEFIDDESNELSAFARESFRELYADFVAAQEKVEFYTKKINVYTRNNPICKRVKSVIGVGPMTAAELYASIGDGKMFHNGRHFAAWCGLTQRQNSSGGKTMLSGITKKGNPHLRSSLIHGARAALQYVDGKDDKLSRWAYELKCRKHSNVACVALANKLARIAWSVIANEEDYRLEYVA

SEQ ID NO: 339820 - protein, 583 aa, unidentified
MSQATDPSLTVIGVGLDTARYGHRVTFLNENREIAAQPFDFLESRSGYRQLEKALGQLAEKHSNVHFQIRVDAAGQYATNLLAFLHQLPWPKTISVGQPVCNKRYREVHFPKRKSDAVESQSCARFAVVERPAETPMQTPESLALKEVASRLEFQVKQTTRQINRLHNLLARVFPELATLYNDLTARWILRTLEKYPSAERIARARLASLTAIPYVTQAKARELQEAAKESVAATRGKITEELVRHAVRDLLRSLEEEKALEKLLLEAFDAVADERAKLITTIPGIGKRTAAILVAKIGSIERFPSADHLTSYFGVFPEEHSSGVDKHGRPAPTGTLRMSRKGNDLVRKHLWMSAFSALKCNPQVKDLYARLRARGRRGDVALGHCMRKLLHQVFGIWTTGRAYDPEYEEKKKASRQAAEQSSDAHEEKAAGRKTEISPEGKAVTATNATIENTPRIVNETAQTQSPTDDPSGPGSIDLPYLCSQITLERVLRHLGYFDRLRGSGLQRRGPCPVHGSKRSRGRTFSAHLGRNVYQCFHPPCGVSGNVLDLWCQVHNLDAHQGAIHLANTFGLELHPPHQNRST

SEQ ID NO: 339821 - protein, 411 aa, unidentified
MLEVKVEKCAGIDVGKKFLAVCILIGLANQKPVGEVRRFGTSVKELERLRTWLLESGCTEAVMESTGSYWKPVFNILEGSLKIILANPEQVKALRGKKTDPNDSRWLASLLRHGLVQGSFIPPRDIRELRDLTRRRRTLVGEGAAERNRVQKILEDANVKIGNVLSDVFGTSGQRMLEALLENKQSAAEIAQLGHWSLAPKIPQIIEAVEGHRMTDHHRFMIRQSLRHMRDIEEMIEELDKEIAVRLKPYEQHIRLACTVPGIKPTSAASILAETGMDMSPEGPFPDCHHLASWATVCPGNNESAGKRKSGRTRQGNRWLRATLTQTGWAGAADKKSLFQRRFQRVKLRRGGQRAVMAIAHAQLIAIYWALRNGTPYPEQLQKLEQDRREAQIRYHLQKLNKLGYAPDMHG

SEQ ID NO: 339822 - protein, 318 aa, unidentified
MDKNFIGIDVAKDSMEVTAYNSKEHWAYANDESGLAKLTARMKRLSPSLIVLEATGGYEVSVAAELQSKGFPVAVVNPRHIREFARSVGILAKTDVLDAKVIARYAATVQPTPRALPTEETRRLGAIMMRRRQIVAMLTAEKNRLHQADPAVKPGIKEHISWLEKKLDDTNKELGQMVENSPEWKEKSDIIQSVPGVGPNLAVTILTDFPELGALNRKQTAALSGVAPFNRDSGTLRGRRMIWGGRNIVRTATYMSTFVAIRFNPLLKAFFEHLISAGKPFKVAVVACMRKLLCILNAMLKNRTYWNYIDHQLIGPCH

SEQ ID NO: 339823 - protein, 340 aa, unidentified
MKDTVIGVDLAKNIFQVHGASRAGEVMFRKKLRRQQFMQFMATQSPALVVLEACGSAHYWARELAGAGHEVRLIAPQYVKPFVKRQKNDAADAEAIVIAARQPEMRFVEPRTEAQQARGVLFRARQRLVHQRTELVNALRAVLYEFGLVVPQGIAHIRHIEAMLGEAVLPEAVKQECLDLLRQISEQSVRIDVRTKKIRMLAQESENTCRLQSMPGVGPLTALAIEAFAPDLQSFRRGRDFAAWLGLVPRQFSSGGKERLGKISKAGQADIRRLLIMGAMTQVNWASRKAPAPGSWLARMLARKPRMLVAIALANRMARVIWAMATKQEDYRDPALSVAA

SEQ ID NO: 339824 - protein, 345 aa, unidentified
MKITTIGLDLAKRVFQVHGVNGAGEVAARKTLRRAQMLGFFAKLDPCLVGIEACGTSHYWAREISKLGHEVRLMPPAYVKPYVKRGKTDASDAEAICEAVTRPTMRYVAIKSPEQQAALTVHRTRDLFVKQRTQLVNMIRGLLAEFGIEIRRGITHALGLAERIMAGEMPDIPALAAKMIASLAEQILDLQARLREIERELLAWHRSSDIALRLATIPGVGTICATAFAASVTDPHQFRSGRQFAAWLGLTPLQHSSGGKERLGRISKMGDKYLRRLLIVGMTSLVRRAKYKPDAVDPWLAALLSRKPARVVTVALANKAARVIWAIMSRGEIYRAPQTAGAVAA

SEQ ID NO: 339825 - protein, 334 aa, unidentified
MKQVHLIGVDVSSKELVCATKSAGQPLPLATFANTTAGHKKFIRWATKGGRPARVCLEATGIYSLEFALALHHAKNVEVMVVNPRAIKDFVRSCMQRAKTDAVDAGGILEYLERMPFAAWQPPGPEILELQAINHRLVQLTTELAREKNRRHASEFAGDSADAIAHDIEVNIHHLERRIERMEQSGLDLVRGVPALARKLAHLVSAKGIAEASAMRLLAELLVLPDGLAAPQWVAHAGLDPRPYESGTSVHRPRRISKVGNRYLRAALYMPALVAIQHDPNVKAFYNKLIAAGKKPMQAIVAVMRKLLHAIWGMLKHDQDFDGEKFFKIAKENT

SEQ ID NO: 339826 - protein, 371 aa, unidentified
MSEAIVAYRSFIGVDLHKTTVTLVAVAPDGTKIEKLTINTRCREKIAAWLAALPRPSHLAVEAVGFVEWFIDDFRHSVDRIDIADATELANRRGKRPKNDWRDALDMAQRLARGECPLGYIADDELMQLRKLGRHWRRLSSIQSRVKQCMKSLVMAANLRGPKFDGASAQRWLMAHGHRLKPAQRRAFADFTRIVQLIELQREPLRYAIIMASRSERFAPLTQLLRTVPGIGEIWACIIVAEIGTFDRFPNADALEFWSGLTSDMKESAGRTQPGPITKAGSRTLRWALCNAALTLCHSDAGQEAIRQRLIRKNGGIKAKANTAMGRRLLRLLYAMVRDGKPYQAGPSRNRTAAANKARAKRAGKKGKEAA

SEQ ID NO: 339827 - protein, 365 aa, unidentified
MTKYYVGLDVHSKQSTFVIEDDAGRVIAQGEVPTTPDGFSRLQATYQLAPGTQVALETGTVAFFVARQLGRLGLDPIVVDAHEVRLKAHRPNQKSDRRDAFELCEGVRRGIYRSIVHVPGQEVSRLRDTLSRRRHFVRLQAAQVGAVKALLRAAGLGSLGRSLGSEHGWTRVLAALAQHEELRTYAEQHRALWRCAREQIAALEASLARQQKDSFAAEIARLQTIPGVGPIVASTAVAVFSTVERFPDAKHAASYTGLVPSTHQSGERDAHGRITKRGSGELRAMLCEAAHHASRPHHPLNPYFVRLCARRGYKMATIAVAHRLCRIIFAMLRHQSDFDLNKLGVERGPFERKILRTYRLKAASK

SEQ ID NO: 339828 - protein, 345 aa, unidentified
MKEVSIIGVDLAKQVFQLHGATSEGEAVFRKKLSRKQFLAFMQTHPGCIVAMEACATAHHWARTLSALGHVVRLIAPKFVKPYVKSQKNDMADAEAIAEAGSRPTMRFVEVKTPEQQGLGMIFRLRDLLVGQRAQMINALRGHLAEFGLVAAKGRENVDKLRAVLEPSQEWVDDLPPAVRYMAQLCFDQIGDLSRRIAELDAQIAAASRRSRFSARVQKMPGIGPITAMALEAFSPPMETFRQGRDFSAWLGLVPRQHSSGGKQRLGRTSKSGQRDIRRLLIIGAMAVISGTKVRPPAESSWLGRILARKPRMLAAIALANKMARMLWAMITKNEEFQGGPLMAN

SEQ ID NO: 339829 - protein, 338 aa, unidentified
MAILMGLDQHRAQITTEWLDTSTGEVSRARVAPADRAAVRRFLARFRGHQLEVALEATTGWRFVVEELQRIEAVVHLAEPADTAALKGSKKHAKNDRADARHLRELLMAGRLPESWIPPAHILDLRARVRQRHTLSEQRGEWQQRIQSVLYHHGCPQRADLINRAGLTWLATQPLSACAREQVTVALAMIDALERQLAPLDKELCRYARRQPGCKALMRHYGIGALTSVTILAELGDPSRFSSSREAVRFAGLDITVHASDKRRAPGHLSRQGPPALRWALFEAAQCARRPGSPDHAYYVQAAERLGGNRACLSVARKLLKRSYHTLRKLGEEALQPA

SEQ ID NO: 339830 - protein, 380 aa, unidentified
MSAFRSLIDAVDGSSTRHVSAMDVGAAEAPAISEELSMQTVTTIGLDIAKSVFQVHGVDAAGQVIIRRQLKRRYLLAFFQKLPPCLVGIEACASSHHWSRELQVLGHTVRLMPPAYVKPYVKRQKNDATDAEAICEAVTRANMRFVPTKTPEQQSGLVLHRTRHLLIRQQTSVINAIRAHLAEFGIVAPVGRRGVEELLDVVADPADKRVPAIARACLAAIGGQLHRLKEQILEFDRLIAAWHRSSEMSKRLDDAPGVGPVLATAVVATVADPKAFRSGRNFSAWIGLVPKQHSSGGKDRLGGISKQGDRYLRSLFVAGALAVIRYAKIHGTKHRPWLTALLARRPTKVAAIALANKIARMVWAMMVKGERYKEPVTLSA

SEQ ID NO: 339831 - protein, 446 aa, unidentified
MKQEAPEEFAAFIGLDWADSKHDVCLQAAGSAKREYFILTHTPEAIDAWVSTLRTRCNGHPIAVCLELNNGPIVSALRTYDFLVLFPINPLTLARYREAFTPSRAKDAPTDAALQLALLLTHRDKLPPLKPQSPAMRALAPLVAHRRRVVNDRVRITNRLTSTLKNYVPHVWQWFQEKDTSVFCDVLSRWPTLKAAQLARRSPLETFFRDHHVRSADIIGKRLQAIKTATPLTSDAGVIAPHVLFVQTLVSQLRVTLDAIETFDHAIAQRAQSHPDFPLFQALPGAGPVFAPRLLVAFGEQRARYASAAALQPYAGIAPVTERRGKKSWVHWRLQWPQCVRHTFVEWAAESIRHSFWAQLYYQQQRDKGKAHQAAVRALAFTWIRLLSRCWQERTPYDEATSLQALTRRGSSLLQNLAKGERCRTDARMIRRETVQSEQFFANTGY

SEQ ID NO: 339832 - protein, 316 aa, unidentified
MEHFVGIDLHKYVSQLAVLRESRSPSQLRFANDVVTVERVLKKLPKGSKIALEAMGSWWWMVELAQKTGHEVFLSHPKQTKAIASARLKSDKVDALMLAKLLKADLLPTVWIPPENQRHVRELLTHRARLVRQRTAVINELRAVYAKRNIDPQAKLQRAQPQVSGAEDLSGYAPRIVGEDVELLGFVNRQIGGLDKELMKIALEDGSAKRLMTIPGVGAVSAVAMSCWIGEIARFSNAKKLASYFGLAPRVRQSAETERHGHITKEGNRMVRALVIQAALVHTRRGKGPSRKHYLGVLKEEASRLPGWRRPTNCWA

SEQ ID NO: 339833 - protein, 349 aa, unidentified
MQQFIGCDAHKRFSVFVAVDERGRASTPIRVEHSQRHYADFLKQLPAKSEIAIESTGHWYWLVDEMERAGHHVHLANPMEAKKRMGRTNKTDALDAKGLAILLRNGTLPESWIPPGPLRDRRELLRTRMALRDLRSSLKHRIHAAVDRYGLHTDSLTDLFGIKGREYLASRLAEFPPETARMVQIQLDALDELAAHIECIEQRIHAEIAPTAEVQLLRSVPGVGEILAPVIWLEIGDVNRFPRAENLASYAGLVPRVFSSGGHTRLGGISHFVNQYLKWAFVEAANCAVRLKAHRHSHVGCLYQRLLARRGHGRAVVAVARHLAEASYWILRKRENYRAPQKLISSRKG

SEQ ID NO: 339834 - protein, 435 aa, unidentified
MPLQEVAAQMKVLYERVAGIDVHKDMVKVAIRSPGDKPWTRKTEILEFRTFYGVLQAMARELRRRGVTHVVMEASGIYTDPVYYALCEQDFTEVAVINPAHAKALKGHKTDAKDCARLAELFECGLLHGSYIPPAELREVRDLTRYRTKTVQARASEIQRLGKSLESAGIKLGSVASEITGKSAMAMIEALIDGERRGAVLADLAMGRMRTAGKLADLSMALAGRFTGHHALMCRLHLDRIAVFNTAVAGLEDQITVKAAPWQREQDLLKTLPGFGDAVAQAWLAEIGPAPHLHFSSHEKLASWVSLCPGNNISARKRKHGRTGDAGTYIKPMLVQAAWSAIKGRGRLQARYNRLVRRFGGDKNPAAKKKAITAIAHTLLKIAYQVLKSGTPYQDLGADFYTRRESPAQRQAYLLRQLEKLNPGCTVTIGPAEAA

SEQ ID NO: 339835 - protein, 330 aa, unidentified
MNVKTIGIDLAKNVFQIHGVDEHGKRLFNKQLRRAQMASFFANIPPCLIGMEACASAHFWANKLISMGHNVKLMAPQFVKPYVKTNKHDAADAEAICEAVTRPNMRFVPVKTAEQQAVLALHRSRQSFIKQRTAQANQIRGLLAEFGIVVPRGIQQLQRRLPELVEDADNPLPVLFRTQLSLLQHHMAYLFDVIATLDKQIEQCYRQNALCQRIGKIPGIGPVTASALIATIGKANNFENGRQLAAWLGLVPRQHSSGGKQVLLGISKRGDTYLRTLLIHGARAVLQSAKHKQDAVSSWANQLMARRNNNIASVALANKNARTVWALLAK

SEQ ID NO: 339836 - protein, 337 aa, unidentified
MTDVYILAIDLAKRSFQVCATDRGGAVLFNRMVSRSKLELLLKAQTPGIVAMEACATSHYWGRFAQDHGHEVRLIPPIYVKPFVKRQKNDAADAAAIAEAALRPNIHYVSVKSAEHQARAVAFRTHQCFVGQRTQLINALRGHLAEFGVVVAQGPANLKSVTGLLAGDAVDLPDGVKDIARLYLDQIEALTSRIDELTLGLREATKANDEMRRLCTAPGVGPVTAGAIMAFAPDLKTFSSGRNFAAWLGLVPRQRSTGGKTRLGGVSKMGQSDIRKLLIVGAMSRIRWIVRKGVLPDNWLGRMLGRKPRMVAAVALANKMARTIWAMMTREENYRLA

SEQ ID NO: 339837 - protein, 370 aa, unidentified
MKPNFEPGKWFMQCVGIDIAKSTFTACLCMYEFDQGCSTPSVVFSNNRTGFNQFVKWSRKEALKGYPLRYVMEPTGVYYEQLAAHLNKLGLYVCVVLPNKAREFAKYEGILTKTDDMDAYTLGMLGCLDKRLKPWTPPSPIYRELRQMTRFVADINKVKTELRNHLEALTHSEIAEKSIVKHYNKLIDEIDKQLDSNQKAIREKIKQVPGLSERIDRITTINGIGFMTAVTVVAETKGFALITNCKQLARYAGLDVPAHQSGPVDPKRHISKKGNVHIRTALYFPAIVSTQCNPQMKDFYGRLCARNTQSKMIGVTAIMRKLLLLIYSLWKSGEKYDLTRGEPACNRQKKEAETTEGQPHGIDVGTLAEE

SEQ ID NO: 339838 - protein, 338 aa, unidentified
MQTYAGIDLHSSNNFIGVIDAKDKRLYSKRHDNNLKQVVKALGPFKKNLQGIAIESTYNWYWLVDGLQEQGFNVHLANPAAIQAYSGLKHTDDKWDSFWLAHMLRLGILPVGYIYPKQHRAVRDLLRRRLMFVRQRTSQILSLQSMITRNRGLNYTGADIKRFRDEFIDVLFADPHLNFTAKKNIETIRFLDRIVGEIETQVNSQIKLKKQFRMLLTTPGIGNILGMTIMLEVGEITRFVKVGHYSSYCRCVESKKISNGKKKGENNKKNGNRYLAWAYVEAANHAMRACTKAQRFFQRKMSKSNRVLATKALANKLTKATYFMMRDQVAYDAEKLFG

SEQ ID NO: 339839 - protein, 422 aa, unidentified
MDESTRLAMFRQMKEEIRGSRKYLAVGIDIAKEKHNAFFGTSTGTSLLRRLVFDNTQEGFKKLCLHAETLKKQHLLDRIIFGVEPTADYHKPLGEYLIREGYMIVLVSGNAVKKNRELLDGRWDKHDTKDAANVADLITQGKCLFYEFPSLVIRQIRSLLSLKRRLKKNEQGYKVRIRNHCIAQYFPEFDPYYGYGEGPAIVKKCFDPSYIADLPFGEFISLVASRNGGEKQRVRIKQIWDKAHISIGCRVNKAVAFEAAILMEELQLIRMMINKTDKSIAEVCSHLPEYSCLLSIPGFGPDVSAMVIGAIGNPYRFENERQVIKTAGYDLSADRSGKRSDTTPVLSKRGKADLRYALYQAALIASVRNEHFMRYFTNKLAGREREQGIRTKMRVKLAAKMLVIAWTLMKKKEVFDSGYITI

SEQ ID NO: 339840 - protein, 526 aa, unidentified
MVAKSKIRKAQGTKKRFIGKPSGQIQERVQAVGAECFGILAVDCAKRRSKWMLCDFYGKVLVEPTTVEHTSGGIRAMTQLASEACQSEGLADLVVAVEMTGIYHKPVFRAFRKAGFDTRIVHPFASNHFRRALHPDTKTDDHDLESIFQAAVRGFGLAHFPCDEVYLLLQAASRHRHNLVKQRSRLMVQMRQLLHQTMPGFADLFEEDTLFRRSIAIPIAMQFSSAEAIRRAGVSGIGRYLREHNIRFQERTIERIVAWSGTASEPTELAAIYTQQWQQLNALRRMYDEQVETIERAMAGFLAKTPYILLLSITGINVVSAARLAGEAGPMEHYASPRALNGRAGLYPSRYQSDEVDLADGALVRQCNRRLRGAAMLVAENLIKCHPYYRGLSALWTQQKVDPRDRHCRIANRAMRMIYQLVGGRQVWRGKGVDRECVLAKLQEYHRLHDSPLDQTIRNLEAACAWLPKSAHAEEAKPLAKWAGVKHRGPQNIGELMIPLLIRLGMSIEELDGELKSNTSEARSSD

SEQ ID NO: 339841 - protein, 342 aa, unidentified
MKVFYLGVDVSKKKLDLCLRSNGKDILYDVIPNDLSSIKSWLTRTFEKFFLSEDSLVVCAEHTGQYTYPLVCATKSIGVYLCLEDAAKIKYCHGIPRGKNDKIDACRIAMYAERYNDCLQPYTASELIIQKLKNLSTERSMLVADRAKYQSQLKDQVDYMEHSIYIAKCNRVEGIINTFTDYIAQIDLEIKELINQAPVIAHQMDLLMSVDGVGERVALKMIMETDAFTSFTDPRKFCCHAGVVPFVYVSGSSQRSKNRVSNRADKSIKHLLHMAALSVSQVKNSPLKKYYDRKVEEGKNKMSVLNAVRAKLVTIMFAVIRADAFFFEKLSKFACVIHKNRG

SEQ ID NO: 339842 - protein, 341 aa, unidentified
MPEASTIGLDLAKRVFQAHGADASGNVVFRKRLRREQVLKFFADRPACVVAMEACSSAHYWARGIGELGHMVRLIPPAYVKPFVKRQKNDTTDAEAICEAAQRPTMRFVAVKSQAAQANAVVFRARDLLVRQRTQAINALRGHLGEYGVVVAKGPSHVAKLIAHVEDPAAGLPEAARTVLRVLIASLQFLSERIDLLDREVARRAREDKEVRRLTTIPGVGPVIATAVAALAPPAGAFRRGRDFAAWVGLTPSQRSSGGKQKLGATSKMGERTLRRLLIIGASSVVRKAIKHGTQSGSWLGQMLARKPRMLVIVALANKMARTVWALLATGEIYRAPLAAA

SEQ ID NO: 339843 - protein, 359 aa, unidentified
MDKNEERLRQVVGGVDTHKDLHVAAIVDEQDHVIGTQSFPTTRQGYRQMLAWMRAAGDLMRVGVESTGSYGAGLLRYLQAAGIEVLEVTAPDRHDRRRRGKNDDLDAQNAAHAAFAGQRTVTPRRRDGMVEALRVLRACRKTAVSARRISLQMIQNTIIAAPDTLREHLRSMTRMQLIRTLAASRPDLTAYRDIEAAYRISLKSLARRYLELHDEIGELDLMIKAIVEELAPDLIARNSIGHNGAAQLLLTAGDNPDRLKSEASFAALCGVTPVPASSGKTIRHRLNRGGDRAANSALHIIAIGRLRTDEKTRAYVARRVAEGHSKLEVIRILKRYIAREVYGIIIRRHRDINATRFAA

SEQ ID NO: 339844 - protein, 398 aa, unidentified
MLYVGIDVAKHKHDLAVIDTEGTIFVRHLQIENNREGFTRLQMTLANLQKTTGEDIQIALEDTGHYCFNILRFLRTQRYPTYSYNPYLIKEFAKNQSLRKTKTDKKDAMTIARKLRTDLDKQSFSATPSMIELKYLTRHTARLKEDCTRKKVSYTRILDILFPELAPSLGSSSAKHQSYVYAILKEYPSAKKLGNAHLTKLTKLISAHSKGRFGKEQAVKLKALAQASIGQESPALEFELLQTIDTIQYLTTMRDEAEKEVARLMNEIDSPLLTIPGIGFKLGSVILAEIRDIKNFRSPNQLLAYAGAEPSVSTSGMKQTETGRMVKRGSSQLRWALHESARLMSIWSPSMRLYFQKKLAEGKHYNVAISHVVRKLVRIIYQLLKDNKPYEEQKMIVN

SEQ ID NO: 339845 - protein, 443 aa, unidentified
MLARTNALKAPCELRPSSRESRLPRENLGKRNLNQIDHLFKAVRAITHPCMLHSSGVSLDTTDAVALASERSEEAKATAADGRSLTLECCNADTVREPDRRRPLVNSPYSRLSRDKLSSSHLQGRDTSKMSFQHFIGIDVSKAKLDLAFDEQATTTVVPNDPKGIDELVDLLPEAKSCLIVIEATGNYERPLAVRLVEAGHVVSVVNPRQVRDFAKAIGQLAKTDKIDARIIALFGKLTRPRAVAKTKQLQGELDQLVTRRRQLIGTRTAEKNRQGQAVSGAVCKSIQRVLDAINNDIKEIDREIQKLVQSDDDWKHRAELLGTMPGIGDVTSATIIAELPELGDLNRREIASLVGLAPFNRDSGQMRGKRSIFGGRGSVRSALYMAALSARRYNPAIAAFSKRLTEQGKPPKVVITACMRKILITLNTMVKTNTTWENPQNA

SEQ ID NO: 339846 - protein, 388 aa, unidentified
MNYVGIDVSKYKHDCFIISDFGDIINEGFSFENNAEGFRKLEQELKLCGKANVRIGMEATGNYGINLKLFLEKLGFEFMEINPLLVKEHIRANTLRRTITDKLSAKAIADYMLSRGFRPHQSEFYSKFALKQLTRLRSRLVGIRSRYLIRMTNVLDCIFPEFKPFFENRFTVTALYILAHYPTPEAISNMNSRSYDILRRKSRGHFSMDKFVTLKQLAKNTVGVYDKCYGIELETLLDLHSQIDSKIDELESEITQIIKELDPPTLSVRGIGEVSAAVIISEFGAFSRFDNPNKMLSFAGLEPGYFQSGTTEYNGRMVKRGSPHLRNVLLNCCRSLRLHNETFATYYRKKISEGKPESVALSHMAKKLIRLIFALETKGEPFDPDKSR

SEQ ID NO: 339847 - protein, 331 aa, unidentified
MSNVTTVGIDLAKNVFSLHGVDGSGVVVLRKTVSRARLLEVVAQQPACLIGLEACSGAHEWARRFQGFGHTVKLMAPRFVAPYRKNGKNDGNDAEAICEAVSRPSMRFVPIKTLEQQAVLCLHRVRQGFVEERTATINRLRGLLAEFGCVLPQKAAEVRRRATECLEQLPPRAACAVRDLREHLRVLDERVKEYERSIEAHARDHDGAKLAQQRLGIGPMTASAIVASVGDVREFKNGRQFSAWLGLVPRQHSTGGKQRLGHITGRGDPYLRTLLVMGARSVLQRASSQSDPLSRWALAVRVRRGYHRACIAVAAKNARVVWAMLNQQARV

SEQ ID NO: 339848 - protein, 315 aa, unidentified
MNEVPLFVGIDVSKDRLDVAVRPGGEAWQVPYDPRGINSLTERLRELAPHLVVVEATGGMELALTGELAVAGLPVAVVNPRHVRDFARAAGQLAKTDSLDAHVLAHFAEAMQPKPRELPDASAQELRALVARRRQLVEMSTAEKNRMRVATPRVRPKVQEHVRWLEDSLKELDKDLADSIRSSPMWRTKEKLLRSTPGVGPILSMTLLSGLPELGALNRGEIAALVGVAPFNRDSGTLRGKRKVWGGRGQVRAVLYMATLVATRFNPVLRDFYQRLCAAGKPKKVAITACMRKLLAILNVMVKHHRHWNPAVQNS

SEQ ID NO: 339849 - protein, 346 aa, unidentified
MLHIGLDLSRKRIDVCLISDQGELIDRFTATPDRDGLHGLARRVAVYGEPVRAVVESMNGARFVHDELTAHGWVVLVADAQKVKGLAPLACKTDKIDSRVLAELSFRDLVPAIWLPTFGLRSEREISRWRLHLVKHRSALKNRVHSTLITFGHQRHMSDLFGVAGRRLLKELEIPEPWRSHVDASLVLIDDLETRIIQIAKELRRSGADHPYVPLLMTAPGFGWITSFTVACEIGDINRFASPVKLSGYTGLCPRVKQSGDMDQRGPLSKHGPKYLRWGLMEAAIAASSHPLYRERYQRTKRRLGKQRGPKVAQIDLARQLTEAIWYMLTRNQPFAPAGATIRLAA

SEQ ID NO: 339850 - protein, 523 aa, unidentified
MVATRSRKRLRSRFVDVIQKPKGVIHPRVQKVGPEHFGIVSVDCAKARCKWMLCDFYGNVLIPPVIVALNRNDLQAALERLRQALQQHGIKDQLVAIERTGRYHHFIRDAFRAAGYEVRLVHPFATSRFRQPSDPGIKTDDIDMAAIHCATANGFALIEPMLNEFWTILQLRVRQRRDLVRKSSQLCCQIREHLEACLPGFAACFEDLWDSPVAWSIVRQFPAAQAIQQAGLTGLQTRLKEAKVRYQQRSLQKVLTWAEAATAPELAAATHHAIALTLEDDRSCKNLEIQALERDLAGRVARTPYILLLSLPGINIISAADLAGEMGPIEHYCNARAITGRAGLRPSRQQSDAVDRPNGPLVRCANRRLRAALLWIADNLVVCNQHFRALAATWKAAGKDPRLTRVRVASRFSRMAYQIVAGGQVCRHPAMQQQSYILEKLLIFHTEHGTPMAQTLADLQAAAEQLPKGAYAREAQPLVKVLRELEQGRNRGPQPLSDILPIVLARLGVRLLQSKASGESDTH

SEQ ID NO: 339851 - protein, 400 aa, unidentified
MDKEKKKVKITVGLDAHPDSITAAIVVGDKPADAIVDKISDAVAINDMERWFKKSVPCDAVVVLEASGNSFDIFTRLSAIGYRTIVLDSVQVGKVSKSYCNTDKISAVRIAKTYLTGLSDEVWVPDPVTRERREVFSAYQQSVKDCTRHNNRIKSMLNSYTIRLKKQDRNLADEKVRNKIYASRDWSETQKALFEEAFDDLDRAADKRNRMRRIMAAEVLKESKMLQLMRIFGLNVIASYGLIAMIGEPGRFLNPKKLSAYFGLCPKIKQSGNVARLGGISKKGRREIRALLVQAAQTVLRYQSKSNPLYHWAWKVRFKKGHNIAVIAIARKIAVAVWYLLMGKPFKVKENTLTIRRKLIGLAKILGPQQIHSMGFGTYAIFVDHHLNLIELFACKGGHT

SEQ ID NO: 339852 - protein, 365 aa, unidentified
MWEAPVEIYRTSVGLDVHARSVVACGLDRSTGEVFERRLTPDCREILEWVGSLPGPAMVTYEAGPTGFGLARSLVGAGIECVVAAPSKLQRPAGDRVKTDVRDARHLARLLHLGEISAVTVPSVEQEAARDLVRAREDCRGDLMTLRHRLSKLLLRQGIVYYGGKAWTGKHELWLRTHRFDVRGLQLAYDTAFDAMLAALDRRDRLDEAIAEMAADSEFTPVVTRLGCVRGIATLTAFGLATEIGDWHRLDGRRIGAYLGLVPTENSSGASRSQGGVTKTGNGHARRLLVEAAWHHRTRYRPGPELRKRWDAASPAARARGQAANRRLHARWARFDERKKRSVVANAAIARELAGWCWSLAVLDD

SEQ ID NO: 339853 - protein, 418 aa, unidentified
MNRTLTKKLAQVKPGTIYIGVDMGREHNIAVVLNEQAERLARFRFPNDGDGYDYFHRRGAALQKRHQATAVLVGMEPTNYFWKLLAADLEQREVAYRLVNAFTVKKHREGDQLDRSKDDARDAFTIADLLRTGKFTETQLLHGGYAELRQCVALYDRLRKDIRSQKNLIYNVVGQLFPEFSSVFTDLAGQTALAMLRRHGAAAVVRQMPVESFITAVRADLRGRRLMVSQLRRAHQLSKTSIGLQDGIQALQLALRFHIETLEELQSQMRAIRSTLLEAFLALPESRYLLSVPGLGAITAAIILAEIGDPSRYHNAHQWVKLAGIQPVPNTSGRKTRSRTPMSHKGRPRLRTALYFAVLRLVQVDEAFAREYQRFQQRERNPLTKMQALGALMNRLLRILWALVRHQRLYDPHYQPTT

SEQ ID NO: 339854 - protein, 359 aa, unidentified
MDQSISESGKRFVGLDVGDRWSHVYVTDEQGEVVEEGRVRTTPEALRERFEGRARMRVVMEAGTHSPWMSRLLSELGHEVVVANPRQLGLISSNDSKSDRIDAELLCRLGRVDVGLLRPIEPRSARAMAARALLRSRDVAVRTRTTLINHIRGLVKASGARLPRSSTPAFAKKTQTAVPEELQSVVAPLYELLAQINQAIGDYDRAIEREGQQEWPATEIVRQVAGVGPVTALAFVACVERPERFASSRAVGSYLGMRPRRDQSGARDPQLRITKAGDPFVRRLLILSSQYILGPHGPDTDLRRFGQRLTARAGKGAKRRAVVAVARKLAVLLHRLWVTGEVYEPLRQATRSGAVEQPA

SEQ ID NO: 339855 - protein, 338 aa, unidentified
MAIVHVGIDLAKNVFAVHGVDEAGKPALVRPSVSRARLRELVAGLPPCTVAMEACTGAHHWARLFAGHGHTVRLMAPKFVTAYRMSGARGKTDAADAAAICEAVQRPNMRFVPVKSEQQHSQLMVHRARQGFVQARTACINRIRGFLAEFGHVLPLRADTVRRQAAGLLEELPGWANTVIGDLLSELHRLDERIAQYDCHVAQIAREDERAQHLMQLPGIGTTTATAIVAMIGNGHEFKCGRQFAAWLGLTPGQYSSGGKTRLGRITKAGDGYLRSLLILGGRSVLALAKGRSDPISSWALALQERRGYWKAVVAVAAKNARMAWAVLRTGENFTMPA

SEQ ID NO: 339856 - protein, 366 aa, unidentified
MKKVYIGIDAHKESNVLALAFAGTAVPELYGKASADLKAFEAVLRRIMKKYDLSKEDIALCYEAGPTGFVLARRLIKLGFECIVVAPSKIPSQSGDRVKTDRRDARKLARLYRASEVEGIHIPSVEDEVIRDVCRGRTDAVNSLARTKKQLLSFLLRNGYRYKGKARWGEPHMRYLRELVLADPAQKVIMEEYLQRIDFAVKQVERIDGQMETLLQTWSRKPLVEALMGFRGFKRTAAMVIVSEIGHFGRFKHPKQLMAYLGVIPSEDSSGGRRRQGSITKCGNSHARWMLVESAEHYRKPPKISKGLSVRQEGLSKEVRKLSWHAQNRLNKRWNKLIFRGMHPNKIRVAVARELSSYIWDLAKIV

SEQ ID NO: 339857 - protein, 405 aa, unidentified
MNAVGIDVSKGKSMIAVIRPFGEVVVAPYEVRHTVSALRELAHSLKSLGGETRVVLEHTGRYYEPVAQTLHNAGLFVSAVNPLLIKEYGNNSIRKVKTDKADALKIARYGLDNWAELREHTPMEKLREQLKILNRQYGLYGKNKIALKNNLIALLDQSFPGVNTLFCSPVREDGSQKWVDFAASFWHVDCVRSLGIKAFVERCRKWCKRHGYNFNASKYTAIYEEARELVPTLPKNDSTKVLITEAITQLNAISRTVEVLRAEMNRLAQQLPEYPVVMAMYGVGPSLGPQIMAEIGDVRRFAHRGSLTAFAGVDPMPSQSGKQERQSNPASKRGSPYLRKSLFLVMTVLLQKAPADDPVYQFIDKKRKESKPYYVYMTAGANKFLRIYYGRVKEYLYAAAETVRT

SEQ ID NO: 339858 - protein, 387 aa, unidentified
MPQPNDLSRSLAALDQDSTLVAVIEISQSSWLVGGIVPGVNRQPLKKLAADETALLQLLSRWRDEATKAGRTISRIAVAYEAGRDGFWLARWLRGRGIEAHVIHPTSVAVSREHRRAKTDRLDTELLKRAFLGWLRGEQRHCSMAMIPTLEEEDAKRPNRERENLVSERTRLVNRMKSALARLGIRGFKPHLRKAPERLDTLRTAEGMALPPNTLAELRRDMARLRFVMDQIREIEAARLARLEQHPEQANHAMVRLLARVVGVGIETADMLVHEILSRHLRDRKAVARYAGLTGSPDESGARRREKGLSRASNARVRRGMIQLAWRFLMFQKDSALAQWYRRQTTDGRGATRKTMIVALARKLLVALWQLVTTGEVPEGVVLRRAA

SEQ ID NO: 339859 - protein, 408 aa, unidentified
MQRYYLGVDWADEFHQVWVSDTEGKKVAEITIEQSVKGLSEFGRWLHERKAEGIELWASIEKPHGRIVDFLLDHGVVVYPVNPKALDRARDRFRMSQSKSDSFDAYVLAEFLRTDHVHLRALQPDSEQAQELKMLTRDHHRLGRHKTRLLNQIEVTLKEYYPRPLEVFSDLESKIALDFLTQYPTPRALSELTRRKWNRFAKREHHLGEERCKELWEKLSQPQLKIPEHVVRAKAQLLLVLVIQLKSLAEAVKNYSDKVESFFASIPAAEFVKTLPGGKSGTTVPMLWAELGDAKNRWESFRHLQAEAGGVPVTKASGKSRVVQFRFACNKLLRYASYWFSFNSLNRCEWANKYYRDQRAKGHSHHQALRALGAKWLKIIFVMWRDHQHNDENLHLANIARQQMRQAA

SEQ ID NO: 339860 - protein, 383 aa, unidentified
MLKYSLGIDVSKNDIHACLSIIDFTQQVKVKASRKFVNQDQGFKDLDSWIAKHRKETDIPLSVTMEATGVYYESCALSLFKKGYSVSVILPSKAKQYLKALGIKTKNDKIDSVGLARMGAEQSLEKWEPLDDFFYRLRSLTRHHQSLQELKTNLNNQLHADLHGIYSGKEVLRQLKKLILTFEKQIKETEEAIKRHLYSKEEVAEKVNQILTIKGVGMMTIATILAETNGFLMFKSIPQLISYAGYDVQENQSGKRNGKTKISKKGNSRLRRILHLPAFNLIRYDVGTFKPFFERILAKHNIKMKAYVAVQRKLLILIYTLWKRNEAFAPSLQATGQEIFRNEEMEPSFAGSEEPNKQPRINGAVLDRHSSTYQCLPSFALQK

SEQ ID NO: 339861 - protein, 342 aa, unidentified
MDISTMGMDLSKTTFHLIGLSPRGEIVLRKKLSRKQLLTYTATRLPMLVGMEACAGAHFLARALRDQGHDARLMPAQYVKPYVKTNKNDYLDAEAIAEAVQRPTMRFVPIKNDEQLDLQALHRVRDRWVARRTAVMNQIRGFLLERGIAIRKGPSYLMTQLKIIFSDGNPSFSERLLHLIHELKHEWDELERKIEEADTELARIAKEDDGCHRLMEVPGFGPIVSTALVAAIGNGVNFRKGRDLAAWLGLVPRQHSTGGKTRLLGISKVGNEYLRRMMLHGARSVVMQMERKPSALGEWLTSLSARRHRNVTVVALANKMARIAWAILSKGTHYCAPAFVAA

SEQ ID NO: 339862 - protein, 343 aa, unidentified
MEYYVGLDVSLKQTSICVVDRAGLVVREGVIDSDPEAISGYVRSKAPNAVRIGLETGPTSTWLWTELKRLGLPVICIDARHAKAVLKMQINKSDRNDAIGIARIMQTGWFKEVHVKDIDSQSIRALLASRALLVKMKRDLENHVRGLLKNLGLVIGRAKFNVFAVRAEELIEGRPELIAAIRPLLEARNAVEQQVSELDRKVMKLARRDAQVRRFMTAPGVGPITALAFKATIDDPARFARSRSVGAYVGLTSRRHASGEVDWTGRISKCGDAMLRSYLFEAAGVLLTRVPKWSAVKAWGVRLAKRSGLRKAKVAVARKLAVILHRMWIDGTEFSWSKKEIAA

SEQ ID NO: 339863 - protein, 416 aa, unidentified
MDTMYERCCGLDIHKKTIEACFRSGKKKTHMSFGTTSAELRKLTMWLVENGCQSVAMESTGSYWKPIFNILELSGTDMEIIVVNARHMKNVPGRKTDVNDAEWIAELLQYGLLRPSFIPDREQRELRELSRYRKSLVGERAREINRLQKMLEGGNIKLTSVVSEVTGYSSRRLLDRLLRNDEPMTEDVISGLVHTSLAGKSKELETALDGLLSELQKELLIKVLDHIDDMSRRIADLDDFCRKQMKKYEDALDKLDEIPGIARRTAETILIETGLDMSRFPTAKHFARWAGLAPGNNESAGKRSSGRTTKGNPTLKSTLIQSAKVAARKKDSFFKARYQKIAARRGANRASVAVAHSMLIAIYHILKSGERFKDLGEDYYNQFNKEKKKKYYLKKLTKLGVNLKEATLSISIQAAT

SEQ ID NO: 339864 - protein, 406 aa, unidentified
MRYYIGVDWADREHAVWVQDESGARVTQRMVAHSAEGFADWGRWLDERRAEGSELWAAIERPDGRVVDFLLDHGVVVFPLNPKALDRARDRFRMSGAKSDPFDAQVAADFLRTDHAHLAPLRPSSEAAQELKAVTRDYARQVRQQTRVLNQLTVTLKEYYPRALEVCPDLKSRWAQEFLAAYPAPAALHGLSERQWTRWARGHRLSAARAAELWPVIAGAQLPVPAHVVRVNARRLAVLLEQLAVTGRAVAGYREAVEGFFARLPAAQWAATLPGGRSGTTVPAVWAELGDAQGRWQTAQHLQGHAGMVPVTARSGKAHVVLFRFACNTHLRAAVQQLAFVSLRHSHWARAYYKGCRARGHAHQHAVRALGAKWLKIIFAMWTRSVPYDEQYHLASIGRHHVGQPA

SEQ ID NO: 339865 - protein, 325 aa, unidentified
MRQPQSAVKPQTQIGLDVSSQTLDTHIRVDGKAFSVPNTDEGFDQLCKMISAYDVTMILMEATGGYEDNVACYLQLQGYDVVVINPRHARRFAQSMGRLAKTDRIDAAILAHMAFMIDSGPDRERYIRPVTDEQRKKLSRMSSRRRQVVDLITVEKQRLTHADDYARESINSLLSVLKAELKRIDADIFRYVKKNFSALANRLLSVPGVGEQAVTVLIADLAELGHVNRRRISALLGVAPFNHDSGKFKGQRRIRDGRQSVRNVLYMGVISATRFNPVIKAFYDRLLSRGKPRKVALIACMHKLIRIINAMMKTGQSFDISLHGV

SEQ ID NO: 339866 - protein, 390 aa, unidentified
MNGQTDFTATKVEPEDFKNTLFLAMELSRSTWLVATFAPRLGDKISVHAIPGGNTKRLLELIGRLQAKLQDKDVSRVRTVCCYEAGYDGFWLHRVLVNHGIENHVLDAASLPIDRRAKHIKTDNIDAKRLLRAIVGFVQGDPQSCRVVRAPTPEEEDARRLHRERQRLVRERTGHLNRIKALLITHGIRALRITDAKWCERLDKMRTGDGRPIPARLKIEMEREWKRLKVVAEQVREIEAERDRLVKGSEPSGDVCTEKMRRLVKLHGIGAEFATVLTREVFYRPFQNRRQVASYVGLTPAPYDSGDTKHDQGINKAGNTRARVIAVQMAWLWLRYQSKSELSLWYYRRVGDLKGRVRRIMIIALARKLVIALWRYVETGRVPTGAIVTT

SEQ ID NO: 339867 - protein, 455 aa, unidentified
MESNKASFQIIHPHAAGVDVGSRSHFVAIDQNKDNVREFGVYTKDHQEMISHLRQHGVTTIAMESTGSYWQTLFNALQQAGFDVLLVGGNQTKNVKGRKTDVIDCIWIQKLHSLGLLSGSLLLSDTFQQLRTYYYHRLHLVEQSARYSNKMQKALRLMNIRLDVVLNDITGQSGMAVIEAILAGQREPDHLVSLISIRVKKSRQEIAHALQGWWRAELLFELEASLDFYRLYEAKVKECDQVIETFLVKYAPAVEISVEETKQLKSNRKRAGKHAPGFNLSHLAYQYFQTDLFAISGISYNTVLCLLTNMGHDLHKFPTAKSFACWLGLVPNNKISGGKIIGNRTPSGKNHIAKALRHAANSIGNQKDHELTPFFKRIAFKKGRLAAIIATARKLAVIIWNMIIKAEPYQKNQVELSTEKQKAMKLKHLDKKLHALQLTKEELEKLFLKHSLSVM

SEQ ID NO: 339868 - protein, 374 aa, unidentified
MNNSITYVAMDTHKKEHKAALHYPGDEEIVQFTVKNTAAEIKKMVNKIKKNSPHEVRFCYEAGVCGFTLKRRIEALGCGCKVIAPSLTPVKPGDHIKTDRRDAVKLLSMFKADLLTEVYAPDEKQEAARELTRCRQSAQENLKRIRHQLLKFLTRHGYIYTDGDHWTQKHLRWLGGLEFDQPMLREVFDCYFTEMQHCIQRLSSLDRQVEKLADSEPYCQIVGLLRCFHGIDTLTAITTVTEIFEFGRFSSPGELMSYLGLTPSEDSSGEKTCKGSITKAGNKRIRKLLIEAGWHYRHPCTVTSKALKQRRKDQPQWVINIADRAGQRLRKRYWYLINRGKSPCVATVAIARELAGFIWSVFKEYEARNGKNVA

SEQ ID NO: 339869 - protein, 453 aa, unidentified
MLKPQVIPDEDHEVVYERVAAVDVAKASGVVCMRTPDPARPGRFVNRIWDNVPATRARIAELGRELLSCQVQMVTLESTSDYWRVWYYVLESIGLAVQLVSASQAKNLKGRPKTGKLDAMWLARLTQWGMLRPSFVPPAAIRAVRDFTRARQDLIRERTRCLQRLEKLLEDAMVKITSVVSDGMKAKSSVAMVQALIAGERDPRKIADLAKGPLRGKRDQLAEALDGMFDSHHGVIAQMLLDQVAFLDQRITAMEDQAIAALAQVQESWGVDATGETGPGCGTGPDSQVLAAAHRLAEIPGISLMLAIVIIAEIGLNMAAFPTPAHLVSWMGLCRSASQSGTRHGKGKQKKGNSYARAAAGQAAIGAAGTATFLGERYARIARRRGKAIAQVAVARSIMIIVWHLLNDPAARYRDLGPDWHASHITRDKKIRTHLRGLQALGLTITITADEAA

SEQ ID NO: 339870 - protein, 427 aa, unidentified
MKELTKVCGIDVHKMFLQVCILSRSGEYSQHRFHNTPHGILALKDLVLAEGCEVVAMESTGIYWYRLFLELESDIRTIVANARQIKSIPGRKTDMNDARWIAELALHGLIRPSRIFPRRDREFRDLTRNRETLVRTRTTIKNRIHKILDSAGIRLNVALKDIFGKSGRHLLAGIAEQKDLEATLATIPSPLILRRADQLREILQDSPLSPTQLHLLTTQLHLLEEIEEKIAHLDELILASLEDSQMEALPICTSVPGISITAATTILAELGDVRDFSSADRLVSWAGLAPSVYQSADTLVCGKITKQGSKSLRWILVQVAQAASRTTDTVFSRFFRRIAFRRGRNKAIVALARKILTILWHLLVNRELYVEPGVQRVRKLPARATLSKISIDDATEILLNAGYRIYSPESQKSAGKGVGAKRATHPL

SEQ ID NO: 339871 - protein, 405 aa, unidentified
MEVVYSHCCGLDVHKKIVVACVVTPEGKEIRTFSTMTEDLISMVDWIKGKGCTHVAMESTGSFWKPLFNLLELENIQTLVVNAKHMKNVPGRKTDVKDAEWIAGLLRHGLLQGSYIPDRDQRELRELIRYRRSLIDERAREVNRIQKVLEGANIKLSSVASDVLGKSGRAMLEAMIAGEEDPEILSELAQRRLKSKKPELQKALNGLIGHHQKLMLKTQLRHIDYLADEIKKLDEEIKQRMLPFDEDLELLDTIPGVGRRTAEQILAEIGTDMNQFPSAAHMCSWAGLSPGNNESAGKRKSGRTRKGNKKLRSALVEAARAAGRTKNTYLSSQYHRLSARRGANRAAVAVAHSILTIAYYIIKRKQPYIELGPTYYEERKRDIVTKQSIKKLESLGYKVTVESVA

SEQ ID NO: 339872 - protein, 421 aa, unidentified
MRAIGLDVHRDFCEVAISEAGEVRSAGRVAARPDALELFAQSLTSDDQVVLEVTGNAWEIARIIEGHVKRVIVVSPSDTGIRQARAKTDRLDARTLAKLLAAGSLDSVWMPDERTRVMRRRLARRSQLVAARTRAKNEVHAILMRRLKGRPEVSDLFGKQGRAWLAELELPVEERETLDSGLRQIDFLDGEVALVERAIAHDALNWPDARRLMTVPGVNLIVAVWFLATVGDIHRFPDRRKLVAYLGLDPKVRQSGDAPAAHGHISKQGSSQARHALVEASWSAVRTPGPLHAFYQRIRARRGHQVAICAAARKLACMFWAMLWRQQDYAFGQPSMTARKIRRLEITAGAPRRQNSRGVWAAAIAMREAERDLARQAEQAYAQTIRDRQAAGAIKAGASATPGHASQKPSKGTAARQTTSP

SEQ ID NO: 339873 - protein, 441 aa, unidentified
MSLTDFSLIDWRGHMTSLATDEFTAFIGLDWADAKHDICLQAAGSDKREVKVLEHKPEAIEAWATALLQRFVGGPIAIALELNKGPIVEALRKYDGLVLFHINPMMLAKYREAFTPSRAKDDPSDAELQLELLLGHRDKLTPLVPQSPEMRTLAQLVEHRRRLVGERVRITNRLTHALKTYFPHVLQWFPNKETRLFCEFVTQWPTLKAAQLARRSTLERFLRQHHVRGSQRINERLEAIKQATPLTTDEGVITPHVLMVQALTSQLRVTLEAIERFDQAIAERAQKHPDFALFEALPGAGSVLAPRLLVAFGEQRERYGSAAELQKYAGIAPVIERSGKQSWVHWRYSCSKFLRQTFVEWAAESTRHSFWAQAYYQQQRNKGASHQAAVRALAFKWIRIVFRCWQSGTLYKESTYLAALQRRGSSLIPNLAKSSKKGEKG

SEQ ID NO: 339874 - protein, 348 aa, unidentified
MDVHQASISIAVSDAAGKVLMECIIETKAATVLEFIQGLRGSLWVAFEEGTSAAWLYDLLKPRVTKVVVCDPRKNALLKAGNKNDRVDARKLSDLLRAGLLTPVYHGESGVRTLRELSRSYLAASKDLTRVMNRLKAIYRSWAIPCAGKQVYSPRHRAAWLEKLREAGVRRRAEQTYQQLDFLLGIRKETRKELLTESRKHPARKLLEQIPRLGPIRVALLIALIQTPHRFRTKRQLWNYCGLGLRTRSSGEYRYTGGHLQHARKPPALRGLNVNHNHDLKNLFKSAATQAGTCKDDPLGEFYQNLLARGMEPPMARLTLARKIAAIALKIWKKGERFDPAKLKQQAA

SEQ ID NO: 339875 - protein, 403 aa, unidentified
MFYVGIDVSKNHFTYCIINSTSQIVRKDTLTQTFESFKDFLSIIKNFQPSTIIMESSGRYHICISSFLISHNIQPFIINPKFSHQFFKFIQSTSPSKTDSKDAFILALFALKNPELLKPSSIPEETKIIARTLQSLKKELAKIKTQILNCLSVVFPELERVTNPFSKTILNILLYFPSAKDIAKAPIKRISAMFEEATTRGKKPSLTPEDLKELAKKSIGISHKGYSLTLKTYIQKLFFLEKQIEELSTLLDEEIQKWSPKEIDIISSIKGISRDLANRFIAEIEDIKKFSSAKKLIKYAGLDPVIKQSGKWKFFKGISKKGNAYLRDIFYQMAYGVVTWNSFFREYLKKKMAQYGSYRKAMIAVVNKLIRVIFAMLKKGEKFRPERVFPSIRFKNSEVVGYV

SEQ ID NO: 339876 - protein, 335 aa, unidentified
MKEITTVGVDLAKSVFTIHGVDAEGRTVLRKTVRREKLMELIVALPPCLIGMEACGGAHEWARKFEQHGHRVGIMMARFVTAYRKSSKNDGNDAEAICEAVARPNMRFVPVKTAEQQSILSLHRVRQGFIEQRTATINRIRGLLAEFGVVLPQRADQVRRAAIAVSEELPVLAREAIADLHTHLAYLDERIGRYERQLVALARQHEPARRIQDLCGVGPLTASAITASVASGHEFANGRQFAAWLGLVPRQYSTGGKIRLGRITKRGDAYLRTLLMLGARAVLQTAARRTDRLSRWALALRARRGYHRAIVAVAAKNARIIWALLARNREFVLAV

SEQ ID NO: 339877 - protein, 411 aa, unidentified
MHNRQNYLYVGVDLHKEHHTAVIINCWQEKLGEIQFDNKPSAFSKFLLEVETYVSAGITVVFGLEDVGGYGRALAKYLVDHEQVVKEGNPALSFLERKSHVTTQKSDSWDAECVARILINKLNQLPDAKPNDLFWSIQQLVSTRNALVKAQSALKNQLHIQLNHHYPSYKKFFSELDGKTALAFWQQYPSPFCLEGANIKQLTAFLLDVSNNTCSVKKASDILKLVKEDGQTMKEYQETRDFLVRSIVRDIEFKKKEMKYIERELKRLVNLLDYQLETMPGIELVTASALIAEIGDVRRFPNANKLARFAGIAPVYFGSGGKGKTHKSKQGNRALHALFYNLAVQQVQVAKGSKLPRNPVFHAYYQKKLKEGKTKGQALVCIMRRLVNIVYGMIKYKTAYELPVVEEKEVV

SEQ ID NO: 339878 - protein, 349 aa, unidentified
MTTVPSRPVAVIGGVDTHADVHVAAACDPLGAVLGTGSFPTTPSGYRRLLAFLISFGPVTVVGVEGTGSYGAGLARHLAEAGVRVVEVNRPNRQVRRRHGKSDIVDAIAAARAVISGQATVIPKTHDGSVEALRALQIVHRSAMKSRTQALNQLHALVVTAPEAIRAPLRGLNRRRLLATCRAYRPGNGDDILAVTKFALRHLAIRIGELTIETTEISKRRRRLLNQCAPTLMAITGVGPDTATALMLAAGDNPDRLGSPAAFAALLGASPIPASSGKTTRMRLNRGGDRQGNSALWHIVISRMATQPVTKAYVERRTEEGLSKPEIIRCLKRYVAREVFNALPREVLV

SEQ ID NO: 339879 - protein, 340 aa, unidentified
MGEVSTVGIDLAKSVFQVHGADMSGAVVFRKKLRRDQVLTFFSTLPRCMVAMEACASAHYWAREIALAGHETRLIPPAYVKPFVKRQKNDMADAEAICEAAQRPTMRFVQGKSAQAQASAVVFRTRDLLVRQRTQLINALRGHLTEFGYVVRQGVGHVGKLVAIVRDPTSDVPAEARPVLAIIAGSLEALQAQIALLDREIAQRAKDDAVAKRLMTIPGVGPVIATALVALAPAASTFRRGRDFAAWLGLVPRQHSSGGKERLGRTTKMGERSLRRLLILGASSATKVAARDPDKAGAWLAGMLSRKPRMLITVALANKMARIVWALMAHGGSYRAPATA

SEQ ID NO: 339880 - protein, 466 aa, unidentified
MTHEVLDQVNYPQIILDDRAAAIRPRPETQTPERAFTMKKSPRGRPVLPRGRAAVGIDIGKRKHAATALSPQGEVIARLASFPNSRQGVDQLEKDVLRKAGGPNKVLVGMEATGHYWMCVYHELTRRGYSCVVLNPLQTNARSKANIRKTRTDKIDSGTIARVILSGEAKATRVPDPRTAELRLLVRHQRRLLQAAGDMERYAHTLVDRIFPEYAGIFCKPFLSAARELIRQIGFAPDRLVENADRVREILAKVGRGRIASETIDQLLQKAKESIGTRQAEEVAESQLRSILDYLDTLRRQIADIDKQLDERIEQFDSPLSSLGLTSRLTAVVHAESDPIGDFTNPQQYVAYTGLDPSLHDSGDSIRGRGKISKRGSPLLRNALYLAAFVVSRRHDYFRRIYHKHRKRGKTHRNALVIVARRLARVIWRLLTDGRQFTARPPKTACPSTKPRKSTTSAKKAVCARA

SEQ ID NO: 339881 - protein, 346 aa, unidentified
MNIVEATRTVVGGIDTHGEVHVAAALDELGAHLGTESFSADASGYAELVRWLEGFGPVAKVGVEGTGSYGAGLNRFLARSGIAVVEVDRQDRQDRRRTGKSDPLDALAAARAALSGKASGLAKSRDGWVEALRVLLVAKRSARVSRIKALTQMRQIVYSAPEELRAMLKGLPISVFVARCQGLRPSRSTDAVTAATKTSLSSLARRVADLEDELERLDAMITPLVRAGAPELLAITGVGIDTAATLLVAAGDNPERLKSEAAWAHLCGVAPLKASSGRVTRHRFNPGGNRQANSALWHIVITRLASDPDTRAYMERRQKEGLSKCEVIRVLKRYVARQVYPALPRR

SEQ ID NO: 339882 - protein, 387 aa, unidentified
MTGPSQVSRFIPGDYHIFAGLDVDKRSIAMTFSDHKTLLKSLRLPYSSAQLLNYVRKHFPQQRVAFVYEAGPTGFGLYDDITAEGHPCLVVAPSMVPTAPGQRVKTNRLDSKKLSIGLRGGELRSIHVPSGSYRELRHLVQLRDTHVQQLTATKLRIKSLLLYEGIPFPPAPATNQWSARVVHELEALPCGETVRFKLDQLIGTLYFHFNMAATTQKQIRRFCQKDPELRQSISFLMSLPGIGWIVAAHTVARLGDWREIENVRSIAGFLGLVSSEHSTGDKVNRGSITRAGDSRLRNKLIQSAWVAIGKDPELRAFYRRIFARHPKKVAARKAIVAVARKLTTRMYAVLKQQRPYLIRPDSSIAPLTTEETVGPRERLDAAQSDQP

SEQ ID NO: 339883 - protein, 338 aa, unidentified
MAIIAIGIDLAKNVFAVHGVDAAGKAVLVRPAVRRDALLELIAKLPPCLIGMEACSGAHHWARQFQQFGHQVRIMAAKFVAPYRLSGKRGKNDAADAQAICEAVQRPQMRFVPIKSEDAQGRLSIHRVRQGFIEQRTATINRIRGLLSEYGHVLPQRAEVVRREAGHCLEDLPGWANTAIGDLLSELHRLDERIAEYDRHIEVMAKADDRCRKLMAIPGVGDKTATALMASIGSAHDFKCGKQLAAWLGLVPSQYSSGGKQRLGRITKAGDGYLRMLLILGARAVVANAKKKDDRLSRWVADLAERRGYWKAVVAVAAKNARMAWAMLSKGEAFRPVT

SEQ ID NO: 339884 - protein, 316 aa, unidentified
MSTAPVSIGIDVAKGELVVATPVAEIGRMGNDPAGIRDLVESLRPLVVDRVTLESTGCYGRAVAAALLAAGYRVAVVQPGRVRHFAASIGIRAKTDPIDAKVIARFAEATQPRTMTPPAEAVARMRALVDRRDQLLDMRIQEENRLETITDPLIAREVRGQVARLRRMEERYTKHIAETIAADPELRALSDRLQEESGVGLQTTAVLLAYFPELGHLNRQRAAALAGLAPYDRSSGTYDGKRAIFGGRKRLRRALYFAAVTAVRWNPRLKDTYRALRTRGKVPKVALIACARKLLVRLNSLAADVLTTQGKVLLSP

SEQ ID NO: 339885 - protein, 425 aa, unidentified
MNYNQNEKIEQVKEETLVIGVDIGSGDHYARAFDYRGREVSKRVYRFSSDLEGFNGFYEWSQINSKKAGKTEILVGCEPTGHYWYTFEKYLREHEIKLVFVNPFAVKRLKELDDNSPKKTDHKDPKTIAKLMVEGRYCYPYIPEGFYADLREAVSSRDRIQKEENAAANRIQRWLKIYFPEYLKVYRRFDAESGMLVLEQAPLPEDIIKLGAEGINRIWREKKMRAIGIKRAKTLVEAAHNSVGIHGGAGARCELKLLLEDYRRKQTQLEMVTQSMTEVVMKVPYVEKLLAIKGVGIVTVAGFLAEVGDIRRFQSPKQIQKYAGLELVENSSGKYKGQTTISKRGRRKLRRILFQVVLPLIGSNEEFREVYDYYSTRIHNPLKGHQAMIAVSCKLIRVFFAILKNGCDYNAEKLRKDIRRPEQAA

SEQ ID NO: 339886 - protein, 347 aa, unidentified
MRFYTQQHAYYCGIDLHARSMYLCVLDQTGTVVLHRNIAAEPGELIAALAPFRPDLVVAAECTFTWYWLADLCADENLPFILGHALYMKAIHGAKAKNDRIDAHKIAALVRGGNFPLAHVYPKARRATRDLLRRRLRLVRRRSELNVHIQNTTSQYNLPALQKRLAYRCNRDGVAERFLDPSARKSVELDLALMDVYDGMLLDVERHILHAAKEHDGDTLYRLQSVPGIGKILALTIHYEVGDIARFPTVQDFASYARLVKPSKESAGRVHGHGGGKIGNAHLKWSFSEAAVLFLRDNPIGQKLLARYERKHGKSKALSILAHRLGRAVYYILKRKTVFDMQKFIAS

SEQ ID NO: 339887 - protein, 359 aa, unidentified
MTMLAEPNEKIEDPTVLDAVVGGDTHRDTHQLEMLTGAGVMISTISIDNDADGYAAAIAWIAQHAPGPRVLVGLEGTRSYGVGLCRAVQAAGLQVVEVEQPKKGQRRGRGKSDPIDAHLAALTVLRMPADRKALPRSDGDREAMRILLVARNEISTTRTAQINRLRALLLLGDDEDRALSRGAMSKAHLDRIGRRRGRRDETREQAVRRGEARRLAIAIRAADLELTANHKQLKTLVQAFAPGLLDRKGVGPFSGAQAIVSFSHVGRCRDDAAFAALAGASPLPASSGRTDRHRLNRGGDRQLNRALHTIMLTRWRDCTRTHAYIQKRRTEGLSDRDIRRCLKRYIARELFRALTAVGG

SEQ ID NO: 339888 - protein, 347 aa, unidentified
MQEVVTVGLDLAKQVFQAHGADAEGAPLFSRKLRRAEVLRFFEKLPRCLVGMEACSGAHFWAREIAALGHDVRMIPPAYVAPFVKRGKTDAGDAEAISEAVTRKTMRFVPIKTAEQQAAAMVLKTRSLLVRQRTQAVNALRCHLTELGIIAGAGIAKVDSLIAIVRDESDTRLPPAARFAMTAIADQIEALKQQASKLEDAIVREAKVDEDIRRLVTIPGVGAITAATIKALVPDPGGFKSARHFAAWIGLTPKPRSSGGKERLGRISKMGNPDLRSLLVVGATSVLRYTEKSAKAMPWLTGIVARRPYKVAAVALANKMARIVWAVLTRGGVYQRGNSLAAATVTS

SEQ ID NO: 339889 - protein, 437 aa, unidentified
MINPIKQEEVMLTEQERLNAYRQMHSSIRNSEQYLVVGIDIAKEKHHAFFGTPAGKTICKQLIIKNDGNGYEQLLARTEQLRLQHQLKYVVFGMEPTANYHKPLAEYLIAREAMVVLVSGTAVVRNRELLDNRWDKHDRKDAANVADLVGAGKCQFYDNPPQIILDLRELLGLRRRYRQLESGLRIRLRNNLLALHFPELDHHFSTHQHDCLSIIKTCFSPQAIAAMHFEKFCRKITDKPIRKRQQAFMEDIWTAAHKTVGRPVDETVQYMATREVCQLEQFRAEIEDLDRQIFKIASALPAYQYLVSIPGFGPFISAKILAAIDDPERFTNEAQVVKLAGFDLCASRSGKQAGKAIAQISKKGNAEIRFALYQAAMVATTKNTLFITYLNQKIQGREQEKGIQKKMRTKVAAKLLVIAWTLMKEHKYFNAEHLNLT

SEQ ID NO: 339890 - protein, 396 aa, unidentified
MISVGIDVSKGKSTVCIMKPCGEILESPFDIGHTADELDSLISLIKSFDEETRVVMEDTGHYHLPVATYLSSHNIFVCCVNALRMKKFCSQSLRRAKTDKIDSIKIASFGITYWNELVKAYPSNVIYDELKFLARQYYQVTGMLVKSKVNFSNLLDQVMPKINDVLSNQGENHKLTEFVSRYIHFQNILDMGEMKFTSDYCKWAKKKGYRLNERKAAEILALAQNGIPTLPNSQSVKIAVSEAVKLIHSIEESRNTILAQMQDLCNTLPEYSVVKEMDCIGDTLAPRIIAEIGDVRRFKNKHSLIAYAGIDAPPYQSGAFHASERHISKRGNSYLRKTGYEIMQSLIKHKPADNAVYDFIQKKRSEGKCGKEAMIAGLNKFLRVYYGKVMEFYSEH

SEQ ID NO: 339891 - protein, 361 aa, unidentified
MLNSTTWIGMDVHKERIHVVAVNEAGHTEARWETPNTPKGKGRLATRLAGLGKARCVYEAGPCGYDLRRFLDEKGIPCDVIAPSMIPTRAGDRVKTDRRDAEKLARMHRMGELTAIHVPTPGQEALRDLVRAREDANEDLVRSRHRLQKFLLRRGRRYEGKSWTRDHWRWIRALSFEDNNAETVLAEYLLAVDQQLERVARLDARIEEEAQNPGMAPAVARLKALRGVRTLTAMTILSELIDMNRFASPRELMSFIGLVPSEYSSGGKQRRGSLTRAGNAHVRRVLVEAAWHYRHPPHRTGETIRKRREGQSPEVIETARKAEVRLHRKFTRMVMRGKRTTVAAVAVARELAGFVWAIGRI

SEQ ID NO: 339892 - protein, 344 aa, unidentified
MKYFVGLDVSLRSCALCVVDGRGKVCLERELPCEVSDIAGCLEAFPHPIERIGFEAGALSQHLYFGLQAKGFDIVCMEARQVSAALSAMRNKTDRTDAKGIAQILRTGWFSPVHMKSREAHGLRALLSTRKALLKKTMDLANEVRGLLKIFGVRLPRTVKHGSFDGLVRPMIEMDDVLAHAIIPLLDARVVLFQNYLELDRRVKRAASQDEVCMRMMTVPGVGPIAALTFKAAVDDPKRFKRSRTVAAHFGLTPRRYQSGEHDNPGRISKAGDRDVRATLYAAANALLMRTMAGSQIKTWGMRLMRTKGRRRAVVAVARKLAVLLHRMWTDGTEFRQEKVGGTA

SEQ ID NO: 339893 - protein, 409 aa, unidentified
MRYYVGVDWADQTHAVWVVDESGTKITGRTVPHTAAGFSEWGRELDEWRAQGIERWAAIERPDGRVVDFLLDHGVVVYPVNPKALDRARDRFRQSGAKSDPFDARVLADFLRTDHRHLQALQPSSDAAQELKLLTEDCQRHIRQQTRLVNQLTATLKAYYPRALEVAELTTALAREFLQTYPTPEALTTLTARQWQRWARGRRVSAARIGALWAVLHQPQLPVPAHVVRAKARLMQSLVEQLTPVVTAVAQYRTAIDDFFARMPAAQWARTLPIGKHGITAPTLWARLGDAPGRWESFRHLQAQAGAVPVTKRSGKQRVVHFRFACDKSLRHVVGQVAFLSLLSSDWARAYYDQQRARGHAHHQALRALGAKWLKIIFVMWHRQVPYDEPYHLATLTRQQLRQRQTTIA

SEQ ID NO: 339894 - protein, 289 aa, unidentified
MITIGIDPHKGSHTAVAVDEHEEVLDQLRVKASRRQVHDLLAWAERWPERRWGVEGANGLGLLVAQRLVAAGQDVVDVPARLAARVRLLDEERTTKSDPNDARSTAIAALRHRRLRTVTAEDHTVVLRMLATRRAPLQAGRTQAVCRFHALVRDMHAGGARTRLSTKKAASMLAAMRPDGVVETERKERARELLEDMRRYDRLLIDNEAKTTAAVKASGTTLTEILGVGPITAGLIIGHTGDVTRFPGRGNYASYNGTAPIEASSGDVRRHRLSRRATASSTTPSTSSP

SEQ ID NO: 339895 - protein, 383 aa, unidentified
MKNVYGSVVGAGIDVHYKFSKAALVDARGRVVRRERLEHQDRESLREALSRWPVGMTAVLEASFGWGWLGDLMEEVGVNVRLSNCFKVEKMRQARGQVKTNDKDAALLAPLPMEASNWWEVWRAPKEVRERREWMRHRMDLVGLQTQTKCRIHAIFHRHGIFHAFSDLFGGGGRKFLLGLCEGQDPQSKYLDSGSLEALRGNLVLLLNLRQELARIAVGLRQELERSPEARRIDSVPGFGLILAHVVLAEVGDLRRFRSSRALASYSLLAPRSNDTGQGLPPGQSPLGRHLGRRGNRTLKWAFIEAAHGAVRSGGIWREMFDRATHGGRRDRGRGYIKVARALVNVVYAVWRDQRMYQTQRPVGRKTRPGTGRPYRPMVMASS

SEQ ID NO: 339896 - protein, 346 aa, unidentified
MTIVGCDFHPGWQQVAVFDAVTGEIQELKLVNADGEAERFYRRLTAPALVGFEACGNTQWFEDLLDRLGHEVWIGDAAAIRASYVRKQKTDRRDAAHILKLLMEDRFPRLWRPSADERDLRQLLIHRHRMVGIRIRVKNGLHHLMLNKGVQMKRKLWSEAGQLALRELPLEGWAAQRRKDLLQLLGSLNAQITELDEAVKSAAQGNERARLLMTQPGVGPITSLAYVVTIGDVSRFPRGKQVASYLGLIPSEHSSSNRRRLGSISKQGNSFMRMLLVESAQTVNRLDEGFRKQYKHRCHHMAKGVAKVAAARRLAVRLYWMLRTNTAYPEIARIESSPRYGVVGES

SEQ ID NO: 339897 - protein, 399 aa, unidentified
MKSQQNTSDRALGSNLKMPNSVDFSTKDLYVGIDVHKERWQVAVYYEGLILSNISIEANFQKLINHLSKRYGNAQFHCVYESCAWGFHLCRTLREAGMDCVIVNPADIPGTDKERKSKTDKVDARKLATHLASGLLHPIYVPTEKLQKQRGLIRLRKKIWGDLVRVKNRLRGELRFQGYIIPEKFDSPSWSNNFLLWIEQLAIRDEYMKETLLMMLDEIKALRQLLLKAEKKLRDLMRSDDYRHNSDLLRTIPGIGPLTSMLFLLEVGDVRRFRSFDALNRYVGLCPDSHSSGEKLKNTGISSRSHSQIRSALVEASWQLIRRDVAMLNHYKDLQKRMKGQEAIIRIARKLLRRIRAVLLSDRIYVSGIDEMITAKELNAPNLPMPKPIGRPRKIFKVN

SEQ ID NO: 339898 - protein, 435 aa, unidentified
MEDVRDEPLYRSRVCGIDVGKAELYATIRVPSDGNPARRASETRRFATTKRGVLELADWLRCWQVPAMVMEATGDYWKGPFYRLEAEDFECVLADARQVKNLPGRPKRDPSDSAWLAACFERGAVTACFVAAPEFRLIRLHTRYRRDLTEERTREKNRAEKLLESAAIKLSSVLTDLHGVTGRDIMGRLIAGERDPKVLAQLARGRARAKISELAAALEGAEFFTAEHAALLKTMLDRIDRINAEITCLSQTIERLLAPWEEQLQQAESMPGWRRRSAEDALAETGPDMTRFPTGAHLASWAGRTPLDNSSGKRQGKARSKKGNRYLAAVTGETSVAAGKTATREGARYRRLARRRGKAKAQVALGNTQMKVYHALLSRPGTRYQDLGPDYYERQRDTRRQIAHHVGKLGALGFEVTLARIPGPEPDAEAGTSAA

SEQ ID NO: 339899 - protein, 413 aa, unidentified
MEVMYPRCAGLDVHKDVVVACARVAVDGRVTQEVRSFATTTKALCELSAWLEEQRCTHVLMEATGVYWKPVWHMLEGTFELVLANAQHIRNVPGRKSDVNDATWLSDLLAHGLVRASFVPPTPIQEVRDLTRTRKQLAREVIQHTNRIEKVLEDTNIKIASVISDVLGKSGRAILNALVAGETDPEKLLALCSGRLKASRKVLIEALRGRVTDHHRFLLKLHLGQVDLLQQAMRDLEARMGESLEPFRQHIENLTTIPGISDVAAHVIAGEIGLDMSRFPNAGNLISWAGLCPQLDESAGKHRSTRIRKGAPWLKTTLVSAAWAAVKTKGSYLQAQFQRLRGRRGPKKAIIAVAASMLTAAYHILRDGVPYKDLGPDHFTRRNKDYAAKRLKKRLEDLRFTVEVRPATAGVST

SEQ ID NO: 339900 - protein, 320 aa, unidentified
MTILDSQTVVGVDVAKNEIVAYRQDSDQSVAVANEGRALKKWLKTLPAGSSIALEATNIYHLETVELAYSMGHRVFVVDPGKLNKYRDSLGQRAKTDASDARLLARYLSKEEDRLRLWSPPPAVYTRLKSLLHRRAALVRMRVSFKQSWGNDPSLKKELDTTMANFDTLDQSLQNLMKETLSEAGLTPQIKRCEAIEGVGFLTATGFLTAFMRGEFENSDAYIAFLGLDLRVRDSGNKHGRRRLTKKGDPEIRRLGHNAAMTASRSATWKPFYEANLARGKAKTQALVILTRKLARVAFSLMKNQTDYVPSSMFGGSPQT

SEQ ID NO: 339901 - protein, 337 aa, unidentified
MNITTIGIDLAKTSFSLVGTNKHGKIVLRKTLSRKKLLPFIAQCPPCLIGLEACSGAHYWAREFEKLGHKPRIIAVKFIEPYRKGSKNDNNDAEAICEAVRRPNIWYVPVKTADQQALLCVHRVRQGVVGERTRWINRSRGLLSEFGIVIPKGRYALQAVLPAILTDMDNGLPELARQMIHDLWLSIQQANEQILGYDRALSRLAREDDTAKRILTIPGVGELTATGVVASVPDPRLFKNSRQFAAWLGLVPRQYTTGGHVRLGRITKRGDKYLRMCLVHGARAVIAKLGDKQDHVSCWVRGVIERRGYLRAVVALAARNARLIWTLMVKREDYRAI

SEQ ID NO: 339902 - protein, 340 aa, unidentified
MMEIKYPILGIDVSKAKLDVCLLEEGDRRTPLTIPNTPKGFASLMRVLKRQSIESVTACLEATNVYSAAIAVHLYEHGATVVLANPAAVHSFMQAEMRRAKTDKADAASIANFARAMAEKLRPWQPLPACYAELRDLTRRLYEIRCAGARTKNQMEKTDYLTSEAKTAIARSLRADLAHHEKQARTILKHLRACLKKSLPLQSRFDVLTSSQGVGEITAFTYMAEVPDVHQFAHAKELAAFMGMTPRIRHSGTRTPISQPISKMGSARLRQVFYMAALSAKRHNEPLVRFAQRLRDKGKPPKVVNIAVARKLVHQLYAMDKYQKPYDPNYQNLQLARGTT

SEQ ID NO: 339903 - protein, 380 aa, unidentified
MPDVSSTAPAQVRMWVAIDQHKLSLVAATLPVTGGQPEVMRVENTERAIRRFVQRLGGADGLAVAYEAGPGGYQLHRLLSSMGVACDVIAPSLIPVRAGDRVKTDRRDAKKLVRLYRAGELSFVQPPSPMQEGLRDMMRCRDDLRCARTAARHRVAKALMRHGHIYRQGKAWTLRHRAWIESQRLGDPLAHTALEHMLTHLGALDAQIAALDQQLEQIATHQPWADPVAWLCSFRGISTHTALGLLAEIGDFRRFAHPRELMSYLGLTPSEYSSGQQQHRGHITKTGNRHARRLLVEAAWHYRHRPRQSTRAARLQEHVPPEVTTRAWQAQIRLHHRHRVLAEHGKRSTVANVAVARELTGFIWGAMTKAPLREQEAAAA

SEQ ID NO: 339904 - protein, 375 aa, unidentified
MDEITRARIARVGVDLAKQVIQVHAVDASGRRVVARAFKRDQFFAWCTQLPAGCVVAMEACSSAHHWARKLRALGLDARLIAANFVTPYRMEGKSGKNDATDATAICEAASRPGMRFVPVKTCEQQGVMSLHRVREGLKEERTACINQIRGVLTEFGLVFGKSPKVLRAVLADVIEDASNELSTTARLVVQRAFEHWRELDEHMKWCDRQVGQHVRASPEAKRAAKVIGIGELGASALTAGVGDFTQFKSGHQFGAWLGVVPRQASSGGKIRLGRITKRGDDYLRTLLIQGAKAAVMSADKRDDPTSRWLAQLTARVGWQKACVAMANKNARILWAVMTREAGFDPKHVSVKPQAKQSTRQPVAAAPSSPAACAA

SEQ ID NO: 339905 - protein, 355 aa, unidentified
MMNDKQVKVYGGIDTHADTHHLAVIDQAGRRLADAQIPTTATGYQAALRFLGSWPGLVSVGIECTGSYGAAVTRAVREAGITVFEVNRPNRFDRRLHGKSDPFDAYSAAEAVLGGRASAAPKGGDGLVESLRVLRTSRSSALQARTATINQIKGMLITAPEDLRTRYKGLSTPKLIAALAASRPTATPVTAAEATAYSLRLLARRWQALTGQIEDLAGHLQRLLDDHAPDLMRVFGCGRDTVAQLLITAGDNPDRLRSEAAFAALAGVCPIPASSGKTKRHRLNRAGDRQANSALYHIVMVRLRYNQETRDYVARRTAEGKTKMEIIRCLKRYLVRQLYPLIVETLHPRKEVAAA

SEQ ID NO: 339906 - protein, 406 aa, unidentified
MRGPVITVDVSKGSCHYQPFLEKGKPFRKPKVLHDTIEGFADLNAIIEKTKERSGEDTVPVVFEATGVYHRCLQKYLDDHKMPYYIISPLLSAAYRKTNLHGNKSDPLDCGHIAKAYYDEDSLLPYQRQSDLFMKLQKLNRYYETELQHLRKRKVSFRSYLDIIYPCLDKCFKGRSSLYDPVPMEILKKYPHPSLLLKHREETIVKAIEKKTDHKPAFIREIVHKMYESALHCYSGADVNDLEAIKFPQIIEELQEQTLLCDSILQELIWEAKEIPYFPCIVSIVGIGENLAARLIAELGDMSRFKNRRALAAYAGLNPKILQSGDVDGTHLRISKKGNRHLRCLLYLGATCNYRLKKKDQIYLFNQKKRQQSISPLKSKAANIAAAHKLLTIIYALSMSGELYRS

SEQ ID NO: 339907 - protein, 385 aa, unidentified
MANQNDLSRSVVAFEQHNTIIAVIEMSLNSWLVAGILPGIERHPLKKLSINEEVLLKLLHRWRDEAVKAGHTISRIVVAFEAGRDGFWLARWLRARDIEAYVIHPTSVAVSREHRRAKTDRLDTELLKRAFLGWLRGEPDHCNMVAIPSLQEEDAKRPTRERENLVGERTRIINRMKACLVRFGIRNFNPTLRTAPERLNALCTPEGASLPPNTLAELRRDLARLRFVMDQINEIEVARLQRLERAPTAEPHAMVRLLARVIGVGIETADMLVHEILSRKLRDRRAVARYAGLTGAPDESGSKRREKGLAKAGNARVRRGMIQLAWRFLLFQKDSALSQWYRTRTESAGKKRKTMIVALARKLLIALWRLVTTGEVPAGVVLRAA

SEQ ID NO: 339908 - protein, 370 aa, unidentified
MKEHSIFVGMDVHKNSIDIAIAEKGRQGQLRHFGTIEGSLAALDKVVRKLVSNGKRPCFVYEAGPCGYQIYRHLTAKGFDCAVVAPSLVPRASGNHIKNDRRDSLMLARLHRAGELTAVCVPHDDDEALRDLTRAREDAKIDEKKAKQRLLAFLLRSGHRYSGRASWSQAHRRWLADLKMPHRCQQIVLQEYIETLSHCRQRLQRLNDQIRQLVPQWRLFPVVQALQSLRGVSLIVSATTVAEIGDFKRFQNPQQLMSYLGLVPSEHSSGEKTRRGSITKTGNTHVRRMLVEAAWAYRFRARVSRALLQRQEGLPQAIRDIAWRAQVRLCARYRRLWAKGKIKAVVTTAIARELCGFIWAIATAVEGPTA

SEQ ID NO: 339909 - protein, 398 aa, unidentified
MLSIGIDVSKGKSTVCGMKPGGEIVYTPFEVQHTREGMSELVSLLRSSGEEVRAVLESTGSYHCPVVTALLENGIFVSVVNSLRMKRFCSQSIRRVKTDQIDAMQIALYGLAYWQELQPTRLPENTYRELQLLARQYYQMTSLLIKAKVDFNAICDQVLPGMQELMSDHAGRHKLSDFVLRYHHTAHILEMGETRFRKDYCKWAEKKGYRNHERMAALIFATAQNGIPVLPDAPSTQIVITEAIRVLHTVEASRDAILTQMQALAKTLPEYSLVREMPCIGDTLAPRLIAEIGDVRRFHSKRALIAYAGIDAPPYQSGKFSANNRHISKRGNRYLRKTGYEVMQSYVMHKPANDPIFTFIEKKRSEGKSGKLAMVAGLNKFLRVYYGKVTELYRSLPQ

SEQ ID NO: 339910 - protein, 352 aa, unidentified
MLYVGLDIHDKRITICVLGETGQIVRRAQVRTIDEMMRLLQALPDRFQVCYEASCGYGHYHDLLCPIAAGVTVAHPGRLRLIFRSRDKNDRKDAERLAKLLYLGEAPAVHVPAADVRTWRELITCRSRVVAKRTRAKNSLRTLLRCAGVVPPGRAALWRKKGREWLRRLELPTASQRLRLDLLLEEVEALTRQADRIEEHLNQQAKHSPAVLRLRSIPGVGVRTAEAVAAFIDDPHRFRDAKAVGRYFGLVPSQDQSGDRNRLGHITREGPAVVRQLVAEASWQAVRRSPTVRAYFERVRRGDPQRKKIALVATAHYLVRVMWSLLRHGTDWEEGVAPADEPEGATPAIATA

SEQ ID NO: 339911 - protein, 348 aa, unidentified
MGDELTKLVDSYPKFKLSEEDACELILQLINKMVRPTPALHSAMSLNMGGAIMSAIKVIGIDLGKSTFHLVGHDYSGREQYRHKLSRSKLLQFISVHEPTLIAMEACCGAHWLARKCQEDGHQVKLIPPQYVKPYVKSHKNDFIDADAIAEAATRPRMRFVSPKTEQAQLGVVIRRIRTGYIRERTATMNRIGSILTEFGFSFPRGHANMKRLFQWLADTGQPVPSLLVFELRDQLSHYNDLNDKIKEQDKKLETLNRDNELFTILQTVPGIGPMTASCCLSSVSDPKDFSNGRNFAAWLGLVPFQYSTGGKPRMLGISKRGNKELRELFIHAAWSVMATKKPFEIRV

SEQ ID NO: 339912 - protein, 353 aa, unidentified
MVVIGIDPHKRSHTAVTVDEAGRKLGQLTVNADDEGFLRLWAWAARYGAARDCSVRWAVEDGRGVAGRLVRALIGQGAAVVWVPPKLMAQCRASARTRGKSDPIDALAIARAAIREPGLPAVQLDETAAELRLLSDRREHLVASRTELINQLRWRLHDLNPALDAGAPRLIGPQTLTKLASALAVLPASVSRDIAADLVADITRLGEQIRHLERRLHVLVTPLAPTLLAIVGISTVTAAKIIGEVAGITRFRSSAAFAMHTGTAPIPVWSSGKPQYRLNRGGNRQLNAALHRIAITQLAHHQPARDYRDRWRTQHPHATAKAAIRALKRQLSDVVYRALTTDHQQQQQLSQTA

SEQ ID NO: 339913 - protein, 332 aa, unidentified
MNILGIDVSKKTLHSCLLSAAQPDKARHKVVANTPEGIATLQRWACDKTQAGCSDLQVVLEATGPYHEVAATQLHTAGCSVAVVNPARVKPFAQGQGLRTKTDRLDAYAIALFGQKNTLRLWQPPAPEYQQLQALLQRLNAVEGDLQREANRHEKLTVQAHTSPEVHQSLARSIHFLEQEKQQLLQDINSHIDQFPILKHDQQLLQSIPGVGPTLATVMVALLYHGERFDKASQVAAYAGLIPLEHQSGSSVRKPPRLSKAGPAQLRAKLYMPALVACRYNPDVCHLYQRLLARGKCKMAALGAAMRKLLHICFGVIKHQTPYQPQITASGG

SEQ ID NO: 339914 - protein, 307 aa, unidentified
MAGCVGVDVAKHSLEWSAGSEGEIHHARNEPRPIAQLVRRLVALDPERIVVESTGGYERALVSKLAEAGLPVVVVNPRRVRSFGEGMGFLARTDAIDARLLALFGEKAQPPIRPIPQGTDRLLADLVARRRQLVAMVVAEKNRRDTATPTLRRTIDPVLRTLGQLVRDPERRIDATLRQDTERAELLELLQTVPGVGPGVARTLLIDLPELGHLGRREIASLVGVAPFARDSGSFRGLRRIRGGRAAVRTALYLAAMTASRFNPSLAELYQRLRQAGKPPKLAFVALARKLLTILNAIARERTAWQA

SEQ ID NO: 339915 - protein, 367 aa, unidentified
MQTVRSFVGMDVHKETISISVAEDGRNGPVRFIGVIPNQPDDIAKMAKRLAKHGELDFCYEAGGCGYNIYRQLTALGHSCTVAATSLIPRKPGERIKTDRRDSQKLAILHRSGDLTKVWVPDATHEALRDLVRARVDASMHLMRARQQLLAFLLRHGRSYPTGKHWTQRHRSWLAGQTFQQEVHRIVFQDYVETVWTAQERRDALIERIGAMTASWSLGPLVEALRGLRGIDLLSAATFICTTGDLSRFESPRMLMGYLGLVPSEHSSGGSVRRGGITKTGNREARRMLIEAAWSYRYPARVAKEKAEILVRLPKNIRDIAWKAQTRLCARYRTMIARGKKPTVVVTALARELAGFIWAIGQEMRIR

SEQ ID NO: 339916 - protein, 348 aa, unidentified
MDHIIVGVDTHKANHVAVAINAHGARLGTITIPATRKGYSSLETWASRLGHIKAFGIEGTGSYGAGLSRELLAQGHTVLDVMRPNRQIRYLHGKSDSLDAESAARSVLNGQATALAKAQTGSSEMIRHIKVARDSAVKAKSQAMITLRTLIINAPSDLRDALDQIKGPIALIRHIAAFRPGEILSPSSSAKVAMRAIARRWLMLHEEIAEHECELERMVISKAPALMKSFGISTITVAEMLILIGDNPERIKSESALAKMCGVCPIPASSGKTNRMRLNRGGNRQANAAIYRVAVVRMRDDDRTKTYAARRTAEGKTRREIVRCLKRYIIREIYRHLCTPSVSQFSGP

SEQ ID NO: 339917 - protein, 344 aa, unidentified
MSKLDTCGTEVSAKELVVALRHEEALQPLKTFPNTAEGHQALSCYLRRAGCEVRVCLEATGLYGLDLALALSAQAGIEVMVANPRAVRHFATALMQRSKNDQLDAGVLEQFAARMPFRAWQRPSPAALALHALARRLGQLVEMQTAEKNRQHAAELSPEIPAAIRRDLARSLRAQERAIERLTREARKVIAPEPDLAERFALLDSVPGIAETSALQILAELAVLAPDLEARQWVAYAGLDPREYSSGTSVHKKTRISKAGNKHLRRALYMPALVAVQHDPHWRAFYQHLLERGKFKMQALVAVMRKLLHAFHGMFKTHQPYDGAKLFQLQPASAQEVTRALVAS

SEQ ID NO: 339918 - protein, 459 aa, unidentified
MGLAPEPPAGPRAWLQIDVPAPSDLAVAWPERGMNALRRSGIRHARHGPPSPMWKWSVLMAVMIGIDPHKGSHTAVAVTAAEEPLGTVRVRACPGQAGQLVAWAAAWPERTWAVEGAAGLGRLLAQQLIAAGERVLDVQPKLAARVRLLHTENTGKSDPNDALSVAVAALRSTTRREVIADDHAMVLKVWAKRHRDLSRARNQAACRLHAVLCDLVPGGVADEITAGRAARILGQIRPAGPAAEAHRELAAELLADIRHLDAQRREVKKKLATAVKASGTSLTEVFGVGPVIAATVIGDVVTVARFPTRDRFAAYNGTAPTEVSSGEKKIYRLSLRGNRRLNHAIHMAAITQISHAHSDGRAYYQRKLAEGKTHKEALRCLKRRISDAIYARLRADARTKGPGGQPGNHSVSRAAGLTPRTPALRTSHSRAQGQPTIPGRTHAAHAAARASAKKARRAT

SEQ ID NO: 339919 - protein, 323 aa, unidentified
MTVYLGIDIASKKFDVAELCDGNYRCKAFENTSAGFLALYKWLGQSTMPDIHACLEATGDYGTSLATFLYENKIKVSVVNPARIKGFGASELSRTKTDKADSKLIARFCKAAVPDGWKPTSAPVRKLQALVRRISALNGMLRMECNRRENADANIQASLDRIISLLKTEIEVVRQEIKDHVRNDDELKKQDALIQSVPGIGEVSSNLILSFMSGKGFRKAKEVTAYLGLNPRHHQSGSSVRGKTRMSKMGDARLRSALYMPALVALRYNPDIKAFGQRLLLAGKPRMLVVGAVMRKLIHIVFGVLKSGTAFSSRIAVHSVVTS

SEQ ID NO: 339920 - protein, 482 aa, unidentified
MKKRNIYHDQSQEIIGIFNSAKDKSKVMCVPMDYAKKDHVVMLCDGNGDILRKPFAVKNSLNGKEYLTDIVIKSCQHRGIKREHVFFGGEHCGSFADNFIEALRSDNWIVAGVNAYDAKQYRDNKQASTDSLDLLGICKMLLNFKGNCSPAQDGIYWNMRMLVRQRRKLVTIATSAKRRIHFLVDQIFPGFLDEKKSGIFPFSKGSLALMNDRFSVHQIRRRNRKTLSKFLARNLVQHADLRAKQLQEYASQVLEPSKDHIASLQLAVHQQVKLLDCLQNSIQQLEKEIAQHLAQTSGAFLTSIRGIGIVLAAGICAEIGDPDKQKTLRELVSYAGIIPRLKQTGGPQGKIQVKKVGKRCNRILKDYVVRSGHLIGIIGPEEFKLDYKRRNAQGQHTDFGMSRRYLRMAMCLMRTSQTYLPTKMRSSACTTEERSQYYLLSWPTFRQKWKRQDALEFAFDKNRPLGQWRNAVQRLYDIELEI

SEQ ID NO: 339921 - protein, 343 aa, unidentified
MQIRSVGIDLGKTTFHLVALGDNGKVLLKKKFTQRQLIVFTANMQASLIGMEACSGAHFLGRTLREQGHDVKLIPAQFVKPFVKSNKNDFIDAEAIAEAVDRQNMRFVPIKTDDQLDLQALHRVRDRLITRRTSVINQLRAFLLERGLVFAKSPARLRERMPEILENADEDLTPRMRNLLALLWNEWKDLELQIVQMNNEVELIASSDAACQRLRQIPGIGPLVATAIVAAIGNGAAFRKGREFAAWMGLVPKQYSTGGKAKLAGISKRGNLYLRKILIHGARAVVLRSKRERIAMGAWMTALETRAPRNVLIVATANKLARIAWAVLSSGQDYRAVQQPVVA

SEQ ID NO: 339922 - protein, 393 aa, unidentified
MRYAGVDIASESHVLAVVDEDGRVLVKPTSCGEDAAGYENLFRALGSPEGCLVAMEATGHYWKNLFVALVTRGFTVALINPLRTRRFAEEDLQRTKTDSIDALGIAHFARQKKPVPTQLSDSTTEELREMIELHDRLTRDSSDRVRQLHRLVDLGFPEFTRHIKHLDSQLATAVLSQYPTAQAYERLSVRRLSRLCYDGRHFVGDQLAQDLIEVARRSIGAHHAEIYRTQIVYLCEDLDVLRRRLKQLDQDVETKLAEHQVGSLLTSINGVGPTTAARLASVMGDPIRFTSGAALASYTGAIPGLRKSGKHQSDRAALTHIGNARLRTALYMPTLSAIRCNPWLHAYYEHLIAKGKLPKVAVLACMRKLLTAAFSVARNRRPFVPHLRPCEAS

SEQ ID NO: 339923 - protein, 356 aa, unidentified
MQTQVTKKIDFTGQSLFIGLDVHKKSWSVTIVVGGIEHRTFTQPPDPKALNNYLQRMFPGGAYNSAYEAGFCGYGIHRELNSLGIRNIVINAADIPTSQKDKLNKRDPVDSRKIARELEKGSLRGIHIFDRDLEELRSLNRTRFYLMRDLRRSKNRIKSFLQYYGEPIPVEFDNNQWILKFVSWLKQVQMKTPGGQDAFSYLIRSYEHQREQMVSLSRQVRVRIREYDNELYSLLKSISGIGPLTSSALMTEIGDINRFPHIDHLSSFVGFVPRVRESGETTHTGGITFRCNSFLRTLLIEASWQAIRQDPALMQYYHRHLVNNKGHKVIIKVARKLLNRIRYVMKNRKPYETGVA

SEQ ID NO: 339924 - protein, 346 aa, unidentified
MEHYVGLDVSLKLTAICIVDRTGKIEREGVVASDPETIVAFIKSHAPHVARVGLETGATSTWLWTELNKVGLPVICIDARHAKAALKLQINKSDRNDAVGIARIMQCGWYKEVRVKDLDSHAIKALLVSRALLVKIKRDIENQVRGLLKNLGLVIGQAKMNVFAVRAAELADARPELAAAVEPLLRAREAIERQIVDLDHKVMRLARSVAQVRQFMTAPGVGPITALCFFATIDDPTRFRRSRSVGAYVGLTTRRYASGEIDWTGRISKCGDKMLRSYLYEAANVLLTRVAKWSALKAWGIRLAKRSGLRKAKVAVARKLAVILHRMWIEGTEFKWSPKEAANQAA

SEQ ID NO: 339925 - protein, 385 aa, unidentified
MAPPARPRVVIGLDVGKSAHWACVVTREGELLASRPIPNRENAIDGLYAQYPGALVVVDQVRNIGSLALSRAKLAGMPRAYLPGLAAHGASRLFAGDAKTDERDAMVIAKTALGIPDALLAVADRPPEVEAARSLAAQRDFLTCENTRSKNRLRSILLESCPEFEAQADLSDPATLKLMAAVGGPWSISEASPQSVGALTRGCRRAKVAALAGSVESSSRPHPAAVACEDRAVRLLARRISENDAEIGSLTSEISALLSADETYRCLLTVPGIGPRTASELVISIDIADFPSHDRLASYCGLAPRNRQSGTSVSSVSASRQGNKRLKNLLIFSCNCLARTDGRWGEYYARCRDRGMPHGKALKAVARKRLKVIYAVMRDKVPYVA

SEQ ID NO: 339926 - protein, 352 aa, unidentified
MKQDTVTADLQTIGLDLGDTRSTLCVVDPQGRIVEEKSVSTTREALTLRFRRPRARVVMEACGQSNWISALIEELGHEVYVVNPRQLHLITRSVKKTDRNDARLLARLGRADIGLLQPTHRRGLDCQAARTVLNARRALVQTRTRLVNTIRSAAKSYGFKLRGCSSKTFAKLANTNLPEQVRTLVQPLLDAILNLDQHIERYDAEVERLGREHFPQTNVLRQIHGVGPQVALAFVTTIEEPKRFARSRDVGPYLGLTPRRDQSGDSDPHLKISKHGDGSTRSLLVGAATAIMRDTAPDTDLKRFGERIAGGTSRRDRGRARIAVARKLSVVMHRLLLTSEVYEPLRHAQTAG

SEQ ID NO: 339927 - protein, 382 aa, unidentified
MPDVISSAPAAVRMRAALDVHKRTIVCAAQPDDPRAELRLEEIPNTERAVRGLVRRLGGPEGLVVCYEAGPCGYDLFRLLSAMGVACDIVAPALTPVAPGARVKTDRRDAKRLLVLHRAGALKFVAVPTLAQEGLRDLVRCRDDLVCARRAARHRVAKQLLRHGHVFREGKKSWTKTHQAWVRRQRLGDPLAQSALEHMLAHLDSLDAQIAALDHQLDEIAAREPWSDPVCWLCCFRGVTTITALGLLAELGDLRRFATARELMSFLGLTPSEYSSGEQRHRGHITKAGPRHARRLLIEAAWHYQHPPRVSQRIAAVHPHVPPDVAARAFSAQVRLHHRHRHLTSHGKRSTVANVAVARELAGFIWAAMTRQPLPAQEVTAA

SEQ ID NO: 339928 - protein, 359 aa, unidentified
MRAIHNLYEGMAMTTMTQPARRVIGGVDTHKDVHVAAVVDDTGRILGVESFRNDTRGFRQMHVWMGRHGELDRVGIEGTGSYGAGLARHFTRAGVEVLEVCRHDRQRRRMKGKSDPVDAEAAARAALARDMVATPKSGTGSIEAIRALRIPRNSAMKARTQAANQIHTLIDTAPDQLREQLRGRSIRRLVGEMARWRPGPPTDPTTAHRYAMRVLAQRWLHLADEIRELDRQIKVLVEQTAPELVAVHGVGIETAATLLVAVGDNPGRVQHERGLAALCGVSPVDRSSGRQRHHSLNRGGNRDANRAIWRIALVRMSFDPATRAYVERRTKEGKSKRQIIRCLKRYIARELHPILLQHT

SEQ ID NO: 339929 - protein, 375 aa, unidentified
MKKAVMCGADVHESSMTTRIAVNKDQPETRVFRYTVTGRHKMFKHLKLMAQKHGATRVVVAYEASSLGFGLCDECMDAGIECYVLAPTKMPQSEEQRKRKTDKRDAQKILEQLRGHVLAGNDLAKVWIPDPQTRDDREVVRMRLEVADKLTRARTQVRTLLKRNKLEKPESVGNAWTVCERHWLRRLTEPESELAEGARVALSSLLRQIAALEEEIKNLDKAVKGLAETERYGAAAGVLVEQLTGVAILSAMVFLTEMGDLRRFRNRKKVGAFMGVVPSSHESGEGAKDRKGHITRQGPARLRKVLCQGAWSRVAFDPVESKVHARIVEKNPKKKKIATVACMRRLGIRMWHLALTAQLEAGVYENHELPERIAA

SEQ ID NO: 339930 - protein, 350 aa, unidentified
MTTMPPRITGGVDTHLHVHVAAALDPRGALLAVESFETTPAGYRRLLGWLRGFGEVELVGVEGTGSYGAGLTRHLHSEGVGVVEVDRPNRQRRRRRGKSDPQDAITAARAAQSGDALGQAKTRDGNVEAMRVLRVARSSARKARTQALNQMRSIISTAPEPIRAELRDLNVYRLLNHAGAYRPGQRRDVTSLTKRTLRILARRAQALEAEVAELDAILEPLVAQTAPALVARSGIGTECASALLVAAGDNPERLRNEATFAHLCGVAPIDASSGKHERHRLNRGGDRQANSALWRIVITRMVYDPRTRDYIDRRTKEGLTKKEAFRCLKRYIAREVYNSLPRSQLALDSP

SEQ ID NO: 339931 - protein, 566 aa, unidentified
MNQNLQSHLGIGIDTARYGHHASFMDEQKRTASKGFHFSENADGYEKLRKSIEQLIAKHPQALLHIHVDAAGQYAENLIQWLHQQSWPVVISVGQPARNKAYRKVHYDKRKADPVESLACARFAVVEKPPAMHRPAVEFSALRDAVAQMESSASARTALVNQLHNMLARAFPELATLVADIASVSILKLLEKYPTAERLAAARLETLCKMPHIDEELAAKLHQAAKASTASLQNETSELLIKQKVQAIVAERKNQADIGKIVQNAVENLPDGPHRRLRTICGIGPQTEAALIAKIINIERFRSASALIGYFGIFPEEVDVSGVNKDGTPKTGKAFQMSRKGNDLVRRLLYTATQNAVRFNPPIRALFARLMANGKEYKTAIGHCMAKLLRQVYGVWTTDCDYDPEYESRNQASQEQLAQEEAKPAQEETKSVAGHSQEHVPSRKVVTATLSNIPAKRRPLNFAKLREQVSMSQVLELLDWTPTRSSRGTLRGGCPMHCTEAKNDSSFAVNEAQKAFCCHRCGAQGNALDLWATSQNLTLLDAAWDLIKRLRIDPPLLQTEKENCLV

SEQ ID NO: 339932 - protein, 430 aa, unidentified
MKSNTQNAKIEAITEKTLVLGIDVGSETHYARAFDYRGIEYSKKPFKFSNTEAGFVTFKEWILDLKERHEKDKVVPGMEPTGHYWFNLGKFLQDNEMKPVLVNPHHVKKSKELDDNNPTKNDRKDPKVIAGLVREGRYMIPYLPDGVYADLRTASNIRFQLQAELTRIQNRISRWFNIYFPEYKTVYGKPDAKSGMLILKAAPLPEDILTLGIDGVNQIWRDAKLRAVGKARAKILIEAAEHSVGSKEGAVSARMEIRMLLEDYESRNTRLQEVMVLIEELVRKIPMTEKLLEIKGVGIRTVSGFLAEVGDISRFNNPKELQKLAGLALVENSSGKHKGETTISRRGRKRLRYLLFEVAMSLVAKNPEFRELHNYYTTRRQNPLKKMQSLMAIAAKLIRVFYAMLTKGVDYDPKKMVSDIKRPAVYLQAA

SEQ ID NO: 339933 - protein, 341 aa, unidentified
MEEYVGLDVSMEETSVCVMEAAGEIIWEGKAATEPGELVRVLHQRAPAAVKVGLETGPLSTWLWHALRAAQVPVVCLDARHAQAALSMRINKTDKNDAAGLAQLVRMGWYREVKVKQLATHVEGALLASRALLVRQRCELENQIRGLLKNFGLRVKATKGRAFGQSVAALAQKQPVLREMVLALLAAWSSLRLQIAVLSRRVEQQAMGDPVCRRLMTMAGVGKLTALAFRAAIDDPSRFRHSVDVGAYLGLTPRRYASGEIDRTGRISRCGDAMTRSYLYEAANVMLTRSRGSNPLKAWGLKLTKRVGWKKARVALARKMAVVLHCMWRDGTDFGAPKANP

SEQ ID NO: 339934 - protein, 372 aa, unidentified
MNYNTVYVGMDVHKKSFSLCAYTIEAEKASHYQRTEADYKKVLNYLEFLRTIYGDDANFICGYEAGCFGYTLYHQLTANNVKCIILAPTTMLEQRSKKRIKTDRRDAEIIAKCLAQHNYSPVHIPTAKDEETKEFLRMRDDHKLALKKVKQQILAFCLRHNYRYDGKSHWTAAHLKWLKALTPEALYKEILDEYLLTYQTLSDKIERLDKRIEELATQDEYKEAVKKLCCFIGVKTHTALSVLVEVGDFKRFASAQHFASYLGLVPGEDSSGDDQNRLGITKAGNRHVRLLLTEASQCYARGQVGFKSKELKSRQSGNTPAVIAYADKANERLRRRYYKMVLNKYKKHNVAKTAIARELACFMWGMMTDNIA

SEQ ID NO: 339935 - protein, 304 aa, unidentified
MQDSIFIGLDVHKATISVAVAAGERGGEVRHWGSIAHRPDHVRKLVERLAEKGRRLHFCYEAGPCGYGLYRQLVELGHDCVVVAPSLIPVKAGDRVKTDRRDAVMLAKLHRAGELTAVWVPDAAHEAMRDLVRARATAMRVLGKARQHLQGFLLRHSRIYPGKKGWTVAYRRWLTTVRFQHSAQQVVFQDYVDAVADAEARVERLTGQIADLLPSWTLAPVVEAIQAMRGVAFIVAVTVAAEVGDFRRFENPRQLMAYLGLTPSEHSSGSTTRRGGITKAGSGPTISRAIAVVTTTCFFPDAAK

SEQ ID NO: 339936 - protein, 324 aa, unidentified
MTDATMPATSLGTSFVGIDVAKARLDVAIRPSGDYWSVANDSVGIAQVVSRLQELQPELVVLEATGGLQMPIAAALAAVGLPVVVVNPRQVRDFAKATGKLAKTDAIDARVLAHFGEAVHPAPRAVPDALAQELSSLLSRRRQVIEMITAESNRWHSASKALQARIKAHIEWLEQELGKLDDDLGHAVRQSPVWREKEALLRTTPGVGPVLSLTLLAELPELGLLNRKQIAALVGVAPLNHDSGGRRGKRSVWGGRARVRAVLYMATLVATRHNPVIKAFYQRLLAAGKEKKVALTACMRKLLLILNAMLKHETPWTLHHQCPS

SEQ ID NO: 339937 - protein, 315 aa, unidentified
MEKARVFVGVDVAKDHVDVALSDEPASRYRNDEAGIAQLVQVLRESQPELVVMEASGGYHRRLLAALAVAGIAAAAVNPRQVRDFAKAAGRLEKTDQVDAQVLRQFAQRMRPTVRALPDEQTQLMNELLGRRRQIVEMLVAERNRLNQASSRAVRRDLEQHIKWLLKRLKDTDAELDAQVSSTPLWNAKVELLRQLDGVGRVTALTLLSAVPELGTLNRRQIAKLVGVAPLAHDSGQSRGRRHIWGGRADARATLYMATLVATRRSPVIGAFYKRLLRAGKLKKVALVACMRKLLTIANAVMKKHLQQQTTAVQN

SEQ ID NO: 339938 - protein, 367 aa, unidentified
MKKHTTMNKPVSATDVSVCTTVAVDLAKKVFQVAGEDALGQLAYEQRIKSREAFQVFLQKLPEGVTVLMETGPGAQAWARLLQAQGNLVRILPAQRVAEHRSGAKNDRNDAHAILRAGRDSSIASVPVKSVAALAMQAWHRVRRGYVRRRTAMGNQIRGLLLEQGIALAQGDVGLKQGVTRVLEDASQPLPALLRELIDEMLNEWKRLGERIAALTGRLEACAAADPTAKRLMTVRGIGPITATALLAKQVEPERFANARQFAAYFGIVPDQHSSGQKVRLGKMTKRGDAYVRSLMVVGSHAVLKQLRPDSEHPDDRRLQRWLQRLGRKGAAVRLANRNLRIAWVLLCSEQTYQRKPNACREMEMSH

SEQ ID NO: 339939 - protein, 330 aa, unidentified
MKKWNVILGVDVSKLTLDISSFELGIHIKIDNCSAGFKVFQKWCKTHNINLQETLIVMEHTGGYEYRFIQFCEAFSIAYRRVPGLEIKSSMGITRGKSDESDSFRISEYGEQRIKTIEPSKPLDKNFLTLKQLLSFRKRLIRERAGLKSTVSERRHMYEIKTADAITHISKAKIKSNTKYIDQVEKEITEIIRSNEAMLLNYRIITSIKGIGKVNAWMTIAYTENFTSFPDGRTYAVYVGVLPFGHRSGTSIKRRTKVSKLANKELKQELNQAGKTAMTHDPEIRAYAQRKLKNKCFSLVLNNVKFKLILRMFSLVKRQELFVENYRRAA

SEQ ID NO: 339940 - protein, 354 aa, unidentified
MMTHYQPVDYDIFIGIDVDKTSFAFTVRDHFNMTRSKKIPADPEHLSSYINNHFKDKAVLCAYEAGPTGFHLYDALEEKGQPCLVVSPTSIPKAANQKVKNNRIDSDKLSRYLKSGELKSIRVPQGAYRELRHLIKVRQLYARNQRSAKLRIKSLLLSVHLDSAVGDIEQNWSNNYVQRLRDLSCSEAVRQRLDMLLQDLSYARRQLVAATRILRTFCRNHPEIHAHLNHLQSIDGIGFIIAATVLGKIGDPRYLNNVRELAGFMGLTPREHSTGHVIQMGSITHLGDKPLRSLLIEAAWVAIRKNVSLRQFYHRIKQRHHPQIAAKKAIVAVARKLTCIIYAVLKEQRMFVAC

SEQ ID NO: 339941 - protein, 361 aa, unidentified
MYSQFVGIDISSQDAQVAIQLTEAQMSRLCIPQTPAGFERLVTALHTAGCQPSRSLVVMEATGVYWMRLAVYLHQAGWQVSVINPAQAHYFARALLQRSKTDQIDACTLSILAARLQPALWQPASATLEAVYQRLSQRDACLSMIQQERNRLHALTQRPLPAPQVVQRLQDHIAFLTAQIAQLDAELQQLIADDPAWQSTAALLRSIKGFGPVVTHWLMTATHLFTACESPEQIASYAGLVPRLFQSGSSIHARPALGFAPHDRLRQALYMASLSAVQHNPIIRAFYHHLLDQGKPKKVALCACARKLIHIAWAVVIKQQAFDLDFAPVYARLSITVSTHANEIDPRKRFVLQVTTDSCTI

SEQ ID NO: 339942 - protein, 374 aa, unidentified
METIYIGVDFHARQQTICYLKTETGELVTSELKHQDKQVVRDFYVQFRGPVIVGLEASGYSPWFERLLEELGCEVWLGHATEIRRRARWRQKNDRRDAELILELMLHDEFPRLHRPAVQSREVLRMLRYRQKLITIRTMSKNSLQALALQAGVARRSHLFTREGKQELAAALMSPAMQWQREHWLQLLQPLNQQVLEAMVWLKAQSKGDVEVARLRTHPGIGLLTSLCLAHTLQPIDRFRNTRKVVAYAGFDPVERSSAERKRFLGISKAGSRLLRHLMVEAAHVAVRKDEDLKCFYQRLADRRGRPKAKVAAARKLLIRAYIMLRDEIDYAEFRRRAVAARLARLGHGPQVPAVVIGQPASTERREQLTRTRK

SEQ ID NO: 339943 - protein, 400 aa, unidentified
MNPVVGLDVSKGESEVQAFLNKSIPYGKSFKIYHTSEGLNFFLQFLTDLENKTLVKPTIILEATGHYHAPVIQFLEKYNYLYIMINPLVSHQSKKTSLRKVKTDAMDAYNLCKLFYKEELEPYKKRGINLLNLRHLTRQKDAITGMYIQAKLQFHTMLDQVFPEYRRVFGDLFSKVSLNLLNEFSTSEKVLNVSEVILAEKIRSLCKTRSYQWALKNAAKLKEAAMNNPFEKIIYQSHLISLNMFIQMLLQYQEHLSILEEQIATLAKDIEEYKIIQSIPGIGEKIAATIISEIGEIERFNHPKKLVAFAGVDPSVFQSGKFNATINRITKRGSTRLRHVLYMAVLCGIRSSRNKRLKEFYDRKRVEGKPAKVAIIACVNKLLHWIYTLLKRKETFLDLN

SEQ ID NO: 339944 - protein, 345 aa, unidentified
MENMYYIGLDVHKKTISHCVKDGSGRIHAEGKIPATRFDLDRWMKTLPQPWTVAMEATIFTGWIYDHLRPHAAAVKVAHPLMLRAIAAAKKKNDRIDAKKIADGLRCNFLPECYMAPTAIRERRRTLHYRNLLVRQTVQLKNRISGLLMEAGVNYNKEKLHKVGYFRELLKSNPDIDESLRPLLQLCRETLVRLQKTESALIRSLARDRFLVERVEHLMTIPAVGPITALTWALEVGEVSRFSSIKKAISYCGLCGDEQSSGEHVKRTPISKQRNKHLQCVLVEAAHMAPRLSPELALLYDREKQKGNANRATLAVARKLVAYLVAIDRNQRDFLLVEKENQAAA

SEQ ID NO: 339945 - protein, 452 aa, unidentified
MTPTKKGNRKSETPLPTSLPTIRPLVAGLDVGSSQHWVCGPAARADGKPNVRLFGTTTDQLNELADWLAHQGVESVAMESTSVYWIPIYEVLEARGIEVRLVNARQLHHVPGRKTDVSDCQWLQLLHSCGLLRGSFRPGEAITRLRALQRQLANLVAERTRCVQWMQKALDQMNVQVHRAVTDLTGVTGMAIVRAIVGGERDPARLAQHRDPRCRKSAEEVARHLTGTWRDEHLFNLASALRLFDALDTEIAAYEAQLLTAIEALEPPDRQAEPVPPHPNPAKEKALKTRGEQPARTTLWRFAGVDLTRIDGIRAGAAQVVLTEVGPNLAAFPSEDHFVSWLRLCPRTPISGGKPLKKRRNGLGANRIAGVLRMAATSLQRSKTALGASFRRIARHKGGAVAVFATARQLARLIYRMLRYGHDYVDVGEQAYDRRFQIRRLAGLTETANSLG

SEQ ID NO: 339946 - protein, 346 aa, unidentified
MKKISVIGLDLAKNVFQIHGVDEKGCVVLRKQLKRTQLLKFFAKLAPCLVGMEACGGAHYWHRALSQHGHTVRMMAPAFVKPYLKSNKNDRNDAEAICEAVQRPSMRFVAAKSPEQQMVLHLHHSRQLLVRQRVAVSNHIRGVLLEYGICLSQGVKAVTNKLPELLEDDENALPMLTRHLLAELKAEHDQLIERIGRLEVQLKAWHASNEQSCRVKYIPGVGLLTATALVATVGKGDGFRNGRQLAAYLGLVPRQSSSGGKDRLLGISKRGDGYLRSLLIHGARAVIHHVRRRLKAGEPGGNPWVEQLLQRCHINEVAVALANKIARIAWVLLARNERYSAKQVEA

SEQ ID NO: 339947 - protein, 306 aa, unidentified
MKGDAAMRRIAVGEEEVKAGGKTSDIYVGIDVHKRSYSVALWSAGTIIKTWTSPARVGVLLNSLERYRKRIKQIVYEAGPTGYGLARRLRGEGYSTGVAAPSQIPREVAPTNKTDRLDCRKLAMYSGTGVLTKFVTVPTEEEEDDRQVVRLRERFTRKLRQVRQQIKSLLLQHGVEEPPGLKTWANKAVEDLVKLELRPGVRFALDMFLSNMDHLKKALRKIDKEMRRMASSLRHEKRIKILKSHPGVGNVVAAAFEMELFPGRNFKNANEVGAFLGLAPRVNISGEKERRGPIMKKGNGPLGRFL

SEQ ID NO: 339948 - protein, 312 aa, unidentified
MNRVICGVDVSKDWLDAHIRPSGTFKRFGNDAAGIGALAGLCRAENVELVVMEASGGYERQAFLLLWEFGIACALANPRHVRRFAEAMGFLEKTDRIDAAMIAHYAETKRLSALSPPKAAQLRLSALMTRLSQVTRDLIVQKQRRSAAGDGAIVESLDEVIALLMRQGSRLEGEIASMIDDDPLWACLNRAFRSVKGVADRTVARLMGELPEIGRISNKAIVKLAGLAPIANDSGKRSGPRPVRGGRSGPRGILFLVAAVAARHDPHLAAFRQRLQSAGKPKMVVRIALARKLLVILNAKARDARREFEHAT

SEQ ID NO: 339949 - protein, 330 aa, unidentified
MTYIGIDISKASFVVAYGSEKSRNTKSFMNTTKGIRDFLQTVDKGECHCVLEATGNYSALLVYLLSEAGITVSMENPRKIKNFARVMLSTIKTDEIDARMIALYGEKMNPVPYKLPGEAILVMRQKRTVIRQLKKQLTATKNLMESFEALPYIDPKCRKSMEKTISFLEKQVKALEEDLASVANDEYEKQMNLLTSIKGIGATLAAALIMTTGAFTYFDNAKQFTRYLGLSPTYQQSGSSINVRGHINRNGDSSLRSQFYVAAMASLRCNAECRACYDRLKANGKPGKVAVVAVANKLIRQAFAVVSHDTPYIDGFVTTIPSQSLSTMEA

SEQ ID NO: 339950 - protein, 331 aa, unidentified
MEQHYIGVDLHKALFQACALQINGERLWERRFLRDAEGVAMFCERCDARTEVAVEATGPTWSFVDAIKPPGATVCVVDPRKTRLKAGFAAKTDRLDARRLADALRRDSVVSVYVPPPAIRELREICRGRHQLVRLRTRLAQMIRALLLRSGVADAPVSRLYSARGAAWLQDVRLAAEAERTLRRLERLLRAVQAEIVEAESVVATHAAADPIAHALDAMVGIGPVRALTLRAEIGDIARFRHGGRELASYAGLVTRVDRSASHCHYGRITREGSPWLRYVLVEAATNAMKRSDAIGQWARRLARRKGTGIARVALARVLCGEIVRVWPRSA

SEQ ID NO: 339951 - protein, 411 aa, unidentified
MENIFLRCVGLDVHKASVEACVRRMEPSGRLHQQTRHWGTMTRDILMMADWMAAQGVTHVAMESTGVYWKPIYNILEGRFTVLLVNARHLKQVPGRKSDIRDCQWIAQLLQHGLLKGSFIPPRPQRELRDLTRHRTQLVEEKTRTNNRIEKVLEDANIKLGSVASEVMGVSGRAMIQALLEGEKDPAQMADLARRSLRGKIPELQKAPEGHLTEHHRFLLRLLWKELTQQEALIAELEAKIEELTRCFAPEIERLDAVPGVDRRVAEVVLAELGGDMSPFPTHRHLSAWAGMCPGNEESAGKRRKRRITPGNRWLKRTLVQAAWAASHTKSSYLASQYRRLVGRRGKKRALIAVGHSILVILYYLLKDGRQYADLGSDFFDRLEPQRLTRYYVNRLQHLGHKVILEPWVTV

SEQ ID NO: 339952 - protein, 299 aa, unidentified
MSEIKRIGIDTSKAVFTLHAIDQADRPVLRVNLRRTQMLAFFKKRPRTEVALEACGSAHHWARKLTALGHDVRLIPPQYVKPYVKRSKNDRNDAEAICEAAGRPGMRFVLAKSEARQADGMVLKVRETLLGQRTRLINTLRGHAAEFGVIAAKGTTQIAALLAVIAAEESIPAEAKAMLALLGEEIAHLDDRLKELDIKLLAMHRTNAVSQLLATIPGIGPIIALTLAIEIDPKAFQSGRHLAAWLGLTPREHSTGGKQRLGGISRAGHERLRALLVSGAAVIRRASREGTVNLGQSGP

SEQ ID NO: 339953 - protein, 349 aa, unidentified
MIARPDAACFVGIDLHKDTLTACVLRGRDREVSYVKLACKCRDQIRSFFASLPQPSAIAIETVGFYRWLWTELEPLAGQLVLCDARGARALAGRRIKTDREDALNVALLLADGRLPLAWAPPENVQLLRNWTRHRNGLTRQHAKVLHHVKSTLNRLNFPGPVRLDAAALQRYLLAGVERFSTDDLTMLWQHQRRLIEIEQDRAQSERRLSELMRAPEFSRLRTILESVPGVGLVTSATVIAEIGDFSRFADSKAIGRYAGLAPTVYASGNSSRLGHISKTGAPDLRWVLQQAAWTAIRCDAGFKKTWLRIAKTAGKKAAAVAIARKILVLMWTLARKDEPYKSREPIAA

SEQ ID NO: 339954 - protein, 357 aa, unidentified
MNSQIKQLDFTGQKVFVGMDVHKKTWKVSTCTMSTNPTKWPFTIGKPFVKNLKKHLDKHYPNADFECGYEAGFCGFWIQKELDKVGLKTKVAHASDIPTNDKERKQKEDKRDARKIAKGLKNGAIAGIYVPEDEALKTRNLVRERYSITKNARRIKNQIKSHLALYNIEISQDMTNKYWSKRYITWLEKERDERMDGALNLQIMRLKLLRELQLYANQAIRKLAKSEAYKKLHDLLLSVPGIGTLTAMLLISELIDMKRFTNFTNLCSYVGYIPTMADSADKENRGSLTKRCNQRVRSALVESSWVAIKNDTALLLKYEIFTKRMTGQEAIIRIARILLSRIRYIWLNQQAYKKEIA

SEQ ID NO: 339955 - protein, 339 aa, unidentified
MRYIGIDLHTNSFTLCILEAGCAERIQTLPVQKGGLEIFIKDLQSDDEVAIEATGNSSWFRDQLLPHVARVLVIAPWQFEVIRRSVKKTDKHDARAIAFFLSKDMIPEARLKSAEHTQLSSLIATRDQLVKLRVSLLNKVHGLFVRHGLKLKKEVLTSKAGFERAASSHIWDALEQVEIEVIASQLDSIRQSCKRLEKEITAFVKTLPGYDNLISIKGIGSLSAAVFLCTIGDIEDFAKTGNLAAYLGIVPRVSQSNDSQRVGRITKRGNKIARTTLVQCTLIAKRYSPYLRDFYEHIKKTRGSGKAIIATARKLLNTIFYTLKKKWVFEDFTKFELKT

SEQ ID NO: 339956 - protein, 397 aa, unidentified
MIAVGIDVSKSKSTVAILDSYGTVLATPFNMAHTQPEMNALVSRLKAFDEPVTILLEYTGHYHYPVLKKLQDEGLPVCVVNPYQMKKYGDMEIHKAKTDKKDALRIATYALEKSYRLVPYSAMEQKYEDLKFLSRQYQQRISMVAGFKVQLINLLDQTMPGITKILALKSRDPEKCALLLFIKRYKSFDEIQRIGKTRFLSTYATLMKKTPDRYAPKKGLEIYELARDSITTRGEDPYIWSAQDQCVDLLAAAQNAADEIITQMQNIAETIPEYKVLRAMNGVGDRLGPVILAEIGDIRRFHSGKALNSFAGNDAPPYQSGQFESRNRHISKRGSSALRKACFEVMQALKLTKPQDDPVYQFILKKEQEGKPYNVAKMAGVNKFLRIYYARAMELYR

SEQ ID NO: 339957 - protein, 413 aa, unidentified
MQSILVAGIDVHKAMVAVVVGGAGIDESGYERRKFGTSTTQIRFLAAWLRERGVVEVAMESTAQYWRPVWLGLEGQFRLQLAQARSNPAPKGRKSDYRDALRIVRRMLANDLTWSFVPSAQQRIWRIWARTRVQMIHTQQQFRNQLECILEEAQIKLSTVVSDLLGKTGRRILDALVRGDSDPAVLAALADRRIRATQAQMQDACDGNMLPAHRQILQMFLNQIDGLEKQIQEIEQHLGKEQQEYADAIRRLCEIPGIDVQAARIILAEVGAEAVAFATAAQLASWAGVCPGREESAGVSHSNASPKGNRHLRRILNQIAWAAIRTKGSYFQIKFERWVVRLGPQKAAWAIAHKILRLIWKVLQQGVRYQEHGTLPTDPKALKRLRLRHTAALKKMGYEVTLTPANQESGPRA

SEQ ID NO: 339958 - protein, 400 aa, unidentified
MSVAVGIDIGAYKHAVAVCRSGEREADRQTLQISADRTGFRELARWMGTLPEAVSLVVMESSGHYWCNLASHLHRVGIPVAVVNPLESKYFGKRRLQRSKSDRADARTLAALGMHDQPRVQTPLAQSELREASRFTMRLVREQAEVCQRIQRLIDLGFPELREVWDDPTCVSALAVLRKAPTAPALRRLRTDTLAALKRPGEGGRAIGRTKAEELQALAKESVAAPELDAQVAFEMRLLIQQHDFLDRQITEAEAQLAGLLDGDTARRLLTIPGVGPATVASLLAEIGDIWRFTDVDQLLAYAGVHPKEQSSGKKGERPETSWTMAKTGNAYLRAAAYRMAIAGIKHNPVIRSHYARKRAAGKSPMNAVGHCMSKALSLVWGVWRSGQNFDPGHGQPQSG

SEQ ID NO: 339959 - protein, 340 aa, unidentified
MMNREGKLFWVGVDVAKESFSASLAPVDLCCAQWRELESRTFEHTRQGVSQLLGWVSQSGSCTGVCVESTGIYSKIFAGLWSGCGAAPEVSIVNPQRTSKFAGSLGVRDKSDPVDAKVLAVFGVVHRPPPQRVRPALYVQLRELSRLREDLVREHTSWSNRLGQALDPSVRKMIKQQLKRLESAVKKVEEQIETLLLSDEAASRDYKRLQKLPGFGKVVATVLLSELGDLRDWSRSEIVSFAGLFPRIYQSGKSIERRPRLAKGGGGRIRRALFMAAISVQSRENAFRQFAKHLQHVGKSKMSSIGAVMRKLLLVARATVISEQDYNPNWRCELMPKTAE

SEQ ID NO: 339960 - protein, 357 aa, unidentified
MNFIGIDLHKKTISVCVVNQERKVLKRRTLCCAEPERIVAFFREWGEFRAVVEATASYEWLWQLLEPLAQRLVLAHPGKLRVIAESKNKSDKLDAQVLAEFLALDMIPEAYRPTPRQRQHRTLVRQRVFVKKNLTRVRNKIRRVLSNYNADRPDLFTRAGLTYLQEAKKKVSAADQFVLDQLLEEWHYHRRQFQAVGRQLQAFARQAPLKEKEIRAVLRSMPSVGPTTVEVVLSEIGDIARFRSNKRVVAYAGLAPGQRESAGRKKELGITKQGSGLLRWVLVQTAWRTLRCSLRWRSVYENLKKRRGSKKAIVAVARRLLTVMAALWRTGQRYRHAAQDGAPTVPKARRARRAAQA

SEQ ID NO: 339961 - protein, 341 aa, unidentified
MTFYCGIDLHSKKSHFCIIDKDGKKVKEENLNNDLPLILAFLKPFGKDVHIVIESTINWYWIVDGLQEAGYNVKLAHTLGLHMITGAKVKTDRRDAFKLAKLLRMGEIPEAYIYPKEKRPLRDLLRRRVELVQERAACYSSLRVQFIKYNLNTMSLTDLKKFLPADIDIMPIPKELKDYCLMILQRVDLLSNQIQQLDMYLKGVALEDPKFKILLTLPGVLYVLGLMIYYEIGDISRFSNVRQFVSYCRLIPGISQSSDKVKRGKGSNQGNHYLKFAFTQAASIAVRYYPKLKKFRDKHANRRKGNAATMIANCILAHKIAIATFHMMKEEVPFDEVQLFG

SEQ ID NO: 339962 - protein, 347 aa, unidentified
MRFYNRQHRHYCGIDLHVKAMYVCILDTMGQVLVHRNVPSTPEAFLETIAPYREDLVVSAECMFTWYWLADLCAAEGITFVLGHALAMKAIHGGKAKNDKIDSHKIVSLLRGGLLPQAYVYPAGMRSTRDLLRRRLHLVRKRGQLLAHIQNTRAQYNLPAFARRLAYPANREGVADRFSDPSVRKSIDVDVTLVDTYDGLINDLELTIVREAKRHDADAFHRLRSVPGIGKVLALTILYEIHDVTRFDRVQEFASYARLVKCVHQSAGKKLGTGGAKMGNVHLKWAFSEAAVLFLRHTKEGKKLLAGIEKKHGKGKALSILAHKIGRAVFYMLSRGTIFSMEKFLAA

SEQ ID NO: 339963 - protein, 395 aa, unidentified
MNYWVGFDVGKRFHWLCVLDGDGAILLSRRVDATEEQLEAACSEIAALGDVEERVIGVDVLGGPATLLETTLLERGERVRYIPGTAVNKVRDAYPGGEHKSDPKDAFVIADQLRLRWKSLREVLIREESGTELRTLVGYRTDLVQDQRRRVCRLRDLLSQVFPVLEAALPDLAEKGALLTVAKVALPSDARRLGKSRLARWLKARGSRKSEALAEKALLAAKAQRRELPASEVKAALVSEIAWEILRTKDRIADLEKRLEELVETNPDGKIVGSLPGMGLILTAEFLAEVDDIGRFGSPDRFAAAAGIAPVLRASGSVSYQRRAKKGNRALKRVLYQSAYCAIGHHDKSRDYYQRKRAEGKMHEQAVVALARRRVNVLWAMLRDRTTYREMPLAA

SEQ ID NO: 339964 - protein, 453 aa, unidentified
MCLEDRPVLEPNAAGIDVGAREMFVAVPPGRDENPVRVFATFTEDLERLTDWLEQCGVTTVALESTGVYWIPLFEILEQRGIRPCLVNARHMKNVPGRRTDWHECQWLQFLHSVGLLRSAFRPGQDICAVRTVLRHRNELVLAASQHVQHMHKALTQMNLQIHHVINDITGTTGRAIVDAILAGQRDGAELAKLRDPHIRADIDTIRKSLEGNWRPEHLFTLRQSRDLFRIYQQQIVNCDLEIEKMLREFEPRTNPAEKPLPPDRKRNRAGSKRRKKNGHPHPEFDLRTETYKLFGVDVTQIPGIEENALPLFSEVGRDMSRWPTAAHFISWLALCPDNDISGGKLLWRGARRIRNRAGHLFRLAAFSLHHSPTPLGNYLRRMKAKLGPKAATMATAHKIAVIFYTMVKNQVEYDETLWATRDAQREKRLEAKLKRQAKQLGYELVPIEPKAA

SEQ ID NO: 339965 - protein, 341 aa, unidentified
MKNKSFIGIDISKNVIDVSIFCEETPIKDFSHDVFNNSRKGFGEMCTWLKKNHVVLSNCLFGMEFTGSYSMELEKFLNARNYQFCMLSTHVVKHYPMGPKDKSDKIDSAKIADFLYRYNGTECVKPYKMPDKTMQRLKELMNERKFLVEQRTCFMNRRQLCTTKEDAQLYDSYIKKLSHDIENIELEEQKLLATDESLFTTYWNLLTIPGIGFVNAINVIVITRNFTAFETARQYASYVGVAPHFRTSDTSVRWRPRPSARCDGQAKADLSMAATVAVQYDAELQSFYNRKLGGKQDSDTKRKALNAVKFKLVLRMFAIGKQNRKWEPLDSKSSNEKLAIS

SEQ ID NO: 339966 - protein, 410 aa, unidentified
MELLHRRCCGLDVHKATVVACLRLVADGKVATEVRTFQTTTADLLRLSEWLAANDCTHVAMEATGVYWKPVWHILDDGEFELVLANAAHVKNVPGRKTDVNDAMWLAELLAHGLIRASFVPDTQTQEMRNLLRTRKQLVREQSSHMLRVQKTLEDANIKLDLVLSDLMGKSGRAMIEALIAGETNPAKLAGLADRRVKASPEELCEALRGRVTKHHRFLLRLHLNQIDALDAAMATLDAQVEVNLGPFRTAVEQMISIPGIKNLGAQVIVSEIGIDMSRFPSAAHLISWACMSPRNDESAGKRRSNRLRKGAAWLKTTLVQCAWAAVKKKDSYLQAQFYRIKARRGPKKAIMAVAASMLTAIYHMLKDGTMYQDLGRKHFDRRSTDQQKNSLVKRLADLGYAVEIKPLAA

SEQ ID NO: 339967 - protein, 452 aa, unidentified
MAQGSGLTRGDRNRNRKIAALRGVVRRDRAVLAVDLGEDKQAAVLVDHEGRVLARKTVTAKAHRLGALLEWAAGQAARAGFAGVVVACEPTGHRWKALMGLADGAGAGFVCVQSLAVARAREGDDYTRDKTDHRDAYLIGRLAVRLDCYLPERAEEAWARLRHLGARRSALVADVISCTQQVSDLLACCWPAALGTAARPLESTTWLAAMGVVTDRCCGDPARLRKMGYDTFVAAIRRELPRWGAKRVYRKIARGLWEALADAGGVAAQRRGALERVHLLMGDWRSLRARQADAEGRMCAVLEELGLAALAASIEGMSAVGAAVILAETGDLSRFATSRAVVKHAGLNPAENTSATLAGKTRISRRGRPGLRTAAWRAAWPGLRHNRVLAARYAHLTSRDGNRLSDGQARAACAATLLRWLWAVITRRQPWDARIAAGTIPARPAVTAPAAA

SEQ ID NO: 339968 - protein, 346 aa, unidentified
MSKHSVQAGDIAGLLRRFAQLKEKARARTGRDFPIIVIQEAGLDGFWIHRVLQSEGIESHVVDAASILTSRRRRRAKTDRVDGETLVRTLMAFKRGEPRVCSMARAPTPQEEDRRRVCRERRTLVGERVTHVNRIKGLLFAQGVFGYEPLRKGRRERLEDLRTGDGRPLPVHLKAQIMRELDRLEVLLEQLKSVAERDALLKPASDEAASPAAMLARLKGIGPETAAVLWSEGLFRQFDNRRQVAAYAGLAPTPWQSGSIDHEQGVSKAGNPRLRTTMVELAWLWLKNQPTSALSLWFHERVRLGGRMRKTIIVALARKLLIALWRYTTAGVVIEGAVMKAVPATI

SEQ ID NO: 339969 - protein, 425 aa, unidentified
MNYKQNEKINQVKESTLVVGIDIGSTTQYARAFDWRGIELGKVFTFSNSREGFESFKAWMQHLQDKYRKSDVIVGIEPTGHYWFDLGAYLEDEGILLVMVNPYAVKQTKELDDNSQSKNDRKDPKVIAKLVTEGRYSAPYTPDGAYADLRIMVANRKRLIREMTQIKNRFARWFAIYFPEYTDVFGDYEAQSSMLLLKKVCTPEAIVELGAEKINQIWRDAKLRAVGMKKATTLCETAKRSIGLKKGSSAARYEMKLLLEDYEYKKAQLDAVMEEIEKLCRKIPESEQMLAIKGIGVITVAGFLAEVGDVRRFESPRQIQKLAGLSLRENSSGKHKGQTTISKRGRSKLRAVLFNAAIPLIAKNPEFKSLHEYYTTRANNPLKKKQSVIAISCKLIRVFYAILANGVTYDAQKMLSDIHRQPQAA

SEQ ID NO: 339970 - protein, 357 aa, unidentified
MLSMGDSAPRKGADAMTFVGCDLHTRMQQVAVLDTGTGEVSEHRLPHDGLTVDEFYAALPQPVTIGIESTGYAVWFHTLMQRLGHTLLVGDAAKIRAMVVRKTKTDRRDALHILDLLRHDRFPTIWVPDPATRDLRALRTHRMRLVRIRTMVKNGLHAIALNSRLTCGSKLLRQAGLVQLQALALPPHTAQRRDQSLELLAGLTTQIRVLDDAITTAAGGHPEAPRLMTHPGVGALTALTTIVVLGPTSRFHDSKHVVSYVGLAPALNASADKYHLGHITKQGSPLLRFVLGQAAAHAARMDPDLKRTYGALVHRRGRPKAKVAVARKLLVRLFIMLRDRIDYDEFRRRGRPAPAAA

SEQ ID NO: 339971 - protein, 436 aa, unidentified
MRKRRAYRAAAVKNVLIERVLESAPDGPVCVGLDVGKKEIFAVVRWADGTFERPWKAKNPSEIRVTVRLLRELADRGVLTVALESTGTYGDAMRQAMTDAELNVHRVSGKAAHDYAEIFDGVPSKHDGKDAAVVAELAAIGKSWPWEFKSKEDNDAEMARRVDWLDAQQSIKMLWLGRMEALLARFWPEATTLLGLTSITLLKTLACYGGPKKLSEDPAAAERLAGWGGPMLKPEKIEALLESARETVGVRQCDQDIQRTQQYATAALEAQREIQNTTRRLKELAKNNATIQRQAEVVGTVTSCVLWVALGDPYDYHCGEAYRKGMGLNLMERSSGKHKGELSITKRGPGIARRWLYFAAMRMAQVPEVRPWYEAKKAKDGDRGKGALIAIMRKLATALYNVGARDEEFEAWRLFPGRSVASKNLRAQNEAAACAM

SEQ ID NO: 339972 - protein, 417 aa, unidentified
MRRTSSRKGPGRSSVLIAPDHAGNVVGIDPHKRTLSAAVVDARGGIVASEHFRVSGEGHRALEAWARQFGPIARWGIENATGWGRHTAIFLVGRGDDVRDVCPNRTSRSDRARQRGKSDTLDAERIARETLAHPLLPRAFKRAAGAGPDEQTELLGLWHRTRRSILTSRQHLLNEAEFLLCELPLELREQLPESTAVRPRLAALARRDREGRWDAPTGLRLRLLEDYRTRIGQLDADERAACRELAALVQASASTLDQLCGLSTRSVAELLAEVGDPRRFTTPGFARFNGTAPLPASTAEGPGEPVRHRYNPGGNRRVNAVLHRMAVTQLRCEPRAQALYAQARARGHTKKEARRILKRHLSDVIHRRMLRDLAAQALVTEPTARGRDAVKVERPTGRTTLTAIAGRAPSSRHEGLT

SEQ ID NO: 339973 - protein, 344 aa, unidentified
MSKIVLDHWSVTTVAVDLAKHVFQVHAVDASGKVVVARALRRRDVLSFFAALPPCLVGMEACGSAHHWGRELMALGHDVKLIPPAYVKPFVKRQKNDANDAAAIYEALFRPGLRFVAVRSVANQAVLMQHKARAMLVGQRTQLLNALRGHLAEVGVIAAQGTCNMRSLGGLIHEGHADIPEAVRASLMPLVDQIAHLDEAIKAIDADIAAQAKADPVSSRLMTIPGIGPVTASALVAIVGDPSGFSGPREFAAFLGLVPRQHSSGGKARLGRITKMGNAYLRKLLVVGAHAVLHHQARHNDPLRNWARKLLATKPFKLVAVACANKLARMAFALMSRNTRYAPA

SEQ ID NO: 339974 - protein, 416 aa, unidentified
MAEEVEWFVGVDWGSQSHQVCLVDARGECLGERAVAHGGLGIEELCDWLIARTGAAPEVIAVAIEVTHGPVVEALLERGFCVYGINPKQLDRFRDRFTVAGSKDDRRDAWVLANSLRTDRHAFRRLSNDEPVIVQLREWSRMADDLQQERMRLASRMREQLWRYYPQMLEIADDLAADWFLDLRQRAPTPARAGRLRPTTIERFVRTYRLRRWQAPEVLRILKQKPLSVAPGVVEAASQHIGTLTARIRLVNQQLKAAHRKLDDLCAQLIPSAEDQPGQQCPHRDVAILRSMPGIGRTILAVLLGEVWQPLRRRDYYALRTLSGVAPVTRRSGKTCVVVRRYARNKRLEHALYHWARVATQHDACSRQRYGALRRRGHSHGRALRTVADRLLSVACTLLEQQTLFDPAYQVRDAAA

SEQ ID NO: 339975 - protein, 355 aa, unidentified
MPPKPSGLTGSLIAAGFFVGPVWLLERKVRIRKEGSKKMIDRSMIVAGIDTGKLELHVCLMPGERRFTVNNDAVGIAALVDTCRAAGVNRCGIESTSIYHRKAAQALRQAGFAVVEPQPRQIKAFAQAVLQWSKSDPLDAKVIARFAAIAETVREGQTAELEALSEPLTYIEQREARIAWLKTSRERFADARIGKDIEADIKRLKARRARELKKLEIRLRKNETPARRLDLLLSIPGLAERTAIGFLIRMPELGSLSREQAASLAGLAPHLCDTGQFRGERHIYGGRERFRHTAFMAAFAGAMQWNEDLQVFYRRLVAHGKTHTAAVVACARKLVILANAILARGTPWQDKRLMP

SEQ ID NO: 339976 - protein, 343 aa, unidentified
MGEVSTIGLDIAKSVFQIHGVDVDGAVVVRKRISRAKLLEFFAALPACLVGIEACPTAHYWSRQLGVLGHTVRLLPPSYVKAYVKRSKNDANDAAAICEAVTRPSMRFVATKSEEQQSSLMLHRSRQLLVCQRTMLSNAIRAHMAELGIISAKGRNGTAELLKIIADEQDDRIPVAARFSLEVLARQYAAVRAEIAAIEKRIHAWHRSSEESRRLEEIPGVGPIIATALVAEVGDWKVFSSGRSLAAWIGLVPRQHSTGGKERLGRISKQGNRHLRWLLVAGAMAVIRYARQHGTKRPWLARLMDRRPIKIAAVALANKIARMAWAMMVRGERFKEPKLLPAA

SEQ ID NO: 339977 - protein, 340 aa, unidentified
MEPMYYIGLDVHKQKISYCVKDSGGKIYGEGWIPATRHDLDCWMKDLPQPWSAALEATMFSGWIYDHLKPHAAVLKVAHPLMLRATAAAKKKNDRVDANKICDCLRCDFLPESYMAPAAIRERRPTLRYRNLLVRQMVQMKIKISSLLMEAGVSYNKQRLHKAGYFRELLASNPDINESLRSLLRRCREMVVRLGKMEAALTHSLQQDGLLMERVERLMSIPAVGPITALTWALEIGQVQRFSSIKKAISYCGLCGDQRSSANHTQRMPLSKQRNKHLQTTLIEAAKMAPRYSPTLALLYDKERQKGNANRRRWLNLEHWTMRLVKAYAEQRKIEALLKP

SEQ ID NO: 339978 - protein, 479 aa, unidentified
MKKDAKTGTGRDGAAAAAEHGGDGAEVAEDRVQVVERAAAIDVAKGSGMVCTRVPGSRPDRRRQKVWRVGATYAGVIALMDHLRCEGIQRLVLESTSDYWRIWYYLAEAAGLEVWLVNARDVKHLPGRGKSDRLDCVWHCKLNERGMLRRSFVPPEPVRDLRALTRTRARLAQDQARHQARVEKILEDALLKISVVISDLFGTSGRRFLDALVAGERSPRALAALGDRRLKATRRELEDALTGRFRDIHAFEIATHLRLIDAINAEITRLDEAIGQQLAQVPRTAPCCTACGLAGGGHAPGCAGEGTPLLSLAGRLDEITGVGECNARVIIAELGTDPSVFPAPGHAAAWARLTPRSRQSGETARPGRTGKGNRYLRGALGQAAMTAARTDTRLGALYRRIARKRGKQKAIVAVSRVICEIAWILICDPAARYHELGPDYYRTRSPARQTREKIREIERLNPGKKVILADVGPAVPGAA

SEQ ID NO: 339979 - protein, 347 aa, unidentified
MRFYNRQHRHYCGIDLHVKTMYVCILDAAGQVLVHRNVKSTPAAFLETIAPYREDLVVGAECMFTWYWLADVCAAEGIAFVLGHALAMKAIHGGKAKNDKIDSHKIVSLLRGGLLPQAYVYPAAMRSTRDLLRRRLHLVRKRGQLLAHIQNTRAQYNLAAFERRLAYPANRAGVLDRFSDPSVRKSIEVDVALVDTYDGLITDLELTIVREAKRHDADAFHRLRSVPGIGKVLALTILYEIHDVRRFDRVQEFASYARLVKCQKQSGGKTLGTSGAKMWNVHLKWAFSEAAVLFLRHTTDGKKLIAAIEKKHGKGKALSILAHKIGRAVFYILSRGTVFSMEKFRAA

SEQ ID NO: 339980 - protein, 343 aa, unidentified
MQAVTTIGLDIAKSVFQVHGVDAAGQVVVRRQLKRRHLLAFFQKQPLCLVGIEACASSHHWSRELETMGHTVRLMPPAYVKPYVKRQKNDTTDAEAICEAVTRPNMRFVPTKTAEQQSCLMLHRVRHLFIRQQTAVINSIRAYLAEFGIVAPVGRRGVEHLLEVVADPTDPRLPEVARGCVAALANQLRALKVQILEFDRRLIAWHRSNATSKRLDAIPGVGPALATALVASIADPAAFRSARDFSAWVGLVPKQNSSGGKDKLGSISKQGDRYLRSLFTAGALAVIRYAKIHGTRHRPWLTGLLARRPTKIAAIALANKLARMAWAMMARDEPYKEPAALTA

SEQ ID NO: 339981 - protein, 350 aa, unidentified
MQIIGVDLHTRQQAIARLDTDTGELSEKTLKHEAEVVREFYSSLPPPVRVGIEATGTMQWFLELMEELGIDCQVGHPAKIRTAEPRKQKHDRADAALIRKLLTEDRFPSIWMPSSEQRDVRALLLHRHQWVRLRTRLQNVLQAIALSHGLRCGSSLWSQAGQHRIASLALPPYAAQRRAALQSLYQHLQEQIEELDRKAEELAWQRPSARRLMTHPGVGPITALATETILGDPARFFDGKAVASYVGMIPREHSSGGRQRLGRLSKQGNPLLRFLWCEAVGHAIRKDAELRRFYQHKLVQKGLGKARVAAARKLGIRLWILLRDQIDYSEFCRRRQLRQRCGGAHAGMPA

SEQ ID NO: 339982 - protein, 346 aa, unidentified
MKDVQIIGVDLGKNGCSLVGLDHAGQVVLRRRVRRDGLTALLAKLPSAVVAMEACCGAHHLGRLLVAQGHEVRLMSPEYVRPYVKAQKNDDRDAEAIAEAATRPTMRFVALKSEAQLDVQVLHRVRDRLVGQRTSLMNQTRSILLERGLVVAQGRRALLDALQAVEEQGEASKLSGRVRLLLADLLDQWHALDSRIAALDEEFTEMARNDPAARRLATIPGVGVMNATALVAAVGDGRTFSRGRDLAAWLGLVPRQATTSGKPKLLGITKRGSKYLRKLIIQGARAALPPLARSPTPLGAWLRGLLARAHGNKVVVALAAKLIRVAWALLRHGTSWSWAPSQLATA

SEQ ID NO: 339983 - protein, 455 aa, unidentified
MTRAKKAKKLHTKKGVELKIVNPNAAGIDIADTEIQVCVPADRDGENNRRFGSFTCDLKLISEWLRDCGITTVAMEATGIYWIPLFFKLEADGIDVQLVNAREVKNISEKKTDEADAEWLMLLHSYGLLKPSFQPENSARQIRNLCRHRNNLLRAAAKEVQHMQKAMEQMNIKLTNVLSDIVGKSGKAIISAILSGNHDPESLAQLADGRCKRSKADIALSLEGTWDADHLFELKQSHELYEFYQKKVEECDGEIEKLLEKFTAKIDVDKANLVRCEKTICKKNAVGFDVESYAYGIWGVNVMQIPGMSAGSVLQLMGELGSDFVEKFETPAKFCKWCNIVPNNRISGGKLISSRVPKRKNPVGQVFRMCANATRDMKNPMGFYFRRLKSRGGHMSAIVATAHKMAEIFYIMVKNKVAYDESKVGLSEEELLKRKIERAQKTLDTLNAKLYGVAS

SEQ ID NO: 339984 - protein, 439 aa, unidentified
MKKRRERVCGADVHKDLIVATITGDEVPSIRENFGTTKSELDRFRNWLADNKCEQVAFEATGVYWIPIYDVLSRTIDTIVANPLQIKSIPNDKSDSKDSKRIATLCLNNQIKRSRVFSDEDRELRNLTRARSGYVKTRTQFKNRIHKYLSSNGIKLSSSMDDIFCKSGTHIIRGLAEDKPVEEILKGIPSGKIRKKQDEIRSALANELSETNRMLISDSLEIMDNVESKIEKTSLNILKKIQNKSKDLAIVMSIPGIAFISGSVILSEIGNYRDFQTPEQLAKWCGLNPGENESAGKKRKCGITKRGSKYIRVVLVEAAQTIANMKNTGLSRFYKRLSKKKEHNVAIVAVARKLICLIYHLLINQEFYQEVDCRKRKKGRNESCHEPSLKDEHLTDKVAAIVDAFYGMSDSSRKKALLRALEDISVNKPDQKRSSDGGG

SEQ ID NO: 339985 - protein, 371 aa, unidentified
MKQQSKSSKITVGLDLGDRRHRFCALDERGEVVEEGSICNERDSLRKLAGRYHGALGVMEAGAHSPWISRFLEALGWRVMVSNPRKVRAIYQHERKSDQRDALMLARIGRMDLALLYPVRHGTAEAQQDLLRIKLRDSLVRARVAVINSVRFTLKSLGYTVRNPSSARFHKVAMEEVPESVREMITPSVQALAELTARIKMLELEINTLAQMKYPQSAQLQQIPGVGPITALYFVLKIEDPNRFAHVRDVGAYAGLCPRRDQSGESDPQLRISKRGDAYLRRLLVSAAHYILGPFGPQSALRAYGLMLAADGTAQAKKRATVAVARKLAVLLLSLWKSQQPYQPFPGARLNGQQEDRRSGTIALHRMEATD

SEQ ID NO: 339986 - protein, 370 aa, unidentified
MSVYVGIDVHRKRSQVAVVTEDGTVQLNRNTVNGTAPILRLIGDLPSGTPVAFEAAFGWGWLIQLLEDYGFEAHMVHPLRCKAIASARLKNDKVDAATLAQLLRADLLPEAWIAPLQVRQLRALLRHRTGLIRLRTQLQNRIHAVVADFGYDRSGSYLSGPGRGWLAELELPAISRELVTDYLAVIDGLAPLTDRIDGELRQHAKADPRVKVLTTLPGVGQFTALVILAEIGDITRFPSARKLASWAGLTPTVRGSDLHVRHGHISKQGSAWLRWVLNQAAQTAKRSPEFSATYDAIAKRRGKKIATIAISRKLLTRAWHLLAAAQAPDPASPEASTATAAHPQTGRVTKPRARSHLRHEPASDRARSSD

SEQ ID NO: 339987 - protein, 391 aa, unidentified
MVYLGIDVAKDKHDCYIVNSDGEILANVFTIPNDQTGFNLLLQRLKSVAPDLSKVKVGLEATGHYSYNILGFLLDKGLHTYVINPLHVNLFRKATNIRKTKTDPIDARTIAEMIMSNVVLTSYTAKSYHNEELKSLTRYRFDKVQERAKLKTSVARLISILFPELEKLVPTLHMHSVYALLTEFPGARQIASCHLTRLTHLLSESSKGRYKRDKAIQIRETARSSIGSVMPAKSLELKHTIQLIKVLTEEIDEIETSIREVMDKNPSPILTIPGINYRMGAMILAEIGDFSRFDSPDKILAYAGLSPSTYQSGKLDNAYPHMEKRGSRYLRYALYNATKYVCIWDSTFAGYLAKKKAEGKHYNVAISHAAKKLIRVIFALQKSGMPYCPAT

SEQ ID NO: 339988 - protein, 388 aa, unidentified
MIYFGIDIAKLNHFASAIDSDGVVLIEPFEFLNDNDGFYMLLSKLNSFDKDSIIIGLESTAHYGNNLVSFLVSKDFNVCVLNPIQTSSLRKNRIRKTKTDKVDTLVIAKAIALMENPRFVTLYDIALMQLKNLGRFRLELVKQRARTKIQLTSYMDQTFPELQYFFKSGLHQKAVYAILKEAPSASQIASMHLTHLKNLLVSNSHGHFKKEVALELRVLAQKSVGHSDKSLSIQITQSIAQIELLDSQINTVDDEIKDIVESIDSVILTIPGIGPINGGMILGEIGDINRFSKPRKLLAFAGLDPSVYQSGNFSASKTRMSKRGSGALRYALINAAHNLVKNNATFKEYYDSKRAEGRGHYNALGHCAGKLVRVIYKMLTDHVEFNLD

SEQ ID NO: 339989 - protein, 361 aa, unidentified
MNHIAIDLGSRESQICIRDSSGEILKEDRRGTCSLGKYLAGKERSRVVLESCAEAFVVADAARSAGHEVVVVPSMLVRQLGVGDRGIKNDVRDARQLSNVSCRLRELPTVHIPSALSRERKAMCNMREAQIEVRTKLVNTARSWLRTQGIGVMRSGGQETFPERFRRHVKSRGKNVPEEVNRVLQALEALNLGIAEADKQLAKAAEDDPVCKLLMTAPGIGPVSSLRYASALDDVSRFHSAHRVEAYLGVVPGENSTGESRKRRMTGITKAGQPRVRWALTQAAWTILKCNRHRTSATMDPMAAWASQVAERRGKKRAAIALVRKLSGVLYAMWRDRKPYDPNHMRKAMQQAGMVAQPSVT

SEQ ID NO: 339990 - protein, 356 aa, unidentified
MGLYAGCDLHAKSNFWGIINGEGKRVFKRKLGNDPEGILEALRPFQGDLEGVVVESTFNWYWLVDLLVGQGYRVHLANPGAMQKYSGLKYMDDEDDAFWLAEMLRLGVLPEGYIYPKEERPVRDLLRKRAHLVRLRTSVLLSLKNIVSRNCGMQVRAYILKGRKGVGELLGGNGDLALAGQVSKEVMDYVSRKIEEVEEAILQRVEMQESYRGLLSIPGVGKILALTIMLETGPIGRFAEVGHYVSYCRKVPSRWVSDGKAKGGGNKKNGNKYLAWAFSEAAELARRFHAEPRAYYQRKMAKTNAMVAHSALAHKLARAAYYIMRDGVSFQSEKLFGLQRAGAESLKGGLVKNHET

SEQ ID NO: 339991 - protein, 332 aa, unidentified
MENFYFIGVDVSKKKLDFCVMFEGKVVHEEETANHQSAIMSLLYHLEEDYQIDNTRMLVCAEHTGQYTFPLACACKAVECKLWLENAAEIKYSSGVQRGKNDKVDAKRIAIYASRFQDKVRYYERPTEDIERLKQLESERTLYVTDFAKYKGQMKDQKEYMPKSLYERKMKRLQALMDDLEEAIQSITDEMDEVIASCPVLFRQRELLMSIDGVGRVVATNMIIATEAFTRFDDPRKFNCYAGVAPFSYSSGSSQHSKARVSHRADKVMKRLLHLAAVAVTHRIGGELKKYYERKVAEGKNKMSVINALRAKIVARMFAVIKRNERYKPILS

SEQ ID NO: 339992 - protein, 363 aa, unidentified
MAKVRSWAGLDVHARSVLAASMDSETGELRVRRLSGETSEVVEFCCSLPGPTRVAYEAGPTGYGLARALLAVGVDCVVAAPGKIERPAQDRVKTDQRDAERVLRLLMIDGLHAVRVPSSEEEALRDLVRAREALRGDLMRARQRMGKLLLRHDVRYEQNASTWTASHRAWLRKVDLGQRGAQATLFDYLGAVDALVIRRDALEATISELVIDSPWAQTTARLRCLRGIDTLSAVGLCAAEVGNFERFQRPGPLMSYLGLVPSEDTSGEKRRQGQITKSGSQHARRLLVEAAWHYRKVPRLGTTLERRQAAQPAQVIAIAWKAQQRLHRTWRRLDTERGKRKTIVAVAVARQLVGFVWAIATTD

SEQ ID NO: 339993 - protein, 433 aa, unidentified
MQDVQDEPLFAERVAGLDIAKAEVEAAIRVPSDTTPGRRQQETRTFGTTRRQLLDLADWLRGWGVTKAGMEATGDYWKPVFFLLESRGFDCELYNAAQVKALPGRPKTDRADSIWLARITERGMICSSFVPPEPIRRLRTRTRYRRHLTQARTAEKQRAEKLLEDGHLKLSSVISDIHGVSGRDMLDALVAGQRDPRALAQLARGTMRGKIRRLEEALDCSFFTAEHAAVLAMMLTTIDHYTTQIEALTARIEVLIEPYLHQAGQLDEIDGIGAICAQDIIAETGTDMTVFPTASHLVSWAKWSPQVRQSAGKRKGSNATGRGNPYLGAALGEAAASAGRTQSFLGARYRRLTRRMPKKKALVATGNSMLTIIHALLSDPAARYTDLGAGYYETRMHARSQARNHVRSLERLGYQVTIQAPGLPAGQPLTATA

SEQ ID NO: 339994 - protein, 351 aa, unidentified
MSMVCGLDLHRQQITFDAMDTASGEVWRGRVWQPDRERVRRWLRHDVAGRANGQPVMMAVEGCTGWRYVAEEIAAAGFEAHLAEPADTQTARGRKHRAKTDRSDARLLRQLLQRGDLPESWIPPTIVLEWRERVRLYKWLVDQRLVWVQRIHAELFQHGVAVPEGAIRSASTRALLVGDDVTLTPAARQRIRVGYAMIDAADAEATPLKAQLQRFGMRQPACRALVDAVYGIGGLTAVAVWSELGDCRRFSRSDQAVRHTGLDVSVDASDLRRAGGYLSRQGPPTLRWALVEAAINASHQRSPDHAYYIGVKQRHDGKLAAISVARQFARRCYHILRNMDPDVVYATPSAA

SEQ ID NO: 339995 - protein, 423 aa, unidentified
MMKLKYSICCGLDVHKNVIVATIVITNKDGISEYRQKSFSTINSDIQRFHNWLIENNCYHVCMESTGKYWIPIFNYLENDIDVCLTHPKYVKAIKGKKTDKKDSKWIADLYKFDLVRCSFIPPKDFRQLRELSRYRFKLVCMKSSEKNRIQNCMTVSNIGIANVLSDPFGKTATEIISYLLKHTADSMDEKAVRKLIKKGAKSKSDKIIEAIKGYNIETDQAKKLELARGHLEYLDDMITQTEVELYVRIKPYYEFVEFVSTMPGMTELSSTIVLAETGVDMSIFDDAKHLCSWCGLSPANNESAGKKKSVRIAKAGDYLKPLMVQCALAAIKNKKQPYFAIKYRQIKKRRGHKKAIIAIARMMMVCIYHMVSEKKPFSPTDYEELMDSQNHIERVVLNENNVFAYLESLGYDSSKLVKRNDN

SEQ ID NO: 339996 - protein, 347 aa, unidentified
MTLYIGVDFHPHQQTANWCDTATGETESVELAHNLEAVRKFYESFTEPAIIGIEASTRAAWFENMLSETKHTLLVGNPVLIRKRATSRHKSDRRDAELILTLLMRGEFPAIWRRDAESNRILEILRLRGNLVRQRTQVYNRLHCLAHNAGLPKGRMKTAVFREVIEKLELGETDAMQRLHLFRLLESLNREIGEIEGWLKKKAALDKGVQLLLTQTGVGYLTALAMVHTLGDLSRFTRLSKQIAGFVGLDPVEDSSAGRRRFGNISKAGSSLLRFQLGQAAQIAARSDVKLKAFYKRLAKKKPKGVAKTATARKLLVKLSIMLRDSITAHEFDQRGSKLACPRKPEV

SEQ ID NO: 339997 - protein, 341 aa, unidentified
MEQATTIGLDIAKHVFQLHGADAAGHVLFRKRITRVKLLGFLAAQTRCVVAVEACAGAHYWAREIAKLGHHVRLIAPAYVKTFIKRQKNDAADAEAICEAAQRPSMRFVPVKTEEEQANGIVFRARDLLVRQRTQCVNALRGHLMEYGHVFPKGITHVETLVALVEDLQSSLPDSVRVILKLLVDTFTALEAQIAVLDAEINQRSKSDPTARRLMTIPGVGPIASTAITALVPAAAGFPAGRDFAAWLGLTPLQKSTGGKQKLGAVSKRGERSIRRLLIIGASAVVQQASRRGAPKGSWLAQMLARKPKMLVTVALANKTARIIWALLVKGGTYRAPAAAS

SEQ ID NO: 339998 - protein, 364 aa, unidentified
MIVIGADPHKATHTLAAVDAAIGELRGTKTAAARPAGHAQLLAWARALDAERVWAIEDCRHVSGALERFLTAHGERVLRVPPKLMGQSRRAERSAGKSDPIDALAVAGAALRHGLESFPLAVLDAEAEEIRLLTDHRDDLVGERTRIQNRLRWHLHELWPELAIPARSLDRPKWLDSIAGRLRRSEQSARVRVCRDELRRIRELTRAVDALERELGVLVAARAPQLLELPGCGSLTAARLVADTAGATFASDAKLARLAGVAPIPASSGNSRRHRLDRGGNRRLNCAIHVIALTQARCHGPARAYLERKQGEGKSRKEALRCLKRQLVRTLWRQLRTPGPDQEGDCLKDRLPTVNAPAPALVLT

SEQ ID NO: 339999 - protein, 395 aa, unidentified
MFIVGIDIAKRSHEAIIIAEDGQVVRKAFSFRNNCTGYNLLLEQVRKLTLVKSQIVFAMESTAHYWLALYARLLKDGYTVMVLNPIQSHSLRELYIRKTKTDARDSLIIADFVRFGRCKASNVPQDKILALRELCRSRAYLVDMAADLKRKLIALLDRIFPEYESLFDSVFSKASIAVLSKYSTPQKVKNANLRKLTDLLMESSNGHFGEWKAHQLKEAACSSFGIDDSGGVYSTLLGMFLEQILSLTAQADSLEKQISVFFQEFNNPLTSIPGVGTVLAATILSEIGDITRFSSADKLLAYAGLDPSVKQSGEFKSNQNRMSKRGSPYLRRAIWLASTVAAHRDPMFQTYYEKKVSEGLHYMNVIGHVSRKMTAVIFAVLRDGQPYQPILQSAG

SEQ ID NO: 340000 - protein, 351 aa, unidentified
MEEYIAFDSHKHYSWVEHEQVNTGKVRQYRLEHAPGAIRRALAGCEPGTAVALEATANWYWIVDEIEQAGLAPKLVHPRKAKLMMGLINKTDKLDAHGMNRLQRNGTLPTVWIPPGRLRELRELTRTRIVMVAQRTRWKNRLTATLAKYGVPASEYSDAYGKGARAEMNSRLERLPEQARWVSERMLAQVDGLSEQIGQFEERLEGLIEATPAMQLLQSLPGVGVILAATVALEIGEIGRFASAEHLAAYAGTTPRVHSSGDRTRYGRTRPDVNRYLKWAFAEAGNSVAVNHTRCPQRHVSQLYRRLRERKGHSKAIGAVARHLAEAAFHVLSRQQVYQDPTLRPGRTREV

SEQ ID NO: 340001 - protein, 347 aa, unidentified
MNFYTQQHKHYCGIDLHARAMYVCILDQHGTKLVHKNLPTTPEAFLRVSAPYRDELVVGVEGMFTWYGLADLCAKAGIAVVLGPALYMQAIHGGKAKNDKIEAHKIAVLLRGGMLPQAYVYPAEMRATRDLLRRRCHLVRKRAELLAHIQHTNSQYNLPEIGKKLAYRANREGVQEHCPDPSLRKTIAVEVSLIAHYAKWLGEVELYLTRTAKAHDVPTFSRLPSVPGIGQILALVLLYELQDIARCPRVQDFVSYCRLVKCAKESGGKRLGTSGKKIGNVHLRWAFAEAAVLCLRQNQPGKEYFAKLEHTHGKAKALTVLAPKLARAVYDLLSRAQAFALNRFVTG

SEQ ID NO: 340002 - protein, 346 aa, unidentified
MHIVGCDYHPRWQQVAWLDMETGETGEQKLVNGDGEAERWYRQLPAPALIGLEATGNSQWFIDLLNQLGHEVWVGDAAEIRASYVRRQKTDRRDAGHVLKLLREGRFPRLWVPSAEQRDLRQLLIHRHKLVQIRARVKNGLQHLAMNQGMQKKSRLWSVPGQQSFRQLPLAGWTECRRHDLLELLAYLDRQIAPLDRAAQQAAEQDGQARLLLTQPGVGPITALAFVLTIGDVTRFQRGKQVASYVGLIPREHSSGGRQRLGAISKQGNTFLRMLLVEAAHSVVRLDAGFRMQYAHRCHSKPKGIAKVAAARRLAVRLYWMLRTQTPYPEIVRIESSPRVPLAGKS

SEQ ID NO: 340003 - protein, 400 aa, unidentified
MISVGIDVSKGKSTVCILKPYGEIVSKPFNITHTQKDLSELSSMLFRLNDEVKIVMEATGIYHLPVLTYLQEKGFFVSVINPYLMKSYRNESLRKAKTDKIDSRIIANYGIDHWFKMKEFQTSGEIYEELKLLGQQYRHYMKLHLLSLAELTHLLDLTMPGIKNLLASWNETNRKDKRSDFVERFWHYDVITSMSEQEFTEEYILWAKEKKYVPSQEKAKVIYTLAQESIPTLPSETSSVKMLVTEAVRVLKEVDATLGLILSRMQEIAKALPEYSVVREMGGVGNTLAPKLIAEIGDVRRFRNGKALVAFAGIDPPPYESGQFVGCNRKISKRGSASLRKVGYETMRSLKMRSRPEDPVYRYVVKKESEGKSKKSAKIAGLNKFLRIYYARVTELYKNI

SEQ ID NO: 340004 - protein, 326 aa, unidentified
MEHELHYIGIDTAKEKLDVDVLRPDGRHRTKKFANTTKGHDELVSWLKGHKIDHAHICIETTGTYMEPVAECLYDAGYIVSVINPALGKAFAQSEGLRNKTDTVDARMLAEFCRQKRPAAWEAPHPLERALRALVVRHQALTDMHTQELNRTETAREVQRPSIDAHLLWLEAELKRLEKQIKDLTDDDPDMKHRRKLLESIPGIGEKTSAVLLAYIGLKDRFAHARQFAAFAGLTPRRYESGSSVRGASRMSKAGHVSLRRALYMPAMVATSKTEWGRAFRDRLAANGKKGKVILGAMMRKLAQVAYGVLKSGVPFDASRHNPVAA

SEQ ID NO: 340005 - protein, 355 aa, unidentified
MCGLKHQKEKRSMDYFAGLDVSVKETSVCIVDDAGKIVREARVASEPEALLQVLTNTIYRFKRVGLEAGPLSQWLYSVLAEAGLPVICVETRHMRAVLKAQINKTDRNDARGIAQMMRVGLYRPVHVKTLRSQKLRMLMTHRKLLQSKAIAIENDLRATLRNFGLKVGVVGAVKFEARIKELVENLPDLTVLVEPLLIVRRVIRGQVDILHRRLLAIVRDDDVCRRLMTVPGVGPVVALTYRATVDVPARFRNSKAVGAVFGLTPAKYQSGQNDRTGAISRCGDEMMRMVLYEAAQSMLARSAKWSWLKAWAMKIARHRGMKKAIVALARRLAVIMHRIWIDGTAFRWTREVAAA

SEQ ID NO: 340006 - protein, 505 aa, unidentified
MANEGEIADLGSCLESSVCTDVPYYVYSKVHFVPTLYILMTPSHTPKGNRENLFISDYQKRNLLLRYIGGAPTPNTLNKEVSMDKNDDSRLEEFRQLKREIRGSAQHLVVGIDVAKERHYAFFGTPAGKTLLHRLVFDNSKEGFEKLCFQTDILKTQHCLTKVVFGMEPTGDYHKPLGEYLIQKDHLVVLVGGSAVKNNRELLDGRWDRNDTKDAANVADLLTQGKCLFYEFASPPLQELRSLLSLQRRLKKQEQGYRVRTRNHLIAQYFPELDPYFGYSEGPAIVKWCLDPREITELPFEEFVRMVPSRNGGEKQRRRLQEIRQKAASSIGCEAHPSVAFEGRVLVEEVRHLQDLLRETQASIRVVCHHFPEYFFLLTIPGFGPDISAKVLEAIGNPHRFENHRQVLKLAGLDLSAERTGKKQDVTPVLSKRGKADLRYGLYQAAFVASTRNRQFMTYFTNKLKGREREKGIGTKMRVKLAAKMLVIAWTLMKKKEKFDPGCIA

SEQ ID NO: 340007 - protein, 386 aa, unidentified
MPQPKDDLSRSLVALEQNRTVIAVVELSLSTWLVGGIVPGLQRDPLKKLPPDQEGLLAVLHRWRDEAVKAGHRIKRVVVAVEAGRDGFWLARWLRNRGIEAYVIHPTSIPVSREQRRAKTDRLDIGLLKRSFLGWLRGEKKHCTMAAIPSLEEEDAKRPTREREHLVGERTGIVNRLKSALVRLGIRGFNPKSRRVQEKLATLCTPEGCPIPPNTLAELERDIARLRFINEQIKQIEDGRLERLKQAPNQGSNATVQQLQRIVGLGVETADMLTHEVLSRDLRDDRAVARYAGLTGSPDESGQRRREKGLAKAGNARVRRGMIQLAWRFLIHQKNSALVEWYRASIAAGKKPKAMVVALARKLLIALWRFAKTGNVPAGMVLRPAS

SEQ ID NO: 340008 - protein, 448 aa, unidentified
MAKPQVIEDEEHERVFQTVAAVDVAKKDGVVCLRGPQPSRPGGRQSTVWTVRATMSDVTALGDQLAAAGVQKVTLESTSDYWRIWFYVLEAAGLDVQLVSASQVRQLSGRPKTDRLDAMWLARLTEKGLLRPSFVPPGEIRVLRGCTRARTHLTQDRTRCWQRLEKLLEDALIKVSSVVSKLPTVSARDMIEALAAGERDPQVLAGLARGRMKAKHDALVAALDGMFTSHHGEIAQILLDQIGFMDRQIARLDILIKEQLASIPGAWGVGPGGDTGPDAGAGPDAAVLPAVARLDEIPGITAGLAASIIAETGLDMTRFPTAAHLVSWAGLCPRTVQSGPRTRHGKGHGDSYLRGYLGQAATGVTGTATFLGERYARIARRRGGAKAQVAIARSILVIIWHLLADPTARFTDLGPGHYETKISKNRKARNHIRQLQALGYTVTITQTA

SEQ ID NO: 340009 - protein, 426 aa, unidentified
MGIAKPIDQNPIRKEVITLDKLFIGIDVGSRDNAVHIMLPDGENHSSFSVGNNLGGSQTISKNIVSAMAEKELKSLEIGIEATGVYGDGLMCFLNEDGAIGKFEKRLYILNPKQVEKFKQAYSDLPKNDSVDAFVIADSLRFGRIKTNPFQDDYRYKALQTLTRSRYHVVQNLTREKQRFMNCLFRKCSGLAQKKIFSNNYGAAALAVFEEFETPDDIVNIDIDQLAAFIAEKGKNRSPRPDEIAKEVQAAARGSYRLPKTVNDSVNQVLSISISSMRAMHTQIKALDKEIERQFENIPNTLTSIKGIGLVFSAGIIAEVGDVNRFTKGQAGLAKYAGLVWKEHKSGTFEAQNTRMIKSGNRFLKYYLCEAAMSLVCCDTEYRRFYDLKYKEVNKYQHKRALALTARKFVRLVFRLLKDNRLYIPA

SEQ ID NO: 340010 - protein, 304 aa, unidentified
MDIAKATLDLHACSPSCPESRQFANRPAGHRALVRWLRGLGPAHVVCEASGGYERSVVTALQQAPITVSVVNPRQVRDFARAQGRLAKTDRLDAQVLAQFGQHLQPAATPAVSAAQRQLAELVARRQQVQQLRNAEHNRLEHTTHPAVRRQLQRHLVCLDRQREQLDAWITELVQAEPALAHKVARLCAVVGVGRITAVVLLATMPELGTLNRRQAAALVGVAPFNRDSGPRRGHRLIGGGRAVARRALYMSALVAAFANPRFIVFYQRLIVAGKAPKVALVAVMRKLIILLNQLLKNPEFQPT

SEQ ID NO: 340011 - protein, 421 aa, unidentified
MPSIEHPPQAAARSDDATPIDMDATLFVALELSLSSWVVVASAPGEDKASRHGVTACDGPGLLALLRRLRERAERRRRRPVAVVVMQEAGRDGFWVHRLLEAHGMRSHVVDPSSIAVSRRSRRAKTDRIDAEAMRRTLMAWARGERQVCAMVRPPSREAEDARRLGREREALLAERIRHANRIKGLLATQGVFGFEPSLRNRRERLAELRTPEGASLPPQLAAEIGRQVDRLELAMQQLAALEDARDAAFAAERGTDPARNEAAHVAANHEAASVKAAPFPEREGAGARLLRLRGVGPETASVLAGEAFFRDFRNRREVASYAGLAPSPWQSGGVDHEQGISKAGNGRVRKAMGQLAWLWLRNQPDSDLSIWYRNKVRDGRGRIKRIAVVALARKLLIALWRFVTQGLVPTGAVLKPAKAA

SEQ ID NO: 340012 - protein, 355 aa, unidentified
MDSKKYIGMDVHKESISIAVMNGAGKIVMECVIETKASMILQFIDGLRGDLQVTFEEGTSGAWLYDLLKPHVAKLVVCDPRKNASMKEGNKSDKIDARRLAELLRLNHLNPVYHGEHGLRSLKELVRSYLTITKDLGRVMTRVKAIYRSWAIPCTGKQVYAPRHRAEWLGKIGEPGVRRRAEFYYQQLDALRAVRQEVRRELLAEGKKHKAWKQLCQIPSIGPIRAAVLLGILQTPHRFRSKRQLWTYSGFGIETHSSADHRSVDGQLQRAKKHISIRGLNRNCNHDLKNLFKGAAIVASSKPGPFQEFYTALLSKGIRPEMARLTLARKIATIVLMVWKRGACFDAQHLKPQTA

SEQ ID NO: 340013 - protein, 412 aa, unidentified
MEVVYPCCCGLDVHKKSITACVLWAEGKGKSRKEKKRFGTFTHDLLQLADWLAERGVTHLAMESTGVYWKPVWNILAEQFEALLVNAQHIKAVPGRKTDQKDSEWIADLLQHGLLRGSFVPPQPIRELRDLTRYRVSLVQEINRIANRIQKVLEDANIKLASVATDALGASGRAILEAMLAGEQDAARLAEMSKGLLRNKIPELKLALEGRMTEHHRFLLRQLYDHLRFTESKRSEIEQEIDKRMRPFEDKVTRLCTIPGVDRVTAWGMLAEIGMNMNQFPSSGHLASWACLCPGSFESAGKRLSGKMRKGNVSLRRCLAQAAWAISMMKNNYLSALYRRIAARRGAKRAVMAVAHALLEIAYHMLKRKEDYRELGADHFDRIDVNRIRRSLVSRLERLGHKVTLEPLARTA

SEQ ID NO: 340014 - protein, 412 aa, unidentified
MLFVGDDWARDHHDVELVDEAGKKLAAKRLPEGLVGVSELHALIAQHLPTQWADLPDGEAAARVKIGIESDHGVWVQALVAAGYEVFALNALSVKNYRGRHSTSGAKSDAADAHLLAEIVRLDRTHHRPVAADSDQVGGVNLAARTHQTMIWERSRHVLRLRSALVEVFPAALEAFPDLDAPDALELLAAAPDPDAAARLSLSRIVAALRRARRRNVQQRAHHIQQVLRAGELHLSPPVQHTYAAVVAVQVRLIMALNEHVDALAAVVDHHFGRHPDADVYASLPGLGVILGARVLGEFGDAPDRYADARARKNYAGSSPITVASGKKRLVQARYAHNKRMADALRQWAFCSMRGSPGARAYYDELKARKIGHHAALKQLANRWAGILHGCLKTHTLYDEHTAWSHHNTAAA

SEQ ID NO: 340015 - protein, 367 aa, unidentified
MSRMKRLTVQQLDVSMDYLVIGLDLAKTDTAVIAITTDGELYAIDRLKYLDLLNQAKQLGPTVFAMEPCNGMTYLVHELEELGHECRVINGEAVKDYVKSHFAGQKNDLNDAQAIAFLAQDEMLKFIRTKAKSEMTMQTLQVVRQQLIKQRTCSVVCIKGICQNYGLIISKSIMSEAKIRPIIEESQKLPEEIKEPLKALLRNAARFTIDIKQIDKAIEQGLKGNDTAERLLEVPGLGPQCVSRLLTTIGDINRFEGPKNLAAYYGLVPRSHTTGHNEQMEKITKHGDRLMRSFLVQGAHAVLILHTRGRLPKSALKKWIDKKLSGGMPRSKLSIALAAKLLRIAFAVLKYKKKFDIKKAGVARCSL

SEQ ID NO: 340016 - protein, 321 aa, unidentified
MSATLGIDIAKKKFDGALLRDGKFKTKVFDNSPAGFAALKNWLLFHGVTKVHACMEATGILFEGLATFLADEGHDVSVTNPLQIKAFGESLLSRTKTDKADARLIARFCETMKPSLWQPDPPEIRQLKALGRRRDALIAMRTQETNRDISANTRVQESIRAVISVLDQEIDDISRQIKDHIDNHPDLKNKSDLLRSIPGVGDVSIEAILSETNGFANFSKVEQVVAYMGLSPKEKSSGSSVRGKASVCKTGNRRLRKVLYMPALVAMQHNPMVKELAQRLKQKAKHGRVIACACMKKLIQSMFGILKNNKPFNPAYNLKFS

SEQ ID NO: 340017 - protein, 342 aa, unidentified
MESTRHIGIDLHRNCFTACVRLENGRNYLTEWRLEQLPKFVAKLRPNDEVAVEVTGNTRLFHDAVAPHVKRVVAVNPNQFQVITHSVKKTDPNDARNLALYLAKDLLPEVRMKDKTRAQIASLTQTRDTMVKLRTALKNKINNICSAHGVNLSKESLASEKGLKAVLEMPFDPLVDLELKILVEQIRSLNKSIGELEETISRESQKLEGHKHLTSIKGIGGLSAGILLSIIGDIRDFADEGKLAAYFGIVPRISHSNETEHSGRITKRGTKLGRTTLVQCALIAQRYSPYLKNYYERKKSRGTGKAIIALARKFLGIIYRTLKNKWLFEDFPNFVLAEEATA

SEQ ID NO: 340018 - protein, 358 aa, unidentified
MIEEDGIRHVVGGVDTHKDLHVAAVVDERDLVLGTRCFATTRQGYRQMLGWMRSFGELRRVGIESTGSYGAGLLRFAQQAGIEVLEVTTPDNQDRRRRGKNDDLDAQNAAHAAFAGKRTVTPRSRDGMVESLRVLAACRKTAVAARRVALQMIQNTIVCAPDGLRDTLRAMTRMQLIRTLAAWRPDLSAYRDVEAAYRISLRSLARRYLELHDEIADLDAMIGAIVDELAPDLIARNSIGHTGAAQLLLTAGDNPERLRSEASFAALCGVSPIPASSGKTVRHRLNRGGDRHANSALHIIAIGRLRTDPKTKAYVAKRVAEGHSKLDAIRALKRYLAREVFGLIARRQKEINQTRIAA

SEQ ID NO: 340019 - protein, 432 aa, unidentified
MKSSHLGTKPAKECFTGLPTLNKLVGQKAHVKPEDRERKAKPLPSKNKEANMKTLGIDVGKDSFSIAVISPEGELVAKLSCNLNSDGIESFKNFISPSDKIAVEASGPYSSIITAHIQNMGITPYLVNPLLAARFKQANSLRKTKTDSIDAISIARLYQSSSLQPAQGYLKEGIRLLERQIETTSKQIACLKNSILQTLHFLFPELEREFDPFSKGILKLLSKFPSAQAIAKATTEEIQDCFPSRGRKVDIQKLMELAQNSVGIPDPSREAVLKALITQLLCLIDVREELKHKLEQEVENLYQKELELVRSIPGFGSLTSSSFIAEVGDISRFSSAKKLTAYAGLDPSVYQSGRFVGKSHISKRGNRHLRRLLFICAQQAVRYSPTFKAYFLRLRARGKSYRQAMVATASKLLRVTYAVLSSGRPFCENPIS

SEQ ID NO: 340020 - protein, 367 aa, unidentified
MHYIGMDCHITTLDFAVVNEAGRLVKAHRVDTSVNGFMEFVKTVPPPRTIYIEEGTLAAWALETCVRFREKLVITDAKKNHWIGSSGQKNDSIDALKLAQLAWGGYIKEIHHPVGHRRRFRELMIAYHDTVRSTTRIKNKIKARFRQNGIQCTGATVYSETHREEWKGKLPQEATLLLILDGLWRQLKQSEQTEEELLAAARAQAKQYPEVKLFKDIPGIGFISAATISAILETPYRFADKRKVWMYAGLGIMTRSSGGKTYSEKLSTDYNRLLKYTLKQAAEAVIQAKDNPFRRKYLDMTLLRGIAPHRAKLTIARDMLATMWAMWRKGEKYSPEIREKAVCKQGCRCQGKMSGFNVQRFCQSCSF

SEQ ID NO: 340021 - protein, 366 aa, unidentified
MEYYVGLDVSLKQTSICVVDQTGSVVRESVVDSDPEVISVYVRSKAPGAVRIGLETGPTSTWLWTELKRLDLPVICIDARHAKAVLKMQINKNDRNDAIGIARIMQTGWFKEVHVKDIDSHSVRALLASRALLVKIKRDLENHIRGLLKNLGLVIGRATFNVFAVRAEELIEDRPDLVAAVRPLLEARNAVEQQVSELDRKVMKLARRDAQVQRFMTVPGVGPITALAFKATIDDPARFARSRSVGAYVGLTSRRHASGEIDWSGRISKCGDAMLRSYLFEAAGVLLTRVPKWSTVKAWGRGSPSATGSARPRLPSRVSSRSFCTACGSTEPSSTGRKRKLLPSEREYRVPAKRREKTSLPGRWRW

SEQ ID NO: 340022 - protein, 401 aa, unidentified
MKRLSGGIDVGSESHHIIILDEEDNFLYNQKVSHQLSEFAESIKLFKQIEKQEGGKLSFALEGKNGYSAPLDRILLNQGFTLYNVDNFKLKRFREAFAGEWRDDERDALMLSKMLKLKEHINSPREKVFIKIEKPSLVTESLKLLSRHQQTLIDEKVRLTNRLRKKLLEVCPEILKLAKLKNKKLIVILVRYPDFSKYKRITLCSLLKTKGIGKKQAPFLLKRLNNIEYMPGLTDIYQMIILSYAKRILELQEEIKDIDKKLDEIGEKNKEVKHLKTIPGVATKLASRLIGEIGVIDRFPSEKQLAVYCGVACVDNNSGKVTKAKAVYKANKICKHTLITMAGGSIRLSSQCKAYYLKKRTEGKSHNHTLRCLARQLIKVIYKMLTEDRDYIIKKELKKVA

SEQ ID NO: 340023 - protein, 377 aa, unidentified
MHSENIAAYVGLDVHKETLAVAIAAPERLGEVRYYGTINNEAQAVRRLFQKLQGLYGNILSCYEAGPCGFGLYHQLTAMNIKCQVIAPSRIPKSPTDRIKNDHRDAISLARLLRAGELTPVWIPDLTHEAMRDLIRARAAAKRDSRVARQRILSMLLRTDKHYAGKHWTGKHRTWLANQSFSQPSQQIAFQHYCQSLEQIEDRILQLDQEISRLLPEWSLCNLVCQLQALKGVGQLIAITLVAELGDFSRFCNPKQLMAFLGLVPGEYSSGNSIRPRGITKVGNSELRRLLYEAAWSYRTPAKVGAWLIYYRPDSVTQYSKDIAWKAQQRLCSRYRSLTAKGKKSQVAITAVARELTGFMWDIALAAQSSFSQQKQN

SEQ ID NO: 340024 - protein, 360 aa, unidentified
MKITTVGIDLAKDIFRVHGCDARGRVVVSKSLTRQELRAFMAKLPPCLVGMEACHTAHYWAHELQKFGHQVKLMAPKFIRPYVKNNKNDTRDAEAICEAVTRPIMRFVPLKSRAQLDVQAVHRVRQQVVRERAALANQLRGFLAEHGIVIRKGFAAVKHAVPDIIEDSDNGLSGLMRELMRDLQERFKLAEERLHRYDVRVAELVQQDERCQRLAELPGVGPLTATAVVASVGNAREFRSGRELAAFFGLVPRHRASGRRTIMLPIGRCCDHYLRTLMVQGARASLRYIERRRDPRGVRANRLRLKRGSYIAAVAIANKNARVMWALLTRGERYSETPAHRPQSGLHMKLEQRRKLPRRA

SEQ ID NO: 340025 - protein, 339 aa, unidentified
MGEYIGLDVSLKETAVSIRRSGKRIWRGKCASDPALLAELIRKRAPEAERVVFETGPLSVWFYHELTALGVPAICIDARHAKAALDMAANKTDANDADGLAHLAEVGFFREVRVKGYDSMLMRTLVAGRGKLVRVAIGLSNQIRGLMKTFGLVIPAGQGGVFEKNVRRLLDGQEALARIVLPILAAWRATRVHAAELGRQLTAAARHSQPCQLLMSIPGVGVVTATAFTTAIEDPANFAKSRSVGAWIGLTTRRYQSGEVDYDGHISRRGDANLRALLYEAAATILTRVHADSDLRTWGLKLRERLGFRRAAVAVARKLAVIMHAMLRSGELFNRTTAA

SEQ ID NO: 340026 - protein, 361 aa, unidentified
MQRVKVNEKTFEGQPIYVGIDDHKKSWKVSILGREYEHKTMSSEPDPVQLARYLKRNFPGADYKAVYEAGFSGFGSQRRLKELGVDCIVVHPADVPTSEKDRQQKTDKADSRKLAKMLRSGEFEGVDVPDEELEADRALIRQRYRLSKDLTRYKNRVKSLLFQFGIRIPDRFTASQSRTWAKNYMDWLTELPEADEGVRTVVGNYVGTGILIKKQLAAVTKQVRELAGKERYRGNYALLISIPGIGLVSGMALLVQLGDVGRFRSLDELCSYVGLVPRMHGSADRMVTGKLTGRGRREIKVMLIEAAWVAVRQDPAMMARFNELKKGMNGNKAIVRIAKNLLSRIRHVLNNQTAYERGVIK

SEQ ID NO: 340027 - protein, 357 aa, unidentified
MHTKNTKPDFSNQTIYIGIDVHKKSWNVSILTEDILVTTFNQPPDPDKLVAHLHRNYPGATYRAVYEAGYFGYWIHDALRERGIECDLANPLDIPTKDKERRHKSDRIDSRKLGREHRKGDIDIIYVPPPHYRHARTLIRTRQQLTKKQTRCKNQIKALLSFYGSTFFDTCPYSHWSRRFIQTLQELELEDQSIRISLDILINELLNLRQSILWITRQIRALSRTPLFTDDVRLLMSMPGIGTLSAMIILSEIVTINRFKSLDKLAAYFGIIPTCHNSGEKEADGELTQRGNRYLKHIIIEIAWVAVRKDPALLEKFQKLTARMKKQRAIICIAKNVLNRIRYILLKKQPYVSAVVA

SEQ ID NO: 340028 - protein, 355 aa, unidentified
MNSEKYIGMDVHQATISVAVMDSSGKLIMECILETQAATILEFIAGLRGTLSVTFEEGTSAAWLHDLLKPHVSHLVVCDPRRNALLKDGSKSDRIDARKLAELLHGNKLHAVYHGEHGVRTLKELGRSYLTLTQDVTRVMSRIKALYRSWAIPCSGTTVYAARHRAEWLAKIPQPGVRLRAERLYQQLDLLQPVRQGARRDLMVESHKHHAVKLLRQIPSIGPIRAALLVALLQTPHRFRTKRQLWAYSGFAVETHDSGEYRFVRGKVVRNRERITVHGLNPNHNHDLKNLFKGAAISASTRPGPLCDFYVALVEKGMRPTMARLTLARKMAAITLTIWKKGVEFDAKQLHRQAA

SEQ ID NO: 340029 - protein, 342 aa, unidentified
MEAYAGQQFVGIDLHRRRSVVVRTTEVGEVLEAVQIVNDADRLAEVIGRAGQYPEVVLEATYGWYWAVDALQAAGARVHLAHPLGVKAFEYRRVKNDLRDARDLADLLRMGRLPEAWIAPPATRELRELVRHRAKLVALRSACKAEVHAVLAKCGIGVPMSDLFGVGGTRLLDGLELSAPYAARIASLRRVMEALDFETELFAGMVRSRLAADPGYVAVRTIPGIGPVLGAVFVAEIDQVSRFGSAPQLACWAGLTPKHHESDTKVHRGRITKQGSRLVRWAAVESVQLLPKTSPVGQLRDRVAARRGRNIGVVAAARRQIEYVYYALRDHHVRALHARAAA

SEQ ID NO: 340030 - protein, 390 aa, unidentified
MRKPKQRKPNDLSRSLAALDVDHTLIAVVEMSLSSWLVAGIVPGVERQPLKKLKTDACALLELLHRWRAEALRVGHKITRVAVAFEAGRDGFWLARWLKAHGIEAHVIHASSIAVSREHRRAKTDRLDTDLLKRSFLGWLRGERDHCKTVAIPTLEEEDAKRPNRERESLVGEQSRLVNRMKATLVRLGIRGFNPKLKRAARDLEALRTPEGAPIPPNTLAELKRDMERRRFICDQIRKIEQARIERLQRAPNTGPNAMVRLLARVVGIGVETAELLVHEVLLRNMRDRRAVARYGGLTGSPDRSGTISREKGIARSGNARVRRGMVQLAWRFLLFQKDSALAQWYRHRTENAPRSRKTMIVALARKLLIALWRLVREGVIPEGIIMRSA

SEQ ID NO: 340031 - protein, 314 aa, unidentified
MNQNTTTDHHLVAIDISKDSLQVHTGSGENFSIAYDKAGLGRLLKHLRRLPDPFVICEATGSYERPLLTMLHEAHVAVKLINPARLRAFALSEAVRAKTDRIDARMILRFAQEKHLQPAPPPDPVRQQLAALLDRRSHLTGQLAREKNRLQKCQKTIAVSIRRMIRFVEKELCALDAQIKLIVAKDRLLSSQAQIFQSVKGVGEITAWTLLAYLSEMAHLQRNQLVALAGIAPFNRDSGKSCAKRSIHAGRSKVRKCLYMAAHTAAQHNPVIKPYVARLIARGKPYKCAIVAAMRKLLIHLHSLLKHQQIVIAL

SEQ ID NO: 340032 - protein, 413 aa, unidentified
MNMDYRFYVGIDWASEEHAVCILNEKREVLEQKKFEHTGSGLAQLTDRLLELSGGEPALVAAGIETPRGAVVETLVERGFHVYSLNPKQMDRFRDRHTVPGAKDDSRDAYVIADSLATDLHLYHAVRLDDPLIIRIRELSRSEEDVKRNQIRTENQLRDLLNRYYPQMLKLCPAVNEAWFWDLIEKAPLPGAAAKLSKAKVQKLLSDNRIRRIDSQLVLDSLRVPKLKLAPGAAEAASEHVLLLLPLLRLLQRQAKEIGHRIEAVLEELGAEDRADEHRDVNILLSLPGVGRSVAATMLAEASQAIAERDYAALRSYAGIAPITRQSGKKKVVAMRQGCNGRLRNAFYHWSRVSTQHDAHSKQHYAALRAKGHSHGRALRGITDRLLAVLVSMLKTGTLYDPARHAPAAQPAA

SEQ ID NO: 340033 - protein, 409 aa, unidentified
MLFVGDDWAEDHHDVEFVDEAGRRLAKARLGEGVQGITRLHELVAAHVPEDAEPGQVVVGIETDRGPWVQALLASGYQVYAINPMQAARYRERHSTSGAKSDAGDAHALAELVRLDRAAHRPIAGDSDLAEAIKLVARAHQTLIWDRHRHLLRLRGALREFFPAALDAFDDLTAPDALELLGAAPDPVTAASLSHARIRGALHRARRRNPAGRAVQVQAALRAEQLGQPPVVTGAYAAIVRSLTAVITALNTQIKAMEVQVVTHFGRHPDAERYRSQPGLGDVLAARVLAEFGDDPTRYAAARSRKNYAGTSPITKASGKKKVVLARYARNDRLADALHQQAFCALTASPGARAYYDTLRARGIGHHAALRQLANRLVGILHGCLKTGTRYNEDTAWAHHSHQAQRAAA

SEQ ID NO: 340034 - protein, 367 aa, unidentified
MKKGSTAAVKTTKNFSQPKLTIGLDLGDRNSWYCVLDETGQIRLEQRVRTNAKALQEVFGAMPRSRIALEIGTHSPWISRLLGELGHEVIVANARKVRLIAESRKKDDRMDAQTLARLARIDSQLLSPVKHRSAQAQADLMMIRARAGLVRARTSLVNTARSLAKSYGERLRGCNVRNMNPEKAEGLSPELQRALQPLLAGIEAVSERIVECNERIEKLAQESYPQTALLKQVKGVGTLIALTFLLTLEDPHRFRKSRDVGCYLGLQPGRRNSGQSEPQLHISKEGDPYLRTLLVQGAQHILGPFGIDCDLRRWGLKLAERGGRNGKKRAIVATARKLAVLLHHLWVSGEAYGPLHNSNRTTVAAAA

SEQ ID NO: 340035 - protein, 459 aa, unidentified
MSKSKKKKKKTLPQGSNGKTMERFGLLYPRSAGIDVGSMLMIVSYTDRQDMVQLREFNSFTDSLYQLADMLKQEGVEVVVMEATGCYWQTLFSILEDHDLKVIIINPSHYRNVAAQKTDIKDAQWLHQLLAHGLLRNSHIATELYRELRHYIHERTLCQDQKGDLLNRIQRNLTTMNIKFQHLISDIEGVAGMKLLRAIASGINDPEMLLRQIDCRLLKASPEDLFSSLKGDYREDQINILNCSLDAYDFLKRQMLKYETYIEQTLKKLLPEDVTQTNQSTKKQGVVRKNQYHFKLSDYLHAIFGVDLTEVEGLDEIGLLTILAVTGTDMRKWPTAAHFASWLNLSPRPKITGGKVIGYQKRVTHNPATQAFRMAANSLWQSKGSLGRLYRKLAATKGKAKAIKAVARRIAVIFYNMVLKKEAFDVKKVQQDTAVQEAKKIARLQKELAKYGYTVQKAA

SEQ ID NO: 340036 - protein, 312 aa, unidentified
MKIICGVDISKARLDACIEPGAIFASFDNDPAGIAELAAFCRQHQAGLVAMEATGGYERRAFSLLWEAAMPCAMTNPRSVRRYAEAMGVLEKTDRLDAHIIARFAHAKNLQPTPAPTPAQQRLKALVARLRQVTDDLTVQKQRRASLADNAEMLASINEVIALLKRQSRTLEGEIASMIDDDPLWAHLAEAWRSVKGVAGRTVARLMADLPEIGTYSNKAIAKLVGLAPLADDSGKRQGKRSIRGGRASVRSILFLVAAIAAKYDKTLAEFRDRLLAAGKEKMVVRIALAHKLLVRLNAKARDARAQYANAT

SEQ ID NO: 340037 - protein, 335 aa, unidentified
MQVYGIDLSKEKFDVNFVNEKGLEKNKTVKNNLHSISAFLSDLPAEVVLCTEHTGSYGDLLVYLSNQCGVRISLVSGYSVKHSLGLIKGKSDPKDARRLREYGERFFDKLSFREYHSEEISELRQLSSLRAQLVKARKELRTGAHAREVMPMQSLAAKHSLASTLNFLDTEILEVEKEIELLIKTSEELAESYELVVSVKGVGPVIATDMIIKTGNFMIIDTARKAASYAGVCPFPNSSGKMVSKSRTVPFADKELKSLLYMGAKSAVKHNKEYKLYYQKKAQEGKPHYLIMNNVANKMLRTIYSVLKNKTPYSPEHICLDPREFKTNRSEKKVA

SEQ ID NO: 340038 - protein, 433 aa, unidentified
MTDAVLSFDVSLDQLDIALRTDDTGWQWPHRAYPNNWPGYQQLKAELLVELGQVAATGLTAVAESTGPYWWPAFYQLAHDADLASYQPHLAVLNPQHVKRFRKALPEQDKNDLLDPQLIDRYYQAVGVKHFFQFNDRYLPLRFLTRAYARIIHTLAAEKAYLRSLLFILASEYQRVEPFSDLFGATSLHVLDEFDDIQALAAMPLAELTDQLRLWSGNHLPDLDHTAQQLHQVADHSYPLPQPLTASLHAIVQLSIAHIRFLSDNQKTMRRLIEQALQQLPEANLALEQPGLGPILVAGCLSEIQNTTRFITGLKFDRKLKRLRPRHYRDGQAAVAKLAGLWWPQADSGRFQADERHLARERNPYLRYWLVQAAHTLQRYQPDYAAFYWRKFYQVRAHQHKRALILTARKAVRLIFALLHKGQRACLEEEPVT

SEQ ID NO: 340039 - protein, 352 aa, unidentified
MTVTIVETCVETRAITGGVDTHAEVHVAAALDPVGGLLGVQEFPATRAGYAQLLSWLGGFGAVYLVGVEGTGSYGAGLARHITAAGVRVVEVDRADRQDRRRAGKSDPLDAVSAARAAQSGRAAGAPKGGDGAVEAIRALMVAKRSARAGRTQTINQARALILTGPDDLRIRFCEHTPARLVAELASLRPRPGAPVGYPTRIALRELGRRAQFLGDQLQRLDELMVPLVTARAPRLLALYGVGADTAAMLLIAAGDHPERLRSEAAWAHLCATAPIPASSGKVTRHRLNPGGDRQANHALWRIVITRMSAHPATRAYVARRTKEGLSKKEIIRCLKRYVAREVYPHLRAPAG

SEQ ID NO: 340040 - protein, 356 aa, unidentified
MENNKLDFTGQLIFVGIDVHKRSWTVTIQYEGIQLKTFSMNPEPEELAKYLKKNYPNGTYISVYEAGFSGYWADRQLRALGIRNMIVNPADVPTKNKEKRSKSDKIDSRKLARELGSNNIEGIYIPSEEDESIRSLSRLRVQFTKDQTRLKNRIKSLLNFVGIKIPDNDEVKHWSGKFIAHLSGLEFKHESIKLTLDHLIENLKQVRKELTSIIKDLRKQKTGHERINKIVNRLVSVPGLGFITAITLYTEIMEIERFGKFDQLSCFVGLSPSVMSSGETERTLGLSNRHNRYLRNMLIESAWIAIRKDPAMTMGYGKLVQRMSRQEAIIRIAKKLLNRIMYVWRQDKDYVCSVVS

SEQ ID NO: 340041 - protein, 361 aa, unidentified
MIIRERISVGLDVHAHSVVGAAIDTDSGELITRRLGPEPEGVIEWLRSLPGPAVVTYEAGPTGYVLARALDAAGISCVVAAPSKIRRAPGDRVKTDKRDAELLARLLLAGDIVAVTVPSVAQEAARDLVRAREDARKDLMTARHRVSKLLLRHDVRFEGNAWTQRHLTWLRQQRFAQAGLQAAFDAGYDALMAVLERRDDLDRAISEMARASEFTPVTNRLACLRGISTLTAFGLTVEIGDWTRLGGRSIGSYLGLVPSEYSTGKSRSQGGITRTGNSHARRLLIEAAWQHARPYNPYSPTMKRRWDLVSKEARDRGHAGNRRLHQRWQAYRARGKRNVIANTAIARELEGWCWSLAVMTG

SEQ ID NO: 340042 - protein, 377 aa, unidentified
MKRIKFVGLDVHAETITVAVAEQGGEVRSLGVIPNREESIRKLVKKMGPVEQLRFCYEAGPTGYVVYWQLAALGAKCEVVAPTLVPVKSGERVKTDRRDALKLARNYRAGELTPVWVPDAAHEALRDLVRAREAAKKDQLRAKHRLGKFLLRHGRRPPTGVKPWTRNYLSWVKNEVHFEQMAQEATLQDYLYEVEHAEARVARLDLAIEEAVKLTPPKMRAVIEALQALRGVAQVAAVTIVAEVGELSRFPGARQLMGYGGIVASEHSSGEGSWRGGITKTGNAHLRRVVVEAAWAYRHRPSVGESLRKRQEGVSEDIREIAWKAQHRLHTRYRKLMARGKEKEKVATAIGRELLGFIWAIGVKAEAAEKKTERRAA

SEQ ID NO: 340043 - protein, 369 aa, unidentified
MEDNARVFVGIDVAKLRNAVAVADGQRNGEIRYLGEFDADEASMRRMVKRLADKHEHIMFCYEAGPTGYGLYRLIRSMGHECVVVAPSLIPRRPGDQVKTNRRDALGLARLLRAGELTSVWVPDEAHEAMRDLVRARTAAVETQRVHRQHITSFMLKHGRIFPRKKHWSMRYMRWLQEQQFEHPAHQIALQEMVEALRVASERIKRIEAAIEEFVPSWSLEPLVRSLQALRGVDLIVAVTFAAEVGDVTRFENPRQLMGYLGLVPSERSTGASVRRGGITKAGNSRVRHMLVESAWSYRHPPRIGVKKLYIHERVSPMVREIAWKAQSRLTSRYRKLSATGKRTTVVCTAVARELAGFMWSVGRAALPT

SEQ ID NO: 340044 - protein, 486 aa, unidentified
MITQGTSVGLDVHARSVVAHARDVSSGEVRKARLTPDYRSIIDWLLALVGPVEVGYEAGPTGFGLYRAIVAAGMACTVAAPSKLQRPVGDRVKTDAKDAAHIEKLLRMGELVAVTVPDENTEAARDLVRARDDARGDLMRARHRLSKLLLRQGIVYYDGKAWTGKHEQWLRRQHFDNPALQAAFDNDFDAVLTVSARRDSLDERIIEMAADSTWTPVATRLQCLRGISVLTAFGLAVEIGDWSRFTGASIGAYTGLVPSEYSSGQSRSQGPITKAGNTHVRRLLVEAAWHHRRAYRCPSAVLRARWEAAGPGRQGTAAMPVTSACTSGGPLSMTGARTPASRISPSLASLPAGAGPWPCSTKLSALTILGHPVADLMVSRERTHELAMCNNHFHRLWLRRTSLDQSVSVPVPNTVQRYPTRAYQSDTTLASNDHHLTATGRPSPFIPALEYHTGRKPDMGLDKSCLHIRLWCACKPVLACKGVCDR

SEQ ID NO: 340045 - protein, 392 aa, unidentified
MYYIGIDIGKNHHEASIVDQSGNQVCKSLRFPSTHKGAVKLLEYIQANTQSNNLVFGLEATGHYWYTLYSFLKEHKYTIYVINPIQSDCFRNFYIRQVKNDSKDSFLIAEVIRFGRFTTTDLTDEDILSLRQLCRYREAVMSARTEIKLRIHTILEQIFPEYEHLFCEIWGSSSMALLSKYLLPENIANASIDELHTILLKNSHNRFSLNKAIEIKDAAMNTFGIKIAQEAFSFQLKMLLERLKLLNEQLKELDEMIISLYNQFDCYLHTIPSITPISAASILAEIGDIRRFKNSSSLVAYAGIDPTVRQSGEYCSAHNRMSKRGSSHLRHTLFLAASCCVFHNSPFNEYYLKKRSQGKHHLVAVGAVSRKLTTVVYAILKSGKPYEPIKFV

SEQ ID NO: 340046 - protein, 405 aa, unidentified
MADDTISWFAGVDWGSEQHQACLLDAAGGIKGERAFRHGGAGLAALCDWLVSIAGDPSSVAVAIEVPHGPVVDALQDRGFAVHAINPKQLDRLRDRFSVAGAKDDRRDARIAAAGLRTDPQLFRFVQIGDPRVIELREWSRLAAELQQERVRLGNRIRQQLWRYYPQLLELSDDITAVWVLELWLMAPTPEKAARLRETTLARLLKQRRIRRIKAETALGILRAPVLKVAPGVTEAAVLHLRSLIARLRLANNEFRQAECKRDELCAALTQTKTADATAPSDAAILASLPGVGANTLAVLLTEASGPLTRRDYSALRTLSGVAPVTKRSGKSCIVVMRQAAQIRLRQAVFHWARVAVQNDPKSHSRYEALRARGHSYGRALRGIGCSALPASCCSGETCSTPSRV

SEQ ID NO: 340047 - protein, 386 aa, unidentified
MHDGTNLPVPERTGIPGDCATLFVSLELSRSTWVATSLAPGSKKMSKHTLVGGNGRELLDLLARLKTRAEQRIAAPVKVVAIHEVGLDGFWIHRLLEANGVESHVVDPASIAVPRRHRRAKTDAIDGETLLRTLMAWQRGEPRVCAMTVPPSPSEEDCRRVSRERATLLRERIQHTNRIRGLLFGQGITNYNPLHKNRRECLEELRTGDGRSLPTHVKAEILREIDRLELVLRQIGEVEAERDEILRPAEASSPAALLMRLKGIGAEFATVLYFEGLFRHFENRRQLAAYAGLAPSPWKSGSIDHEQGISKAGNPRLRTTMVELAWMWVRYQPDSALSGWFRQRVGSERGRTRRISIVALARKLLIALWRYVTHGEIPAGAVMKPV

SEQ ID NO: 340048 - protein, 359 aa, unidentified
MTVIEGRERRIVGGVDTHKDLHVAAVVDEQDRVIGTQSFATTRQGYRQMLAFMRSFGHLQRIGVESTGSYGAGLLRFMQQAGIAVLEVTTPDKQDRRRRGKNDDLDAQNAAHAAFAGQRTVTPRSRDGMIESLRVLMACRKTAVSARRVALQMIHNTIVCAPDGLRDQLRSMTRMQLIRTLAAWRPDLTAYRDVEAAIAIAFKSLARRYLELHDEIADLDAMIVAIVDELAPNLVARNSIGHTGAAQLLLTAGDNPERLRSEASFASLCGVSPVPASSGKTVRHRLNRGGDRAANSALHIIAIGRLRTDQRTKDYVARRIAEGHSKLDAIRALKRYLAREVFTLVTQRRREINATRIAA

SEQ ID NO: 340049 - protein, 350 aa, unidentified
MSKHSEKPAIEVLGIDLAKRSFQLHGVDGDGHKMVGKKLSRPKLKEYLVTLRPCVVAMEACGSAHHWARLFESYGHEVRLIAPQFVKPYVKSNKNDAADAEGICEAAQRPSMRFVAVKEVGQQDIQAIHRMRSLAVDRRTAQSNQIRGLLLEYGIEIPVGRVNLLKRLPGVLEDAENGLTDLFRGELFGLVEELRHLDERIAHYDEKIEQIAQADERMQRLQTIPGIGPKIATALVAAIGDIHTFKNGRELAAWVGLVPRQHSTGGKSTLLGISKRGDVYLRQLLIHGARSILRGVDRKPDRTSRWATALKQRRHQNVAVVAMANKMVRIAFALLKKGETYRAQPIPAPA

SEQ ID NO: 340050 - protein, 396 aa, unidentified
MLTSIMVNGSIAEASGGEASVASRADRRRRQEFDRAQTHEAVTKREPCRRCGTSPNSRLSRRQRTTRPASSHLQDWDKPMEAKQIFIGIDVAKDTFQIACSPQAISMSLPNSKEGIKQLIEAVQPYTVELVVLEATGGYEHLIATELLGAGFNVVVASPKQVRDFARGLGEFAKTDAIDAYVLARFAQIVQPKPKSFANGQTEELADLVSRRRQLTDLRTQETNRMETVRHPRVRKSIRKMIKTLDYQIKELDELIEQHIQADDNFRQKDQILRSTPGVGPQTSAMLLSHLPELGQLNRQEIAALVGVAPFDFRSGSFIGKSRIYGGRKDIRSVLYMAALSAMRCNPIVHNFSERLYDEGKVFKVVVTACMRKLLVILNSMVRNQTLWTPKKIIKY

SEQ ID NO: 340051 - protein, 403 aa, unidentified
MYKYFLGIDISKDSFDFCFTDETEKVLYKDHYQMDMTDFTKLSDYLAPFSKDEILIVMEATGIYHLTLLSYLSEQGLNVSVVNPLFIHAFTKSMTIRKTKTDSKDAHIISIFAKRNYATIRLSSACDIETIKPIVREKEKLTNQISAIKTDIKSLVNQLFPEMLKNTNIFLKSSLNLLLQAPSKRIIRNLKEKKIAELLSCDTKRGAKPKVDAKEILLMAKNSIGINNQSLEKILVSKIKQLDFLQTQLDEFNETIEQFVDEHYHDDMDLLTSIGGVGKPSAASFLTELGDINNFATYKQLTAFIGTDPTIYQSGTSVNVKGSISKRGNSHLRRVLWHMARAATVWNETLKAYYDKKRSEGKTFKQSVIAVANKLIRIIFSMLKNNTKFDSNFSNLAIKSASI

SEQ ID NO: 340052 - protein, 350 aa, unidentified
MPCSTIRAVATIGIDMGKNTLHMIGLDSRGAIVLREKVSRGRISSRLANLPPCLIGIEAGMATHYVARELAALGHDVKQVPPTYAKPFRQGHKNDFRDAHAVAEAVQRPTTRFVPAKTDEQLDLQALHRVRSRLVSERTAVINQIRAFLLERGIIVRQGLRFLRQALPDILAKRTDVLSPRMVRIVADLASDWRQLDERIEVVTDEIETLAKSDSSCRRVMTVPGIGPIISSAMIAAIGSGAAFARGRDFSAWIGLVPKQMSTGDRTILGRISKRGNGYLRMLFMQAARVILLRPASWPKHGFGVWLARAAQRLHPNVLASALANKLARIAWTVLAQERSYETRLTEAAA

SEQ ID NO: 340053 - protein, 348 aa, unidentified
MNVIGVDYHPSWQQICWMDTETGETDEKKLEHATGEAERFYRQLPGRALIGMESTGNCQWFVELLGRLGHELWIGDAAKIRASEVRRQKNDRRDAALILKLLVEGRFPRIWTPTSEEKDLRQLLIHRYKLVLIRAQVKNELQHLAMNQGVTKRQKLWSKTGEKVLRELPLAPWASRRREDLFKVRGMLDEQIALLDVAVKEAAEKNEKARLLMTQPGVGPVTSMAFVLTMGDVQRFRRGKHVASYLGLIPREHSSGGHQRLHSISKQGNRFLRMLLVEAAQSAVRYDPEFRREYLHRCHGKPRGVAKVAAARKLAVRLYWMLRTNTAYPGVVRVESSSRVPVVVRSNG

SEQ ID NO: 340054 - protein, 355 aa, unidentified
MKKRSVTGRVTGIDQGDRFSHLCVLDARGEVVERTRVRTTPAAYRKRFGGRSARGRVILEVGPHSPWSSRLLESLGHEVIVANARRVKLIAKADRKTDRVDAETLARLGRVDPNLLAPIAHGGEAAQRDRALLRVREGLVRSRTRLIQQARGLAKALGERLPAASTAAFPRRVRNEGLESLFPGLDVLLEMVEVLSARIRKLDHEIERACRERHPVTAQLRQVPGVGSITALAYVLKVEDPTRFAKSREVGPFLALVPRERSSGESQPQLGIPPRGDAMLRRLLVQASHYILGPFGPDTDLRRFGLALAERGGKRAKKRAVIAVARKLAVLLHRLWVSGETYRPLQVAGSEALAA

SEQ ID NO: 340055 - protein, 361 aa, unidentified
MKKPAQHLIAEVPRRQAKVEITIGIDLGDVWSHYCTLNQDGEVVDRGRFRTTPKAIEKWFTDVAPARVAMEAGTHSIWISAQLQELGHEVIVANVRELRAISHSDRKSDQVDAEKLARYARLDPNILRPIAHRTVAQQEALTLIRARALLVRLRTAAVNAVRGLTKSCGYRMPTSATTCFAQRSLAVMPPGLAQALGPVLQQIAEMTIKIKQYDRQIQQLGQTEYPETQALLKVHGVGHLTALTFVLTLGCKERFGRSRDVGCYLGLRPRRSQSGDHDPQLGITHAGNAYLRSLLIECSNHILRPHGRDSALRQWGLHLAARDGKQAKSKAVVAVARKLAVLLHRLWTTQETYMPFYEQAA

SEQ ID NO: 340056 - protein, 321 aa, unidentified
MAKIICGVDVSSQFLDVFLNPRCQRFPNTVAGIADLLALCQQHHVDLVAVEASGGYERRMYRQLWAAGLPVALCNARAVRDFAKSMGRLEKTDPMDAALIAEYAAANQKLVAHPPQSSAHDQLRALVTRLRQLTETRATQLQQRLLVTDPVVLETFTRLLAFLTSEIRQLQDRIAQLIDADPLWHHLDHAFRSIKGVADRTVACLMAELPEIGTLSHKAVSKLVGLAPLADESGRRHGRRSIRGGRATVRHLLFIVASVVRRYHPDFAAFSQRLAAAGKAKKVILVALAHKLLIRLNAKARDARRQLLPMASLPLTTTIPS

SEQ ID NO: 340057 - protein, 348 aa, unidentified
MNATRKSVVGVDTAKSVFQVYTVEQETGEVINKPIKRAQFLQWFANRAPCVVGMEACGGSQHWARKLQELGHEVKLMSGKMVKAFVCGNKNDAADARAIYMATRQPEVKPVAVKSEGQQAVLAMHRIRQQLVKVRTAQMNEMRGLLGEYGEVFGTGRKAFDAGMKAGLERLAERLPAPLIDTLRDQWNELTRLDKRIARIEAFLRAWLRADRGARAIAEIPGVGLLGATAAVAAMGDAKAFRSGREFAAWIGLVPGQTGSGGKVRLLGMSKRGDTYLRTLLVHGARAVLQHAKAPGPWLQQLSQRRPPNVVIVALANKIARTIWAVLAHERAYDKDHVSLRPHAAATA

SEQ ID NO: 340058 - protein, 408 aa, unidentified
MNPLYVGIDVSSKSNVVYLMLPDGSKHSNFSVANSHDGSTQLVKHILSAITSLSLDTVIIGLEATSVYGDNLVYFLMEDASLVPYDRKIHVLNPKQVKNFKEAYNDLPKNDYVDSYVIADCLRFGRINKEVYQGDYRYKALQNLTRARFFAVQNLVKEKQRFINVLFKKYSTMTQEKVFSDTFSTTALAVYGEFESAEALASMDLQELTDFIMEKGKNRFHDPDAVAKAIQKAARSSYRLPKTVNDSVNQVLSISITSIKALDAQIKEFDKTIKAQMELLPNVLTSIPGIGPVYSAGIIAEIGDINRFPSQAQLGKYAGLAWTQNQSGDFEAENTKLIRSGNRFLKYYLCEGALSLVRCDTEYSNFYHSKYKEVNRHQHKRALALTARKFVRLVFRLLKDNRLYRAAE

SEQ ID NO: 340059 - protein, 349 aa, unidentified
MRILALDLGKNKSVFVDYTVGGERKFGKIGTNAQELRKRLDRCAPDRLVIEACPAAGWVCDVAESKKVPVQVANGNDERWRWKTVKEKSDRKDGLKLAQLSEMNSLPTVHVPKASVRQWRSLIEYRHQLVDRRTAIKNSIRSIYERQGLALPSARRAWTKPAVEELKKEASAAKPEQLWLFQGHCELQQLEMVEQQIEQVEAKLEETAKEKESVRLLKTAPCVGPRLSEAVVAILDDPHRFKNGRQVGCYAGLTPRRWQSGESDRQGRISKAGNPLLRELLVEIAWLGVRNKTWMLEVYERVRRGSDKRKKIAIVAVARRLLVKLWAMLRDGTEWKEPAPQPAAALAVG

SEQ ID NO: 340060 - protein, 362 aa, unidentified
MRIIGVDLHARQQTLAVLDTTTGEVMEKTLTHSGSNVQEFYSTLPGPVRVGIEATGTMQWFLSLMEEMGIDCQVGHPAKIRAAEPRKQKHDRRDADLILKLLVENRFPSIWRPSKELVDLRALLLHRHQWVRMRTRIQNALQAIALANGLRRGPALWSQAGQCTIASLPLAPHTAHRRNELQATYAKFEAEIEKLNQRVAEQVDGRPGARLLMTHPGVGPITALATDVFLGDPTRFSDGKALASYVGIIPSEYSSGGRQKLGGLSKQGNPLLRFLWCEAAAHAVRRDPELQRFYRRKLIQKGLGKARVAVARKLGIRLWIMLRDQINYNEFCRRGQMQRKDGDACAGMPGTRYGANSHRPID

SEQ ID NO: 340061 - protein, 429 aa, unidentified
MNYTQNEKIEQVTDSTMVVGVDIGSQIHYARAFDNRGRELTKRVFSFHNDLEGFNSFNLWAETLKTENKKTAVLIGCEPTGHYWFAFAKYVNDHQKRLVMVNPFSVKKIKELDDNSPNKTDSKDPKTIAKLVVDGRYSIPYMPEGIYAEIRDLVYSRDRIMKQHNISANRIQRWLAIHFPEYLGLYTRFDAISGLAVLERAPLPKDVIALGVNGIRKIWHDKKMRGRGVTEDRAKTLVEAAHNSVGLDGGIGTKSELYMLLEEHRLWTSQLEAVNKVLEEMILKVPHVEKLLAIKGVGSITIAGFIAEVGDIRRFDSPKQIQKYAGLELVENSSGKHKGRTRISKRGRRKLRKILYQVMVPLLARNKEFRGIYDYYVTRVKNPLKRRQAMVAVSCKLIRVFYAVLTKGVEYDRFKMMSDIHRKSDIIAA

SEQ ID NO: 340062 - protein, 337 aa, unidentified
MKKIMLVGIDTAKQVFHLVGMDESNGLSYRRKVSRKRFLSTMAQLPVCQVVMEACGASHHWGRRIRAQGHEVRLIAPQHVTAYRVGNKNDYRDAEALIAAALSPSMKFVGIKTVEQQAEQAEHRVRSRLLSQRNAAANGLRGLLGEYGMAFAKGHKALREGARAFAGSDQARELGLVGLVNDVLDEIAALDERMEAYKRRIEQRVRLDPVSRQLQRELNGIGPLSCSALRVKVADARAFGNGRNFAAYLGFAPRHRGTGGKVTLGKLSRGHDRYLRQLLIHGARAVVSRIGDKQDEQSRWLRGLIERRGFNIACVALAHKNARQAWAILARQPQTAG

SEQ ID NO: 340063 - protein, 348 aa, unidentified
MALTIVEDTRVITGGVDTHADTHVAAALDPIGGLLGVEEFPVTLAGYARLLGWLGGFGTVGLVGIEGTGSYGAGLARYVTAAGIRVVEVDRSDRQDRRRQGKSDPLDAVSAARAAQSGRARGAPKGRDGAVEAIRALMVAKRSARSERTQTINQARSLIVTGPDDLRARFAGHTVAALVSELATLRPRPGDVVGHATRIALRELGRRAEFLDGQLERLDELIVPLVTARAPGLLALHGVGPDTAALLLIAAGDHPARLRSESAWAHLCAAAPIPASSGKVTRHRLNPGGNRQANHALWRIVITRMSAHAPTRAYVERRSEQGLSKKEIIRCLKRYVAREVYRHLRPAA

SEQ ID NO: 340064 - protein, 378 aa, unidentified
MISTDSQLDFTGQDIYVGLDIGQKSWKTCILTKDFEHKTFTQPPNVEALVGYLHRQFPGARYLSVYEAGYFGFWIHDELQRRGVDNLVVHPADVPTTDKEKKNRNDRVDARKLARHRRNGDLKPLYVPSRTALEDRSLVRTRAQMVQKQTRCKNQIKGLLAFYGVTIPDEIVSKHWSRRYLQSLESLTFQRASGNQALTALLDELKHLRQTIAALTRQIRALSRGEPYRIPVVNLVSIPGISTLSAMILLTELVDIQRFRSPDHLASYVGLVPGEDSSSEKEVNTGISHRRNALLRVILIEASWVAVRKDPALLLAFSALARRMPKNRAIIRIARKLLNRIRYVLKHQQPYQPGIVKVDSGPKAPLGSRSLIESPCVG

SEQ ID NO: 340065 - protein, 373 aa, unidentified
MTTTATHNSHDTTTERVLFVAFELSEKTWKLGFTVGHGQKPRERTVAARHQARLLQEVAQAKKRFGLPETAPVVSCYEAGREGFWLHRFLQAQGITNSVVDSSSIEVNRRKRRAKSDGLDVRKLLSMLIRYEYGEREVWRVVHVPSVEAEDQRHLHRDLETLKQERASTTTRIKGLLSSQGIRLTSLRQFPEQLDALRLWDGSPIPSGLRRRLLRVYAHHEFLSQQITELEAERRALLESSQDASIEKVRQLMHLKGIGINGSWLLIMEFFGWRDFTNRREVGGLAGFTPTPYQSGESAREQGITKSGNRHVRWMTTELAWSWLRYQPESALSCWFRERFGGGGKRLRRIGIVAVARKLLIALWRFLKTGGLT

SEQ ID NO: 340066 - protein, 443 aa, unidentified
MARKQAKQRFQLVHPHCAGIDIGSREHWVAASKDHEPIVRSFATFTHDLNQLADWLSEMGVEVVAMEATGVYWIPLFELLDARGFNVYLVNSRSTRQISGRKSDVLDCQWIWQLMSHGLLRGAFRPSESICTLRALVRQRANKVRDQAQALNRIQKALTQMNIQLANVISDISGVTGMRILRAIIDGERDPQILAGMIDRRIKATPETVARSLHGNWRLEHLHALAQEVEAYDFLEQQIADNDEAISGVLALLPVRQEKPQPSRKVLRSPHRSAAAQTALHQAVWKVMGVDLTAIPTIGVDTALVIASEIGPDLSRFPSSQHFCSWLGLAPPTRISGGRQLSGSGPKVINRAAQALKQAASNARNDKSFIGTSHRARLSRMDTSCAIKATAHQVARLIYAMVTRGQAYAEKGIEEFEERSKGRQLRALLRKARKLGLELVEAA

SEQ ID NO: 340067 - protein, 358 aa, unidentified
MDKYIGFDVDSKKTVACVIQKGERDRYTTFKTDIGQMKSFLQQQRRPGEKLNLTFEVSGQAGYMYDSLLNSVDGITVSNPSKMTWIYRTAKKNDRIDARKQALLLSIGEIPKVHMPRRQIRQWRQTIQHRRKQVKHITQVKNSTRALLKSVGITKPGCSKSWWTKSNRNWMYRLCRESRDTVDLGWQLNPKHMLDHLNLLESQRNDITKRLDDYLLKQPDWILLRSIPGIGPRTVEAILAYTDDAARFRRTRRYCAYFGLTPRLDESGSMRRLGHISKQGPSVVRWLIVESTWRAIRCSPSLKAFYERIMAGQKSRKKIALIATARKILTIIRAMLTTGELFNERVVSQYCYLQDYIS

SEQ ID NO: 340068 - protein, 401 aa, unidentified
MELLYARCAGLDVHAKTVVACARIASGGAVTYHHRTVATTTQGLLELAEWLTAQGCTHVVLESTGVYWKPVWHMLEGQFELTLANAMHVRNVPGRKSDMNDARWLADLLAMGLIRSSFVPPAPIQELRDLTRTRKQLVREVARHTQRIQKTLEDANVKLTEAISDIRGTSGRAILKALTTGETDPERLVDLTTGRLKASRAQLVEVLRGRVTAHHRFMITLHLTQIEARIGEALAPFRAAVNLLTTMPGLSETTAAVILAEIGDTVSPFPTAGHLVSWAGLCPRLDESAGKRRSTRTRQGAPWLKTTLVQAAWAATRRKNSYFHAQFMRLKSRRGPKKAILAVAASMLTDVYYLLRDGVEFHDLGAQYFVKRDHDKERLTTRLMRRLRELGVDIEVKEKAA

SEQ ID NO: 340069 - protein, 313 aa, unidentified
MKETTTVGIDISKDSFDVHIDTTSQFLHLENTPTGIQLLLEALRELSVSLVVMEATSKYHYLLASMLTEAGLAVAVVNPRQVKNFARALGKIAKSDPIDAKTICEFGKRMQPAPRPLKGNELQELSLILARRRQLVQTRTMEAARCQEKPSPFIEQGIAKHIAWLNAEINALDLEIKARLKESEELTIRRKLLDSVKGIGPVTQAVLLTQLPVLGKLNRRQISALVGVCPYDRDSGSLRGKRAIWGGRSGVRAMLYMAMLSAVRYNPQIKMFYTNLVSRGKPKKVALTACIRKFITILNAMFRDERMWAELKS

SEQ ID NO: 340070 - protein, 422 aa, unidentified
MLEEDPQVEEIIARVAALDIGKAELVCCVRVPHEDKPGRRCQEVLTYSTMTRSLLVMADHLRCLGVRRVVMEATSDYWKPVFYLLEAQGLDPWLVNAKDVKHLPGRPKTDKLDAVWLCKVAERGMIRPSFVPPVEIRRLRDVTRYRIDLVGVRTAEKQRVEKLLEDAQIKLSVVASDIFGVSGRAMMAALVAGQTNPKALAELARGRMRAKLTVLEEAFTGHFTNHHALLLRKMLARIDTLDADIAELDATIGEMIAPFAPAVARLDEIPGVGTTAARVIIAEVGLDMARFPTPAHLASWAKFAPGIKESAGRKKGTGSTGHGNRYLARALGEAAVAASKTNTFLGERYRRIARRRGKKRAIVAVGRSILVIVWHLLSDPEARFIDLGSDFYDTRIGSEAKKRNHIRQLEALGYKVTLEPAA

SEQ ID NO: 340071 - protein, 389 aa, unidentified
MYYLGIDVAKRQHTAIILDDQGQVIHRSFTFHNDRAGFDQLVTEIKALPAPVTIGLEATGHYWLALYDHLTHLDYTVLILNPLQIAAYRRTGIRKRKTDRHDAYWIADFVRIGGGQPCHVPQQIILQIRELTRFRFRLVEQIGDCKRKAISVLDRVFPEYETFFSDLFIHTSRRLLQEAVTAQEFADFPLDELRSLLTSASRGRFGVTKAQQIIATAARSVGVSFLADAARLELRCLLNQIEFLEAQVTDVDAALDALLQQTEQYLTTIPGVGLASAAAFLGEIGDIHRFPTLEKLVAYAGIDATVYQTGEFEGDQAHMSKRGSPYLRHALWLAAAMARQYDPELKAYYERRRAEGKAHGTIMGAICRKLLARVYVVLRENRPYVIRTL

SEQ ID NO: 340072 - protein, 391 aa, unidentified
MIYIGIDVAKDKHDCFITNSEGEVLFNAFTIPNNADGFHDLFQKISSLTNDFSNVKVGLEATGHYNYNLLGFLIDKGLPTFVINPLHTNLFRKSLSLRQTKTDKEDAHTIALMMMSGVNLQSYSNTSYHNEELKSLTRYRFDKVQERAKLKTSISRLVNILFPELEKLVPSLHMVSIYALLAEFPSSAQIASCHLTRLTNLLANASKGHYNKEKAIEIRNAAKHSIGSNMPAKSLELKHTIRLIQELTSEIDEIECSIKSIMDEIRSPILSIPGINYRMGAMIIAEIGDFNRFSSPDKILAYAGLSPSTYQSGQLDGCYSHMEKRGSRYLRYALFNATKFVCIWDNQFSAYLAKKRSEGKHYNVAISHAAKKLVRVIYQLEKSGQLYHRAA

SEQ ID NO: 340073 - protein, 450 aa, unidentified
MDKKLKKNQSLQLAVINPCCAAIDVGSMMMMVAYSDEQGNQYLLEVDAFTESLQTLATTLQQAGVTHVAMEATGVYWIVVYEILEQQGFQVTLVNAKHFKNVDAQKTDVKDCQWLHQLHANGLLRASHIAKEIYRELKSYLHERNILQKQKSDTLNRIHKLLTQMNIKVQHLISDIEGVSGMKLLRGIANGITDPVELLSLINADKLKAGKEDLIKSLQGIYKKQYVVILQNALKAYDFFKEQMRSYEILIEKVLKTMLPKDSDGNKPVIKNKTSYVRKNQYSINLKEYLKHIIGVDVIKIDGIDEISALEIISVTGLDMNKWPSAEHFVSWLTLSPRPKISGGKIIGHEKRFTNNKATQAFRMAAQSMWQNKGSLGHLYRRLSAQKGSKKANKAIARKLAVIFYHMVKNKTEYDKNKLKVNTERQRAKRISFLHKEAIKYGYVLQNAVV

SEQ ID NO: 340074 - protein, 332 aa, unidentified
MRSVATGRIGGDLDSLDKVVRKLVSTGKELRFVYEAGPCGYEIYRHLISRGYECVVVAPSQVLRRSGDRIKNDRRDAMALARLYRAGELTPVYVPSPEDEAMRDLVRGREDAKRNERKAKQRLGAFLLRHGHRYSGRKNWSQAHMRWISDIRMPHPAQQITMHEYITTINECSDRVARLTDQIRELLATWRMAPVVMALQSLRGVSLIVASTMVSELGDLGRFANPSELMAYLGLVPSENSSGERNRRGKITKTGNNHARRALVEAAWAYRLPARVSRVLLKRQEGLPQQICDISWKAQLRLCGRYKSMMAMGKIKQLVITAIAREVTIPAK

SEQ ID NO: 340075 - protein, 419 aa, unidentified
MSFKILKNNCCGLDVHKTWIYACIGITDSFKRTEYKQARFSSFTKGLQELCLWLAKYNCIDVCMESTGKYWIPVFNVLEKNNIFVTLSHPKYTKPQKGNKTDRKDAKWICDLYMCGMVKPSFIPPADIRQLRDLVRYRFKLTCMITGEKNRAHNCLTVSNLKLDDVFSDIFGKSSRSITEQILQHPGEVFDVAPFVDSRCKTPIEEIQAAVDGAISHEQAVKLRQCLKHIDELEMHKAEIEREIFRLSQKYESVLDLIRTIPGFDKNPLTAIQVLSEIGADMSVFPTAKNLVSWAGCCPRNDQSSRKIKSTRISRAGSYFKPVLVQIANALIKSKKHPEFTTRYRRIKARRGHKKAIIAICRMILTAIWHILTDLKPYTTEGFLESRPVNDSKILTTSQALNLLKQRGYVIKDDIVSVP

SEQ ID NO: 340076 - protein, 339 aa, unidentified
MWYSGIDQHKRDSVIATYGPDGPRVKQLRVANTPLALAQYFADFPAPHKAVVESTGGWYWLADVLAPLGVDLVLAHATRLKAISAAKVKTDQVDSDVLAQLLRADLIPIAHMIRSEQRGPRDLMRARLRLVEKCVSAQNSIDRLLEKFNVATVAQLDALYQLQAACHQAQIHLLDEQITTLERALHPHLIPNPDVQRLLWIPGLGKVNAFTLYTEIDGITRFPSARQFFSYCRLVPGADNSGGRMRHRSGSKAGNRYLKLAFSHAGIRAVQYYPEIRAFFKAKARRKPIRIARTLVALELARIVYQVLTKQEAFNGQFKTHPLSRRKHAQWPRRASPSV

SEQ ID NO: 340077 - protein, 447 aa, unidentified
MNKSTKEQPKKKISQLPIIHDFAAGIDVSDNEMVVALPINGYIEVACFKCFTCDLHSLAALLKENGIQTVAMESTGVYWVSLFEILQDQGFEVYLVNAKHVKNVTGRKSDESDAVWIQKLHSCGLLSASFQPENQVRGLRSVTRHRKNLVRTCSTYVNRMQKAMELMNIKLHTVISDIDGKTGKLIIEAILAGERDAKTLSKLRDPGIKAAEEDIIKSLEGNWHQEHLFELRQCYEMYQCHQKMIRECDEQIKKLLEGMIASKNDGELPVIQQSKKRKRQYKNRISFDMTAYLKDLTGVDLTEITGISELSALTVISEIGTDMSRWPTEHHFTSWLGLAPNTKISGGKTISSRIMKKKQSAGETFRTAANSLYNSKAPLGKFFKRIKAKAGPGKATVATARKIAIIVYKMIQTQTPFKPEMLEKYQEQHKIHQIKQLRRRLELLEAA

SEQ ID NO: 340078 - protein, 322 aa, unidentified
MSQTFKTMNQSTNSVKFLGVDVAKDSLQLFCNGLKVPAQIQNTPKAITTWLKGLHSHHSQLHIVCESTGGYENTLLRACWKAGVRVTRLNPARVRDFARCRGLLAKTDAIDAKAISEFASTFPPDPTPEPSPQQMLLAELVARREDLKTQRAAESNRSRDIQDKVLRRMLEKHLRFLDAQIKQIDKLIEDTISQDQAMHQKREILVRTKGVGATSAAILLSCLPELGTISGEAISALAGVAPFNRDSGTLRGKRCIRAGRAVARKALYMCALVGSRANPILKDFYQRLISKGKPPKVALTALMRKLVVHLNSSLKILNSQTA

SEQ ID NO: 340079 - protein, 333 aa, unidentified
MEETGECGEQELNHSDGQAEKFYRDLKQRGISVRVGMEATGYSRWFERLLAELGFEVWMGDPAEIKAKRVKKRKTDREDARLLLKLMLGNNFPQVWVPGPENRDLRQLLWHRHRWVQMRTRIMNQLQALAMNEGYRWKKKLFSQQGRAQLEKLTLAPWASRRRQELLELLDRMNPTIEELTAAVEREARKRPEALRLMTHPGVGPLTALAYVLIIGTPTRFQRGKQIGTYVGMIPCEESSAGKQRLGHISKQGNSLLRFLLVEAAQAAARINPEWRRRYIHLAMRRHRSIAKVAMGRRLAVRLYWMWRNGCEYSPSLEFGSYAGQLGLVHGGK

SEQ ID NO: 340080 - protein, 352 aa, unidentified
MWIIGVDYHPSVQQIAFVNTDTGECGERRMSHSDGESEKFYRELKATGCRVRVWMEATGHARWFEQLLGGLNIELWVGDAAMIRAKRGRKPKTDRQDAQHILNLLLTGDFPQIWVANWENRDVRQLLWHRHRLVQMRTRITNQLQAVAMNEGVRRKKALWSSKSGRAQLESLSLAPWAARRRHDLLELLDRLNPTIEELSAAVEQEAQQRPEVLRLMTHPGVGPITALAFVLIIDSAERFACGKQIASYVGLIPCEDSSSDRRRLGHITKQGNSLLRFLLVEAAQAAVRRDPDWRRRYIHLAMRRDKRIAKVAMARKLAVLLYWMMRKEWNYEQLKKFGSYAGESDLVHGVQ

SEQ ID NO: 340081 - protein, 390 aa, unidentified
MPKYQDLSRSLAAFDQNSTLVAVIEMGSEGWLVGALVPGLKKDPRKKLSPDKQSLLALLHRWCAEAAKAGRAIKRVCVAYEAGRDGVWLARWLREQDIDAYVIHPTSIPVSREHRRAKSDRLDLRLLLRAFLGWLRGEPGHCSMVAIATVEEEDGKRPLRERETLTGDVTRLINRMKSLLVTHGIRNFKVTLKKAGEKLAELKTAWGEPLPPESLAELQRSFERLRQAKQQIAEIDKARRRRLEKAPEAGVHPMILILARVYGVGLMTAESLVREVLYRNLRDRRAVARYVGLTGSPDESGKKRREQGLAKAGNGRIRRALIQLAWRLLRHQPESALVKWYRARTGDGRRDTRKVMIVALARKLLVAFWELVTNGTVPEGMRLHPAKVAG

SEQ ID NO: 340082 - protein, 457 aa, unidentified
MRKKNKRTPGVEEAHPFSGMSRIHPNAAGVDIGAIEIVACVAGDENTQIVKAFGNYTVDLQALAQWMKGYHIKTIAMESTGVYWIPLFEELERQGFECLLISSRSLRRVAGRKSDISDAQWIQTLHTYGLLEGSFRPQGDLVALRTLLRHRSQLVEHRSPHIQHMQKALLQMNVQLSQAVTDVTGMTGQKIIRAILTGERKPQALAALREAGCKKSTEEIGKALTGTWREEHLFVLKQSVLLYDFYTEQIQACDEEIERLYGLTRPDWETGEVEPFTRRKKNSRSKNLPQHPEEIRKHLKRISGVDLSVVDGFGVSLAQTVIMEVGTDMSRFPDEKHFCSWLGLAPKHEISGGKVLKNNTLKTRNRAGQAFRMAAQSVKQAECVFGVFYRRLKARLGPSQATVATAHAIARVVYRMLKYQVEYEPLSLNEYQRQYEAQQIKYLKKRAAKFGFQLIPT

SEQ ID NO: 340083 - protein, 338 aa, unidentified
MVILTVGIDLAKNVFAVHGVNEAGKAELLRPAVPRDKLHELIAALPPCVIGMEACSGAHHWARLFQTSGHTVRLIAPKFVTPYRMSGKRGKNDAADAAAICEAVRRPHMRFVPIKTLEQQSRLMVHRARQGFVEQRTATLNRIRGCLSEFGIVLPLKAATVRRRACDCLEDLPGYANIVIGDLLSEVTRLDERITQYDQHIKAMAKEDARAKRLMQLSGVGETTATCMLAMIGNGNDFDCGRQFAAWLGLAPGQYSSGGKTRLGRITKAGDSYLRMLLILGARAMLVAAKNKTDATSRWAVALEARRGYWKAVVAIAAKNARMAWAVLRKGEDFALPS

SEQ ID NO: 340084 - protein, 344 aa, unidentified
MSKVTIGLDIAKSVFHLVFMNQSGRVLRKKKLRRHQMLSYFSQLEPCIVVMEACGSCHYWCRELTKAGHEVKAIAPQYVVAYRKGNKHDYNDAEAIAEASQREGMRFVPFKSQDQQDIQLMHRIRERMIAQQTALSNQIRGLLSEYGIVYARGVATLVKELPLTLEEADNGLSMLARRQFQGLLNDLRELREHIKEMDKGLKAFSQSQPVCERLMSMTGIGPLIATALYAGIGQGQTFNSGRHLAAWLGVVPKQHTTGDNPRLLGISKRGNTYLRTQIINGARAALRHIGDKTDKVSEWCRACLARMSFNKACVALANKMVRMAWAMLHYQQDYQPGLINKVAA

SEQ ID NO: 340085 - protein, 321 aa, unidentified
MQTPSPALDIGADVGKDEIVIACAEGALSRRKLRNRRIELSALLKSLPAGSRIGMESTGSYHELLAETAHKLGFVIFVLNPKDVRHYAKGVGLRGKTDRVDAELIARMVAREHEKLHPWIPPTPEQRQIDRLLKRRAKVSRIRVALNQSLKGLRGFGADLKTVNERLERFVKRIDAKVKTLIEANKDRKQQYARLRKIAGLGGVVVRSSVLNTLERVPLHSADAFVAFTGLDPRPEDSGHHVGRRRLSKRGPSELRRLLYIAAMAAVKTKLWKPIYEHYRAKGLSTTAALVVIARRIARTAWSLYTHKTDFDPKRVALALT

SEQ ID NO: 340086 - protein, 318 aa, unidentified
MTSATFVGVDVAKERLDVAVRPSGEHWSVSNDDAGVAALVARLAPLGPALIICEATGGFERAAIAALAAGRLPVVVANPRQVRDFARASGQLAKTDQLDAGILALFAERVRPTPRPLPDAAVQLLDAVLTRRRQLLEMLTAEKNRLGFAPQPVHRGIQAHIRWLERQLDDVTKELAALIEASPVWRAKDDLLQSVPGVGPILSCTLLGELPELGTVSDKQIAALAGVAPLARDSGTLRGKRMVWGGRASVRTALFMAAMCARRWNPVIQVFYERLIAAGKPKKVALIACARKLLTILNTMMRNNTRWMTGEARIQYSC

SEQ ID NO: 340087 - protein, 352 aa, unidentified
MEMVGGLDLHRSQITFRTVDLRTGEVQRGKIHPGARDRFREWLGRVEPGTDAHFALEGTTGWRFVVEEIERRGFTAHLADPAELSERRGPKRRAKTDHADCELMVNLLLEGRLPQSWIPPAHILELRTLVRSRKTLVDQRIEWQQRLQAQLFHQGVVPGLGLCNPEDRRRLADAEVSGSGRQMIETGLIMLDHFDTQLGPLSAQLTGLARAQPGCRALQRELYGVGWLTAVAIVAELGDCRRFTSADQAVRSSGLDITVYESNGKRPGGHLARQGPQVLRWALFEAAQCAARKSSPDHAYYLKVRDRIDHNRACLSVARKICRRACHILKDLGDAAMAPPKAPSARRDPQAA

SEQ ID NO: 340088 - protein, 456 aa, unidentified
MPRGRRRTTRAATPPILTPDAAGIDIGATEIYVCVPLERDPQPIRRFGTFTQDLLAVATWLSQCGVTAVAMESTGVYWIPLYQILEARGFAVCLVNARHVKNVPGRKTDVQDCQWLQYLHAVGLLRASFRPPETVCAVRALLRHRDNLVRLAAVHTQHLQKALNQMNLQLHHVLSDITGVTGLAILDALLAGERDPQVLAGHRDHRIKASRETIAKALVGDYRPEHLFTLRQSLDAYRQYQRLIGECDREVQALLATFESAIDPAAAPLPPATTTHRKPQGNAPRFDLRPELYRILGIDLTQVAGLNSATVYTLFAELGSDLGKFPTAKHFASWLGLCPDNRISGGKLLAVKTRHVKHRVAQALRMAAQSLYRSHSLLGAFFRRMRAKLGAPKAITATAHKLARIVYHLLTTREPYAESQLAKAEDVYRKRMESRLHAQARALGFHLVPVTGQSVS

SEQ ID NO: 340089 - protein, 337 aa, unidentified
MMYGGIDLHSNNSVIAIIDDADRVVAQKRLPNDITKIIGFLARWQDQLAGVVVESTYNWYWLVDGLQDAGMQVHLANTAAIKQYEGLKHSGDETDAQHLAHLLRLGILPTGTILPREHRALRDLARKRMQLVQSCTAHVLAVENIMARQLGGRITSNQIKRLTDDTIDSLPLAADVGLAIKANVAVIATLQSQIEVLEKRLQERVKPRPQYGLLTSVPGIGQTLATVILLETGPIDRFADVGNFASYARCVDSVHTSNRRKKGEGNVKNGNTYLAWAFVEAANFARRFCPEAKRFHERKKARTNNIVATKALAHKLARASYHILKEGKPFEATRCFA

SEQ ID NO: 340090 - protein, 337 aa, unidentified
MDYFAGLDNSMDETHVCVLDRDGAVVYEGTSASMAEAIAGELAKAPSCRRIVFETGRMAPILFHGLSQLGLPVVCVESRQAYQALKSLATHKTDRNDARGLAHLARTGFFRPVHVKSLRAHAVRSLIIRARSWWGQRVTLENQIRGLAVVFGIRLPRALTAAFVNQALKASEGIAGLSAAMRGLIAARTAVRTAVAAIDADMRRVTRASAACRRLMTIPGVGQLTALAFVAAIDDPSCIRRSRDIGAYLGLVPRRYQSGEVDYVGGISKCRDRRVRTLLYEAANVMLTRYKGQLKLKDWAFAIAKRSTMRKARIALARRLAIIMHAMLRDGTEFAPA

SEQ ID NO: 340091 - protein, 439 aa, unidentified
MGRRCIGLDVHREFAQVAIWEDGRVRHAGQVVITGEALRVFADSLGPEDEVAVEATCNTHAIVRAIEPRVARVIVSNPMKTRAIAEAKVKTDKVDAAVLAELLAADYLPSVWVADEHTQALRRQVARRTQLVRQRTRLKNQIQAILHRNLVARCPFSDLFGIKGRCWLADQHLPADEEHAIDALLRQLDFHGQELRIIDSALGRIALNRGEVRRLMTIPGVDATVALSLMAAVGDFGRFRTPEQLVSYLGLNPRVKQSGGKAAAHGRITKNGRAHARGMLVEAAFTASKVPGPLRAFYQRVRARRGIQIAIVATARKLTVLCWTMIERGEDYAFARQSLTEKKLRALELRAGLPARRGRKGTAANYSLKDVRRRELELAEQAEHAYRQQIADWQARGPSRTKPGVAAANGTRLKRPSEGQAARQATVPEPALRSGSTTP

SEQ ID NO: 340092 - protein, 356 aa, unidentified
MSYDVKYIGMDVHKEAIVIAVQNESGKLVMESVIETKASSILQFLHGLRGELHVTWEEGTWAAWLYDLLQPHVQHIVVCNPRRNALLKEGSKSDKVDAQKLSDLLRTGMLRPVYHGENGLRTLRELGRSYQTISKDLTRVMNRLKALYRGWGIPCAGTQVYAARSREEWLSKIPHAGVRRRAELLYQQLDGLQALRREVRPEFLAESRKHKAAKLLRQIPCIGPIRAARLIALMQTPHRFRSKRQLWTYSGLGIETHDSAQYRFVRGQLQLSKKPQQLRGLNRNHNHEMKEIFKSAATRASCGRGPFYDFYAALLAKGMKPEMARLTLARKIAAITLTLWKKEERFDAEQLKTQAA

SEQ ID NO: 340093 - protein, 355 aa, unidentified
MNEAKYIGMDVHQATISAAVRDSSGNLVMEATLETKAETILQFIRGLGGSLRVTLEEGTWSAWLHDLLKPHVTEVLVCDPRKNALLRVGNKNDREDARKLAELLFLNKLNTVFHGETGIRTLKELARSYLTLTRDLTRMMNRLKAIYRSWGIACGGQQVYAPRYRAEWLAKITEAGVRRRAEIYYQQFDVLAALRQEVRRELLAESRKHPAIRLLRQIPSIGPIRAALLIALMQTPHRFRTKRQLWAYCGLALKTYDSGEYRFVGGQLKRSKKNPAIRGLNKNHNHDLKNIFKGAATRAAAAAGPFQKFYEARIANGMKPPMARLTLARKIAAITLLVWKKGVRFDAEQLKQQAA

SEQ ID NO: 340094 - protein, 361 aa, unidentified
MKCVQRNKLDFSGQNIYVGIDVHLKSWSVAILSEHSVLKRFSQSPEPELLHKYLVSNYPGANYFSVYEAGFCGFWIHESLTDLGITNIVVNPADVPTMSKEKLRKTDAVDCNKLARELRSGSLEGIYVPGTATLELRSLIRMRTLIVKDSTRAKNRIKSLLHFHGVKISEEFIRCSSHCWSKRFLRWLHNLELSTEYGKKTLELHLEQFIRLRKMLLQETRAIREISRKAPFAKPIRLLSSVPGIGITTAATLMVEIDDIVRFNSAEHLASFIGLVPMCHSSGDNDAVSNMTIRRHFMLRWLLVESAWTAIRIDPAMTMAYTEYRKRMNPQKAIVKIARRLVNRVYFVLKYEKEYVSCIVK

SEQ ID NO: 340095 - protein, 439 aa, unidentified
METIYRRCAGLDVHKKSIQVCVRVMDDDGSVNQRTQRFGTMTGDLLRLRDWLSEWKVTHVTMESTGVLWKPVFNILEEAFTVWVCNAQHIKQVPGRKTDVKDCQWIAQLMQHGLLHPSFVPHRGLRDLRDLTRERAQMMGEVTRVKNRIHKVLEDANIKASCVMSDVLGVSGRAIVAAIVEGTQDPEALAELARGRLRAKTEALREALEGRINDPHRFMLREHLRHLKALEILVAELEARIDTLWASDAINPPEVREQTPPSGNEEVSGPEPFVPPFQDCVELLDSIPGVNVRIAQTLLAEIGTDMAQFPTGAQLASWAGLCPGNCESAGKHHSGKTRHGNRWLRRILTQAAWAVTREKPGSYLKSLYRRVVRRRGKKRAIIAVGHAILLTAHCLLSTGAYYYDLGQDYFDHLNQERLTRYLVKRLESLGHTVELQPAA

SEQ ID NO: 340096 - protein, 430 aa, unidentified
MGLIVPSAMHPEQADQPLPYEWFVGIDWGSQQHQVCVLDRDRRLVGERAVDHDGASLAQLAAWLWTLSAGQPQRVAVAIEVPRGAIVEGLVERGFHVFAINPKQLDRFRDRHSVAGAKDDRRDAFVLADSVRTDRPSFRRLHLDEPHLLLLRELSRVEETLLEEFRRSANRLREQLHRFYPQMLQLCSAADEPWLWDLLHLAPTPAHAMLLSEEQVQRVLKVHRIRRIKAPAVLACLQAPALPVAPGTPEAAQAHCGFLLPCLRVLAEQLQACSQQVSALLRTMADEPGEGESPSDVAIVQSLPGVGRKITAWLFAEAAQPLAERDYQVLRTHGGVAPVTKQSGKRRQVVMRHGCNPRLRHALYHMARVAMQRDAHCSSVYAALRAKGQRHGQALRNIGDRLLRILMAMLRHRTCYDASRMRREPVVQMG

SEQ ID NO: 340097 - protein, 349 aa, unidentified
MELDTIGIDLGKTVFHLVGLNRAGEVVVRRRLSRPQLLRFTGNLRVRLIGMEACGGSHFLGRRLREQGHEVRLIPAQYVKPYVKTNKNDYIDAEAIAEAVGRPTMRFVPIKSDEQLDMQSLHRVRDRWVARRTSVINQIRGLLLERGITFRKGRRHAEACLPGILEDADNRLSGLLRMLLAQLQGELRQLQSQIDEADALIAKAAREHEPCQRLMAIPGIGPLTATAVVASIGSGAEFRKGRSFAAWLGLVPKQHSTGGRQNLLSISKRGNRYLRRLLVHGARAVLQCRDKQSKGLNVWLGQLASRAHTNIVAVALANKMARVAWAVLAKSEAYRPPLLVTQAEAMVCN

SEQ ID NO: 340098 - protein, 397 aa, unidentified
MYIVGIDIAKRKHEAAVIDGEGAVIIKPFSFTNNCSGYNRLLAMLAKAKLPLDEVSFAMEATGHYWLALFTRLQKEGFRVQVINPVQTNSIRSFYIRQAKTDPRDALLIAEVIRFGHFSESTLHPENIYELRELCRGRHAIVSMQADVKRKVVALLDQVFPEYETAFANMFGDTSMAILQTCPTPKELSEMRLEELCHLIEVSSHKRFRMAKAQELQALARNSFGFAMAGDVFSTMIRLYAKHLDFLKQQVREMDRKIAEIMETLDTPITTITGIGPTLGAYILSEIGDISRFSSAAKLAAYAGIDPTMRQSGEYNGVRNRMSKRGSPYLRHAIWLAASSAVLHDPALKLYFQKKRDEGKPYMASVGHACRKMVSIIYAVMRDNKAYTPCIPNEISA

SEQ ID NO: 340099 - protein, 350 aa, unidentified
MQPQITKIDFSGQTFYCGIDMHRKSWTIAIEAEDVSMRPFVQDADPDILVNHLKKNYPGASIIAGYEAGYFGYWAQRKLQASGIECLVINPADIPTTNKEKDQKRDPRDSKKIARALRSKDVNAIWIPPVSLQEDRQFMRTRKSLSKDLTRIKNRIKALLQMNGIQYPVQFSKRGSHWSRRFIQWLEGIRLTEETGTESLQTLLRNLNFLRSELLAISRRIRKLAQSPSYQAVYERLIKVSGIGMVAAMTLLTEVGDIRRFPSTDHFRSYLGLIPSAHNSGEKEHSGRITSRANRMLRDILVESTWVAIRTNTTYLSFYRQYRSRMKDNNALIRTAAKLANQIYFVFKME

SEQ ID NO: 340100 - protein, 377 aa, unidentified
MREKLRFLGLDVHAETIAVAVAEPDGEVRSLGTIANREESIRRFIRRLGSPEHLRACYEAGPTGFVLYWQLTQLGVKCDVIAPSLVPKKPGDKVKTDRRDALKLARSHRSDDLTAVWVPDEASEALRDLVRAREAAKRDQLRAQHRLTKFLLRTGRRPPLGVKAWTERHAEWLQQVRYTHPAQEATLLDCLHEVQHMAERVKRLEKSIVEVIQLAPASMQEVIRGLQALRGIAHLSAVTIAAELGNITSRFEHARDLMGSSGAFPDENSSGKRIRRGGITKSGNAHLRRIVVESAWSYRHRPAIGARLRRRQEGLPAEITEIAWKAQNRLHKRYMQLMARGKEQRKTMTAIARELLGFIWAIGIKAEATACKQQMAA

SEQ ID NO: 340101 - protein, 346 aa, unidentified
MNSVGIDLHRKRSHVAAIGDEGEVLLSRRITNDPETFLQLLSELDGESQIALEATYGWEWLAELLEEADHELHLAHPQRTKAIASARVKTDSVDALTLAQLLRADLLPEAYIAPRELRDLRELLRHRIALTQMRSALKNRIHAILAKHGIQRPMSDLFGKSGREFLAELELREPPRRRLDSLMALICDFDREITQTTREIDGRAKRDDHVPLLCQIRGVGPYTAMLIIAEVGEVERFPTARKLCAWAGLTPTVRSSDGKARLGRISRMGSCALRWALVEAAQKSVLGGGPLRQRFERIAKRRGRNVAKVAVARQILTLCYYGLRDGEIRCLEPGQARASRAMAASS

SEQ ID NO: 340102 - protein, 398 aa, unidentified
MTESSDYESVQVFIGVDVGKDTHHAVAINRSGKRLFDKALPNDENKLRSLISDLKQHGQILLVVDQPATIGALPIAVARSEGVLVGYLPGLAMRRIADLHAGEAKTDARDAAIIAEAARTLPHALRTLKLADEQIAELSMLCGFDDDLAAQTTQASNRIRGLLTQIHPALERVLGPRLEHPAVLDLLQRYLSPEKLASLGEKKLAAQLCKLAPRLGKRLAADIAQALAEQTVIVPGTNAAAVVLPRLALQLITLRKQRDEVALEVEQRVLAHPLYPVLTSMPGVGVRTAARLLTEVACRAFASAAHLAAYAGLAPVTRRSGSSIRGEHPSRRGNKALKRALFLSAFAALRDPLSRAYYTRKMSQGKRHNQALIALARRRCDVLFAMMRDGTFYTPQGS

SEQ ID NO: 340103 - protein, 420 aa, unidentified
MHAPTDKSFTAYVGVDWADSKHDICLQAAGSEQREFDCFPHRVERIEEWANSLHQRFGGPIAVALELVKGPLVYALQKHDFFVLFPVNPSMLAKYREAFKPSRAKDDPTDAELALDLLVRHPERFKALQPQSVEMRTLMSLVEQRRRLVNDKTRLTNRLRNTLKQYYPQTLEWFDHINTPIFCDFISRWPTLTQVKRARRTTLERFFHEHNMRFAHLLQARLKSIKAATALTFDDAVITPHRLQALVLVDLLRVTLQAIQRFDEEIAQLAPKHADYALFSALPGAGPSLAPRLLVAFGEQRERFSNAAELQKYSGIAPVTERSGRKHWVHWRWQCPTFLRQTFVEWAAQTINKSFWAGAYYRQQRAKGCSYQVALRALAFKWIRILYRCWETRTPYNEAEYLRALERRGSPLLKQFATSE

SEQ ID NO: 340104 - protein, 477 aa, unidentified
MNKTQGNNLQAPGTKTKRRKRNKGMCLEERPILEPNAAGIDVGAREMFVAVPPGRDENPVRVFATFTEDLERLTDWLEQCGVTTVALESTGVYWIPLFEILEQRGIRPCLVNARHMKNVPGRRADWHECQWLQFLHSVGLLRAAFRPGQDICAVRTLVRHRNELVSAASQHVQHMHKALTQMNLQIHHVISDITGLTGLAIVDAILAGERDGAELAKLKDPHIKADTETIRKSLEGNWRPEHLFTLGQSRALYRIYQQQIVSCDLEIERMLGEFEPRVDPTQKLLPPDGKRNRAGRKRRRKNGHPHPEFDLRTEVYKLFGVDVTQIPGLEENALPLFSEVGRDMSRWPSAAHFVSWLALCPDNDISGGKLLWRGARRVKNRAGHLFRLAAFSLHHSPTPLGNYLRRMKTKLGPKGATMATAHKIAVIFYVMVKKQVEYDQSIWATRDAQREKRLETKLKRQAKQLGYELVPIQPKAA

SEQ ID NO: 340105 - protein, 434 aa, unidentified
MDIVHPRVAGIDVHKRVVWVAVRLPGGTPGERKVMVKSFKTFWRSLQKMTGWLAELGVSDAAMESTGVYWWPVYHALAQAGTIEVCVCNAAHMRNVPGRKTDIRDCQWIAELHEHGLLRPSFIPGQQVAALRARTRYRKKLIEHRASEGQRLSKVLEDAGIKIDSVASELLGVSGREMVEALIGGERDPSRLAGLARGQLRAKLDDLQMACDGRFTAGHAQLCRIHLDAYDLLTGQIATLDQLVGQAAEPFAAVIARLVTIPGIGPRLAQVIVAETGGDMARFATSARLAAWAGLAPGDNESAGKRKRAAARKGNPHLRAAMVEAAWAASRTASRPGARFRRLARRFGRLNIKKAAVAVAHTLLCVAWAVMKDDSDYAEAGADYYDLRDQRNHEHLIRHHQQALARLGCQVTLIPPGDGQAAGTGSGSPQYPAA

SEQ ID NO: 340106 - protein, 319 aa, unidentified
MAEEVYVGIDVSKAELVVAARPGGERMTLTNDRAGIKRLVGRLGELKPRLVVVEATGGLQRQVVAALWTAGIAVAAVNPSWVRNFAKGRGLRAKTDRKDAELLALYAERERPQVRPPADAETQALQELVMRREQLVEMLVAEEHRLTHALGPVRKELRHHIAYLEGRLKQIAEDIDKTVRRSAGWRRKSEIVRSVPGFGKVFCSMVLAKVPELGALNRKQIGALVGVAPVPDDSGTRHGRRAIAGGRFEVRNKLYMCALVASRANPVLKEFYQRLVARGKPKKLALVAVMRKLIVTLNAMLKTNSMWRPPCLAVSVREN

SEQ ID NO: 340107 - protein, 311 aa, unidentified
MEHSHFVGIDVSKDHLDVHVRPTGDSFRVRYDDAGLVTLVEHLRPVAPAVLVLEATGGYEVTVVATLARAALPVAVVNPRQIRAFARATGQLAKTDTLDARILALFAEAVRPAARPVPNEQADALGELIARRRQLVDMLGAEHNRRRLLRDRRLQRHLDAHIAWLEEALRRLDQDLTTLIRSTPVWRETDDLLRSVPGIGPVTAGTLIADLPELGRLDRRRIAALAGLAPIARDSGAFRGRRMIMGGRPHIRRVLYMATLTAIKHNPAIRAFHRRLVTAGRPGKVALTAAMRKLLTILNAMLRDRRPWHSA

SEQ ID NO: 340108 - protein, 354 aa, unidentified
MDTIYIGVDFHARQQTICYLKTETGELVTLELKHQDKEKVRAFYAEFHGQVIVGLEASGYSPWFERLLEELGHEVWLGHATEIRRRARWRQKNDRRDAELILDLMLHDEFPRLHRPSVQSREVMRMLRYRQKLIKMRTMSKNSLQALALQAGLAKRSSLFTRDGQQQLAMAEMSPAMQWQREHWLQLLAPLNQQVLASMAWLKAAGKDDVCIARLRTHPGIGLLTSLCLVHTLQPVDRFRNTRKVAAYAGFDPVERSSAETKRFLGISKAGSRLLRHLMVEAANVAVRRDDELKRFYQRLADRRGRPKAKVAAARKLLIRAYIMMRDEIDYAEFRRRAVAARLARLGHGPKCPG

SEQ ID NO: 340109 - protein, 384 aa, unidentified
MLDREQIQTNLPEVAVFVTLELSKSAWLLAAQAVPSGKTSAHRVSGGDVEGLLALLRRLQAREQRSSGREVAIILGYEAGYDGFWLQRRLAAEAIACFVMDPGSLQVDRRARRAKTDRLDAAMLLRALMAWCRGDHAACRMVQVPSVEREDARRTHRERQRLIAERVQHVNRIKGLLATQGVYTFQPLRRDRWERLKEVRTGDGRDLPQRLRGEIEREFRRLELVLEQVAAAEAERDAAVADPAVTDADAEKVARLARLGGIGTELATVLVREALYRPFANRKQVAAYAGLTPSPYASGDRQRDQGISKAGNPLLRKSMVELAWLWLRYQPGSGLARWFVERVGTGRGRIRKITAVALARKLLVALWRYLATGLVPEGARLKAA

SEQ ID NO: 340110 - protein, 420 aa, unidentified
MSNSNIWTARVQEPGQRLYAGVDLALEKNAVVILNQAGQVVDRFQFTQDREGYAYFEQRGERVRQREQAQEIEVAMEPTNYFWKLLAQELEEKERVYRLVNAYTVKKHREGNQLDRSKDDWRDAREIAELARQGQCTQTHLQQGVYEELRQYATLYWQVTRAMQREKAIVCGLVGQVFPEFFCVFQKATSETAQAILQSGVAAVEICEGSLEEFVAGVRAVYPGRRLAVTKLRRLYARAATSIGVRQGVPAIQFALRLHLRILNNLDQQCKQLRAALQGCLSQVPDAAYLLSMPTVTSVTVALFFAEVGDPQRYRTAAQWVKLAGIQPVPNRSGRKQRSQTPMSHQGRPHLRTLLYYAALQLINHDPHFIQLYTHLQRRSTNPLTRMQALGVLMNKLLHVWWALIQQHTLYQSVLSPAKA

SEQ ID NO: 340111 - protein, 350 aa, unidentified
MWIIGCDYHPGFQQIAYVDSETGEFQEQRLAHREEAEKFYRDLAAQGMKVCVGMEASGHARWFERLLAELNIELWMGDAAKIRAKRVRKKKTDREDARHILKLMLKDDFPKIWVPSWENRDLRQLLWHRHRMVQMRTRIMNQLQAVVLNEGLRCKKRLWRKHGRAQLESIRLAPWASRRRRDLLELLDRLNPTISELTQRIEQQVEQFPVAQRLMTHPGVGALTALAFVLIIGEAERFECGKQIAAYLGLVPEEDSSGESRRLGHISKQGSGLMRFFLVEAAQVTVRSDAEWRNKFFHLAMRRGRKIAKVAMARRLAVRLYWMWRQQWDYAQLKKFGPHAGQPGTGVGVQ

SEQ ID NO: 340112 - protein, 367 aa, unidentified
MKKISTAATKQSKNFSEQKLTIGLDLGDRSSWYCLLDEVGEVRVEKKLSTTPKAMREVFGSLPHCRIALETGMHSPWVSRALSELGHEVIVAHARAVRLIGESRKKDDRLDARTLARLARIDPQLLCPVKHRSAQAQADLTQIRARAGLVRARTALVNTARGLAKSYGERLRGCNVRNMNPEKAEGLSPELQSALEPLLAAIESLGERIRECNERIEKLAQESYPQVALLKQVKGVGTLIALTFLLTLEDAHRFRKSRDVGCYLGLQPGRRNSGQSEPQMHISKEGDPYLRTLLVQGAHHILGPFGADSDLRRWGLKLAERGGKNGKKRAVIATARKLAVLLHRLWVSGEVYEPLRHSQPRAMPAAA

SEQ ID NO: 340113 - protein, 334 aa, unidentified
MPIHEKVVVGLDLHLQRTYGTVMALDGRILRQERFPTTREALARFLSGLPEDTPVALEAQGFCWPWIDYIEEFGHRPLLVNPIKAKQRAEDLKTDRVDSEVLAHLTRMNWLPTVYVPTKELRELRNLVRHRCYLRKLSTALKNRTWSEFRKRDLRPQASMQSMRGRRQLWDYGIHEVRQNLELIEALEARIKATVRLLKQRCEGTRVIELLRTIPGIDFITAVGLYAEICDIRRFPNPERLAHYAGLVPRVRQSGERTWHGRETRGNRWLKWMLIEAAWAHIRSHPGGRLARVFRDALKRKRSKAKAIKVVARKLVNVVWAVWAYGQPFAPGKA

SEQ ID NO: 340114 - protein, 356 aa, unidentified
MPIPIKRYKGMKKIFIGIDFSKEKFDATVIKAEGVEERAERQHDVFDNKVSGFRRLLRWVKSVVDEQDAGLWLFCGENTGGYSRALCNYLYGSGYDMWLENALSIKRSSALQRTKSDKADAGIIAEYAMRNYDQMRLYKPLDKNLERLREIFLYRHNLVKLKASMTVRKGEKKQTQEKSDISRFMAMSSKHLISEFNKKIAECDMRIENIISEDEELRRNFEIITSVPGVGTQNAVCLMVYTDNFSRFDFDSRKIACYYGVAPFGRQSGTSVNTPPHVSPFANKLIKALLTQAALASIHFCPQMAIYYHRLVEVGKKKPVAVNNVKNKLLHVITAMVRNGEKYNPDHDYHAALKAA

SEQ ID NO: 340115 - protein, 344 aa, unidentified
MTQYKRIGVDTSKAVFTLHGIDQQDRPVLRINLRRAQMNPFFAKLPPTEIAMEACGGAHHWARELAALGHKVCLIPPQYVKPYVKRGKNDRNDAEAICEAAGRPGMHFVPMKSVSQQAQGMVLKVRETLVGQRTLLINTLRGHAAEFGVIAGRGLPQVGPLLSAIEQQTNLPPEARDMAALLGRQIEDLDTRIKELDARLTAAHKANAVSQRLATIPGVGPVTALTLAIEIDPEAFESGRHLAAWAGLTPKEQSTGGKQRMGGISRAGNERLRVLLVAGATSVIYAAMKPGSKQMTDWLRALLQRKPRKVAAVALANKMARVAWALMASGETYRRPSSAGATGA

SEQ ID NO: 340116 - protein, 359 aa, unidentified
MLVERTSVGLDVHARSVAAAAIDGVTGELKRARLTPSHDHIRSWLSELAGPVAVAYEAGPTGFGLYRSLTALGIRCVVAAPSKLQRPSGDRVKTDARDAVHLARLLRLGELTAVCVPSVDQEAARDLVRAREDCRGDLMRARHRLSKLLLRQGIVYCGGNAWTDAHDRWLRRQRFDSPATTTAFESDYDTILTVAARRDRLATTIAELAADSEFTPVVRRLACLRGISTLTAFALAVQIGDWHRFTGNTIGSFIGLVPSEHSSGASRVQGSITKTGNTHARRLLVEAAWHHRAPYRPGKTMHQRWDLAPAAARARGDAGNRRLHARWITFNLRRKRLVIANVAIARELAGWCWSLAVMD

SEQ ID NO: 340117 - protein, 408 aa, unidentified
MERYYLGVDWADEFHQVWVSDPEGNKVIEKKVVENVEGLTEFGRWLDENRAKGIELWAAIEKPHGRIVDFLLDHGVVVYPVNPKALDRARDRFRMSQSKSDSFDAYVLAEFVRTDHGHLRALDPNSDPAQELKLLTRDQYRLVRQKTRLLNQLSRTLKEYYVRPLEVFSDLETNIALDFLQEYPTPQALAKLTRRQWNRFSKREHHLGEDHCKELWEKLNQPQLEVPEHVVRAKARLLAVLVVQLKTLRDAVESYNKRVKSFFACMPAAELVRMLPGAKTGTIVATLWAELGDAKSRWESFRHLQAEAGVVPVTKASGKSRVVQFRFSCNKIMRHAAYWLAFVSLNRSEWANQYYRDQRAKGHSHHQALRALGAKWLKIIFVMWRDHKPYDENIHLANITRQKMRQAA

SEQ ID NO: 340118 - protein, 369 aa, unidentified
MDKGIKAYVGLDVHKESIAVAVADQTGEAARFVGTTAHDLQRLLKVLQRLGGAGELKLVYEAGPTGYGLQRAVVAAGYACEVIAPSLIPKRCGERVKTDRRDCVRLAELARAGELKAIWIPQPEDEAIRDLARAREDAVNARTQARHQLKGFLLRHGLRYAAKTAWSKRFYRWLGTLAFDHPPTQISFTEYQLAVQAADERVGRLTQALEASIAGWRFESVVASLRALRGIDTVSAIGLVAEIGDIERFAHPRQLMAYLGLVPSESSSGDRIRKGPITKTGNAHARRLLTEAAWNYRFKPRIGYRAQARQEDLPEAIRALAWKAQLRLSARFARLQARRLQINKACVAVARELAGFIWAIAKASPSVRI

SEQ ID NO: 340119 - protein, 413 aa, unidentified
MKRILERCAGLDVHKKELTACRLVPGPHNTTVSEVMTFGTMTKELLALVDWLKQGGCTHVAMESTGVFWKPVFNLLEGEFEVLLVNPREVKQVPGRKTDTGDAAWLAELLQCGLLKGSFIPPAPQRQLRDLTRYRTTLVQERARILNRLQKVLEDANIKLASVVSDIDGVSARMMLQTILAGETNVTFLAELAKGRLREKRAELEQALTGLIKEHHRFLIAEHLSHMDYLEEAIARVSAEIEERLRPFQLESDLLDSSPGINLRIAEIILAEIGPNPFPTFEDADHLASWAGLCPGNQQSAGKRLSGKTRKGCAALRSALVEAAHGAAKTKNTYLSAQYHSLVRRIGKKKALVAVAHSILIAVYHILTRKEPYRELGPRYLDELRRPQRIRRHVRCLEQFGFEVVLKPLPAAA

SEQ ID NO: 340120 - protein, 318 aa, unidentified
MAQRGGLVGIDVSKGKVDVAIRSAAAAATFTDSPEGRRELLKWLTQHGVRKAVMEATGGYEQKWAKLLGKAGMEVAIVDPKRVRHFAKSAGRLAKNDPIDAQMIAWFGEVFDDLTGKPLDDERQELEQLVTARLGAVRLKEQIESWGEHEQPKVVQKTHQALLKAVVAELGKLEVAIAAKIEKVDRFAERAEIIQSVPGLADVAATGLIAFLPELGRVDRQAASALVGAAPFDDDSGERRGERHIKGGRKKLRKLLYMPIVGAATQHNPVLKAYYQRLLARGKKAKVAFMACMRKLISILNAMLARGEKWDPTKHAIA

SEQ ID NO: 340121 - protein, 459 aa, unidentified
MSRIKTGKKNCSRSQTDQAPPTSTPPQPRFVGVDLHKQIATFHTMAEDGKTLEQGRFDVNPEAILKFANEKLQAADSVAVEVTSNTWAFVRLIRSHVDKVVVSNPMKTKAIAEASVKTDKVDAKVLAHLLRCNYLPSVWTPTETIENSRALAARRTALVGQRTALRNRIHSVLARRLVVVPAGGPFTQAGLTWLQELSLDPVDRTLIDTDLRLLEGIAQEMQEIEHLIVKESYDDPDIRLLMTLPGLDFTIAQALKACLADISRFPNPDKAASYLGLTPRIKQSAGKCYHGSITKAGSSQTRWLLIQAAQSVGRTPGPLGAFFRKLEKKKNRNIAVVATARKLVTIAWHMLKNKEPYRYAVPRTTENKLGTLRVRATGEKRKGGSPKGPKPEPRFENSDSRRIPSLDEIYTREDVPGRRPLSEGEKRMIREAGVENFVAELGQTRIVPRKKRVPASTPQ

SEQ ID NO: 340122 - protein, 355 aa, unidentified
MNDAKYIGLDVHQATISVAVLDSAGKLVMEAILETKAETILQFLRGLRGSLHVTLEEGTWAAWLHDLLQPHVTRVLVCDPRKNALLKAGNKSDRIDARKLAELLYLNKLNPVYHGEQGIRTLKELARSYLTITRDLTRVMSRLKAIYRSWAIPCAGQQVYAPRYRAEWLAKISEAGVRRRAELYYQQFDSLAALRQGARRELLAEGRKHLNTRLLQQIPSIGPLRAVLLLALMQTPNRFRTKRQLWAYSGLALRTYTSGEYRIVGGQLKRSKKVLAIRGLNINHNHDLKNIFKGAATRAASTAGPFQDFYEACVARGMKPHLARLTLARKIAAITLLVWKKGVRFDAEHLKQQAA

SEQ ID NO: 340123 - protein, 430 aa, unidentified
MEKQIGFDIWCGLDVGKQAHHACALDAAGNRVFDKPLPQDQSKLEDLFGRLSEHGRVLMIVDQPNTIGALPIAVARSMGITVAYLPGLAMRRIADLHPGNAKTDARDAFIIADAARTMPHTLRRVDVGEEALAELKVLVGFDDDLAAEATRLSNRIRGLLTQIHPALERVVGPRLTTKQGLAVIEHLGGPQGITAATKSRLLRIVTKANPRGAQSFADAITTALAEQTVVVAGTAAAEKVLPKLAASLRQTLEQRAELALQVEKVVDDHPLAEVLTSMPGVGVRTAARILLDIGDASSFPTAGHLAAYAGLAPVTRRSGPVSGASSPPGQATSTSNEHSSFPRSPRSDLTPPAAPTTTANEPRARSTTPPSSACPVAAAMSCSPCSGIESPTGLPPQHQNPHPDLWPLDEEHRDTPRTTKTGPPRGDDPV

SEQ ID NO: 340124 - protein, 398 aa, unidentified
MFYLGIDIAKHKHYASIIDQTGKPITKPFPFRNHKEGGQALLNWMYRYIESPTEIMIGMEATGHYWLAVYSFLLDHGFSVVVLNPIQTNAWRKGTEIRKRKTDAIDATMIADIIRFGRFVETPLVDEKMFALKQMSRFRNALVSNMSDLKRKALVVLDQTFPEYQSIFSDVFGKTSSQILLEYSSPSDYEQISIDDLTQIIEQTSRNRLGKKTANKLMELASNSFGVTFCKNAFSFQLKMLMEQIRFIEDQIKECEEEMSQLLIDLDTPIMTIPGVGPILGATILSEIGDIHRFDKPSKLVAYAGIDASVSQSGQFESSGTSISKRGSSHLRRALFQAAITAHKHDPVLKAFYEKKRKQGKHYYVCIGAVARKLCYIIYAILKSNKPYEVPPHSPVET

SEQ ID NO: 340125 - protein, 417 aa, unidentified
MSEYAALVAIDWADQKHAVSLYDQSTGLREQTIVKHTPQALQEWALGLRQRFAGQPIAVCLEQSRGPLIYALLQYDFFVLFPINPATLAKYRQAFSTAGGKDDPSDADYLLDLLQHHRDRLRVWRPDDEKTRTLSLLMEQRRRLVNDRTRISNRLTALLKGYFPQVLDWFEDIRTTLVCDFLARWPQLSLLQRARPATINQFLRSHHSTSKPTNARRLAEIKSALPLTNDAAVITSSVLNVKVLVAQMKIVIAAISEYDRHIEALCLTHEDYQLFAALPGAGLIHAARLTAALGSDRSRWQSANELLCFSGIAPIIERSGKQFRVRWRYFCPKFFRQTFHEFAAQSIQDSFWARAYYYSQRAKGKDHHAAVRALAFKWMRVIWKCWHARTPYNEIVYLETLRKKGSSLLKFAADYQQ

SEQ ID NO: 340126 - protein, 339 aa, unidentified
MYYTGIDQHKHTSYLTTVDNKGVIIKQANLKNNNHDILNYFHQFGDQNIATVETTGGWYWLSDLLKENNIDLKLAHAKYVKAIAYAKVKTDKVDSHILAQLLRMNFIPEANKIDEDLRPLRDTLRARLRLTQKRTSALNFMNRMLEKFNIQNPSELSEQYQLQYKQFFDQTEFLKQQILTLEKSLYPKLVPDQDIQLLLAIPGIGKMNAFTSFLEIYDINRFETVKNFLSYCRLAPQASNSGGKTKQSKTPKDGNKYLKIVFSDAAIHAIQYYPVIKKHHNSLLRKKNKQIAKYIISKEIASIVYYTLKTKKRFNNKFKNIDLQHIKSLQWPRITSPVV

SEQ ID NO: 340127 - protein, 308 aa, unidentified
MGHHTEVFVGIDTSKSRNAIAIADGGRGGEVRYLGEFSATEAAIRKLVAKLAAKCCHLTFCYEAGPTGYGLYRLLKSLGHDCLVVAPSLVPKKAGDRVKTNRRDAVSLAKLLRAGELNAVWVPDERHEAMRDLSRARQAVKKDLQGKRQQISSLMLRLGRIYPGKTTWGPAHMRWLMSQKLEHREQRIAFEELLEGIRQESERMERLEDAIREVVPEWSLAEVVAALQAMRGIDLIAAVGVLAEIGDLSRFQNARELMGYLGLVPTENSTGDKVKRGGITKAGNGRARRILVEAAWREMSEVLCKRPL

SEQ ID NO: 340128 - protein, 394 aa, unidentified
MHVGIDAHKRSCTVCVVEEGDVRDSFSFPTTREGISTFIERIPEQATVVVEASTTGKVLSRMLLEKYEVHMVAPPERKRSIKTDRRDAERIVREDMLQYLRRCYIPSAYIEELRFLILQQMQIGRKIGRVKNQIHALLERSMIHDLDGVSDIFGVEGLRRLAGIQLPAPDMVALGRYLEELKLLVVHHKELETELARIAESDEDALLLMSIPGIDFFTALAIKSRIGEIGRFPSKKHLCSYSAVVPGASNSGDHISTHNRVKHGDMVMKYALTCALRGAVAARKNSAVKRFYLKRRKRLGAQKAEVAAARKMACVVWKVLISHELYREEDKRLTVRKRRILSWKAKRQDRSNPGNIRQLAETLEGDIAILEKYPAGFDEKFGGNLSKESEKDWM

SEQ ID NO: 340129 - protein, 350 aa, unidentified
MSEQYAGKQIVGMDLHRRRSVLVRMTETGEHLETVRISNDPEYLRQVMERAGEAPEVVLEATYGWYWAADTLAELGAHVHLAHPLGVKMFAYRRVKNDQRDAADLADLLRMGRLPEAWIAPPATRELRGWVRHRAKLVGLRSSLKCQIHAVLAAAGVQVPMSDLFGAGGRQLLTNARLAPESRARVDSLLRLIEALDFEIELFATLVARRLREHPGYRALLQIPGVGPVLAAIFVAEIGDIGRFHRPEQLASWAGLTPKHHESDTTVHRGPITKQGSRLVRWAAIEAVQRVGGHTRLGQIRDRVTARRGRNIGVVAAARELTELVFYGLRDGRLRCLSTPAASNTVNPVA

SEQ ID NO: 340130 - protein, 394 aa, unidentified
MKLVGIDVGKNSHHFCVMDKETGEFNVTPTSFSNNKEGFDFLINSLKPYSKKSILIGIEDTGHYHVALLKFLLSNGYPVALINPKTTDLTRKMEGGITKNDKLDTITICDVLDTPERKKQYRITKVDRFDLYEQRQLTRHHHNLKEELNVYCNRLQKSIDLVFPEFNTLFSSKYSIVYMNLLKTFGSAEAIASTDIRTIRKCFEIKGRGNRISLTPEKLKECAKNSIGISSEVETIQIKHLVSQITLIKEQIAEIDKKIEEFSITNNSPILSIPGISHFSGTSILAELGDIGNYSKPSQIIKFAGVAPYHYESSQYNAQHTGITKKGSKYLRKTLYQIILTVINNNPVFKKYYLLKISQGKGHRCAQGHCIRKLLRIIYHLLETGQSFDPALLR

SEQ ID NO: 340131 - protein, 354 aa, unidentified
MIIIGCDFHARSQQIAMLDMETGELVEKRLEHENGEAKRFYEELKEPALVGIETTGYTRWFAEMLAGLGHELVVGEAGKIRAKETRKQKHDRRDAEHLLNLLLHGDFPRVWLPPAEERDVRVLVEHRHQLVGMRTRAKNGLQAIALNYGLRRRGRLWSERGQEELQKLPLREGMARRRADLLQLLRQLDVWVKELDQRIAEEVAHREDAQRLMTHPGVGALTALGTVLVLGPVERFPNSRHLTSYLGLIPEEDSSSDRQRFGHLTKQGNRLLRFLLVEAAQSASRYDPGLRRTYRRLAFRKGMAMAKVAVARKLAIRLYIMLRDRIDYAEFCRRGPDSSGRGSHAGMLGNVALV

SEQ ID NO: 340132 - protein, 339 aa, unidentified
MAQVTTLGVDIAKNGVCIHGVDAHGHVIVKKRLARQKVLPFVAQLPPCLIGMEASGGAHYWAREFTKLGHTVKLLSPQFVKPYVQSQKNDPNDAAGICEAVARPRMRGVPVKSVAQQDIQALHRIRERQIKARTALINQIRGLLMEYGIVIPQRASQVRHKLPFVLEDAENGLTITAREWLQALAEELQVLDQRLAATDHRIEQVFEADEACQRLAQLGGIGPLTATALVAAGGDATGFKNGRQFAAWLGLVPRQHSTGGKTTLLGITKGGNRYLRMLLIHGARAVLRVVDRKTDAWSRWLQGVQGRRGTNCASVAQANKTARVAWALLAKGDRYRRAA

SEQ ID NO: 340133 - protein, 421 aa, unidentified
MKVTYQICCGVDVHKSFLVATIVKTTGGIEPSYQKKRFSTFNNSILEFKQWLLDNGCHDICMESTGKYRVPVFNLLEDEINVVIANPKWVKAVKGNKDDAKDSKWIGDLFRLGLVKGSYIPCKKVRILREYTRYRYKLVSCRSSEKNRYQNALTVCNVALDSVVSDIFGKSSTSIIDYLLEQSGTSINHEEIASKLLRSLKSKEDAVIHSIEGYQMTDAQKYRMRLVRAHMDYITAEINDVDKMIENMISSNPDFENAVQFLCTIPGVKRDSAITIISEIGIDMSQFSSSKRLCCWAGLTPGSNESAGKKKSVRITRAGIYLKPALVQCAHAAVKSDKSPYYKKKYESLVKRRGKKRAIIAIARMILTAIYQMLSTGEQWNPSDLYKIDIPVALVEKKRQKLSSRLRSCCNGKDYFLLMNH

SEQ ID NO: 340134 - protein, 410 aa, unidentified
MESLIERGCGLDVHQATVVACLLISLAKGKVKKVIRTFGTTTRELLILRDWLLSEGCTHVAMESTGVYWKPVYALLEGSFEIVVANAQQIKKVPGRKTDVKDAEWIADLLRHGLLRPSFVPPQPIRELRDLLRYRRKLVESQTGERNRLLKLLEGANIKLASVATDVFGVSGQLMLDALLEGTQTPQEMAELAKGRMREKIPQLELALEGRLQEHHRFLLRLQRRRLQQVEKDLAELEQRIFEKLQPYAPQHTLLLEIPGVDRILAAVIIAELGIDMSVFGSASQAASWAGVCPGNDESAGKRRSGRTSPGNIYLKTALVEAANAAARAKGTYLREKFYRLKARRGHKRAAIGIAHKILVAAYHMLSDQVSYNDLGDAYLDKLSKTQLTRSLVRRLDRLGYQVSIRPKAA

SEQ ID NO: 340135 - protein, 282 aa, unidentified
MTKVIIGVDPHKLSATIEVVDGHEKLLGSGRFSTDQAGYTAMRTYAKTWPERVWAVEGSNGAGRPLAQRLLEAGEEVVDVPAKLAARVRLFDTGHNRKTDALDAHSIAIVAVRTTTLRVLRPDGELEALRMLCDRREELTRLRVQTVNRLHRLLAELVPGKAKQDLTALQAKAILASVRPRDVAGKTRRRIAAEELADLVAVEAKMKKATAELKALVKARGSRLMDLRGVGPVVAARTLADVGDVARFADRNRFASWTGTAPLDASSGEQNRHRLSAPGTGG

SEQ ID NO: 340136 - protein, 367 aa, unidentified
MDKAWAGVDAGKEFHWAHVLDDSGRELLSRKVENDEADILKLIHDALLLAEELVWAVDQPGGGAALLLALLWERNQRVLYVPGLTVDRARDAYRGESKTDARDAHVIADQARMRTDLGELEPGEEEIAGLQLLLGRRRDLVTDRGRTITRLREALVSSFPALERALDLNCKGPLTLFAHYQTPVRLRRAGHKRIATYLRNRGVKGANKVADKALAASKAQSVTPPAQEVASRIVADLAGEILALKGRIESIDEEIGQRFFARPEARILTSLPGMGPILGAEFLVAVGDVSAFESADRLAAYAGLIPAARDSGKRVGNNKRIRGGNKVLKRVFYQSAFASLRGSPESRAFYERKRAEGKRHTQALSSR

SEQ ID NO: 340137 - protein, 422 aa, unidentified
MVMEEITEEPGALTERVAALDIGKASLTACIRVPHEDKPGARRQEVRTYATVTRALLELRDWLVCQGVTLVVMEATSAYWKPPFYLLEDDITCQVVNARDVKNVPGRPKTDKLDAVWLCKLAERGMLRASFIPSRPQRQLRDLTRYRRTLTQERTREKQRAEKLLEDAQIKLSVVISDIFGASGRAMLDALIGGQASPHELAALARGKMRAKTSALQEALTGHFTEHHAFMLGMMLDRIDALTTQIATLTARIEQAIAPLAAQVAQLDEIPGIGTTAAQDLIAEFGADMSRFPTPGHLVSWAKFAPRARQSAGRAKAATTGKGNPWLGGTLGEAAAAAARTKTFLASRYKRIARRRGKNRALVAVGNSILTIAWHLLSDPAAHFTDLGPDWHDRLAPLRRKRQLITELERLSGKKVTLHDAV

SEQ ID NO: 340138 - protein, 410 aa, unidentified
MEVLHPHCAGLDVHKDTVVAAVRHMVGGTVRREVRTFKTTTKDLMALSEWLSAEGCTHIAMEATGIYWKPVWHVLGDGEFELVLANAAHVKNVPGRKTDVNDATWLADLMAHGLIRGSFVPDAHTQELRALLRTRKQFVRERSSHVQRLQKTLEDANIKLDSALSDVMGLSGRAMIEALIAGESDPDTLAGLAHRRVKAPPQELREALRGRVTKHHRFLLQLHLQQVDAIDAAISEIDREVDANVEPFRAAITLLTTIPGVSDLSATLIIAEIGNDMSRFPTEGHLISWAGLCPKNDESAGKRRSTRMRKGAPWLKTTLIQCAWAGARKKASYLQAQFHRLRSRRGVKKAIGAVAASILTAAYHMLADGTLYHDLGPDHFDRTAKATQTRRLLTRLHNLGYAVQITPLAA

SEQ ID NO: 340139 - protein, 309 aa, unidentified
MKEELVYLGVDIAKSYLDAAIGNEKRRFSNERIGHRELIKWVKQLSAAVQVICESSGGYERALVQGLARARVKISLVQANRVRQFARAAGILAKTDRIDAEVLCEFGKVMRPQTVTAAKLEQEQLRELESQRRHLTHLLVMEQNRGARLSDASVQRLNRSLINQIKKQIDQLDLFIKRHIDQSHQLSAKAAKLTSISGVGARTAALLLAQLPELGQLNRREVAALVGVAPFNRDSGRMRGKRTIYGGRRPVRHGLYMAALVAARHNPILRNFYLRLRAAGKPAKLALTATMRKLLIVLNSALKTDLNYA

SEQ ID NO: 340140 - protein, 344 aa, unidentified
MGEVSTIGLDIAKSVFQIHGVDRDGEVAIRKRVSRAKLLEFFAGLPPCVIGIEACPTAHHWSRKLQPLGHTVRLMPPSYVKAYLKRSKNDANDAAAICEAVTRPSMRFVPIKSEQQQSGLMLHRSRQLLVRQRTMLSNAIRGHMAELGIISAKGRNGTAELLKIIATENDDCIPAAARLSLDVLARQYVAIAAEIGVIEKRIHAWHRSCAESRRLEEIPGIGPIVATALVAEVGDWKAFSSGRNLAAWIGLVPKQHSTGGKERLGGISKQGNRYLRWLLVAGAMAVIRYARQHGTKRLWLARIMNRRAIKVAAVALANKIARIAWAMMVRGERFKEPRLLPAVT

SEQ ID NO: 340141 - protein, 410 aa, unidentified
MNAFCGIDWAENHHDIALVDEHGQLIAKRRIDDDAAGFRELLELLGEYGDTAAEPIPVAIETSRGLLVACLRATGRPVYAINPLAVSRYRERHTVARAKSDHADAMILANILRMDASAHRPLPADTELAQAIAVLARGGQDATWQRQQIANQLRSLLRQYFPAAIEAFHTAKSGLGGAEARVILAVAPTPALAAKLTKPRLRQLLTKAGRQRNIDAWTDRLHTIFAGEQLRQPLRVEAAFGEQARALVMQLDAACRAVDHLAEETAQAFAEHPDAAILTSFPGVGALTGARILAEIGDDRSRFAEARNLRAYAGSAPVTRASGKILVVMQRKVKNQRLAAAGYTWAFAALTASPHARAHYDRRRAVGDGHAAALRNLYNRFLSQLHHCLTTRERYRPERAFGEYRAPTAA

SEQ ID NO: 340142 - protein, 416 aa, unidentified
MASDQNTPILSIVHPICCGLDVHKRTISACVTETRSDGSVQHHLGEFGTFTDELVHLRDWLLELDCPIVAMESTGVYWRPVHNVLEGYAEVVLVNARHVKNVPGRKTDIEDSRWLAGLLRHGLVRGSFIPPKDVRQWREMVRLRRSYVEALSDFKRRTHKLFECANIKIDSVVSDLFGLTGANLMKLLVSKETITLDDVKGCARGHLIRKVEELYRSIQGFFEEHHRFLLASLLQTVKSLEGQISSLETRLKTLTNDHEALVERLDEVPGIDQIAARTILAEIGPSLEAFPTVEQLCSWAGVCPGNNESAGKRHSGKSPVQKHPLKTILVDVAWAAVKKKGSYYRAKYYRLKARRTAKKAIVAIAHRILKAIYAIIKHGVRYRELGEQYLDRQTQARKLAKLKIEARQLGYKVVPA

SEQ ID NO: 340143 - protein, 370 aa, unidentified
MHQPTTLFVGLDVHKESISVAYAADGRPEPAQFLGPIGTRQCDVDKMIRRLRSKAASLVFAYEAGPCGYVLYRYLTAKGFDCRVVAPSLMPKRPGDRIKNDRRDAVELARLLRSGDLTPVYVPTVEDEAIRDLCRARDATRITLRSAKLRLKSFLLRLGLHYTGRANWTAAHRRYLAKVVCPTPTQQIVFQEFILAVDEQVERLNRIEQELLDLAPSWRLYPVVEALQAMRGVQWVVAITVVVELGDLTRFDNPRQLAAFVGLIPSEHSSGPKRRLGAITKTGNSRARRVLIEGAWAYRYPAKVSTHIQKRIEGLPKVVQDIGWKAQVRLCKRFRRLSSRGKNSNVVVTAIAREMLAFMWAIAREVPIKV

SEQ ID NO: 340144 - protein, 442 aa, unidentified
MDEKAQIVTWESHVYFMGFDWATKHHAAVVVDRAGRVVLDLQISHTAEGWRHLREQLAQVAGPELQQVAAAIETTCGPAVEQLLGLGCTVYPLNPKSAQRYRDRKAPSGTKTDHLDAWSFADALRTDGHAWRRLKPEDPKIQELRLLCRDEVELIGQRTALVNQLRDAVEAYYPVILEAFEDWTLPAPWEFVQQFPTPEALQKAGKRRWEKYLHTHHLSDPRTYTKRLDIFGRATEFCGGPAATNAKSLLAISLSKQLQLLHRLLRSYRDRIEQLFRQHPDHDLFGSLPGVAEKLGPRLLSECGDDRSRFEDHEALQCYAGTAPISFQSGQIHRVKFRRACNKHLRTAVHQWADRSRFQCTWAQVYYDQKRREGKSHACATRCLGQRWLKILWKMWQTKQPYDEQIHTRNQTKHGSWVLALNQQNDASAKSLKKTMRKDLQT

SEQ ID NO: 340145 - protein, 359 aa, unidentified
MRIIGCDLHARQQTLAMLDTATGEVVNTTLKHEGNNVQEFYSSLPRPVRVGIEATGSMQWFVNLMEELGIECLVGHPAEIRAAEPRKQKHDRRDADLLLQLLVEERFPAIWLPTKELLDLRALLRHRHQWVCLRVKIQNALQAIALANGLRRGSSLWTQAGQQAIASLPLSPHAAYRRNELQAMYEKFKAEIEKLNQRVEQQARERSGTRLLMTHPGVGPITALATEVFLGDPARFANSKELASYVGMIPGEYSSGKRQRLGGLTKQGNPLLRFLWSEAVIHAVRRDPGLKHFYRRKLIQKGLGKARAAVARKLGIRMWIMLRDGIECQEFCRHGQMQQKSGDACAGMPERRCGAKVTG

SEQ ID NO: 340146 - protein, 338 aa, unidentified
MKITTIGLDIAKSVFHLYAANKMGRYVKKKQLKRKQVLPYLARLEPCLIAMEACGGANYWAREIETLGHEVKLIAPQYVKPYVKGNKNDYNDAEAIAEAVQRPTMRFVPIKSVEQQDVQNLHRQRERIKKARTALVNQVRGLLAEYGIVINKGVAAVRKGLPDILEDAGNDLTTLSRELFADLLEELRVLDERFKQGEKQIEASNRGNEVCQRLDEILGVGPITASAAYAAAGDGKDFVNGRHFSAWIGLVPGQHSTGGKTTLLGISKRGNAYLRTLFIHGARAVLQHSANKTDRFSLWAQALLERRGYNKACVAVANKMARMAWVIMAKGETYRVAT

SEQ ID NO: 340147 - protein, 331 aa, unidentified
MTSLLNRTNEPALTVGIDVAKATLEVAFSDASAALAPTNDEAGHAALLAHLAALREQGHAIGLIVLEATGGLELDAATALQLAGWPVVIVNPRQSRDFARAMGYLAKTDRIDARVLAHMGQTLLQRADLHKLVKPLPTEQQRLLQALVTRRRQLLAMHIAEQQRASAPDKRMRRSLNIVLKALQREMARLDKDMQTLIGEHHAELAARLGEIKGVGKATISTLLAEVPELGEFNGREISALVGLAPINRDSGEMRGKRTIFGGRPQVRKVLFMAALVATRWNPVIKTFYERLLAAGKPKKLAITACARKLLTILNAMARSGKPFNAALHLG

SEQ ID NO: 340148 - protein, 328 aa, unidentified
MTILADQVDGVIGVDTHRDTLTAAAVTPVGGLLKQLAVAADGAGYQRLLDFACTQVPGRRCFAVEGAGSYGAGLARLLAERGEWVVEIDRPKRPARRGGKTDALDAVRAAREALTQEHLAAPRRRGDRQALRVLLATRHGAVVARTCASNQLKALIVGTPEELRAELRGRSTSSQVSYCAALRDRPARSLEHRMTVRALRSTARRIQALAAEAAELEGEIDRLVRAVAPWLLELPGVGPISAGQVLVSWSHAGRLRSEAAFAALAGVSPIPASSGQVTRHRLNRGGDRQLNRALHTIALVRLRDDPETRGYAARRRADGKSRGRSAAA

SEQ ID NO: 340149 - protein, 458 aa, unidentified
MGHARARKIPAQLVEDEEYQLRHERVAGIDIAKAKADVCTRLPPQRDGGRRASRVEEVPATAKAILALAVRLIADGAELVVMESTSDYWRMWYYLLEGAGLSVQLVNPAHARQLAGRPKTDRLDAQWLARLAEMGLLRPSFVPPPEIRALRDLTRTRLQLVRDRSREWQRLEKLLEGALVKLSSVVHSLAKVQSARAILEAIAAGERDPKALAALAHPNVKGGRAAVEEALGGMALGDHHPMLIRVHLDHITLLDRSVAEVEDEIEAALDAIPAAWGTDPGGETGPDAGRGPDPAVLPAAERLAEIPGVSLMLARAIIAETGLDMTRFPTAAHLVSWAGLCRVASQSGPRSRGGKKGHGNTYLRSSLGQAAIGSARTATFPGERYGRIARRRGKAKAQVAVARSILVVIWHLLADPAARYTDLGPDYVARRTDRDKKIRNHVRGLRAMGLEVTLTPAA

SEQ ID NO: 340150 - protein, 358 aa, unidentified
MKKIVIGIDISKEKIDASAIDVRNTQQGVQKLDYQTFENRPMGFRHMLVWARHLINGVTLDEVLFCCETTGGYDRSLCDYIYAKDLDIWRESALQIKRSMGVRKGKDDKADSLMIAEYAMRHMDKAVIYETPSDNVRELKALLQYRHKLVQEKTEKKVRMSHLADTAAKSKSMSFILRDARKSIKALEKSVKQCERQILELIKGDEELSRSYRHIISVSGIGIVNATALIAYSNNFRGITTANRMASYYGIAAFRDTSGTSVDKKAYVKCYSNSLLKAYLTQAAEWTIRENGIYHDYCLRLKEKGKPYGIIINNARNKLIHLVFSLVQNDIDYERNHEYIRMQKRVNADFTTELKNIN

SEQ ID NO: 340151 - protein, 358 aa, unidentified
MEHFAGLDVAMEETAVCVVDLAGTIVHESTVATDPDAIAEALAPWGQSLGRAGHEAGSLSPWLQPALDNLGVPAVCLETRNVRAAMAAQRNKTDQTDAQALAQIVRTGWYREVHIKSETSYRLRLLLTLRRNLKRKFLDIENAIRHSLKSFGIRLAGTTRGHFANVIRGLIAGDPLLQAMIEPMLEVRAAMWLQYTRLHRLVVKVVRADEVCRRFMAIPGVGPVTALQVKTALDDPGRFSRSKTVGAYFGLTSRRWQTGTSVDIQGRISKMGDDDVRRALVEAANSLLLRYQGWSALKVWGLKLSRTRGRKRALVAVARKLAIIMFAMWRDGTEYRFGTKKSVPDEVELSGEVALVAA

SEQ ID NO: 340152 - protein, 386 aa, unidentified
MQKLNDLSRSLTSLEPDGTLIAVVEMSQSSWLVAGIVPGVERQPLKKLKVDESTLLNLLHRWREEAEKAGHRIQRISVAFEAGRDGFWLARWLRARDIEAHVIHASSVAVSREHRRAKTDRLDSELLKRAFLGWLRGERDHCKMVAIPTIKDEDAKRPNRERESLVGEQNRIINRMKATLIRLGIRGFNPKLKKAAERLEGLRTPEGEPIPLNTLAELHRDMVRRRLVSDQIRQIENVRLEHLKQAPSDGPHAMVRLLARVIGVGIETADMLVQEVLSRNMRDRRAVARYAGLTGSPDESGTKRREKGLARSGNARVRRGMIQLAWRFLMFQKNSALAQWFQTRTKNARGTRKPMIVALARKLLIALWRFVREGVVPDGVVLRPAS

SEQ ID NO: 340153 - protein, 312 aa, unidentified
MAMLSFCGIDVSKDRLDVVVLPQGWFFSVSNDTAGWAELVVRLRPLTVSAIGLEPSGGYERGIIRALLAAGLSVRRINPNKLRQFARARGVLAKNDRLDARLIAEYVAIMPTRVVQRDAAVERLAEIVTMRRQLCDEHVAAENQAAHLEDAMLRRLSKRRQMRLEADIRLLDKRLAEMVAANVVLAQRYELLTSMPGVGPVLAVTLIALLPELGKMSRKQIAALVGLAPYDFDSGKLKGRRSIYGGRMPVRNVLYMAALSASRYSPALKTFHKRLAAADKKSKVIIVAVMRKMITTLNAMLRDNAAWQPRSV

SEQ ID NO: 340154 - protein, 386 aa, unidentified
MQIADRSEAPTAIRTDLGAIFVSLELSRSTWLITSLSPGSGEKMSKHSVRGGDIAALLERFTQLQEKTQARTGKRFEIIVIQEAGLDGFWIHRVLQSKGIDSHIVDPASIATSRRRRRAKTDRIDGEALVRALLAYKRGEPRVCAMVKVLTPEEEDRRRLCRERKVLIAEQIEHVNRLKGLLFSQGISGYEPRRRDRWTRLEELQTGDGRLLPKHLKAQIRRELNRLELLLEQIKAVEVERDALLAAEETSAPAPAALLLNIRGIGPEFAAVLWSEGLFRHFDNRRQVAAYAGLAPTPWQSGVVDREQGVSKSGNPRLRTTLIQLAWLWVRHQPRSALTLWFEARVKRNGGRLKKTTIVALARKLLVALWKYVTAGVLIEGAAMKV

SEQ ID NO: 340155 - protein, 344 aa, unidentified
MTTIERTHAVIGGVDTHGQVHVAAAIDTVGGVLGTASFPTTRRGYDQLLGWLRAYGPVRLVGVEGTGAYGAGLTRRLSECGVAVSDVSRPNRQERRRQGKSDVKDAVEAARAALSGRCQPVKTKIGPTESIRVLLVARRSATQARTKALVQMRHLVITAPDEVRRRFGDVSGRELVDCAARLRPGDVSDAAAATRSALRTLARRIRALDVERAQLERDLDRLTQLAAPRLRALLGVGVVTAATLLVTAGASSERLRSEAAFAHLCGVAPLEASSGKVSRQRLNRGGDRQANSALWRIVLVRMNCDQRTRDYVARRTVEGRSQREVMRCLKRYVAREIYRTLAQP

SEQ ID NO: 340156 - protein, 344 aa, unidentified
MKIAVLGIDLGKNVCSVVGLDASGAVVLRRRVRRDTLIDLVANLPACIVGMEACCGAHHLGRLFAAQGHAVRLMSPEYVRPYVKAQKNDDRDAEGIAEAATRPTMRFVEVKTEDQLDMQTLHRSRERLVGERTALINQLRAVLLERGIVVPQGKRKLEQYLVIMMNEHDGEGLSARMRMLVADIRAQWQDLDRRIGAFDAEFGRWTKENEDARRLATIPGIGVTISTALIAAIGKAETFEHGRDLAAWLGLVPRQSTTGGKPCLMGISKRGNKYLRKLLIHGARAALPHIAEKDTALGRWAKSLLSRVHQNVAVVALANKLARICWAVLRSGQKFAAKGAPLVV

SEQ ID NO: 340157 - protein, 403 aa, unidentified
MNSVGIDISKGRSTIAVMRPFGEVVISPFEVRHTDSELSELARQLKSLNGETRVVMEATGNYHAPVAKLLHDAGLYVSVINAKLVHGYGNNDLRRVKTDKKDSVKLANYGLDRWLTLPRYVPEEDTRLLLKNCYRQYRQYSKVQTVLKNNLISLLDMVFPNVNRLFSSPIRGDGSEKWVDFVAEFWHCRCVSEKSQKAFTNKYQRWCRKHGYNFSEAKAHTIHAEACGHIDVIPKSETTKLLVEQAVAQLRATSAALAALKHEMQALASMLPEYPVVMDMFGVGPTLGPQLMAEIGDVRRFYSKKALVAYAGLDAPPNDSGDVTGRHKSMSKVGASSLRRTLFLVMSVYLQNAPLDESVYQFMDKKRAEGKPYRVYMMASANKFLRIYYATVKAYLESLEHTA

SEQ ID NO: 340158 - protein, 400 aa, unidentified
MDDIDDVGVFLGLDVGKSAHHGHGLTPAGKKVFDKQLPNSEPKLRAVFDKLAAKFGTVLVIVDQPASIGALPLTVARAAGCKVAYLPGLSMRRIADLYPGEAKTDAKDAAVIADAARTMPHTLRSLQLTDEITAELTVLVGFDQDLAAEATRTSNRIRGLLTQFHPSLERVLGPRLDHPAVTWLLERYGSPASLRKAGRRKLVEVIRPKAPRMAARLIDEVFDALDEQTVVVPGTGTLDLVIPSLARSLAAVHEQRRALEAQIGQLLEAHPLSAVLTSIPGVAVRTAATLLVTVGDGTSFPTAAHLASYAGLAPTTKSSGTSIHGEHAPRGGNRQLKRAMFLPAFAALHDPASRTYYDRCRARGKTHTQALLRLARQRINVLFAMLRDGTFYEPRTPRLA

SEQ ID NO: 340159 - protein, 411 aa, unidentified
MSKTLFVGCDVSSKRHTVCLMDPEGNPLGTQTFPNTLSGAQTLETWLLETLNQKGFSEVKIATESTSFLDLHLVDFLASSQRLAPFHPSLYQLNPKLVRNFKRAYPDKEKTDKVDAFVIADRLRFGRVPQPYESHQPYLPLKRLTRYRFHLVKAIAREKAYFLTHLYLKFSAFSLEKPFASLFGATSLALITDFSPDELVHFPLEDLTQFILKTGKNRFKDPEGVVEAVKRAARESYRLRPALASSIDLILATILQTLRALQEALKEVDRAIEKEFEAFPNTLQSIKGIGPVYSAGIFSEIGEIRRFPREDALAKFSGLTWRKHQSGNFEAEETRLSKSGNEYLRYYLIEAANALRVHNAEYKAYYETKFKEVTKHQHKRALVLTARKLVRLVYALLKKGQLYRANYQQEA

SEQ ID NO: 340160 - protein, 456 aa, unidentified
MTKGKKKQKSIQVREDMPPINRNAGGIDVGASEMWVSVPPDRDAEPVKQYAACTRDLYAMADWLKHCGIETVAMESTGVYWIPVFQVLEERGIRVLLVNAKYAKNVSGRKSDMLDCQWLRMLHPYGLLAGSFQPAAEIGVLRSYLRQRQTLIEYAAAHIQHMQKALTQMNLQLAHVLSDVTGTTGMRIIRDILKGERDPKRLAGLRDVRTKSDEETIAKALEGNYQAEHLFALRQAVELFDVYQQKIADCDPQIAGYLRTLESKIDTQAQPLKPAREKKKKRRNTPGFDCRHEAYRISGVDLTQIDSISESTALTILSEICIDMSPWNTEKHFASWLTLCPNNKITGGKVFQRHTRKSANRVRDVLCMSAQSLLNSKSALGAFCRRMCSRLGPEKGIVAAAHKLALVIYRLLKFGKDYVDIGEQAYERQYKERAVKNLARKAKQFGFQLVSSAATP

SEQ ID NO: 340161 - protein, 344 aa, unidentified
MTTAPTILGIDLGKNWFHLIGIDERGAPVLRQKLNRGQLAAYAATAPRCVVATEACPGSQYWGRIFTQAGHEVRILPAQFVKPYVKANKNDFHDAAAIAEAASRASMRYVPLKTMEQLELQALHRMRQRAVQERTAVVNQMRALLLEHGIVVPLGRSLFERRLPAVFTDAESRLSPRLLDVLHRLRQRWLAIDGEIKATTRELTAWADHSDLCQRVVTVPGIGPLIATATVAAVGNGHMFTRGRDMAAWLGIVPKQSSTGGKPTLGGISKRGNTYLRQLFIQGAQSSFLYLKRDQSALGAWLREVEVRRHRQVAVVALANKMVRICWKVLTTEEAYEPYPAGVA

SEQ ID NO: 340162 - protein, 323 aa, unidentified
MQGKVSFQEDAMPVVYAGVDVSKEWLDIHLHPLGESRRFSNDKTGIRQLKRLLARHRPKSIVMEATGKFHRPAHRSLWLDGFAVAVVDPLRARMFARACGYLAKTDRLDARFLALLAESLRPPADTPPSPHVEALQELVNARSAAKCDITALQNRSKTATTALLRGELNRLVRRLEQHVERLDKEIERRVGEDPQLYRKAEILTSIPGIGRVTALALMAGMDELGSCSGKQAAMLAGLAPIANDSGARTGRRSIRAGRPAPRRALYMAALSACRYNPALARFADTLKAAGKPAKVILVAVMRKLLVLANCLLSHDRLWTPNPP

SEQ ID NO: 340163 - protein, 341 aa, unidentified
MSIVSVIGLDIAKHVFQIHGIDETGSVLVRRQVRRAELLDFFGKLAPCLIGIEACATAHYWGRELRAQGHEVRLIPPQYVKPYVKRNKTDAADAEAICEAVTRPSMRFVGIKSADQQAVLTLHRVRDQLVRQRTMAINALRGHMAEFGVVEAQGIAGAGRLAAIVRDEDDDRLPDIARRALGVLVTQLCDVMERIDILKQELLSWHKQSDVSLRLAKIPGIGPITATALAATVPDASIFTSARQFAAWLGLVPRQHSTGGKPRLGGISKRGDGYLRRLLVTGATAALFRSKETRTRPWVKELLKRRPAKVVAVALANKMARTAWALMNSGAPYRAPKSTEA

SEQ ID NO: 340164 - protein, 346 aa, unidentified
MAIVETTRSITGGVDTHLDTHVVAALDPNGGVLGVAAFAATRSGYSSLWSWLGEFGTIARIGVEGTGAYGAGLARHLRSLGVEVIEVDRPNRQLRRARGKSDTIDAIEAARAVLSGRATGVAKTADGNVEAMRALLVAKRSGREARITCLNQIRHLGFTAPDELRERFQRVSRGMLAAQAASLRPRPDSDAVLYATKLAMRSLGRRVLVIDEEIARLEVVLGELVGATAPGLVGLYGVGVDTAAILCVAAGDNPQRVRSEAAWAQLCGVAPLEATSGKLTRRHRLNRGGNRQANHALWRIVFTRLGSDPRTRSYLARRLDEGLSRPEIIRSLKRYVARETYRQLPR

SEQ ID NO: 340165 - protein, 341 aa, unidentified
MSKPNTYIGVDLHKKTCYVTIMNSDGKIKKQTEISTDADKVSKLFKRYTDTPVAVESTMNWIPFYENLESLGCKVFLSNPLQTKAIAHARIKNDKVDSKILADLLRTNLLPTAYIQPRKIRDLKEIVRERANFIEMRTKIKNKIHSVLFKTNHKHEFTNLYGKAGMKWLAELELRDIYRNELNRYLETLKHLNEQIDKISEIIENMAKLDFDCKLLMTIPGIGYYSALMIKSEIGDISRFKSASKLCSYAGLIPSTYASADKVRHGRITKRGSKWLRKTLIDAVTSGSRNHNRIGAFYKKLKKNKGTGKAKVAAGRKLCSVIFAILTDQVPFQDFASVKQR

SEQ ID NO: 340166 - protein, 355 aa, unidentified
MNDEKYIGLDVHQATIVVAVLDSTGKLVMESILETKAATILQFFAGLRGPLAVTFEEGTWSAWLYDLLHSRVDKLVVCNPRKNALLNHGNKSDRIDARKLAELLRGNQLKPVYHGETGVRMLRELSRSYLTIVKDLSRVMNRLKAVYRSWAIPCAGRDVYYRRHRAQWLAKIREAGVRRRAERLYEQLDMLQHLRQQARRELLAESRKHAITAKLRQIPYLGPIRVALAVALIQTPHRFRTKRQLWAYSGLALETRTSAEYRFVEGQVRRSKKLLSIRGLNKDHNHDLKGLFKGAATMASVRPGPFQDFYTAALAKGIKPTMARLTLARKIAAITLTLWKKGENFDAEKLKSQAA

SEQ ID NO: 340167 - protein, 338 aa, unidentified
MKQHNLIAIDLAKNIFQVCSMNNRQQVTENKALKRGPLIEYMAQQPVTVVAMEACYSSHYWARLFEGMGHTVKLLPAQFVTPFVRGNKSDRNDALAIAEASLRPNIKPVPIKSLEQQDIQAIHRFRERYMRNRIGLTNQLRGLLSEYGVIAPQGHKAFCTLLRTISDPSYRGITTLFKTQVNQVCDEYYQLTDRIEELDALLANVAKTNPLCKRLMTLPGIGVINATALYSSIGNGNQFKNGRELAVWLGLTPQQSGSGEKQTSGGITKRGNRYLRKQLVHGARSALFASRKKSDKLSCWVNRLEARRGFNKACVALASRIARISWVLLQREENYKAM

SEQ ID NO: 340168 - protein, 401 aa, unidentified
MIKILSLAPNVTPHYSKKRFSTFNNSILQFKQWLIDNNCFDVCMESTGKYWVPIYNLLEDTIHITVANPKWVKAVKGNKDDTKDSKWIGDLFRLGLVPGSYIPNKPVRILREYTRYRSKLVSCKSSEKNRFQNAFTVCNVALDAVVSDMFGKSASSITDYLISSDSFDPEYCSSLLQKSLKKKAATVIESIEGYQMTWEQKERIVMVRSHLEFVQQSIAKLDEKLDKMVAPYESAITLLCTIPGVDRASAITIISEIGTDMSQFANSKRLCCWAGLTPGNNESAGKKKSVRITRAGVYLKPALVQVAHAAVRSDKSPYYRVKYERIYKRRGKKRAIIAIARMILTAIYHMFVTGELFNPSDLYKIDMPQEMLEKQKEKAIKQAIKLLVAQGVIKSADISVA

SEQ ID NO: 340169 - protein, 369 aa, unidentified
MIYIGIDVAKDKHDCFITNSDSEVLFKAFTIFNNLDGFNDLYQKIESVMDDVTKVKVGLEATGHYSYNLLGYLIDKGLPTYVINPLHTNLYRKSLSLRQTKTDKVDARTIASMLMSDVNLKSYSDTSYHNEELKSLTRYRFDKVKERAKLKTSVSRLVCILFPELEKLVPTLHMASVYALLSEFPSAKHVATAHLTRLTNLLSESSKGRYGKDTAITFRDSARASIGSNMPAKSLELKHTIKLIQELDSEIDEIENEIKIIMDEINSPILSIPGINYRMGAMIIAEIGDFNRFDSPDKILAYAGFSPSTYQSGQLDGAYAHMEKRGSRYLRYALYNATKYVCHWIQHLQPILLKNERKVNITMLPYHTL

SEQ ID NO: 340170 - protein, 342 aa, unidentified
MQIAVLGIDLGKNSCSVVGLDTTGGVVLKRRLQRDAVVKLAAGLPACVMAMEACCGAHHLGRILRDHGHRVRLMSPEYVRPYVKAQKNDDRDAEAIAEAATRPTMRFVELKSEAQLDMQSLHRARDRLVGERTALINQLRALLLERGIIVPQGRRKLELHLETLLAAEEVSLSRRTRVLIEDQRTEWRELDRRILAFDEEFALQARTDETARLLTSIPGIGPLNATALVAAIGRAETFGRGRDLAAWMGLVPKQMTTGGKPRLLGISKRGNVYLRKMLIHGARAALPTLSKSETPLGGWLRGLLARAHVNTVVVALAAKLARIICAVLRSGQKFEMKAATVS

SEQ ID NO: 340171 - protein, 338 aa, unidentified
MNKITTIGLDLAKDVFHVMCCDARGKIVRKRMLKRGQVLTFFGNLGQCLVGMEACAGAHYWGRELESLGFEVKLIPAQYVKAFVRGNKNDYNDALAIAEAVVRPEMRFVAVKTPGQQDIQALHRLRKGCVNARTDLCNQIRGLAGEYGLVAPRGVAALRRQIPQWLEDGDNGLSDLFRRLLSESFARLQAFDSHIIFYTEEVERQSKQDEACVRLQTIPGFGPIVASVFHSQIGNGEAYRRGRDVSAAVGLVPRQHSSGGKDMLLGISKRGDSYLRSLLVHGARAVVSRAEHKDDRLSLWINKIRAKRGFNKAVVALANKMARTGWAVLAHKTVYQAA

SEQ ID NO: 340172 - protein, 356 aa, unidentified
MSEGSWVRLDVHARSVVAGVIDVGSGEVRSLRLPPGGEATVAWLQTLPAPVRVVYEAGPTGYRLARACAEARISCVVAAPSRIRAATDRVKTDRRDAERLARLLRLGEITPIRVPPPEEEAARDLVRAREDARGDLMRARHRLSKLLLRHGLVYDATAWTRTHDAWLRRQRFESAPLAIVFDECYGRMLDAKSRRDALDKAITELAATPPYVDVVGRLVCLRGVSTLTAFALTVELGDWTRFRPESLGPFLGLTPSEHSSGERRRQGAITKTGNSNARRLLIEAAWHQRRPPRRSVTLERRRTGKPQVLQAQAERSARRLHGRWHALEGRGKPRSIVVVAVARELAGHCWALATMD

SEQ ID NO: 340173 - protein, 338 aa, unidentified
MKLYAGIDLHANNSVVVVIDEDDRILYQKRVHNELGALLQALAPYQATLQGIVVESTYNWYWLVDGLMATGYRVHLANTTAIEQYKGLKHTDDESDARWLAHLLRLGILPEGYIYPKEERAVRDLLRKRSQLVRQRTSNLLSIQNLLTRNTGSALSGNRIKQLTIEEVEELLPQAELALAVKSNLAVLQCLEEQIEQIEAVVLAQLKLRDGFQPLLTVSGIGQILGMTIMLETGEIGRFATVGDFASYCRCVSSQKLSNGKRKGQGNVKNGNKYLAWAFVEAANFAVRYNAQIKRFYQRKQAKTNGVVAIKTVAHKLARACYYILRDQVPFEVNKAFT

SEQ ID NO: 340174 - protein, 353 aa, unidentified
MNDPITTIGCDLGDLRSTVFTIHADGRTERCQSLQTTRAAFGKWFARPRCRVVLEAGAHSRWTAELLEELGHEVIVANPRRLRVISQSDTKTDEADAELLARLGRSDPKLLSPIHHRGMEVQHDLAVLKSRDALVTARTRLINLCRGMVKSSGLRLKTCTAKSFHRSGAIDQIPAELLPALAPIFHVLEHIELGIRAEEERIAKLTKKYPDAEVVGQPIGVGVLTALTFVLTLEDKNRFKKSRSVGAFIGICPRKRASGRQDPQLRITKAGDPFLRRLLVQCANYILGPQCKADSDLRRWGVRLAERGGMNGRKRAKVAVARRLAVLMHRLWVSGEVYEPLRQAKRSEKSKAA

SEQ ID NO: 340175 - protein, 368 aa, unidentified
MGEIIRIGVDTSKSVFVLHGVDAAERPVLRKKLRRRDFLKFFAKLPPTKVGLEACGGAHYWGRELMALRHEPKLLPAQHVKAYVQRNKNDNRDADAVCEAMSRPRMTFVRIKSAEEQAAQMLMTTRQRLTDYRTQLINTIRGHAAEFGLTAAKGPAHVEPLLARIAEDATVPALAKELFAIHGQEYGRLKVELRGIEAKLKVWHRQNETSRHLAEVDTIGPIGGCLLAIKAPDPRAFGCGRNFAAWMGLTPKDHSTAGKMRLGVITRAGDEALRRTLVLGATSLIQQVNKGKARPSPWLRDLLVRKPPKLAAVALANKVARIAWKLMVSGERYDAARAGIVSPRPSVAPCSRRQGRCAPPAAGASGQP

SEQ ID NO: 340176 - protein, 377 aa, unidentified
MHSENIAAYVGLDVHKETLAVAIAAPERLGEVRYYGTINNEAQAVRRLFQKLQGLYGNILSCYEAGPCGFGLYHQLTAMNIKCQVIAPSRIPKSPTDRIKNDHRGAISLARLLRAGELTPVWIPDLTHEAMRDLIRARAAAKRDSRVARQRILSMLLRTDKHYAGKHWTGKHRTWLANQSFSQPSQQIAFQHYCQSLEQIEDRILQLDQEISRLLPEWSLCNLVCQLQALKGVGQLIAITLVAELGDFSRFSNPKQLMAFLGLVPGEYSSGNSIRPRGITKVGNSELRRLLYEAAWSYRTPAKVGAWLIYYRPDSVTQYSKDIAWKAQQRLCSRYRSLTAKGKKSQVAITAVARELTGFMWDIALAAQSSFSQQKQN

SEQ ID NO: 340177 - protein, 349 aa, unidentified
MKQEQMQLFAGLDMHTESVTGTIKDENGNPVRVLKVETSKEGVKKLFERLQKKNITAVFEASRNWPRYAKLIQPYCSKILMAHPFKVRAIASARIKTDMIDSNVLSDLLRANLIPESYMPALEIVELRELLRYRAGLSRMRGELKTKAKNILSREGKKCDFDEVTGKRARLWLNNLELNDLNRKELDYTVTLIDNLSAEIAKFDKIIERLQYKYPEVEILKSVVGINTFSGMMILAEMGDIARFPSPNKLACYSGLVPSTYQSSQVQYSGRITKQGNSHLRWILTQCTHASIKSRKSHKLKSFYLRIERRRGKQKAIVATARKMLTTIWHLLNKNEYYAYRDIPSKNGL

SEQ ID NO: 340178 - protein, 386 aa, unidentified
MDQATASTASANTLHCALELSKKSWLLAIQFPDREQPSLYPITGGDTEGLMAKLTAARDRWAKTSGALPMITLCYEVGYDAFWLARFLKTRGIECLVIDPGSLQVSRRGRRVKTDRVDVKTLLRTLIAWCRGERHVWSLVRIPSIDEEDLRRSHRERSRLVRERTAHINRIKGLLFAQGIRGINVKSRYQTLAVDKLVTGDDHRLPPRLAGEIAREIQRLAMVQEQIAEIERERDAAPTTCEATERKRDLLSQLKSVGPTISAFLSREVYYRQFANQRQVGSFLGLTPSPYDSGEEEHCQGISRAGSGHARAIMIEAAWLWIKHQPKSALTRWFVERTAGQSKRVRKIMIVAVARKLAIALWRYVELGLVPQGAIINPPMTRKARS

SEQ ID NO: 340179 - protein, 389 aa, unidentified
MDEAGKVLVKRRLPEGAAGMTQLHALIGRFLPEDADDAEVVIGIETDRGPWVTALVAAGYVVFPVNPLQASRYRERHGVSGAKSDGGDAHMLADMVRTDSHQLRPAAGDSPEGQGIKVVARAHKTMIWDRTRATQRLRSQLREYFPAALAAFEDLDAPDVLELLGKAPDPDRARRLTRAQVAAALKRARRRDIAGKTDAILAALRGEHLGQPAALTAAYAATARSLIAVITTLNAQVKILEDQVRDHFGRHPDAEIYLSQPGIGAILGARVPGEFGDDPCRYVSAKARKNYGGTSPITRASGKKKVVAARFIHTDRLIDALMSWAFASLNASPGARAFYDEQRAKGLDHNDALRRLANRLVGILHGCLKTRTPYDEATAWSHRESSLAA

SEQ ID NO: 340180 - protein, 342 aa, unidentified
MQITTIGLDIAKNVFQVHGIDATEKVVVRKQLRRGQVLAFFKALAPCLIGMEACATAHYWARELTKLGHQVRLMPAKDVKAYVKRNKNDAADAEAICEAVRRPTMRFVPVKSAEQQARLMQHRARDLLMRQRTQLINALRAHLAELGIAAAQGREGIKELLAIVAQDGDTRLPVDAHASLIVLAAQLQAVQTMIGSIEKRIVAQHRSSEENKRLQTIPSIGVLGASTIAAAVPDPKVFRSGRDFAAWIGIVPREDSTGGKQKLGPISKQGDRYLRRILVVGACAVLRRARQQPEKYPWLTQLLARRPFKVVAVALANKMARIAWALLAKGGTYRAPALAAAA

SEQ ID NO: 340181 - protein, 355 aa, unidentified
MVGSISEAKSSVSGVTDPYCRTEHCEKIHPYRCDKEVGVLGIDVSKDNLITSRRGKYENNLKGYEKILDMKPRTIVLEPTGVYSIKPSQYFKEKGIRVLQVSPNMLSREKDFREKKTDFYDAEKIENMVDKAKEYEYNVLRELVTLYLFLKDMEVKQKNRLKRALFLVSDNDKINKERLKRLASGDFTQEVLYQLEYTPIVLEEVKILAKALFETQEKLKEVKEMIESQVPEDHVLLTIPGVGKLAAGIIIGVVGDIRRFPKPESFVAYCGLDPVVERSGKAVVSKGISRRGNKYLRSLFYFLAQMNCSKNPTLLRFYEYHKDKLHGRKLYTALARKLAKVVSSVWYNNKSYEPK

SEQ ID NO: 340182 - protein, 347 aa, unidentified
MKFYTKQHKYYCGIDLHTKKMFVCILDAGGNIRVHQNIKTDPEAFLRIITPFRDDIVVTVECMFTWYWIADLCVEQNIPFVLGHALYMKAIHRGKAKNDKIDSHKIATLLRGGMLPQAYVYPARMRATRDLLRRRNHFMRKRAELFAHIQNTRSQYNLPDPLGCIAKPQNREGIVERFNDPSVQKSMAANLEMIEAYDRLLTQLEHDIIASAKEHDLRSYALLQTIPGVGRILALVILYEIESIERFPQVQDFVSYCRLIKSIKESNGKKYGSSGKKIGNAHLKWAFSEAAVLFLKGNEPGKRYLERLTRKHGKAKALSILAHKLGRAVYFMLKNKEAFNQKKFLGL

SEQ ID NO: 340183 - protein, 339 aa, unidentified
MQIVTIGLDIAKNVFQLHGVDAAGDVVLRRKLRRSEVRVFFSRLTPCLIGIEACATSHYWARELLSLGHSVRLIPPSYVKPYVRRGKNDAADAAAICEAVARPTMRFVPVKSIDQQAVLVLHRSRDLLVKQRTMLINALRCHLAEFGIVAAQKRTGLAELVACVEEGVDDDFPELLRRGLKPLIHQLKQIQAQILQLEKEIETWHRSNSISCRLATIPGVGPIIASAIAATMLDPAHFRSGREFAAWLGLVPRQNSSGGKERLGRISRQGNRYVRRLLVIGATAVLRHDRRRTSGTGWMRALLERKPARLVTVALANKMARTAWALLARNADYRVPTTE

SEQ ID NO: 340184 - protein, 426 aa, unidentified
MNRSPIHALVSSSLADVACDVGLDGLNLICSAVARPGFAATWEIENRTDPIRATLTEIQRLAEAAGYDGLRVLVEPTGIYHKLLLRIARQLGCQTAMVNAAHVSKMREVIFGDPGKTDRRDPHAIEGVARQGRVIVDRQLPETYQLLRHWTTLYASAEASIIECKSKVHRVVKLLFPDFAFSTDFLYSDSGRAVIRCFGLNPHRITAERPQRMFERLRKTSKIRRSSVERLRTQARESSSSAPAGRIADLLEHELTLVWEELELHQDRRRQARQALEGLYDEARLDDPHLPEPQQGVISKVALARLVGELGPFRDFTSWRQMLKMSGLNLCERKSGTYIGQTKISRTGRAGARAVLNQVALPLVKRNQLYGPYYHRKREVEKMSGNKAMTAVARKALKMIWGLYRSTTTFDRTRVFTCASKFRLAA

SEQ ID NO: 340185 - protein, 480 aa, unidentified
MAAAKKNAGKDTDGKGAAGGEAASGSDGAEVAEDRVQVVTYAAAIDVAKGFGMVCTRVPGSRPDRRRQKVWRVEATYGEVTALMDHLRCEGIQRLVLESTSDYWRTWYYLAEAAGLEAWLVNARDVRHLPGRGKSDRADCVWHCKLNERGMLRRSFVPPQAVRDLRALTRTRARLAQDQARHQARVEKILEDALLKISVVISDLFGASGRRFLDALVAGERSPAALAALGDPRLKATRQQLEDALTGRFRDIHAFEISTHLRIIDAINDEITRLDEKIEEQLAEVPRTAPACTACGLAGGGHAPGCLDEQVPLLGLAGRLDEITGIGECNARVLIAELGTDPSVFPTPGHAAAWARLTSRTMQSGQTARPGRTGKGNRYIRGALGQAAMTAAKTDTRLGAMYRRIARKRGKQKAIVAVSRAICEIAWILICDPGARYQELGPDYYTPRSRARQTRNKIREIERLNPGKKVILADAGPEAA

SEQ ID NO: 340186 - protein, 369 aa, unidentified
MADRITYVGLDVHKESIVVAVASGGLRGEVREYGRIANTATALDRLLRKLGDAGMALRFCYEAGPCGYGIQRHVSAQGHECVVVAPSLIPKRAGDRVKTDRRDAASLVKLHRAGELTAVWVPDPQHEAMRDLVRARLDAVHSLRRARQQLSGFLLRQGCHYGRPAWTKLHRRWLAGLIFDQAIHHIVLEDYIAAVEAAEARRDRLTAQIETMLPDWTLAPVVAALQTMRGMAMVNAATLIAELGDLSRFADPRQLMAYLGLTPSEYSSGSSVRRGGITKAGNGAARRLLIEAAWSYRFPARLSRELLLRQESQPKPIRDIAWKGQVRLCARYRRLARTAKPANVVTTAIARELTGFVWAIARQVTVTPG

SEQ ID NO: 340187 - protein, 322 aa, unidentified
MAGIAWCGVDVAKATLMACVVGEGAKPQLEEFGNRAGEQRKLMAWAKRRAKGSEVRFCIEATGRHSRAVAELLDREGEWVSLVNPRRIKGHRVSMGVRNKNDLGDARVVADFAQERKPRRWRAPSAAERRLRELMQGLARLEKSQQQWKLRQGEPGMDALVRQSMTAVLKTLTKEMKRLQQAIAAHLAENQELAVNERLLRTITGVGKKTASWFLATVGDGRRFESAKAVAAFVGLHPCEQESGTSVHGPSRIARTGGAMLRKVLYMAAQSAMRHNPVVRAFVERLQAQRRLCKKAILVAAMHKLVRICYGVCKSQTAFRAA

SEQ ID NO: 340188 - protein, 353 aa, unidentified
MSKDITLTVDYHDRVCVVRWFDHGTGRDQVFTEVPTTKEALKQIVEQARLAAGPAGHVTWIQESTTGWARVQELLGDRVLFRLANVLQMPLPPKARRRKTDKIDTARLQREYLNGSLPLAYQPPAQWRQLRRLVAYRESLVKRRTAVRNWINRYLAHETWFDRTGLWSPTGQKRLRALLKRLPKTDALVIGQKLDELTRLGEQLEVAFKEFASAYSNSPEAQRLDAIKGIDIVSAVSIVARIGPVERFRDADRLIAFAGLAPGISESDQTRRNGRIGGGGTDWHLRNYLIEATIWARKLPRYKHTYNRIYKRRGAKVGRLVVARMLVRSIFKILRDGVEFAAGVDRPIAAVTS

SEQ ID NO: 340189 - protein, 339 aa, unidentified
MSEREYVGIDLHRRRSVIVRVDKDGKHLSTVRVANEPLDVAAGVSAAGPNPEVVLEATYGYYWLVDLLAELGASVHLANPSGLHWGNRRVKNDERDALDLVKKLRLGELPEAWIPPPAVRELRELVRYRAKAVRLRSGLKAQVHAVMAKEGVLPSRYDMFGPGGNAQLDSMEVADNYRTRIESLRGLIAAYDTEVAMLERDIARQLKDHDGYHAIQQIPGVGPTFAAIFVAEIGDVTRFSSAEKLCSWAGLTPKHRESDTKVYRGRVTKQGSKLVRWAAIESVAKNRGGTRLQADYRRLAERRGKQKARTAVARKVLVLVYYGLRDGVIRSLRPTEEAA

SEQ ID NO: 340190 - protein, 369 aa, unidentified
MKIQKYVGLDVHKDTIMIAVAEGDRSGEVRLYGQIASDLGALEKVLRKLGGENVVLHVVYEAGPTGYVIYRRLQQLKIACIVVAPSRTPQPKAGRQKNDRRDAVQLARLHRAGELTAINVPDAVDESIRDLTRARADAVHELTRAKQRLKSFLLRQGYRYSGKANWSEAHQRYLRELVLPLPALKSVLEECLLAIQQAKDRVTRLEELIAAQVPQWRMYPAVQALMCLRGFQLTAAAVLVAELGDLRRFAHPKHLMGFLGLVPKQDSTGDNPKLLGITKAGNAHARWILIEAIQHALLPPKVSAPLALRQQGQPEAYRALAWKVQTRLHKRGWHLLQRGVLKAKINVALARELAGFVWALLIQVPPPKP

SEQ ID NO: 340191 - protein, 408 aa, unidentified
MRLFVGDDWAEDHHDVEVMDAAGRRLAKARLPEGVAGIARLHAMISDQLGETPDEDVEVLVGIETDRGPWVAALVAAGYRVLAVNPLQAARFRDRLGVSGAKSDAADAHVLADMVRTHAHELRPVAGDSDQAEAIKVVTRTHKTLIWERTRHTQRLRHALRDYFPAALAAFEDLDAADTLELLAKAPTSAQAARLTTAQISAALKRARRRDIAEKAAAIQAALRAEHLGQSEIVTSAYAASIQALIAVLTVLNTQVKTLQGQVEAYFGQHPAAEIIISQPGLGPILGARVLAEFGDDPHRYATAKARKNYAGTSPITRASGKKKIALARFIHNDRLIDALLTQAFSALRLSPGARAYYDRQRARGVGHNAALRQLANRLVGILHGCLKTSTPYDETTAWSHHINSTAA

SEQ ID NO: 340192 - protein, 418 aa, unidentified
MEKHSKSSQRSEPSLKRTKARGPVQRDAKEVLAEVLEKLRGKLEAPAVSTSAKEQRRGNTVGPNRDRLTVGVDLGDRWSQYCILGLEGETLAEGQLRTTQEDVREFFQALTVARVVIEVGTHSAWVQDVITEWGHEVLVANPRLMEGSKRRKRKSDRIDANKLARLGRVDPQSLYPIRHRSREVRQDLVVLRARDALVSVRTELINTTRGLVKSMGTRLPRCSSPSFAQKVKDAIPVEVREALLPLVQLVETVNDCIARYDQKIEELGQKKYGHTTLLRQVKGVGPITSLAYVLTLEDPQRFASSREVGPYLGLVPKQEDSGDSQPQLGISKAGDRMLRRLLVGSSQYMLGAFGPDTDLRRYGLRLCERGGKNAKKRAVVAVARKLAVLLHHLWVTGDVYEPLHHSGAGTGTAQAAAA

SEQ ID NO: 340193 - protein, 393 aa, unidentified
MIGVDPHKGSHTAVAIDAAERQLGTMRVRASASQAARLAEWAAEWPERTWAVEGAGGLGHLLAQQLLAAGEQVLDIQPKLGSRVRLLSSGRSNKNDPNDARSVAIAALRSPTRKTVAADDHAVVLKMWSKRHRDLARLRTQAACRLHATMCELLPGGVAKRITTPAATTLLASLDPAGPVAAARHELALAQLADLRRIDGQLRQTRTKLTAAVRASGTSLTGPFGVGPVIAATIIGDVTDVSRFPSADRFAAYNGTAPIEVSSGNRKVYRLSRRGNRRMNHAIHMAAVTQIRYSYSDGRAYYDRKIKEGKTPLEALRALKRRLSNAIYQQLLADTRRAAAISRDTGPGGQPGNDSVSSAASSHPERQLFGSATPGPGPSLRPPEGIIAAKNRE

SEQ ID NO: 340194 - protein, 408 aa, unidentified
MEVLYPRCAGLDVHKDTIVACVRCVSPPVHHEVRSFDSTTRGLLELADWLASHDCTHVAMEATGVYWKPVWHVLEAGFALVLANAQHIRNVPGRKTDVNDAMWIADLLAHGLIRSSFVPPAAIQELRDLTRTRKQLVREISQHSLRIQKVLEDANLKLGSVLSNVLGRSGRAMLDAFIAGESDPQRLAELALGNARKKTAELREALRGRITAHHRMLLKLHLDVIKALERTLAELDAAVGKALTPIRQGCRLLTTIPGISDVTAQVMVAEIGVDMTRFPGAGHLVSWAGLCPRNDESAGKRRSTRVRKSGTWLKTALVTAAWSAVRVKNSYLHAQFLRLKARRGAKKAILAVAASMLTAAYFMLRDGVEYEDLGSDHFDRHDKTKTIHRLLKRLADLGCNIEPIPHPA

SEQ ID NO: 340195 - protein, 367 aa, unidentified
MKKISTAAAQKKRKVEGQKLTIGLDLGDRWSWYCVLDEAGDVILEQKLATTPKAMKEVFGGMPRSRIALETGMHSPWVSRLLSELGHEAIVAHARNVRLIGESRRKDDRFDARTLARLARIDPELLGPVKHRSRKAQADLTVIRARAGLVRARTSLINTARGLTKSYGERLRGCSPGTMNRELAEGLSPELRSALQPLLDEIESLSERIREYNERVQQIAQGSYPEVARLEQVKGVGTLIALTYVLTLEDPRRFRKSRDVGCYVGLQPGHRNSGQSEPQMHISKEGDPYLRTMMVQSAHHILGPFGEDSDLRRWGLKLAERGGKNAKKRAVVAVARKLSILLHRLWVSGEDYEPLRHSRPALLPAAA

SEQ ID NO: 340196 - protein, 377 aa, unidentified
MEKDSRFVGLDVHAETIAVAVAESGGEVRSLGTIPNTPEAVRRLVKKLGPPETLRVCYEAGPTGYVLYRQLTALGVPCAVIAPTLVPVKAGERVKTDRRDAEKLARSYRSGDLTPVWVPAPGHEALRDLVRAREAAKKDQLRARHRLGKFLLRQGRRAPTGIKAWGVKHRAWLQTIRFAHAAQDATLLDYLTEIDHAADRIVRLERAIATAADVAPAPVRAVIAGLQALRGIAKLSAVSIVTEVGALSRFAKPRQLMGYSGAVASEHSSGPHLRRGGITKTGNAHLRRIVIEAAWAYRHRPAIGGTLRTRQQGLSEEVKALAWKAQHRLHGRYTRLLAKGKAPTQVVTAIARELLGFIWAIGVHIEQHTAGGAPAAA

SEQ ID NO: 340197 - protein, 416 aa, unidentified
MDVVFKFCAGLDVHKKIIVACVLLSSPEGLQRQIKTFSTMLAGLEALAAWLAGFGVTHVAMESTGVYWKPVYNVLSAEFDVWIVNARELQQVPGRKTDVKDAEWIAQLMRCGLLNRSFIPAVEQRDLRDLTRYRTRLTAERAAASNRLQKVMEDANIKLAAVASDSQGVSARAMLEALIRGVTDPAQLAELAKGRLRAKIPALEQALCGRVREHHRFMWREVLEHMDELNTRLLLLNARIRALTAPYESIITRLAAIPGVDRYTAEVILAEIGPNVTPFPTAKHLASWACLCPGNNLSAGKRRSGKTRRGNNWLRTALVEAAWAASRTKDTYLGSQFHRLRARRGDKRAAVAVAHSILIVVYHLLAQPEAVFTELGGDYFLKRNPEQEQRRAVRKLEGLGFTVTLTPVAAPAATAA

SEQ ID NO: 340198 - protein, 351 aa, unidentified
MVIIGVDYHPSDQYIAFVDTETGEYGERRLNHSDGEAEKFYRDLQQREIRVRVGMEATGYSRWFERLLAELGIEVWIGDAAKIKTKRVRKQKTDHNDAQLLLKLLLENNFPKIWVPSPENRDLRQLLWHRHRLVQMRTRIMNQLQALAMNEGQRRKKKLWSEQGRAQLEKLPLATWASRRRQDLLELLDRMNPSIEALTAAVEQEARQRPEVLRLMTHPGVGPITGLAFVMIIGTPERFPRGKQIGSYVGLIPCEDSSASRQRLGHISKQGNTLLRYLLGEAAQAAVRCDADWRRRYLHLAMRRQRNIAKVAMARRLAVRLYWMWRNSWEYSEWVKFSSHAGQLAIGHGVN

SEQ ID NO: 340199 - protein, 414 aa, unidentified
MAVMDVVHGRCAGLDISKKDAKVCVRVAGTGRRKTTETVTTWGATTNQVLALREHLMTEQVTCVVMEATGDYWKPFFYLLEDAGFEVLLVNARHVQNVPGRKTDVADATWLAQLGAHGLVRGSFVPPEPIRVLRDLTRARTAIIRERGREVQRLEKLLEDAGIKLSSVASDIMGVSGRLMLQALIEGQHDPAVLADLAKRRLRSKIPALTEALTGRFSEHHGFLARVHLDLIDQHTHAIEELTSRIEVVIEPFQAFRDLITTIPGMATPSADVIVAETGADMSRFPTGGHIAAWAGTTPGHNESAGRVKATKTRPGNPYLQGVLGAAAMSCAQHPGTYLGARYRRIASRRGPMKANVAIQHSMLIAIWHMGRDGTLYDDPGGDYFHRLHPERAKNRALHQLEAMGYQVTLDRVG

SEQ ID NO: 340200 - protein, 348 aa, unidentified
MKYYTSTTEYNCGIDLHARQMYVCVMDSKGKKLVHTNVKNNDFAFFLKLIAPYRHDITVCCECMFGWYWLADACIEANLTFVLAHALYLRLIHGGKNKNDRLDSEKLAHLLRANLITPSYVYPSEKRPLRALLRQRIYFVWARAELLARIQSHQLAHNRPVLKQTRINRDPWLEQLLASEDHPLRQIAIKNDMAMIAHFDKQIAHLEAELERQTKKVAARDFSLLRSIPGIGPCLGLTILHEIGDISRFPTVKNFLSYCRLVKGTVASAGKIKGLRGAKLGNPYLRWAFGEAAVIAKRDHPIRPLADRLEAKMGGNKFKANTVVAIKLARSAFFMLKNKTAFDPERLA

SEQ ID NO: 340201 - protein, 408 aa, unidentified
MDQQIERCAGLDVHRDTVAAGVRVPGSNGKRRQEVRTFGTTAAELLALRDWLEAHGVTHVAMESTGVYWKPVYYVLEEAFTCLLVNAAHIKQVPGRKTDVKDCAWIAQCLECGLLRGSFVPPAPIRELRDLTRHRKVLIQEKTRAANRLHKLLQDADIKLASVATDILGVSGRAMLEALARGTTDPVVLADLARGQLRKKLPALRQALAGRFRPHHAFLLSQLLAHVDYLDEAISLMSAEVEQRLAPFAEVLMRLDAIPGINQRTAEVVIAEVGVDMSPFPSDRHLASWAGMCPGNNESAGKHKTGKTRKGNRWLRMALIEAASAAIRTKDSALGARYRRVMRHRGHHKAVVAVAHAMLRAIYHILAEGTTYRDSGANYYDRRHTQRVTRRAIQLLERQGYSVLAPAA

SEQ ID NO: 340202 - protein, 397 aa, unidentified
MIAVGIDISKAKSTVAVIDSDGTVLASPFTMAHTQPEMEAFVTYLKGLGEPTTILMEYTGHYHYPVLKKLQGEGFPVCIVNPYQMKKYGDVEIHKAKTDKKDALRIAAYALEKSYKLVPYSSMEQKYEDLKFLSRQYSQRITYVAKLKVQLIALLDQTMPGITRILPLNSRNPEKCALLLFIRRFKSFDEIHRIGKARFLASYDVLAKKTSERSASSKGLSIYELAVDSITTRGEDPYIWLSQNQCVDLLSTTQNAADEIISQMRNIAETIPEYKVLRAMRGVGDRLGPIILAEIGDIRRFHSGKALNSYAGNDAPPYQSGQFESRNRHISKRGSSALRKACYEVMQALKLTKPQDDPVYLFMLKKEQERKPFNVAKMAGVNKFLRIYYARAMELYK

SEQ ID NO: 340203 - protein, 364 aa, unidentified
MYDSMTTVTVGLDVHARSIRLAAVRADELLEERTLAYDEEAVERALRRWPVVRCCYEAGPTGFGLQRHLVERGIDCQVVAPGLVPQRPGDRVKNDSRDARKLARLLAGGLLQAIHVPSRELEAARDLVRAREDARLDRMRDRQRLSKFCLRHGRRMPTSSWTVVRRKWLGEQRFELAPQQQTFDAYVHAVDLVDARVEQLGRAIRETADQQPWRGLVGKLRCLRGINTLTALALVAEIGDFDRFKTAEEFMAFVGLVPSEHSSGEQRRQGSITKVGNSHVRRLLVESAWHARRRPKVGYELARRQRGQDAVVVERTWRCQQRLYSRWLRMAGRGKPQQKIVVACARELAGFVWAIATEQPLRNT

SEQ ID NO: 340204 - protein, 366 aa, unidentified
MKKISTMQAFGNEFLKEQKLTIGVDLGDRWSFYCILDEAGRVILEQKVPTTPEAMKKTLGKIPRSLVAMETGTHSPWVSRLLTELGHEVLVAHAQKVKLITKSNRKDDRHDARTLARLARIDPELLGPVRHRSAQAQIHLTVIRARAELVSARTALVNAARGLVKSYGQRLPKCGTYQVSGKLAEGLSAELRDVLQPLLKEIESLNERIKEYDERMEKIAKEVYPEVSLLQQVKGVGTQIALTYVLTIEDPYRFLKSREVGCFLGLKPGRRDSGESKPQKSISKAGDRYLRTMMVQGAHYILGPFGEDSDLRRWGLKLAERGGKNAKKRAVVAVARKLAILLHRLWVSGEVYEPLRNSQKAMQAVA

SEQ ID NO: 340205 - protein, 344 aa, unidentified
MTKTTITVLGIDLGKNSCSVAGMDATGAVVMRKRMTRDAIVTFAASLPACVIAMEACCGAHFLGRTLALQGHTIRLMSPEYVQPYVKAQKTDDRDAEAIAEAATRPTMRFVSLKNETQLDLQILHRVRERLVNARTALTNQMRAILLERGIIVPKGRINLMRRVEGLMTGDPALSARTRTLLGDLCDEWAGLDRRIKEYDDELAALTRDDVQARRLTTIPGIGVINATALIAAVGDGSAFAKGRDLAAWLGLTPRQHSTGGKAKLLGISKRGNRYLRKQLIHGARAAMPHLAAKPNQMGAWLQKMLTRAHPNVVVVALAAKLARIAWAVLRHGESFDRRELVSA

SEQ ID NO: 340206 - protein, 397 aa, unidentified
MLIGNTGSVRNKIGEPAAMSSENTVYMAIELSVSSWLVAARLPNTNKARLHRLEGGNTTALLKLVAELRSAASAKLGSTVDVACCFEAGRDGVWLHRLLEAHGIAAYVLEPTSILVNRRARRAKTDRLDAEGMLRVLATWLGGDRQVCSMVRVPTPDEEDAKRPHREREHLVQDKLRIENRIEALLFAQGIRKRPSLRAWERDVEGLRTGDGRVLPPLLRIEIDRLRRRLVLILELIRELEIDRAHAEEAANAADRMTGKITALRRVRGIGENFAAVLVREVFYRSFENRRQLASYVGITPMPYQSGGIDRDRSISRAGNPRARTTMIQLAWLWLRYQPDSTLATWFRERVGKLQGRTRRIAIVAMARKLLIALWRYVETGVTPDGVAIRVETKASA

SEQ ID NO: 340207 - protein, 355 aa, unidentified
MNSEKYIGLDVHQATICVAVMDPKGKVVMESILETKAATILEFFAGLRGTLSVTFEEGTWAAWLYDLLKPHVANLVVCNPRKNALLKHGNKSDKIDARKLANLLRLNDLEPVYHGETGVRMLRELARSYLTIVKDVSRVMTRLKALYRSWAIPCAGRDVYYTRHRSEWLGKIPEAGSRRRAEQLYQQLDMLQPLRQQARRELLAESHKHTITAKLRQIPSLGPIRSALAVALIQTPHRFRTKRQLWTYSGLGLETRDSGEYHYVQGQVRRRKKQVSIRGLNKDHNHDLKGLFKAAATRASVQPGPFQDFYQRSLAKGIKPTMVRLTLARKIAAITLTLWKKGENFDVEKLKSQAA

SEQ ID NO: 340208 - protein, 320 aa, unidentified
MSVTSVVVGIDVAKAHVDVSVLGVKLDVQRFDNDADGHSALVAALQPFAVSLVVMEATGGYEAAIACALQAAGLSVAVVNPRQARDFAKSMGQLAKTDAVDARLLAEFASVLVRREDLASFIRPLPDDKQQTLAALVTRRRQLLTMLGAERQRLQLAIAKVRPSIEAMIKAIRAQLDDVAAQMVGHVKEHYEELDKLLRSASGIGPVASATLIAELPELGRLNRREIAALVGVAPMANDSGTTRGRRRIQGGRFEIRRVLYMAALVAAKHNPPIKAFYQCLLAAGKLPKVALVACMRKLLTTLNAMVKTNTPWDAEFDHA

SEQ ID NO: 340209 - protein, 349 aa, unidentified
MKKVVKQIIGIDVSQDELVVCLGKMYDDWTPELIAHKTFVNSNKGFCMLKDWVDKLTAHEIVVRFVMEATGVYHESLAYYLHEQGYVVSIVLPNKISNYAKSLEVKTVTDKTASEAIAMFGLERKLDNWEPPKGIYKKLQQLTRERSQLVEERTMIKNQLHAEKAEARPNKQSIERANKRIALLNKQEEEIKKELTDLIKTDEEVKQIVLLICSIPGIGLLTTATVLGETNGFNLIRNKRQLTSYAGLDVKEKKSGTSVKGKPCISKRGNKHLRKAMHLPALSAIRHDERFKAIFIRLVSKHGIKMKAAVAVQRKLLEMVYTINKTKQKFDKNYFKVKEEEKQLLKNTI

SEQ ID NO: 340210 - protein, 319 aa, unidentified
MAKQTIEFEQVIERGCGLDVHRDTVVATAMGKGIQTETRTFGTTTSSLKELGEWLKNLQVTDGAMESTGIYWKPVLHVLRDYPLNLLVVNARHIKNVPGRKTDKADSQWICKLLISGLLKGSFIPPENIQALRDLHRYKKKLVGTVASEKNRIIRVLEDANIKLSSVVSDTSGVTSTYLINGLIAGRRDLKELVAECYHKKLQATPEQIVESINGRLTPHLTFLLKSMQKHIQSVEEQIAEIDAEIEKHIKDFEKEIELLQTIPGVGKEGAIGIVSEIGVDMEVFPSEHHLASHSGMCPGNNESAGKKKVQEHDKGTNI

SEQ ID NO: 340211 - protein, 342 aa, unidentified
MDKIEACGIEVSAQELVVAMSGKKGEAVLRRFANTPVGHRQLLQALTRGGKRVRACMEATGVYGLDAALFLSAQAGIELMVANPRAVRHFAQARMQRSKNDRLDAVMLREFAMRMEFTAWTRPEQSTLALWAIARRLQALTRLCTAEKNRQHAAGVSQAMPACVRASVARTLRLLQREIQKLRQTARQCIAGDARLQRRYQLLRTVPGIGEISAIQILAELALLPTDRDVRQWVAYAGLDPREYSSGSSVKKYTRISKVGNRHLRCALYMPALVASRCEPHLQGFYEHLVAVGKKKRQALTAVARKMLHAIFGMFRSDRPYDGNRVFPLPASGLALQAPKIA

SEQ ID NO: 340212 - protein, 482 aa, unidentified
MKKTNIYQNQSQELLHLFEEAGSNDKVVCVPMDYAKNDHLVMFLNGHGDILRKPFSVKNSPEGIAYIDEQVTRFCRRRGIKKKHVFFGGEDANSFAKNFVSTLRCKGFVVANVNAHDAKKQRSNVQASTDRIDLMGIATMLLSCRANCCTAQSGIYRNLRILVRHRRRLVQMLTEVKNRVHGIVDELFPGFLNENNSGIVPFTQSSLYLMQDRFSPKQIRRRRRQKLIEILKRSGTSKAEHTAAKLQQYAGKVLHAPVEHVDTMQLSLAQHIKHIRCLKESVAQMEKEIALNLAQTQGAFLTSVRGIGLVLAAGVTAEIGDVNAQKPLNNLASYSGIIPRVKQTGGLDGKTYTGPVAKRCNRILKDYVVKSAYHIGLHGPPELMADYKRRDASGQHADFGIGRRYLRMAKSLMRTSQVYLPANLRKQDSTRQDRAGYYLMSWPYLKEKWKKVGALEAAFANNRPLGLWRQIVQELYDIKLKL

SEQ ID NO: 340213 - protein, 343 aa, unidentified
MNVSKTVVGIDIAKRVFQLHWVDVNTGQIVSLQLKRDVFLAHFANRQQCLIGMECCGGAQHWARQLAMMGHEVKLLPARSVKPFVTGNKNDRHDARAIWTAVQQPHVKAAAVKTEEQQAMLALHRMRSQLVKFRTAQINCLRGLLTEYGEVMPQGKANLLKGIVEGLARLSERLPAMVIDTLRDQWARITRMDEEIDMIEQRINLWRKQEDACLRIAEIPGIGLLTATAAVAVIGDPKAFKSGREFAAFVGLVPRQVGTGGKTKLLGISKRGDVYLRTLFINGARAVLSRSTDPGPWATELCKRRPFNVAVVALANKMARTVWALLAHDRKYQKGFVSQPVQG

SEQ ID NO: 340214 - protein, 410 aa, unidentified
MIIIGVDFHPEFQQIASVDTDTGEVQEKRLAHREEAEKFYRALAGQKVRVGMEASGHGRWFERLVAELQFELWIGDAADIRTRRVRKQKTDRQDAQLILRLLLEDRFPKIWVPSWENRDLRQLLWHRHRMVQARTRIMNQLQAVALNEGLRCKKRLWRIHGREQLESFRLAPWASRRRHDLLELMDRLNPTIAELSQAIEQEVEKCPEARRLMTHPGVGPLTALAFVLIIGEADRFQCGKQVASYLGLVPLEDSSGNRRRLGHITKQGSSMLRFLLVEAAQVTVRSLPEWRNKYLHLMMRRGRKIAKVAMARKLAVRLYWLMSAVSSAASLSPDSRPPLMPAHSSSTDISYRLRNRAPSPRGCGFCSVTTGSSTPNGLSAGQNTRCAISVPTPTALPFPTAGWLLSPRAT

SEQ ID NO: 340215 - protein, 346 aa, unidentified
MPPTDCLVTIGVDSHKELHVAVALDQLGRHLGAITVATTPRGFGQLERWAQRLGTIQRFGIEGTGSYAAGLARWLQAHGHQVMEIDRPNRQTRRRQGKSDPIDAEAAARATLADHGLVWPKTADGTVEMLRVLRMARRSAMKARTQTAQQLDSLVVTAPDRLRAQLRRLSLEQLIPVAAALRPGELVGPLAATKLALRELARRHQTLSAEVARLDHQIARLTATAAPRLLARGGVGPQVATALLIAAGDNPARLRSDAAFAMLCGAAPIPASSGKIVRHRLNRGGDRQANNALWTIAVCRMSYDPKTIAYVQRRTQEGKSKLEIIRCLKRYIAREVHRDLKAALLT

SEQ ID NO: 340216 - protein, 343 aa, unidentified
MTIATIGIDIGKSKFHVCALDDRGHVKLRRVFSRSALIRFLSNTPPARVATEACAGAHFIGRKAEAFGHDARLLPAQYVKAYVKSQKNDYADAEAIAEAATRPTMRSVPIKSIDRQTLQLLHRQRSGWVSERTALVNRIRAILLEFGITVPKGIRQLRRALPWVLEDGDNGLPHRLRELLAVLWSDMSRLDERIETLTTELGALARDDPQLRLLMSIPGIGPIVATALAAGIGDAGAFRKGRDLAAWLGLVPRQHSTGGQTRLLGIGKRGNPHLRMLLIHGARAVLRVIHTRDADDGLRRWVERVRSRKHANVVAVALANKLARIVHGVLRDRVPYDPHRLSA

SEQ ID NO: 340217 - protein, 342 aa, unidentified
MMKQYVGLDVSQKETAVCVVDETGRLIFEGRAKSDPGALASLLAKKAPDAERVGFETGAMSSWLWHELKKIGMPVVCIDARHAHAVLSVRMNKSDENDARGLAELVRIGWYREVAVKSEASQKVRSILIARSRLVTMRRDLENQVRSMLKEYGLIFPRAIAGQFQRYVTDLTGEGHVLWTVLLPLLSVHSHVCRELEGLDRQIRQMARTDETTRRLMTVPGIGVVTALTFRHTIDDPSRFRSAASVGAYLGLTPRRKQSGETDTVGHVSRWGDRLLRTYLFEAASVLLHRTKPWCSLKAWGLRLAKRNGMKKEQVAVARKLAVILHCIWIDGTSFQWGKEPA

SEQ ID NO: 340218 - protein, 344 aa, unidentified
MTIVTIGLDLAKHVFQVHGVDETGRVVIRKQLRRAAVEEFFAALPPCLIGMEACATAHHWARRLIDLGHQVRLIPPSRVKAYVQRGKKNDATDAAAIAEAVTRPHMAFVAVKNEDQQSVLMLHRTRELLVRQRTMLINALRAHLAEFGIIAAQGRRKAADLIATLDELAIPGLARIALRELAEQIDACDQRIMTMEKEIFAWHKTNEASRNLATIPGIGPITATMLAATITDPAAFKSGRQLAAWVGLVPRQNSSGGKDRLGSITKAGDRSIRRLLVMGATSVIRYARTKAPGDSDWLKGLLDRKPARLVTVALANKMARIAWAVLTRGEVYQENFCASSVARS

SEQ ID NO: 340219 - protein, 420 aa, unidentified
MKAPVIHDFAALIGIDWADKKHDVCEHPMGTTKHLYSIISSQPESLHEWAMSLKKRYPQQLIAVACELSKGPLIYALSKYDHIMLFSINPSTVAKYRKAFTHSGAKNDPSDAFIQTEILEKHMDKLDVLRPEQSQVRALAQLLEYRRKVVQDKVDLTNRITATLKNYYPQVLDWFKEKDTVVFCDFLTRWSSLSRVKKARKQTLLDFFNQHHSRYCEINEKRCDEIKSSIALTDDLGVIEPNQILIEILISQLRIMLEGIARLDKEIKQRYKNQKDKVIFDSFPGADPQMSPRLFVAFGTDRERYAEANALQKYGGIAPVIEQSGQKKWTHWRYSCPKFLRQTFVEWAGQSVRYSFWAKAYYEQQKQKGKPHNTIIRALAFKWIRIAFRCWQTRMPYDESKYLMALKKQGSPLLNFAVNN

SEQ ID NO: 340220 - protein, 386 aa, unidentified
MQASTVGTPTASRYGTIFITIELSQKSWLVTLHSPDQDKLSRHQLAGGDHAGLLALIDRIRDRAARALGGVPAVASCYEAGYDGFWLHRLLLAAGITNYVFDPASIAVDQRARRVKTDRIDGETMLRTLMAFLRGEPRVVRIVRVPSAEQEDARRASRERDRLVKEQTAHTNRIKALLRLLGMAIGNPRRRDWLSWLATQRDWQGQAVPPQMLGEIRHEHARLMLVRERLDALAKTPAQADPTPAAAQMTERSELLLRLKCLGPAFATTLTNEVFYKDFRNRREVASYFGLTPSPWRSGGIDRDQGISKAGNPRARCAAIELAWLWLRHQPDSKLTQEYRRRTLDAGKRIKRVAIVALARKLVVALWRYLTTGLVPEGAVLKAVKM

SEQ ID NO: 340221 - protein, 397 aa, unidentified
MYIVGIDIAKRKHEAAVIDGEGTVIIKPFSFTNNCSGYNRLLAMLAKAKLPLDEVSFAMEATGHYWLALFTRLQKEGFRVQVINPVQTNSIRSFYIRQAKTDPRDALLIAEVIRFGHFSESTLHPENIYELRELCRGRHAIVSMQADVKRKVVALLDQVFPEYETAFTNMFGDTSMAILQTCPTPKELSEMRLEELCHLIEVSSHKRFRMAKAQELQELARNSFGFAMAGDVFSTMIRLYAKHLDFLKQQVREMDRKIAEIMDTLDTPITTITGIGPTLGAYILSEIGDISRFSSAAKLAAYAGIDPTMRQSGEYNGVRNRMSKRGSPYLRHAIWLAASSAVLHDPALKLYFQKKRDEGKPYMASVGHACRKMVSIIYAVMRDNKEYVPCIPGEISA

SEQ ID NO: 340222 - protein, 340 aa, unidentified
MRQLYAGCDLHGNNNLFGIIDAEGKRVFKKKLSNDLLLVLDTLKPFQEELVGIAVESTYNWYWMVDGLMETGYQVHLANPSAIQQYSGLKHSDDKHDAFWLAEMLRLGILPEGYIYPKQERPVRDLLRKRGHWVRLRTSLVNSLQNILTRNLGRKVNVNDVKALKEDRITLLLEVSEDLALAGRVSKEAIDHLTRQIYKIEWAVQKKIALKEEYRYLLTLPGVGKILSLTIMLETGPISRFETVGDYVSYCRKVPSQWTSNEKRKGSGNTKNGNKYLAWAYSEASEFARRLYPEPRAYYNRKMQKSNAAVAHSALANKLSRAGYYVMRDKVPFQPEKLFG

SEQ ID NO: 340223 - protein, 423 aa, unidentified
MRKRIYRAVSVKSLNREKLAELVKGNRVVLGVDVAKEDFVGAFMNEGREVIRTIKWKSPGEVADIVTLLKELPWSTLEVAMEPSGTYGDTLRAFLQKEGFSVYLVSPKKTFDASEVYDGVPSSHDAKSAAIIAKLHLDGASKEWPIRSDEVRQLAAAVETMELYRGQLSRNINRIESKLARYWPEVTTILSLDSATLLALLGAYGGPEAIAADIEGARRLMVRVGRTMLSSEKRERVIEAARTSIGVNMIGGERELIKELALETDRNRKATNAARRKVERMSQSGRALASMSAAVGRVTAAVLMVTSGDPNLYPSAGAYLKGNGLNLKERSSGKHKGKLKITKRGPGAARSYLYMAALRLIQRDDVCNAWYQKKVVRDGGKIKSKAITALMRKLVKALWRVAQGEAFDSRKLFDTRRLNIATI

SEQ ID NO: 340224 - protein, 385 aa, unidentified
MDQTSSSTLCANILHCALELSKKSWLLAIQFPDREQPSLYSIEGGNTEKLMAKLIVARDCWAKTSGALPVITLCYEVGYDAFWLARFLKTRGIECLVIDPGSLQVNRRGRRVKTDRVDVKMLLRTLIAWCRGERHVWSLVRIPSVDEEDLRRSHRERSRLVRERTAHINRIKGLLFAQGIRGINVKSKYKTPAVDKFVTGDGHRLPPRLAGEIAREIQRLAMVQEQIAEIERERDTAPTPCEATERKRHLLLQLKSIGPAISALLSREVYYRQFANRRQVGSFLGLTPSPYSSGEEERCQGISRAGSGHVRGIMIEAAWLWIRHQPKSALTRWFVERTAGQSTRLRKIMIVAVARKLAIALWRYVEHGLVPQGAILNPPATGNAR

SEQ ID NO: 340225 - protein, 387 aa, unidentified
MIYVGIDIAKLNHFASAISSDGEIMLQPFKFTNDYDGFHLLLHKLDSFDPDSLIIGLESTAHYGNNLLEFLVKHNYKVCVINPIQTSAMRKNNIRKTKTDKVDTYIIAKTLMMDPHRFFSQHDLSIMHFKGIGAFPHETNQETYPGQDSTSRMLIRTFPELQYFFKSGIHQKSVYAVLKEAPTTKDIASMHLTHLSHLLEVSSHGHFKKDTATELRILAQKSVGCNDSSISTQITQTIELIELLDSQVHDVESEMELIVNSLASIIMTIPGIGFINGGMILGEIGDIMRFSSPSKVLAFAGLDPTVYQSGNFNASHTKMSKRGSCPLRYALINAAHNVVKNNKTFKDYYDQKISEGKSHYNALGHCAGKLVRIIYKMLTDNVSFNLD

SEQ ID NO: 340226 - protein, 337 aa, unidentified
MKVVRIGLDIAKTVFQVHGVDQHGKTVLKKTLSRGEVLAFFTHTPVSLIGLEACAGAHYWARELIKLGHDARLMAAQFVSPYHKSCKNDANDAEAICEAVGRPNMRFVPVKSEEAQAVLAVHRARALTVSERTALVNQVRGLLGEFGIVVGQGIAQARRLLADIGAGGRQLPILARETIGELHNRLRTLDERILAYDRKISALAKASEPARRLMAIEGVGPVTATALVASVGNASAFKSGRQFAAWLGLTPRQNSSGGKTKLGAISKRGDVTLRTLLIHGTRSVLRLTTDKADRKSVWAEALKKRSCANVAAVALAAKNARIIWAMLSRGTEYRVAS

SEQ ID NO: 340227 - protein, 418 aa, unidentified
MKSASSTTLPETPPNDVTCGIDWARDDHAVCIVDGRGREVARTMVEHTGAGLRELVTFLGRHGVGEVAIERPDGPVIDTLFKADLTVVVISPNQVKNLRGRYGSAGNKDDRFDAYVLADTLRTDRARLRPLQPDTTETIALRRTCRARKDLVGHRVAAANQLRAHLRNVFPGAVGLFADIDSPISLAFLTRFSTQDQADWLTPSRLGTWLTKQGYSGRTSPETLHARLTAAPRRITGQDADNQAHITRALLTVLAILVEQIKTLEDQISRQLAAHADQHIFTSLPKAGRVRAARLLSEIGDCRAKFPTPESLACLAGAAPSTRQSGKIRAVGFRWACDKQLRDAVTDFAGDSRHANPWAADLYQRARARGHDHPHAVRILARAWLFVIWHCWQDGTAYDTAQHNALQRILQTTETKAA

SEQ ID NO: 340228 - protein, 308 aa, unidentified
MSNILFQNLFISVGIDVGADFSFMSIALPNRTFVGKPFKILHSDLISLSMAVSKIKEAEEMYSLESHIFLESTGIYHFPLFCYLRDKGFLVSIINPIITKNSTNINIRKVHNDKFDSKKAALIGLNPDLKVSLIPSDLVLDLRNLSREYYDLMDNRSAYVNKLQGELRMVFPQFLKIFSKITAVSLMCEIGDFSAFQSSKQLFAYFGLDPAVKQSGNFEGTKISMSKRGSRIARMVLHTMALISISRNKDGSAKNPVLRDYYLKKCQSKPKMVALGAVMHKVCNIVFAILRDEKNLKSSHQRNTRRIT

SEQ ID NO: 340229 - protein, 339 aa, unidentified
MKEVVEFPQIVKVGCGIDVHRDIIVATISKSNNEFETREFEAYTSSFTSLRDWCKTEQVTHVAMESTGVYWKPVFNVLEEAFEIILVNARHVKNVPGHKTDKADSKWISKLLLSGLLKGSFIPPCDIRELRDLVRYKKKVVAQAASEQNRIIKILEDANIKLSSVISKVGGAVGTKIINSLIQGQTDPDELIKFYHGKLKVSKTEFRKALEGRISKHHRFMLQLHKDSILDKERLIERIEAQIDEATKVYQVEIDLLQTIPGVGKDSAIGIISEIGSDMSKFPNENHLSSWAGMSPGNNETGEKKNSKSNSWKQISTKHSGRMWLGSNQEKGWFFKTQI

SEQ ID NO: 340230 - protein, 349 aa, unidentified
MLIIGCDCHPSQQIAFVDTDTGELQERRLEHREEVEEFYRGLGVEGMKVRVGMEASGHARWFERLLAELNFELWIGDTTEIARKRERKQKTDRQDAQHILRLLLKDDFPRIWVANWENRDLRQLPWHWHRMVQARTRIMNPLQAVALNEGLRCKKGLWREHGREQLESIRLAPWASRRRRDLLELLDRLNPTIAELSQAIEQEAEKLPEARCLMPHPGVGALTALAFVLIIGRAERFQCGKQIASYLGLVPLEDSSGNRRRLGHITKQGSSMLRLLLVEAAQVTVRSFPEWRSKYFHLMMRRERKIAKVAMARRLAIRLYRMWRKGWDYEQVKKFGSHAGKLETGDGVQ

SEQ ID NO: 340231 - protein, 355 aa, unidentified
MNSVRYVGLDVHRDTISVAVLDESGRLILQSVLATRAAAILDFIGGIRGTVHVTFEEGTHSAWLYDLLVHRVAKLVVCNPRKNALLKSGSKSDAIDARKLAELLRAGMLSPVYHGESSALEVQHLMRSYAMLTEDTTRVMGRLKAVFRGQAVICTGKKLYGKRHRERYLAELGEGGLRRRAECLYRELDALQPLRRQARRELIVECGKHAAAKWLQSVPFLGPLRAAVLIGRVQTPHRFRTKRQFWTYCGLALETRDSGEYRVVNGQVERRKRPVLIRGLNWNHNHELKNLFKGAATTASACNGVFREFYHGLLNKGMQPEMARLTLARKIAAIALNIWKKGEAFDQQHVKPQAA

SEQ ID NO: 340232 - protein, 434 aa, unidentified
MSKFFNDFVIGIDVSSEFSVVAMLEPSGSLIRKPFRIDHNPKGFNKLLEILKKEEERLKQKPIYFVESTGIFHLPLFFFLRSNDLKGFVLNPLSVHSTKNFDLRKVKNDAKDAESIARLAKFQEVKYSLVPEPQILALRMMSREYYAMSDMLTEMKNRLCTDLYLLFPGYLDVFGNPFGKASLEILKTYSSPRALSEVDSSELALMISKISRKTVSWANKKVNALLEITTQALSMPMEFDILSLKIKTHVENIENFQNRLDGLIDQLKVMIQSPDFPAKERRYIELLEGMPGIGFLTAVTLIAEIGDFSKFHSPKAFVAFFGIDPSVNQSGKFNGDRNKISKRGTRFGRRVLFTAALASIRTTRKGDAINPVLRDYYHQKCENKKKKVALVAVMHKLLNYIFAVLRDEKPFALRSPKDHQSWRHTKETALKLVA

SEQ ID NO: 340233 - protein, 350 aa, unidentified
MELATMNTEYVCGIDLHSRSMYICVMNQKGDIQLHRNIRNNFQFFKSLIDDYSGNISVGCESMHSYYWLADGCIQNNIPFYLGHAYYMKTIHGGKKKNDKLDSKKIADLMRANHLPVGYVYPKIFRPTRDLLRRRIRFMTIRAEAYAHIQTTFRQNCLIISPKDVKNKKTRRELIIKIQNKDIQKSIELDLDVIDNFDSLLKPIEAEIRAQAKLHDRTSLNLLLTIPGIGDMMSLVILYEIGDISRFNSPQNFSSYCRLVICDRESGGKKSRGGFQKIGNPYLKWAISEIIIHAPSTSPVIKNYYEKLIDKSGKKRAQRIMTHKFGVAIYYILKNKQGFNEQKFIQSDMN

SEQ ID NO: 340234 - protein, 384 aa, unidentified
MGSRAGNRAWLREWPSLRVMELETTESGWACSKHHRGTTMEHYAGIDVSLESASLCVVDATGRIVREAKVASEPEVLIGWFNRLGLAVTRIGLEAGPLSQWLYAGMRDAGLAVELLETRHVRAAFKTMPVKTDRKDARGIAQLMRLGWFRPVHCKSLPAQEMRALLTARKLLQTKNHDVEMSLRGVLRGFGLKVGPTTPRTFASRVRDLVAGHATLLTVAEAMLAARETLFGEWQKLEKRLRSLAREDSRVRRLMTTPGVGTIVALTYVSAIDDPGRFRSSKTVGAHFGLTPKKYQSGETDVTGRISKIGDGGVRAALYEAANVILTRPVKGSTLKSWGMRLAARAGMRKAKVALARKLAVVLHRMLADGTSFLADKAAAAVTR

SEQ ID NO: 340235 - protein, 370 aa, unidentified
MKPSTSYVGLDVHKSTISVAVADEGRGGEVRSYGVVENRVDLLIRLAERLSRRGQHLHFCYEAGPCGYGLHRLLSGLGHDCTVVAPSLIPKKPGERVKTNRRDATMLARLHRAGELTAVWVPDAAHEAMRDLVRARATAARGLTKARQHLSGFLLRHGKIYVGPRAWTVAYRHWLTTVRFAHPAQQIVLEDYIHAVDDAEKRIARLVAQIELLLEQWSMAPVVAAIQAMRGVAFINAVTIVAEIGDFARFTNPRQLMAYVGLVPSEHSSGDNVRRGGITKAGNSQARRALIEGAWTYRMQARVSRKLHDRIAGLPKSIRDTAWRAQVRLCARYRRLVAAGKKTVVVTTAIAREMIGFIWAIARQVELRSA

SEQ ID NO: 340236 - protein, 315 aa, unidentified
MGHSPAAPTFVGIDVAKDRLDIHLRPLNEGFALSRDGAGLEALVERLAALAPALVVLEATGGFEIAVAGALAAAGLPLVVVNPRQIRDFARATGRLAKTDRLDAEAIARFAEAVQPAPRPLPSAAAHALGELVARRRQLVEMIISEGQRRRQTRDPRLQRRLEAHVAWLQKELSALEADLDDAVRGTPAWRVAEDLLASVPGIGKTSARTLIAELPELGTLDRRKIAALVGVAPINRDSGSFRGRRMAMGGRASVRTALYMPTLTAIRRNPALQAFYRRLIGRGRPAKVAITACMRKLLTILNAILRDHTPWQTP

SEQ ID NO: 340237 - protein, 363 aa, unidentified
MFTERTSIGLDVHARSVAACGIDGETGELFEQRLAVDPAEITSWVRSLPGPVAVAYEAGPTGFGLYRQLMSAGIRCAVVAPSKLQRPSGDRVKTDAKDARHLAKLVRLDEITPVEVPSTDREAARDLVRAREDCRSDLMRARHRLSKLALRHGMVYSGGQAWTGKHDAWLRRQVQPALTGPGSRAAFDCDYEAVLATTARRDRLDGQIADMAADSQFTPLARRLGCLRGISSLTGLALAVEIGDWHRFTGATIGSFVGLVPSEHSSGQSRSQGPITKTGNAHVRRLLVEAAWHHRARYTIGKTMRDRWDLAPAAARARGDAGNRRLHARWVRFIDRNKRHTVATTAIARELAGWCWSLAVMDD

SEQ ID NO: 340238 - protein, 306 aa, unidentified
MLSKQSWRTLSPAVGNNNKGFATVLEHTGPDYHFVMEATGVYYIRLAFYLHHQSCKLSVVNALSIKRYIQMHLERNKSDKKDAAWICRYAIEQQPPYWEMPDSAYFESKQLYNAIREYTEQIKRFNNQLHSLKLLPVPSKDTIKSLEKVKQQLAKEIINLEVKLETLLQSWQPAQLKSISSIKGVGKRATAMLIVFTQGFKNTHSHRQLISFAGLSPTEYSSGSSIQSKPRIYKRGGKNLRDVLYMCSMNAIKTNTACKTLYERLRANGKTGKQALIAVCNKLLKQVFAVVKNNSLYQPNYCSAKP

SEQ ID NO: 340239 - protein, 384 aa, unidentified
MNEHILYVGLDTAKNHIDVAVAEPLPGGEVRYWGKVANEGAALDRLIRRLQRERRQLKICYEAGPCGYGIHRRLNAKQDVSCEVIAPSLTPRRPGVRVKTNRRDCLTLVKLLRAEELTAAWVPDAAHEAMRDLIRTRSAAVEDLVRCRQRIGGFLLRQEIRYAGKPWSKKHRVWLGRLEFAAPAHRLMLGELLEALDQAQARRDRLTDHIAELVPTWSLAWLVEALQALRGYRLVNAASLVAEIGDPRRFASPRDLMGYVGMVPSEHSTGDTVQRGGLTKTGNRRARKVLIEAAWTYARRAKVASPRAGRHPPAVRAIAEKARHRLSGRYRRLTVRGKLGVVAIAAVARESLGFIWAIAQAAGPADIIERRRPARGAGRGSDSR

SEQ ID NO: 340240 - protein, 331 aa, unidentified
MNIRETIGIDMSKLKFDVRIHSNQSFMTFDNQKKGFKKLIKWVEKQSAFPAEETLFLFEHTGLYSYQLSVFLSEQDLAFVMIPGLEIKRSLGMARGKDDRIDATKIALYGYRLREELTPCKLPSKAIIAMKRLLTLRDRLVKQRAGYKASFKEQKRVLTKKDNLILLGVQEKMIAVLTKEIDKVESELQGIIKADSELKTIFDLVTSVKGIGTQTALFLIAYTEGFTKFKNTRQLASYCGIAPFPHSSGTSIRGKTKVSHLANKKIKSLLDLCAKTAIQHSPEMKVYYNRRINEGHNKMSTINIIRNKLLARACAVVKRRVPYVDILKYAA

SEQ ID NO: 340241 - protein, 386 aa, unidentified
MEHYVGLDVSLKQTSICVVNQIGSVVCEGVVESAPEAIAQFVNSKVPATVRIGLESGPTATWLWTELKRFGLPVICIDARHAKAVLKMQINKSDRNDAAGIARIMQTGWFKEVRVKDLDSHAIKALLASRALLVKLKRDVENQVRGLLKNLGLVIGRAKMNVFSVRATELIEGRPELAAAVVPLFKAREAIEQQIRDLDRKVMRLARNDAQVRRFMTVPGIGPVTALCYLATIDDPARFKRSRSVGAYVGLTTRRYASGEVDWTGRISKCGDKMLRSYLYEAANLLLTRVAKWSALKAWGVRLAKRSGLRKAKVAVARKLAVILHRMWIEGSEFKWSSKEACSNLRSRTIEIPPNSGKKRPCRDAGVGEIALGLAMPEKGKARFTH

SEQ ID NO: 340242 - protein, 342 aa, unidentified
MEEVTIIGIDLAKNVFQLHGAAADGRPVFRKKLTRLQFQRFMAAQPPRIVAMEACPGSHYWARGDGSAGSHREGDLAAIRHPYVKRQKNDAADAEAIAEAATRPHMRFVEPKSAEQQARAVVFRVRQKAIAQRIELVNALRSHLYEFGYIAPVGLQHLPKLVAVLEDETSDLPGPARIACRGILRQIESLGGEIAALDAQIAELSKESRWARLLQTMPGVGPITAMAIEAFAPPMETFRRGRDFAAWLGLVPRQNSSGGKARLGKVSKAGQHDIRRLLVVGAMAAMVGACRRRHPRDTWLGKLMLRKPRILVAIALANKMARRIWAMLTKGESYRDPALAEV

SEQ ID NO: 340243 - protein, 373 aa, unidentified
MDQHSRAFIGIDTSKLRNAVAVGEEGRGGEVRYLGEIDTTEAATRKLVTKLAAKYRQLTFCYEAGPTGYGLYRLIRKLGHDCIVAAPSLIPKKPGERVKTNRRDAIGLAKVLRAGDLTAVWVPDERHEAMRDLSRAREAARKDLKGKRQQVSSFMLRLGRHFPGKKTWGPAHMNWLMLQKLEHREQRIVLEELLGAVRQESERVERLEQAIRDAVPEWSLAEVVTALQAMRGIDLITAVTVLAEIGDLSRFQNPRELMGYLGLVPSESSTGDTINRGGITKTGNGRVRRILVESAWSYRYPPRVSSEKQMKVAAAPRAVREIAWKAQMRLCGRFRSLTRKGKRPTVVATAIARELAAFIWAINREVMAHATAS

SEQ ID NO: 340244 - protein, 387 aa, unidentified
MARKRTLSTLDTSIAYEAVGLDLAKTDVALAAFDSDHKEPYLIDRIPYDKLYELLANMAPTLVAMEPCSGAHQIAEQIQELGHEVMMISGRHVQAWVKDHCNGQKTDLNDAFAILNLAYDRWLTPIRGKTREECRLLALQASYRQLKGQRTKTMVHVKATLHAWGFPIRAGSFNQKALHELIDANREAFGDEVVETLHLMINRVHDLDHDIATMLKLLTEATQRDPRASLLRSIPGFGVLTTSRWCAVVGDIARFDSPKQTMAFIGLVPNNRITGHHTETSSGREARGQGKMSKRGDKMLRSLCILGAGALCLMVRNDRLPDCPFVASIKERLASPRPWFKVLVYVAAKLVRIATALLKYGETFSFEKAGISKAVLKQWELEQAKAA

SEQ ID NO: 340245 - protein, 368 aa, unidentified
MHETITAFIGLDAHAESTAIGVAEAGRAAARFVGTVGPKFAELTKALARLGGPAQLLIVYEAGPCGFALARELRASGYRCEVVAPSKIPRRPGDRVKTDRRDALTLASLSRAGELRFVAIPDERDEAIRDLSRTRIDAVRARLKARQQLKALLLRHGRRYTGKTSWTAAHERYLATLSFSHHAQDIAFVEYRQTVSEAQARVERLSAALTQELEHWRMRPLVQALMTLRGVDQVVAMTLVAELGELKRFAHPRELMGYLGLVPCEHTSGEKRRLGGITKTGNTHARRVLIEAAWNYRFPPRITGPLQKRQERQPSAVRAIAWRAQLRLNHRYRQLTARGLQHNKICVAIARELAGFLWSIGQQVSVCA

SEQ ID NO: 340246 - protein, 318 aa, unidentified
MNSNITQNINVGVDTGKTQLDIHIRPINLFFSVENSQKGIKDALKVIQKHSPERIVIEATGRLEMMFVLACAEANLPIVRANPIHIKRFAGAIGRRAKNDRLDAELIAHYAEAIKPTITPIKSENIRIMSDLVIRRNQLLSMQTMEKNRLSILPKSLYSTIKPMLTTLKNQISKIEEKLTSLIESCPEYQAKNAILQSVPGIGNIAAASIISNVPELGYINNKQASSLIGVAPMTKESGRYKGKRVIQGGRAQVRTVLYMAMMSAMQCNPTFKATYTRLVNAGKPKKVAIIACVRKMVVILNSMLRDGSMWDENSAKN

SEQ ID NO: 340247 - protein, 355 aa, unidentified
MDSTKYIGMDVHKEVISIAVMNGDGKLVMESLIETKAITILQFIQGLRGALHVTFEEGTWAAWLYDLLKPHVTKVVVCDPRKNALLKEGNKSDKIDARKLADLLRGGYVRSVYHGENGLRTLKELSRSYLTISKDLTRIMNRIKALYRSWAIPCEGQQVYDPRHRAEWLDKIREAGVRRRAEFFYQQLDALQTLRQEVRRDLLAESRKHGATKLLRQIPCIGPIRAAQLVALIQTPHRFGTKRQIWTYSGLGLETHDSGQYCSVGGRLQRSRKAQHIRGLNENHNRDLKNIFKGAATRASSCPGPFHDFYQALLAKGMKPTMARLTVARKIAAITLIVWKKGASFDAKHLKQQAA

SEQ ID NO: 340248 - protein, 372 aa, unidentified
MEEAITFVGMDTSKERIKLSVRFAGETEPVDVSLANRAADVRRMVRKFQRKAPGEVLFGYEAGPCGYALQRQVEGLGSRCKVVAPSLIPVKPGERIKTDRRDGRKLRELLEAGLLTEVRPPTSEEEAARDLCRAREDALEDRQRCRHRMGKLVLRRGLVYGQGGAWTQGHYRWLRTLEWEHAAERAVFDDYMLAIEQIDERLKTLEAKLEELSQQEPYREKVGWLMCFRGIKTITAMTILTELHGFERFSSARGLMAYLGLVPSEHSSGDSVRRGKITKAGNVHARRVLIEAAQNYRLRPSVRAAVMKRRQGQPGWVIAIADRAQQRLHRRMWRLLGRGKPHNKVVTAVARELAGFVWAVMQGPPVERPEAV

SEQ ID NO: 340249 - protein, 343 aa, unidentified
MQAIAVVGLDIAKSVFQVHGVDAPGSVVVRRQLKRRYVIAFFKKLPPCLVGIEACATSHHWSRELQALGHTVRLIPPAYVKPYVKRQKNDAADAEAICEAVQRPSMRFVPTKTPEQQSCLMLHRTRHLFIRQQTAVINTIRAHLAELGIVAPVGRNGVEQLLYAIADTKDDRIPDVARVCLEALGALLGKLKAQILEFDRQINSWHRSNETSRRLDELPGVGPALATALVASVADPKAFRSGRDFSAWIGLVPKQNSSGGREKLGSITKRGDRYLRSLFCAGALAVIRYAKIHGTKHRPWLAKLLERRPTKVAATALANKLARMAWAMMATGERYREPLALAR

SEQ ID NO: 340250 - protein, 338 aa, unidentified
MSLYCGIDLHANNSYVVVSGLEDEVVLGRRLPNDLERILRALEPYREELEGIAVESTFNWYWLADGLRESGYTVHLVNPLAAKQYEGLKYTDDRSDARWLARMLHLGILPTGWICPPEQRAVRDLLRKRVQLVRQRVACRLSLRNILERTTARRLSSNALERLSEEELSAWIEDEHVRLSMTTTLAVIETLSEQIERLEGVVFERARQGKAFSVLQTIPGVGPILASTIQYETGDLSRFAGVGHYTSYCRLVRSERLSNERRKGQGLRKNGNAYLSWAYHEAAHFAVRHQPSARKWHERKRSKTCALVAIRALAHKLARAAYFMMRDQVAYEPARLFR

SEQ ID NO: 340251 - protein, 321 aa, unidentified
MADHSMKVAGIDTGKAELHVCLLPDGTRFKVGNDAGGIAELVAKCVEAGIRSAEIEATSIYHRAAVKALRQAGIEVAELQPRQARGYAQALLQWSKSDTIDAAVIARLTRALDEVRPAPDPKIEAFAEVLTYVEQLEERIAWLKTSRERYANARLKARIAADIKELEKRRRAELKRLEAAMRKDQILATRLDLLLSIPGVAERTAIGLLIRMPELGTLTREAAARLAGLAPCDDDSGQHKGERHIHGGRSRLRRTAFMAAFAAALNWNHDLNIFYKRLRQRGKAHTAAVVACARKLIILANAIIARGTPWEKQRGMPCPAS

SEQ ID NO: 340252 - protein, 352 aa, unidentified
MRTSQKAAGIIATIGIDIGKNTFHLVGLDKRGAIVLQQKVSRGQLERRLANIPRCLIGMEACSGAHHIGRQLAAVGHDVRLIPAQYVKPFLKGHKNDYRDAEAIAEAVQRPTMHFVAIKTPEQLDLLALHRVRSRLVGQRTGVINQIRGFLIERGITVRQGPVPLRKALAEILSSDTGVLSPRMVGLVTDLVQDWRRLDERIAAVSAEIEALAEQDDGCQRLMTVPGVGPIISSAVVAAIGNGTGFKQGRDFGAWLGLVPKQESTGDRTILGKISKRGNKYLRTLFVQAAHVVLARRPSAAMRGLWPWIEQASKRLHRNMLAIALANKLARIAWAVLARGRAYQPRITADAA

SEQ ID NO: 340253 - protein, 427 aa, unidentified
MSVTQNEKIRQVTETTMVIGVDIASETHWARAFDWRGLELGKAVNFENSAEGFQFFLHWVSELAAEQKKDGVMVGFEPTGHYWFTLAAYLQGSSIKLVLVNPYHVKRSKELDDGHPSKSDRKDPKTIAKLVLEGRYVLPYIPQGLYAELRVAMNCRWRVQKELTSVQNQIQRWLKIYFPEHKTVFGKFEGIGSMALLHAAPFPSDLIALGVDGINQIWRQMELRCVGLKRAQRAFEAAQNSVGCTTGIEAARMELQILLEDHDAKLQQYERIMEVVESLCRQIPEVEELLQIKGIGISTIAGIFAEVGDIRRFSSPRQLQKLAGLAITENSSGKHKGQTEISRRGRAHLRAILFRAAMPLVAKNEEFQKLHHYFTTRAENPLKKMQSMIAICCKLLRVFYAVATKGCAYSAEKMLADIHRNQPLKAV

SEQ ID NO: 340254 - protein, 377 aa, unidentified
MTSTDAATEARETVYVAIELSKKTWVLGIAHPDRDRPSIHRVSGGNIAELVSRLRVAARNNRRILVCYEAGYDGFWLARALAKMGIECRVLDPASIQVNRRARRVKTDRIDVLALLRALIATDRGERHVCAIARAPSIEEEDARRSHRERQRLVRERTGHINRIKGLLFAQGIRDIKPKLRRSRIDFAALETAEGHPLPDRLRRELEREYARLSLIATQLREVEKERDTADAQDPVVEQRRQLLVALHGVGATSAAILAREVFARSFASRRQLGSYLGLTPSAYDSGSTTRCQGISKAGNSWARRILIEVAWLWQKYQPASPLSHWYIQRTAGQSSRIRRIMLIALARKLAISLWRYVETGLVPEGVAIAKAKLRPA

SEQ ID NO: 340255 - protein, 404 aa, unidentified
MWYAGIDWANDHHDALVIDEKGRQVGSLRVEHNPQGLSKLNTFLEQIVGSESKDQLACIIETNHGLLIASLLEAGWAIYPVNPRTVDRRRSASGAKTDTIDAYLLAKTGRADLADLHRLTPDSEKITELKQLTRDQDALIRMQTRLVNQLTACLKAYYPVVLELFSKLQQKSTLLFLQTYPTAQAAKTASAHQIQEVLRRAKHPNPLPVATQIVERLHQPHLQADAITTRTKSRLMLVLVGQLLPLIEQIAQYDKEIDTLFLTHEDHEIFASLPRAGQRLAPRLLAEIGDDRNRYQDASSLQALAGTSPVLFQSGMYSKAHRRLGCIKPMRNALHQFAWQTTQSEPWAMQYYQRKRAEGKSHTVAVRALANVWVRIIFAMWLHHHCYETATFEQAQQQHVRRAA

SEQ ID NO: 340256 - protein, 365 aa, unidentified
MASSRFWAGLDVGGASTSICVIDQSGAIVQESACPSELPAVDREIRWLRRRRSARVGIEAGTGASLARGLRTLGYTVDIFETRQLSKFLRVRRNKTDAGDAAGIAEAGRLGASAVSRVFLKSLDAQALQAELTIRRQLIRQRVATVNLLGRMVDLFGGRSIGRAQSNGFRINAAKKLNALFERSHPLAKELRYLLSLCEQLADHQREIDHELSNRASEDEICRRLMSVPGVGPICALSFKSVIADPHRFVHSSEIGSYLGLAPRLFQSGQSTRTGGISKMGNRAMRALLVQSAMVFMRSAPEDCALRQWATQLEQRRGRRIARVALARKLAIILLVSWKTNNSYCAGAQAGYMAASRPDPDRPTV

SEQ ID NO: 340257 - protein, 346 aa, unidentified
MKKIFIGIDFSKEKFDATLIKAEGVEERAERQHEVFDNKVSGFRRLLRWVKSATDEQDTDLWLFCGENTGGYSKALCNHLYGSGYDMWLENALSIRRSSALQRSKSDKADAGIIAEYAMRNYDQMRLYKPLDKNLERLREVFLYRHNLVKLKAGMTVRKGEKKLTQDKSDISRFMAMSSKHLISEFNKKIAECDMRIEKIISEDENLRRNFDIITSVPGVGTQNAVCLMVYTDNFCRFDFDSRKIACYYGVAPFGRQSGTSVNTPPHVSPFANKLIKALLTQAALASVHFCPQMAIYHHRLVEAGKKKPVALNNVKNKLLHVITAMVRKGEKYNPDHDYYAALNAA

SEQ ID NO: 340258 - protein, 377 aa, unidentified
MAWVLAGERNRATPWLSEQQTKNTNTHMKIKTTSSLKAKQIKLGIDVHADSYRVVRQVDNATPQPAQKFTPQGFLLWAQKQLEQAETVCSCYEAGPFGYGLHRALAAMGIQNYVIRPQNWDELGRGVKTDKTDALALVLRLDRLLAGNTKALAVIRVPTEAEEQARSASRQREQLRQHRQRLEAQGRSLLLYYGCRVRGRWWSPQNWPVVKNRLAVPLQTLLATLRELIETVNEKLTTATEQLEAQASPQPVGFGALSSELLRREVGDWGRFKNRREVASLTGMCPRVRASGNQQQQGSITKHGNPRLRRVLIELAWRVVRYQPDYPPVRRWQAVLLGPSAGARKKAIVAIGRKLAIDQWRLATGRGTAESLHLKMN

SEQ ID NO: 340259 - protein, 331 aa, unidentified
MSVHVGLDVGSRTTAMGWRDKGRAAGSWDIAQTPKGRKAAVKKLKALKPLSVVMEATGMYYLDLALELNAAGLPISVINPKSSRNFAKLVLQHNKTDAIDAQLLAEYGERMTPRLWMPPSPAQLELRAIGRHINRLTGHCTRAKNELHALRATETTSAMMIEDEEEAIAMFGRRIERFRQAGLEIIANCPALQDQFNHMAAAPGMGGVSTFAVLAELTTLPETLKSSQVSRYAGLDVRLTQSGTSIDKPGRLSKGGNAYLRSAMFMPAMSAIRCDPYVKAFYEGLVGRGKRKMQAICAVMRKYLTGLWACMRSGEDFDTAKLFSDKHLLKA

SEQ ID NO: 340260 - protein, 354 aa, unidentified
MTSNQNTDTVPGARAGVIKLGLDVHASLIVVVRQVDGQASQPPQRFSEEAFVGFVHRQLAAAEAVHSCYEAGPFGYVLHRRLTALGVHNLVVRPRDWSTYGERVKTDARDAGALCSSLDRHLAGNRGALAVVRVPSEAEEAARGVSRQRQSLVRDRVRFTLRGKGIARLRGIALPPEWWRERAFARLDIPADLREQLSGLRRVILSIDAEAVALTTQIEAAAPAALPAYLGPLTWEILRREVGDWSRFANRRQVASYTGLCPSEHSSGASRLQGSINRHGNPRLRHILVEAAWRLLRYQPAYRPVAKWREAFMDQGRPGRRKKIVVAIARQLAVDLWRLATGRATAAQLGLVVP

SEQ ID NO: 340261 - protein, 429 aa, unidentified
MNYNTQNAKIASITEKTLIVGIDVGSETHYARAFDWRNYEYSKKPFAFNNDEAGFAAFKAWMEDMADKHGKEAVIPGMEPTGHYWLNLGAYLQEQGMKPVHVNPHHVKKSKELDDNNPNKNDRKDPKTIAGLVNEGRFSYPYIPTGIYAEIRNLSNLRIQTQEELTRIKNRIARWFSIYFPEIKDVYKNPDAVSGMMVIKKAPLPCDIKELGVDGVNQVWRDAKLKGAGLKRARTLVSAAEHSIGSTEAPGSARIEIRNLLNDYEVYKNRMDDLMREIEAKLSEIPYIDKLMEINGIGLKTVSCFIAEVGDIRRFDNPKQLQKLAGYAIVADSSGKHNGESRISHRGRKRLRYALYEAAISVIGKNKEFREIHDYYRTRKQNPLKKMQSVIAIACKLNRIFYTILTKGVDYDGQKMLSDIVRPETIMAA

SEQ ID NO: 340262 - protein, 341 aa, unidentified
MDYFAGLDVSVKDTSVCIVDDAGRIRREVKVASEPDALLAVLRNPAYHFKRIGLEAGPLSQWLFSALAEADLPVICVETRHMRAVLKARINKTDRNDARGIAQMMRVGLYVHVKTLRSQKLRMLLTHRKLLQAKAIAIENDLRASLRNFGLKVGVVGTVRFEARIKALVENLPDLEALVEPLLVVRRVLREQINILHRRLLAVVRDDEVCRRLMTVPGVGPVVALTYRATVDVPARFRKSKSVGAVFGLTPARDQSGERDRPGAISRCGDEMMRTTLYEAAQVMLLRSAKWSWLKAWAMKIARHRGMKKAIVALARRLAVIMHRIWTDGTEFRWTREAAAA

SEQ ID NO: 340263 - protein, 439 aa, unidentified
MFGCVERTPGMEEVDEVELVVQRVAALDLGKATLEACMRVPHPSKPGRRMQEIRGYATTTATLLEMAIWLRQWGIERVAMESTSDYWKGVYYLLEAEGFDCWLVNAREVKNVPGRAKTDRADAVWLAKVAERGMCRPSLVHPPPIRRLRDLTRYRRALVSDRSREMQRVEKLLEDAQIKISSVLSDIHGVSGRAMMEALIAGQRDPRSLARLAKGLARKKTDRLEEALRGFFTDHHATILQMMLDNIDRIGAQIAALDARIAEAIGPFSRQGSRLADIPGVNTVAAAELIAEIGVDMTRFPSPAHLVSWAKFCPQIHQSAGKSRSKARGKGNPWLAGTVGRIVFSASHTDTFLGARYRRLARRRGKPKAIVAVGNSVLTVVYHLLSDADLDFCELGPAHYESRINKHRRARDLATQLQALTGQHIVIRDGKAIITDNAA

SEQ ID NO: 340264 - protein, 390 aa, unidentified
MHVVAHQPEAPGAIRSDLGAIFVSLELSRSTWLITSLSPCAGEKMSKHSVAAGDIGALLARFSEFKQKAFARTGKSFPIIVIQEAGLDGFWIHRVLQSEGIESHVVDPASIATSRRRRRAKTDRIDGEALLRALLAYKRGEPRVCAMVKAPTPEEEDRRRLSRERKTLIGERVEHVNRIKGLLFCQGVSDYEPLRRDRRQRLDELKTGDGRALPDHLKAQISRELDRLELLLEQIKAVEAGQNTLFAAAKAEAPTPAPVTMLLDIKGIGPEFAAILWMEAFFRSFANRKQIAAYAGLAPTPWQSGAVNCEQGVSKSGNPRLRTTLIQLAWLWLRHQPQSALALWFKERVTRNGGRFKKTTIVALARKLLVALWKYVTAGIVIEGAVMKAA

SEQ ID NO: 340265 - protein, 342 aa, unidentified
MNYYAGIDVSLECSSVAIVDATGKIVREGKVASDPVALIAWFRVFGLNVIRIGLEAGPLSQWLYAAMKEAGLAVELLETRHVRNAFKTMAVKTDRKDARGIAELMRVGWFRPVHCKSMDAQETRAILTARTLVQSKLHDIEASLRGILRGFGLKVGKITSNRLAGRINELVVGHPTLQIIAEALLAAHEVLLRQFKGFEKRVRIMAREDAKARLLMTATGVGAIVSLTCSSGIDDPGRFKKSKTVGAHYGMAPKKYQSGETDYTGRISKTGDKSVRTALYQAAHIILTKPVKGSVLKSWAMRLAKRIGMKKAKVALARKLAVIMHRMLVDGKPFNPAAGAAA

SEQ ID NO: 340266 - protein, 366 aa, unidentified
MKKHTSKKQTTRKGTAKETFAFYIGIDLGDKKSDICVLDEQGELHDQFRLRMNAQELQTYFGSLARSRVAIEAGAQSRWVAEVIERCGHQVYVSNTRQVPYIHQSDAKNDPGDAYKLAELVRFQPRLLHPIQHRSQEAQADLSWIRAREVLVGSRTQIINAIRGMSKAFGERLQKCSTTSFTGKRGDQIPAPIRSAVAPLLETIDYLNEQISYYDQMIQQVARTRYPRHRLLDQVQGVGVHTALAYMLTIGDPERFDKSRAVGSFLGLRPKQKDSGERKPQMGITKAGDEYLRKTLVNCAHYILGPHGADSDLRRFGLRICERGGKNAKKRAVVAVARKLAVLLHRLWISGEVYDPLRNRQVAAAA

SEQ ID NO: 340267 - protein, 454 aa, unidentified
MKIAKSTSQPKAQAALQIVYPNAAGLDIGASEIMVAIPPDREGVTVRGFGTYTPDLAALADWLSEAGVTHVAMESTGVYWIPIFELLEERGFEVIVVNARHIKHPPGRKSDVMDCQWIQQLHAHGMLRGSFRPEAEMCILRAYLRHRDNLLEDRAKHIQYMEKALLQMNLQLGQVLSDLTGETGLAILHAIVKGEHNPLILARMRHGNCKHSPEDLIKALTGHYRKEHLFVLKQALEMFESFSQRLRECDQEIERLLEEMKPELPDDFPPLPPDPKPNSHSKNAPSYDARALLYPLVGVDLMAIPGMNEILLQKILSEVGLDMSRFPTDKHFCSWLGLAPHNAISGGRILYSHTLKNHNRAGQCFRLAARAVSRGNTVYSEFYRHIRARSGAKEANVATAHKIARTFYFMLKRGQPFLAPDLQTYLQVQREKDIRRLQARAIKFGFRLQPAEVS

SEQ ID NO: 340268 - protein, 397 aa, unidentified
MTTDICGLDVASTSAAVCVQNADGSILHELTLPATRDGEDRLLALLPTAAAVYMESTGRYHLRWARRLAAAGHRVYVLNALLAKRLIGAANALRQNKTDKIDARQLADVGRRNDGELETYRFREDVGRLGLRTLCLVRAQQRQLLTSTLKSAGDLLYSILPEAAFLKLAENRGLAALFLRIDSLRQLQRLRLPTLQALVCSKAEALHTALRQPLSAAETFDILLPALQAQLRLIESLRDQQLTLLAAIRTAVQTAHRGDDVALAESIPGYGEKTAATLVACIPEDFRSWGTKQKVARKLQAYFGADPKLKESGKWKGQVRMSKRGSELARTALFQAATCAMLHDPTMKAVFDRKQAAGKFYLVCVSHVMRIQLRRLVAVLYDRKPFVLHSPQLALTT

SEQ ID NO: 340269 - protein, 386 aa, unidentified
MRDQTFVPQDYDVFVGLDVDKRSIAATFSGAQGFIRSLQMPYSVDHLLNHVRKHFGDQKIAFVYEAGPTGYGLYDGLAAQGYRCLIAAPSMIPRAPGQRVKTNRLDSRALSESLRGGQLKSIHIPSAVYRELRHLTQLRDTVVREAAAHKQRIKALLLLEGIGFPPAPARSQWSFMVKEKLRKLACSGSVRFKLDQLLDSLEFCQKQVVSSTKEIRHFCKADAELKQSIEYLMSISGIGWIVGSQLLARIGDWRQIDNVRQLGSFLGLVPTENSTGDTVNRGSITRVGDGRLRSKMIQAAWSAIRQDAELREFYRSVCQRNPRGKGARIAIVAVARKLSMRIYAVLKNQRPYIVREQVHSAPLTQEETSPQGTTRRFAEPGETENS

SEQ ID NO: 340270 - protein, 467 aa, unidentified
MTPHKDYCLDPCPPVLTPMLPPSPILSDALQVCHPHAAGIDIGEAEHWVAVPPGSDPQPVRRFGPFTADLDALADWLIDCGVTTVAMESTGVYWIPLFELLEARGVQVLLIDPRQAKRAPGRPKTDRLDCKWLQRLHAYGLLAGAFRPADQVCVLRGYLRHRQMLLTYAAHHIQHRHKALEQMNLKLTQVVSDITGVTGMAILKAIIAGERDPVTLAKLRNPHGQHSEDEIAKALQGTWRAEHLFALQQAVELYQFYHPQLTTCDQRITAHLETFADKSDGQPLPPKARRHKKTNEPRFDARTPLSRLAGVDLTTIEGIEENTALILLSEIGTDMHRWPSVKHFCRWLGLCPQHQSSGGKVLSRRVRPGAHRVTVALRLAARRLHHSQSALGAFFRRMQVRLGTPKAITATAHKLARLVSSLWQHGSAYVQQGLDAYEAQYRERKVTTMAKQAKALGYTLVLLAAQG

SEQ ID NO: 340271 - protein, 349 aa, unidentified
MPIVGGLDIHRKQLTFDYLDTVTGEVRRGQIAPADREHLRAWLARFAGRDDVAFAIEGCTGWRYVAGELAAAGIAAHVGEPADTAAARGRKRHAKTDKTDARHLRTLLAEGRLPECWIPPAQILDYRALLETYHDLRREHTAWVQRIHAVFFHQGAPRLGEGALRTEQGLAALRAAAVAHLSPAGQLQVATALDMLAAVGARMEVLRKQLLDAARHLTGAKVLAARLYGAGPVTALALTCWLAGAGRFSSSRKAVRFTGLDITVWSSDRKGPPGRLSRQGPPVLRWAVYEAGKTHARSSAPDHRYYTAVKDRKRAALSEARKLVRQACHILTELGDDALTAADDALTAA

SEQ ID NO: 340272 - protein, 411 aa, unidentified
MEAIIERCAGLDVHQATVVACVLIGEAGRKPRKEIRTFSTMTRDLEGLRDWLTELGVTHVGMESTGVYWKPVHAILEGHFTLIVANAHHIRNVPGRKTDAKDAEWTAELIRHGLVKPSFVPPPPIRELRDLVRLRRSLSDALTTEQNRTLKLLETANIKLAGVVSDVFGVSGRAMMKALVENTATPQEMADLAKRSLRRKLEPLALALDGRLSEHHRYLLAFHLRRVEAIEADLRDLDQRIAEKAQPYQAQRRLLRQIPGVDDRLAVAIIAEIGIDMTVFGNAKRLAAWAGVCPGNHESAGKKKNTATRKGNVHLKTTLVQAAICAARKKGSYYKDKYHRLKARRGSLRAAMAIAHKILVAVFHMLGKSVPFQELGEAFLDQQARKRTTTNLVHRLNNLGYEVLLRPKVAA

SEQ ID NO: 340273 - protein, 430 aa, unidentified
MSDTTSPSLEPIFSSFTHFAGLDWAKDHHDVAIVDKSGAVVLELRFDHTREGWSILADKLRVFSNLALTIETSSGSVVERLLQMGLNVYPIHPLAAERFRDRKAPGGVKSDRFDAWCMADALRTDGHGWRRLRAEDSLTQELRLLCRDEIALIEQRTALINALQAALHEYYPAATEAFDDWTLQAAWAFVERFPSPAQLLSKGKRQWEKFLHTHRLARPETYEKRLAAFAKAGEFVASPATTRAKSLLAVSLCLQLRALQGQLDEYRRRITELFNQHPDKDIFDSLPGIGPKLGPRLLAECGTDREKFEDHEALQCLAGTAPVTRQSGQICIVRQRLACNKTLKATVHLWANLSRGTCVWAEAYYQKKREQGKSHACALRCLGQRWLKILWKMWKDRTPYDEALHTRNQIKHGSWVIKLANTTPLPTGPH

SEQ ID NO: 340274 - protein, 447 aa, unidentified
MPDASPSRRRRARLKVVNPRSAGIDIGSRFHVVAIPTELDDEPVRKFLSFTSDLKRMVEWLLAVNITTVAMESTGIYWVPLYEILVAHGIEVFLVNARHAKNVPGRKTDINDAQWLQQLHSYGLVRASFQPDPCIAKLRAYFRQRDVLVRYRSSHQQHIQKALMQMNLQLHHVVKDITGLTARRIIDAILSGERDPKKLAALRDRRCKESVETIAAALDGNYQEEHLFELKVAVEMFDVYSAKIQECELAGQSVLQELAGDDDVEPKRQASDSRIKGNGFSFNPQELIKSVAGHDLLALPGLGPATVITLISECGLDMTRWPSAKHFVSWLGLSPQNKISGGRVLSSRTRQGTTRAGSAFWIAAVPLSRTSTALGAFQRRLSARVGKSKALIATARKLAILYYKTVRYGMEFQEHGDLAYQQASRERQIHGLERRAKALGYQLVATG

SEQ ID NO: 340275 - protein, 445 aa, unidentified
MRQKKSSRKEHMKLPKHLQHINQYAAGIDIGSRSHFAAVPEGADEQPVREFSTFTGDLERLAEWLISCGVTTVAMESTGIYWIPVFEILENHGLEVKLVNARHVKNVPGRKSDVLDCQWLQQLHTYGLLRGAFRPVEQVCTLRAYVRQRATLVRSAASYIQRMQKALAQMNLQLHNVVSDITGVTGMRIIKAILGGERNPNILAAMRDQRCKNSEATIARSLKGSYRPEHLFSLRQAVEFYEFYQSKIADCDCQILEQLKSFDVLDSPNDEPPISVGEALQRMSGVDLTSIDGIDTNTALKILAEIGTDMSRWKTAKHFASWLGLSPGSKISGGKVLSSATKPVANKAAAALRMAAFTLFNSKSALGAYLRRQRSRLGAPKAITATAHKLARLIYAMLTHGTAYVDVGQEYYEERYRSRVVQNLKRKAQELGFELVTIQGVTAVA

SEQ ID NO: 340276 - protein, 403 aa, unidentified
MVSSPRRTMKFIGIDIASEKHVVAVVDAEGTVLVKPTSFTEDLAGYEKLLGLLRPAEGALVALEATGHYWQNLFATLVASGFAVALINPLRTRRFAEVDMPRAKTDAVDALSIAKFAAEKRPMPTALPDDATLELRELVRLRDRYVQDLGDRIRQLHRALDLTFPEFTKLVSGLDTELATSLLTRCQTAMQFATQPLRQLSRFVYDGSHQVGEELARALIQTAKVSVGKHHGPAYRRQVEDFCADIATFRSRIKTLDEDIRSTLKKHEIGMLLTTIDGIGKTTAARLVAELGDITKFESAEALAAFVGVVPTVSHSGKRTPLRAPTGRLGDARLRAKLWMPTLAAVKHNPWLRAFYERLIARGKLPKVALTAALRKLLHAIYSVAKNRRAFVPMLPPNAPGHA

SEQ ID NO: 340277 - protein, 408 aa, unidentified
MEVLYPRCAGLDVHQQTVVACARIASGPAVQQEVRTFSTTTGALLALADWLTAHGCTHVAMESTGVYCKPIWHVLDGQFDLILANDLQIRSVPGRKTDVNDAMWIADLLAHGLIRSSFVPPAPIHELRDLTRTRKQLVREVSQHTLRIQKVLEDANLKLTSVISDVMGMSGRAMIEAITRGEQDPERLADLSQGRLKASRPAVIAALQGQVTPHHRFLLRLHLTQIDALEVAVRDVEAHLGEALAPFQAAVDRLMTIPAIGRTVARVIVAEIGVDMTRFPTAGHLVSWAGLCPRQQESAGKRLSTRTRPGNPWLKTTLVQVAWVAARTRNTYLRAQFLRLKSRRGAKKAILAVAASMLTAAYYILKDDVRYHELGADYFEHRDKAQIARRLVRRLEALGLSVEVRPAA

SEQ ID NO: 340278 - protein, 409 aa, unidentified
MKLFVGMDVSSSDLKVCIMNQEGETLNSFTVSNNLNGASYLRDQVIALADKHRSKEIQMGLESTSVYSWHPAMFLNEDEELRKRNTKVYTINPKLIRKFKEAYVDMDKTDHIDAWIIADRLRFGRLPFTVIMQEQYVALQRLTRMRYHLMHNLTREKQYFLQHLFFKCSAFTTEVESSVFGHAMMELLLEKYSLEEIGAMEVSELASYLKEKGKNRFPDPERVANCIQKAVRSSYRLSKCVEDTIDILLGTSIESIRSIQAQIKQLDKAIEKVLDGIPNTLQTIPGIGPVYCAGILAEIGDIARFKDQASLAKYTGLTWSKHQSGKFQAEETNMIRSGNRYLRYYLVEAANSVKRYEPEFRDYYQKKYLEVPKHQHKRALVLTARKLVRLVDALLRNDQIYTPGRKVNN

SEQ ID NO: 340279 - protein, 364 aa, unidentified
MEITTIGIDLAKSVLALSGADRRGRVVMRKQLRRGQVVEFLSRLGRCVVGMEACGGAHHWARAIAKLGHEVRLMSPALVLPYRKGNKHDRNDADAVLEAVGRPTMRFVAVKSVAQQDLLALHRVRGRLMKQRIALSNQIRALLHERGVVTRRGAAGLRAGVGAALADEHNELSGELRGLVVELMEELGALELRLRSFDQRIERAARRDERCIRLRAVPGVGPLTASALVATVGNAREFRSGRELSAYLGLTPRQHSSGGKTVMLGISKRGDRYLRTLLIHGARSLLYGKRWRTHPRSAWAGRLIASRGQNVAAVALANHNARLLWALLSRGARYRPGLHGTRPPTEATVKPGRREGKLVLAKEA

SEQ ID NO: 340280 - protein, 387 aa, unidentified
MSQLNDLSRSLVALEQDATLIAVIEMGQSSWLVAGVVPGIERNPLKKLSPDRDRLLQLLHRWRKEAVQAGRTIKRIAVAYEAGRDGFWLARWLRAREIEAYVIHPSSVPVSREHRRAKTDRLDTELLKRAFLGWLRGEPKHCSMAAIPTPEDEDARRPSREREGLVGERTRIVNRLKANLARLGIRGFRPNLAHASSRLETLRTPEGAAVPENTLAELRRDMARLRFVKQQIKEIEGARARHLERASGERRAGMVRLLTQVVGVGIETADMLVQEVFSRNIRDRRALARYAGLTGAPDESGQKRRERGLAKAGNARVRRGMIQLAWGHLVHQKNSSLADWYRRRTADARSGTRKTMIVALARKLLIAFWKLVTTGEAPAGLLLRRAA

SEQ ID NO: 340281 - protein, 348 aa, unidentified
MKTHFIGLDTHGQFCDVTAVNGKGEVVLRRRSKTNIPALVALLELVPKPRHLVIEEGPLADWLWRNLWSQVEQMVVCEPRRNRLIAREGDKDDPIDAEKLAQLFRGGFVKAVHHTATLERACLKQHVSLYQQQVRLRVHEGHRARGLLRQHGIIVRERDFAQSADRQDLLARLPTNRTLREDLELLWQSYELAALHELRLGKRLVELAQQEEVVRRFQALPGIGWVRGLTLFVWLDTPWRFATKQALWRYLGIGLQRRRSGNGPERLGVPKQVNRPLKSTILGAAKSAAAQGDNPFADQYRRWRDEGLSARVARRNVARSLAVTLWGLWKNGSAYRPDWVGVAAAARR

SEQ ID NO: 340282 - protein, 340 aa, unidentified
MSIVGGLDVHRAQITYDYLDTETGEVEVGRIVPATRCELRDWLSRFEGQDAVFATEGCTGWRFVVEEMQRAGVGAHLAEPADTATLRGRKKRAKTDRADARHLRRLLVEDRLPESWIPPGHVLEVRTKGRVYLALMNHRRAWQQRIQAQLFHQGVEKRAGLLTAQGRAHLDDAELSAAGRQLVEVALRIIDALGAEADQLRSELKAFARRQAGCRALVNELYGVGELTAAIIWAEMGDTRRFSSSNQAVRHTGLDITVWSSDGKRSPGRLSRQGPSVLRWALFEAALAAARESSPDHAYHLEVAERLGAKRAYLSVARKLARRVHHILRGLGDTAFEEVS

SEQ ID NO: 340283 - protein, 352 aa, unidentified
MNKHTTAVIQNASNATITAIGIDLAKNLFAVHGADASGKPVLVRPSVRREQLLELLAQLPACLIGMEACSGAHHWARQLQALGHTPKLMAPKFVTPYRMAGKQGKNDANDAAAICEAVTRANMRFVPIKTADAQASLSLHRVRQGFIEERTATINRIRGLLSEFGVVLPQQADSVRRGARLALETLPHWAHRALSDLLGHLGELDHWIGEYDTLLKQAAQSDERSRRLMTMPGIGPITASALLAAIGNGHDFRNGRQLAAWLGLTPGQHSSGGKAKLGRITKAGDRYLRTLLILGARSVLAVAHKKTDPMSLWAQALQARAGYGKALVAIAAKNARMAWAMLARGEAYRVVV

SEQ ID NO: 340284 - protein, 337 aa, unidentified
MEYFAGLDVSMEETHVCVVTRNGTVIHEAKVPSTPASIAATLARVPSCQRVLFETGRMAPMLYHGLSQLGLPVVCVESRQAYQALKSLATHKTDRNDARGLAHLARTGFFKPVHVKSLPAHAVRSLIIARKKLVGQRVTLENQIRGLAVVFGVRLPRALSPAFIRQALQASEGIPGLSAAMKGLVAARAAVLAAVVAIDGDIRKMARASAACRRLMDIPGVGQLTALAFTAAVDDPERFRRSRDIGAYLGLVPRRYQSGEVDYTGGISKCGDRRVRTLLYEAANVMLTRYKGPLKLKAWALAIAKRSTMRKARIALARRLAIIMHAMLRHGTEFKSA

SEQ ID NO: 340285 - protein, 414 aa, unidentified
MLKIVYRICCGMDIHKSFVVACIASTNEQGVTTYKSKRFSTFTGDLRRCADWLSENNCKDVCMESTGKYWIPVYNILEPTCNIVLAHPKYVKAIRGKKTDKRDAKWIADIFKHDLVSGSFIPPADIRQLRDLFRYRWKLTNFTTGEKNRAQNCLTVSNFKLDDVFSDVFGKAASAITAWILEHPTEKITDISAFRTKGMKATDERVLSAVDGEMCEEQAEKLRIIRSHMSSLQLCKLNLESLILSTAEKYLPQLGLVMTAPGIQSFAAIGIISEIGVDMSVFPTSKHLCSWAGLTPQNNESAGKKKTTRISRAGAYIKPLLVQCALCAIRAKQFPEVRNRYLALKKRRGHKKAIIAIARMLLTAIYNMLKKNEPYNSELYRKGDRPPAHREVSVAEAIFILQRQGYLVAAPPTV

SEQ ID NO: 340286 - protein, 339 aa, unidentified
MVIVGCDFHPGWQQVAVFDSGTGEIRELQLRNSEGEAERFYGSLPSPALVGFEACGNTHWFEDMLDRLGHEVWIGDAAEIRASYVRKQKTDKRDAAHILKLLMEGRFPRLWRPSKADRDLRQLLIHRDRLVGVRTRVKNGLHHLMLNKGVQLKRKLWSKAGQKILHELPLEGWAAQRRTDLLQLLSTLDPQIEELDVAVERAAYANERARLLMTQPGVGPITSLAFVITMGDVTRFPSGKQVSSYLGLIPSEHSSSKRRRLGAISKQGSPFLRMLLVESVQTVCRLDEGFRKQYNHRCHRMKKGIAKVAAARKLAVRLYWMLRTNTAYPEIAHIEGSPR

SEQ ID NO: 340287 - protein, 417 aa, unidentified
MSIDPGVTPVRVTAGVDWAKDDHAVCVAGDQGEVLERFTVRHDAAGLKRMAARLLRTGAGQIGIERSDGPVAGTLLQAGLTVFVIPPAQVKNLRSRYGSAGNKDDRFDAYVLADVVRTDVRRLRPMARDSDQTSALRTSVRARRDLVGHRVAAANQLRAHLQIVFPAAATLFASIDSAITLTFLDRFTTQEQADWLSPRRLAAWLASAACSGGTGPCVLHARLMAAPRGATGQYASIHAGTTLALVAILRTLNTQIQVLAASIGEQLAAHPDAAIFTSLPRAGIVRAARLLAGIGDARGRFPTRDSLTCLAGVAPSTRQSGKVKSVTFRWGADKQLRDALCDFAGDSRRASPWATALYDKAIARGCDHPHAVRILARAWTHVIWRCWQDNLPYDPAAHNSLQALLSQDQPAATRTEA

SEQ ID NO: 340288 - protein, 395 aa, unidentified
MVHSVPAIWIGVDVGKEFHWAHALDASGTKLFSHRVENDESDLLKLIDEVLSFTGEVVWAVDQPGGGAALLLALLWERDQRVVYIPGLSVDRARDTYRGESKTDARDAHVIADQARMRPDLGELAPSESDLAELELLLARRRDLVVDKSRSVTRLRETLLSSFPALERALDLNRSAPLTLLTHYQRPAQIRRAGRKRIATYLRNRGVKGYEGLAQKALTAAEAQSVTLPAEDVAARIVAELAGEVLDAKGRIETLDAELRERFFAREEAKIITSLPGMGTVLGSEFLVCVGDLSAFESADKLAAYAGLVPAAHDSGKRSGNDRRMRGGNKVLKRAFYQSSFASLRSSPASRAFYDRKKAEGKRHTQALIALARRRVNVLWAMLRDGTTFKAPSSA

SEQ ID NO: 340289 - protein, 336 aa, unidentified
MNKLAVGIDISMDDFHACIKLRTDNDSIKIKGTRTFENTEKGFKDCLSWALKQQKNDCPLQFVMEATGVYYENLAYFLYANEQKVSVVLANKIKNYIKSLNVKTKTDKTDSKVIAGFGIERKLEDWQPMSPVCKSLREQCRELLSIKKDMQRAKSQLHAFEKAYEKLPAIIKLKKDQIEFFEKTIKVLRKEIKATVDKDPVLKERIRKIETTPGLGFETVVILVCETNGFDLFNSIRQLVSYAGLDVTQNESGKYKGKTRISKRGNTRIRQALYMPSLSATRANEPKLYQRINERNPETKRKGVVAGMRKLLILNYTLWKKDEEYSRDYDWTESNV

SEQ ID NO: 340290 - protein, 354 aa, unidentified
MKGTAVTIVEDKPVIIGGVDTHADLHVAAALDPIGGLLGVRQFPATAAGYADLLEWLGGFGDVGLVGVEGTGSYGAGLARHLAAAGVAVVEVDRADRQDRHRQGKSDPLDAVSAARAAQSGRASGVPKGRDGAVEAIRALMVAKRSARHERTQAINQARALIVTGPDELRARFAGHGPAALVEAIAALRPRPGDVPGYATRIALRELGRRVQFLDAQLERLDELIIPLVTARAPTLFSLFGVGPDTAALLLVAAGDHPERLRSESSWAHLCGAAPIPASSGKTSRHRLNRGGNREANHALWRIVITRMGSRPGHPATRAYVERRTKEGLSKKEIIRCLKRYVAREVYHQLRDSA

SEQ ID NO: 340291 - protein, 359 aa, unidentified
MRQLYAGCDLHGNSNLIGIVDGEGKRVFKKKLSNDFSLVRDTLKLFQEELVGIAVESTYNWYWLVDGLMEEGYKVHLANPSAIQQYVGLKHADDKHDAFWLAEMLRLGILPEGYIYPKQERPVRDLLRKRGHLVRLRTSLVISLQNILSRNLGRKVNVNDVKALREDRVTPLLESSEELALAGRVSKEAIDFLTYQIRRIEGVVEKRIELKEAYRYLLTLPGVGKILALTMMLETGPIGRFATVGDYVSYCRKVPSQWTSNGKRKGSGNKKNGNKYLAWAYAEASELARRFYPEPRAYYNRKMQKTNAPVAHSALAHKLARAGYYVMRDQVPFESQRLFGRGRGRNGEPELGLVKSHEA

SEQ ID NO: 340292 - protein, 333 aa, unidentified
MVEGTLGSHHKEGSRKMSKHSMICAGIDTGKRKLDVALDGRAERLQVDNNADGHKALSAWLRRHRTKRVGIEASGGYEQAVVAELRHDHFQVIVFQPAQVRAYAKFHLQRAKNDKIDAALIAVCTAAAKKIHAPPDPRLAPFSEHLTMIEQITEDIARFKTRRESCRDPRIGQFWDEEVARLKRRLKIELEQLVAAIREHRDLAERLDLIASVDGVGERTALAILVRMPEIGTLSREQAAALAGLAPYDDDSGDQVGVRRIDGGRERLRKSLYAAALAASFRWNPQLGTMYRRLLAAGKAHKLALVACARKLLIFVNTVVARGTPWTKKTAAV

SEQ ID NO: 340293 - protein, 350 aa, unidentified
MDKELYIGVDVSKQTLDLAYYDGESIDWKKAHIKVSNNNAGFKKIGSWVAKVSKEVDIVLFCMEYTGLYTQNFRLWLEEKHYIYRMVEPRKMHRFEPDLDDGLRSLDRIKTDELDSFRIAIYCEQNHRKILRNPSKLPPPVYFKLKRLLAERKQTVKQSVLYKQQLHDICAYDTDLSVERKNGQLKTLNDALKGIDNEIDMYIKEDADISKNFSLLTSIPGIGRVVALETIVLTENFMAIDNPRKYACYIGVAPFKKESGTSVRKGSSVSKKGFKQAKADLSIACLVCMQHIPNIRDYWERKRKEKCSGIVFNAIKFKMILRMFAVIKRGTPYVETDNYRNGKNKQPGVN

SEQ ID NO: 340294 - protein, 418 aa, unidentified
MKKHNNSQKKSEPTSKRTKSRGPVQRDMKEVLAELVGKLKEKLDPKKVAVTSAGEKHQSGELRPNLDRLTVGVDLGDQWSHYCILGLEGETLAEGQLRTTQQDIAEFFQALNAARVVFEVGTHSAWVQEVICGCGHEVLVANPRLMEGSKRRKRKNDRIDANKLARLGRVDPQSLHPMRHRSKEVRQDLVVLRARNALVAARTELINATRGLVKSMGTRLPKCSSESFAQKVEEAVPGEIREALLPLVRMAAALSDCIQGYDEKIEKLGREKYGHTALLRQVKGVGPITALAYVLTLENPERFVKSRDVGPYLGLVPKQEDSGESQPQLGISKTGDTMLRKLLVGSAHYILGPFGPDTDLRRYGLRLCERGGKNAKKRAAVAVARKLAVLLHCLWVSGEVYEPLRQGMSPTIAPAVAA

SEQ ID NO: 340295 - protein, 358 aa, unidentified
MSTQTTAYPKLYIGMDIHKKSWSVHFRTDLFDHRGFTMPPHPEKLAEYVQHHFSDHQVSITYESGCCGFSAARYFAEIGWKVTVVNAADIPRIQKQQFQKTDRIDCRMLCKNLQQDQLKAIHIPTEEQDQLRSLVRHRNSVVKQVRQVKLHIKSMLLYQGIILPGAFDNANWSKAFLQWLSEIPWQHSPATYSMQSKLRILNSLHTEYLTCANELRRYCRRHHQKDYYLLKSIPGIGGYLASALLAELGNMRRFNNEDQFSAYIGMIPAMRNSGGTESTLGITPRSKSLIRSYLIEAAWVAIRRDPEMQSYYRKHFGKNIKNVIVKVAHKLIKRILSVIKNERPYQVSYQHHSALKLN

SEQ ID NO: 340296 - protein, 368 aa, unidentified
MDKSSKLYVGMDVHKDSIDVATGDDAAGEVRHYGAIGGDMAAVSRLCRKLESTGKVLVFVYEAGPCGFGIYRMLRGRGHECWVVSPGMTPRSNADRVKTDRRDCLKLARLARAGELTPIHVPDETDEAMRDLVRSREDAVVMQRQARQRLGALLLRNDVRYNGKTAWSPAHRRWIAELKLPHAAQHIAFEEYTQGVDEAGKRIERLEAAIHDELGRWRWRPVVAALEAFRGIRTIHAVRLVAELGDLARFAAARHLMGYLGLVPSENSTGNRRRQGAITKTGNSSARRALVEAAWAYRYGARVSVGIARRQSGLPKPVTDLAWKAQLRLCSRYRRLSARGLNRNKIIVAVARELSGFVWALGQQVKPL

SEQ ID NO: 340297 - protein, 405 aa, unidentified
MNMNAIGIDVSKRKSMVAILRPGGEVVAKPFEVSHLSKDLRSLIHRIRSLDGESRIVMECTGHYYETIAHELVSAGLFVSAVNPQLIRHYQDEDNSLRKVESDKADSLKIARYTLDRWSKLKQYGLMDELRNQLKTMNRQFGFYMKHKTAMKNNLIGLLDQTYPGVNTYFDSPAREDGSQKWVDFADCYWHADCVRKISVDAFVDHYQKWCHRKKYNFSKTKAEEIYETAKEPVSVLPKDVFTKRIIKQAVEQLNTASRTVEQLRSLMNETAAQLPEYSVVMAMKGVGPSLGPQLIAEIGDVSRFTHRNAITAFAGVDPGVNESGDYSQKSIHASKHGSPALRKTLFQVMDVLIKTKPQDDPVYLFMDKKRAQGKAYYVYMIAGANKFLRIYYGRVKEYLASLPQ

SEQ ID NO: 340298 - protein, 377 aa, unidentified
MSKVLFVGLDVHAETIAVAVAETGGEVRSLGDIPNRLESVRKLIHKLGPVQHLRACYEAGPTGYVLYWQLTQLGVACSVIAPSLVPTKASDRVKTDRRDAEKLARCHRAGELTAVWVPDAAHEALRDLVRAREAAKKDQLKARHRLGKFLLRHGQQRPEGVKAWTKKHREWIKSHVRFEQPALEATLADYVEEVDHVGGRITKLEKAIDEAIQQAPSEIKAVVEALQALRGVAQTVAVSIVAEVGSLSRFPSPRELMGYSGLVPSEHSSGNRVQRGGITKTGNGHLRRVIGEAAWAYQHRPNVIGFLAQRQKRLAIAEETTKIAWKAQQRLHKRYKALSARGKNKNQIITALGRELLGFIWAIGVSAERQHQLSAAA

SEQ ID NO: 340299 - protein, 286 aa, unidentified
MVNDSPSTAGIDTGKDRLDVAVHGRGNPFAVDNTQAGWQSLATRLCQDGVQRVGIEASGSYERGIARHLQAAGFAVVILQPLQGRAFASLHLRRAKNDRIDAVLIAACTHLLDPKETKAADPRLDGLCDQLTFIEQVEADIARLKTRLEHIRDQRLRDIVTADIETLRARRADELRRLIAALRSHADLARRFALVLSVPGIGERTALALVLRMPELGKVSREQAAALAGLAPFVQQSGRWTGEPHIAGGRRRLRRSLYAAALPAAAPRQLIPASIAATTRLRRSTE

SEQ ID NO: 340300 - protein, 402 aa, unidentified
MSGSDDQVVSRSQVVIGMDPHKRSVTIEIMTGVEEIVGGGRFGTDGAGFADLLRCAQEWPERVWAVEGCNGIGRHVATRLVEAGERVIDVPPKLSARVRIFATGQGRKTDATDAHSIALVGVRMSGLAPVVRDEQREVLRLLVDRRRRTGEEHTVKTCQLHSLLLELVPGGAKKDLSAAQARALLATVRPRDLVGKTRRRVAAELVTDLERIYARKKDADKELRQVLDDVGTGLLDLYGIGPSGAARLLVEVGDVTRFPDRGHFASWTGTAPIDASSGDHVRHRLSRKGNRQINQVLHIMATVQLRHRDTEGRAYYDRKTAAGKTSGEAMRALKRRLSDIVFTALLNDAARAAAGPAAGPGGHSGTSTNSSVTSSHPDAGSSKKSLPEPATTQPRTTLPTAS

SEQ ID NO: 340301 - protein, 373 aa, unidentified
MPKYSTAFGMDVHLRSTTVCALDADTGEAVTRRFPGNPWGEVAEWMSGFPGPSLAAYESGYLGFAPQRELSGLGVDCVVAAVSKVPRSAADLSSKNDRNDAARMAKAILSHDISPVWVPSPEIEGLRDLAGAHDAATARLAAAKQRLLAFLARRGYAYGGTTPAGNPRRYWTYDFLRWLDKVRPADDGGIRALAALRSEVEAAAETRDDLLAEYRAAVAAGPLSAEVEALQSIKGCGFALAAAFASEVGDFSRFRSGRQVTSYFGLAPKQRSSADSVRLGGISGTGNALVRRLAVEGSWSYVQASHQPKLMPKGSGVPLEVRMHGRKGSERLLRRREEMLARGMPQAKANAATAAELVRWLWALGAMCREATE

SEQ ID NO: 340302 - protein, 445 aa, unidentified
METYAGVDWASEKHDVLIEDEAGEGLFAGSFAHDEAGLRALCRTLVRFEVGLVAIERPDGLLVERLLDAGLRLLALHPNQVAAARPRFRVSGGKSDRFDSFVLCELARTDHHRFRVLEPDSDQTKALRALTRAREDLVQQRVGLANQLRAELERFWPGPIGLFSDLDSRISLAFLKRYSSPKDAKALAAKRMQTFLAGQHYTGRQQPADLVAKLRRAPQGRAGELECDARRAVVLSLVAALEPIVAAISQLERQIATTVRAHPDGEIFTSLFKHPDSVVTAAIMVAEIGDCRARYPNRDALTGDAGQAAVAIESGKRKVACFRWACNKRLRDAFCTLADSTRHWHPWAADHYARSIAKGHDHQRAIRTLGRAWCRIVWRCWQDRVPYDPQRHRSLQQHITVIIPSSSDPAVVDHAATARMAAPLPLKRPNTKRLPDSNKRSVAAG

SEQ ID NO: 340303 - protein, 335 aa, unidentified
MNQARMHVGVDVGKDSLDICYPNGDKEHIRNTKRCRATLIKKARAFGAIVSFEATGPYDEALESECVASGVPAVRLDAWKTRKYAESQGMLEKTDSIDSEMIRDYAASLRPDQLHFVRERSAGYRKLKRAVSVRRNLLKAKALIASQLEGDLDAEIKSAIARAVASIDRQVERMDAVCVAAIRSDERMGAIAARFGQVVGIGPVLISTALASCPDIGSFTSKGIAKFAGVAPLENRSCTITKKPRPRRGRRDLRCALYMAAVSACRSNHRLRRTYEGLVARGIPKRAALIALARHIIVLMNYIAKYPDFNPEVDPKKAAQMALPKRRPGRPRKNP

SEQ ID NO: 340304 - protein, 551 aa, unidentified
MHDVSAPGARGDSPAQKALRAKWKTIGLPITDPGTGEKIVPWVWDGDDEQMTREVIWWHAGQDVDKKYIWTALYGVLARDPRQKVLGPIEWFGTDGPGLAKLVEFLDRFAPVRVLMENTGVYSNNPYWVQREHFDPDNARQRVIVMNSRVIARHLITNKSTDKVNAQRLAQLASVPEFLEPSYISTPAEFAVRGVLRQRNKANQAATRVKNRIKTMLASAGFSWKFNFKQLGERDLVYAFVQSNLSLGEFVTAAGEGSVPLTEHATRALRKIDWELSRWGDTRLDPIMQVLIAGFFAELARLNAQVEVYDKLVTERMMTDEKYRDSRACIQGITGMGGWTLATTLLESGPISRFNRIGQYLSYAGISNGKEQSAEVDVKKKPNPYSNHMLKAAYKTVAFTLLKQADAKRGSKTPADALLAYARVVKARAELGNGKKVNKVAAKVARVVYAVLKSGVPYDPAYEMHRAQAVPRPAKPRNKPLHRVRYLEKMLALCKTRAEELFEGTNMADTQEARDWLAKITGALASMDEAGLIHTITLQLKQARAVAKVYE

SEQ ID NO: 340305 - protein, 411 aa, unidentified
MDVVVACCAGLDVHQASVVACVNSTGRDGRSHKEVRTFGTMRDDLIALHDWLKDAGVTQVAMESTGVYWKPVYAALEDDFDTIVANAQHIKNVPGRKTDVKDCEWDSDLLRHGLIRPGFVPPREIRDLREVNRYRRKLAQVQAGERNRLIKVLETAGIKLAGVASDVFGVSGRAMIRALIEGEATPEAMAGLARGKLRGKRTHLARALDAPLQPHQRLMLRTQLARIEQAETDLQRLDVALTEMIAPYHRQMRLLMSIPGVEWINAVTIIAEIGVDMSAFVSAAHLASWAGLCPGNNESAGKRRSGKSRKGNVFLKTALITAAITGSRRGGGSYLGEKYRRLSARRGKLRAAVAIAHKILVSIWHMLTEGTFYQDLGAAYLDRLDRTRTARNLVRRLAAMGFDVQLQEKAA

SEQ ID NO: 340306 - protein, 356 aa, unidentified
MLQSNKKDFTGQKIAIGIDVHLRTWSVTVLTASGLIRTHSQKASAKELFEHLKKHYPNGSYHAAYETGFSGFSTYYALTELGIHCTVVHAADVPTTQKEQVSKSDPVDSKKLAKALMRDELECVYIHTKNNLDDRSLVRYRDNIVKQIGRTKSRIKHLLYNNGVEYPDEYFNGNHHWTRKFISWLQDDVRLLSETRMSLDMLIEDILHYRHRLLTVNRKLRTLAQSDKYANKYELLMSIPGIGTTIAMSLLTEIDDIDRFSNQRQFASFLGLIPMMSSSGNKEYVGEKTFRGNKQLGPRIVEASWISIRHDMELSAKYGSLCARGMKPQEAIIRIARKLSNIIFSVLKSNHKYECH

SEQ ID NO: 340307 - protein, 381 aa, unidentified
MTTPATRNVQESKTEGTLFVAFELSEKTWKLGFTTGHGQKPRERTVTARHQERVLDEIAQAKRRLGLLETAPVVSCYEAGREGFWLHRFLQAHGITNQVVDSSSIEVNRRRRRAKSDGLDVRKLLSMVMRYEQGERHVWQVVKVPSVEAEDQRHLHRDLETLKRERASTMTRIEGLLSSQGLRVPSLAKFPEQLEALRLWDGSPVPPGLRRRVLRVYAHYTFLSEQIAAVEVERRTLLQTSADARIDKIRQLMQLKGIGINGAWLLVMELFGWRAFTNRREVGGLAGFTPTPYQSGESSREQGMTKSGNRHVRWMTTELAWSWLRFQPDSALSVWFRARFGSGGKRLRRIGIVAVARKLLIALWRFLETGAFPEGAALKEA

SEQ ID NO: 340308 - protein, 341 aa, unidentified
MKKFIRTAIDLGKNYFQVHGLESEDGRSMSRKVKRSKILEFYSQIAPCQVGMEACGSAHHWARELVAMGHQVVLIPPAYIKPYVKRGKNDAVDAAAICEAMSRPDMRFILIKSADQQSVLMLHKTRELLVKQRTMSVNALRGHLAEFGIVTAKGIGRVDELLALAQADPALPRIAQSAVAGLARHLEGLEQSIETLDAEIAEAHGQNPASRLLDEVPGIGPLIASVTAASVPDPGVFKSGRDFAAWLGLTPRQNSSGGKEKLGAITKQGNRYIRKMLITGATSVLRVAGKRKGALADWINALRARKPERVVAVALANKLARICWAIMTSGESFRTDTYVKA

SEQ ID NO: 340309 - protein, 413 aa, unidentified
MSVSCGIDWAEDHHDVALVDVDGALVTKRRISDDAVGFGLLLELLVDAGDSAEDPIPVAIETTRGLLVACLRATGRKVYAINPKAVDRYRDRHSVARKKSDAGDALVLAHILRTDKAAHRPLPADSELAQAIAVLARAQQDAVWERTCAHNKLRSLLREYYPAILAAFASQRGGILRPEARAILAAAPTPAAAAKLTKAQLRKLLAQAGRQRGIDAEADRLHAVLRAEYLHHPQLVEDAYGMQALALLRQLTVACSNADELAAATVAHFDKHPDAEIITSLPGLGSLTGARVLAEIGDDRSRFADARSLKAYAGSAPVTRASGKSLTVTHRRVKNQRLAAVGYVWAFASLTASPGARAYYDRRRNAGDRHTAAQRNLFNRLLGCLHHCLDTRDHYNENAAFPTDSTTQRETAA

SEQ ID NO: 340310 - protein, 356 aa, unidentified
MPETNPAEVIIGVDTHKHTHAAVALTALGARLGTITVPASRRGYQELEAWAGSFGPVRAYGVEGSGSYGAGLSRFLQASGHAVIEVNRPNRQLRYQHGKSDPLDAEGAARAVLSGQADARAKPGTHAVEMIRHLKVARDTAVKSRTQAMITLKALIVSAPAALREQLEGLAGKMALIRHLAALRPGTLTSPTASAKAALRALAQRWLALDAEIKAHEAHLDALTAACTPILRTAYGMSTGTAAEMLILVGDHPDRIRSEAAFAKLCGACPIPASSGKIIRHRLNRGGNRQANAALYRVVIVRMRSHPPTLAYVRRRMGEGKTKLEIIRCLKRFVAREIFGYLCGAKTLPTAPMTAS

SEQ ID NO: 340311 - protein, 426 aa, unidentified
MKRIGLDHLAKAPDTAVLAGDVCRDRIDAYSELGGVGLEWDFENTPRELRAALVAFGERARLAGKARILVVVESTGAYSELVLRIAQELDFHTAWVSTEAVCKMRGIESNDSSKTDPKDARCIYRLAAVMGKTLRHRALTEEYGVLRELHLVYASAEEAVVVARNAAQDVLRRLFPGFGFKSGFLFGKSGHALVSCYGADPARILATDEAEFTATMRAAAKGIHGVSLRRLRSQAEACSTSFLSEELASVLVLRMRQLFEDLERHDARKAAIKARMVALYEALRLRTPALPAATQGVVSAFHLVRIVAETGPLSGFESWRQVMRLAGLNLTERKSGTWKGRTKLSKKGRPLLRKVLSHCVLPLVKTGALFGEDHRRNREQRKVAGTASMASISRRFLKMLFGWYRSGAAFDAARMRTCASAYRKAA

SEQ ID NO: 340312 - protein, 385 aa, unidentified
MLHANDLSRSLNCLEQDRTIIAVIEMSQSNWLVAGIVPGIERHPLKKLAPNEEDLLRLLIRWRAEATKKGRTIIRIAVAFEAGRDGFWLARWLCARDIEAYVIHPTSVAVSREHRRAKTDRLDTGLLKRVFIGWLRGEPDHCHMAAIPTLEEEDAKRPNREREGLVRERTRIVNRIKSCLVRFGIRNFKPTLRKAPERLSMLCTPEGVPLPPNTLFELRRDMARLRFVIEQIKEIEETRAQRLEQAPQENSHAMVRLIARVIGVGVETADMLVHEVLARNLRDRRAVARYAGLTGSPDESGSRRREKGLAKVGNARVRRGMIQLAWRFLLFQKDSALAQWYRARTEIDGRKRKTMIVALARKLLIALWRLVTTGETPAGVVLRAA

SEQ ID NO: 340313 - protein, 354 aa, unidentified
MIIIGADYHPAFQQIAFVDTETGELQERRLEHAEVAEKFYRELAAQGKKVRVGMEASGHARWFERLLAELNFELWIGDAAEIRRKRERKQKTDRLDAQHILRLLLKDDFPRIWVPSWENRDLRQLLWHRHRMVQARTRIMNQLQAVALNEGLRSKKRLWREQGREQLEAFRLAPWASRRRHDLLELLDRLNPTIAALSQAIEQEVEKCPEAQRLMTHPGVGPLTALAFVLIIGGADRFQCGKQIASYLGLVPLEDSSGNRRRLGHITKQGNSLLRFLLVEAAQVTVRSLPEWRSKYVHLTMRRGRKIAKVAMARKLAVRLYWMMRKGWDYEQVKKFGSHAGQPGHRHGVKSNIE

SEQ ID NO: 340314 - protein, 370 aa, unidentified
MSVYVGIDVHRKRSQVAVVAEDGKVQLNKNTVNGTEPILRLIGDLPPGTPVAFEAAFGWSWLAQLLEDYGFEAHMVHPLRCKAIASARLKNDKVDAATLAQLLRADLLPEAWIAPPAVRQIRALLRHRTGLVRLRTQLQNRIHAVVADFGYDRSGSYLSGPGRGWLAELELPAVSREIVTDCLTFIDALAPEIDRIDGELRQHAKTDPRVKVLTTLPGVGQFTALVMLAEIGDITRFPSARKLASWAGLTPTVRGSDRTVRHGHISKQGSAWLRWVLNQAAQTAKRSPEFAATYQTIANKRGKKIATIAISRKLLTRAWHLLAAAQAADPAAPGGSAVTAAHPQTGRVTQPRARSLTRHEQADGRARSSD

SEQ ID NO: 340315 - protein, 422 aa, unidentified
MNSGDQKSFTAYIGIDWADRKHDICIQSSKTGAREFDQIPHQPDELDQWANSLMRRFGAPMAVALELSKGPIVSALQKHDCFVIFPINPSTLARYREAFTPSGAKDDPTDAELALDIIIRHPDRFKPLNPQSEQMRALASLVEQRRRLVNDRVRTTNRLRNALKQYYPQPLEWFDRIDTLLFCDFITRWPTLHQVKRARPTTLTNFFHQHSMRFSQLLHNRVEAIKTATPLTRDEGIIAPHRLQALVLVDQLRVTLNAIKQYDQAIAELAPQHPDYALFDALPGAGPSLAPRLLVAFGEQRDRFNSAAELQRYAGIAPVTERSGKKHWVHWRWQCSSFLRQTFVEWAAQTINKSYWAGVYYRQQRDKGATYQAAVRALAFKWIRILYRCWKNNTPYNESVYLNALKQRGSPLVSQYPDTINP

SEQ ID NO: 340316 - protein, 396 aa, unidentified
MAKLWIGVDIGKTHHHVAAVDGDGRLVYSRRVANDETSLLTVMAEVSTYGRPVCWAVDVTTGLSALLLTLLWRRQVQVRYVSGTVSFHMAAAFAGENKTDARDAVVIAQTIRMRPDIPILEPSDRLLAELTVLTSYRADLVGQRVATLFRLQELLTGISPALERAVDLNRKAPMMVLACWQTPAAIRHAGVDRITALLRRGHVKNAAQVAEAMVAAARQQTVTLPGRRSAAVVVGQMATEILAIEQRIAAVDDLIAEQLDQHPLAPIIGSMPGMGPLLTAELLVHTAGMTEYDSPTKLAAHAGLAPVSRDSGTISGNHRPARRYHRRLRHILWMAAFTAARECPTSRAYYEKKRAEGKNHRQAILALARRRVDVLWALIRDRKTFSRPAVTAPAAA

SEQ ID NO: 340317 - protein, 430 aa, unidentified
MNPPSADTAQTEFAALIGLDWGHGSHALALQIRGAATETSTLDHSAENLHQWLDQLEKRCGGQPVAVAIEASQGAAVYALLERPWITLYPIHPATSTRHRAAFRPSGAKDDTPDALVLLSLLQQHRDRLRPLQSEDEATRTLARLVEARRKAVDRRTLLSNQLQSTLRDYFPQALELIGDHLAAPLALDFLEKWPRLTDVQAAKTPTLKNFYQRHNVRRPELIESRVQRIRAARLLTRDAAVIEVAVRVVRLLVAELRVLQEHIAEFESAIAQAFAAHPEKHLFRELPGAGAVLAPRLLVAFGAVRDRFADASAMQRYFGVAPVTERSGGRAWVHWRWNAPRFVRQTLVEWAGQTVVYCPWAKAYYEQQRAKRAGHWAILRALAFKWLRILWRCWQKSEPYDQEKYLRQLAQRRSPIAALARQFAKQMAA

SEQ ID NO: 340318 - protein, 443 aa, unidentified
MAMRTKKNELSVCYPNAAGIDVGGGSHFVAVPPDRSELSVREFGCFTEDLYAMASWLAECGVTDVALESTGVYWIPVFEVLESCGLRVLLVNARSVKNVSGRKSDVLDCQWLQQLMSFGLLSAAFRPPADVCALRAISRQRDTLLQEQGRCIQRMQKALTQMNVQLANVITDITGQTGLAIIRAIVAGERDPAVLAKHRNYRIRASEETIAKSLQGTWKEEHLFCLGQSLALFDTYRTMVAEVDAQLKTMIAPLRLHAAAPLQGKPKRRGKNAPDFDVREALQQWAGVDLTRIGGIDVGTALKVLVELGPDLSRFKTAKHFASWLGLCPGTRISGGKRLSGASKRIPNRVARALKLAAQGLSRSQCGLGAYYRRMAARMGAGKAITATAHKLARLVYAMLTQGTEYVEQSQAQYEERFVDRTFKYLQQKAKAMGYILVAEAAV

SEQ ID NO: 340319 - protein, 346 aa, unidentified
MEHYAGLDVCLKEISICVVDGDGKTIAHGACPADPEGVAGWFRTRSLTPNRIVHESGMLSIWLQRGLAALGLPATCIDARKAHKALSARLNKSDAADAEGLAQLARTGWFTPVHIRSEDADRLRALVGARERLIRLRKDLEEHIRGVLKTFGIRMTGIAQGRQRQAFRDQLAAAGETDPVLRVIADGFITAHATLCEAADDLDKSVKKKAKAHPVARRLMTIPGIGPVNALSFIALIDDPNRFSRTSDVGAFLGLTPKRHQSGEVDWSGRVSKYGDGAMRGLLFEAASCLIRQVKRFSPLKSRAVRLAGRRGFRKAAVATARKIAVLMLTLWKNETDYQWTKEATA

SEQ ID NO: 340320 - protein, 351 aa, unidentified
MIVLGADTHKRSHTIAGVGATTGELLGERTVQVGRAGFGALLAWARARGGERVWALEDCRHVSGSLERFLIERGERVLRIPTNLMAETRKSARQRGKSDAIDAVNVARAALREGLATFPAAHLDGPELDLRLLVDHRERLVIHRVELNNTLQWHLHDLWPELELPGGALFSKKWSTRIARRLSRAEQTMRVRIARDELRRLRELTETVKALAREITQLIEQIAPRLLAEPGFGPLIAAKLVGEIAGAQRFATDAKLARAAGAAPIPASSGNTRRQRLDRGGNRQINAALHRVIVTRARCHQPTRDYIERRRREGKTTRDAIRCLKRYLARQVWNLLRASPPNMTLTTPSIS

SEQ ID NO: 340321 - protein, 369 aa, unidentified
MSSSTVPSTSSAPRTRRPAGEVVLGVDTHRDVHVAAVLSASGAVLATDEFPATAAGYRDLLKRARKWGTVRRAGVEGTGSYGASLSRYLLAQGVDVFDVNRMDRADRRRRGKSDPLDAQNAARAVLSGRARARAKSGDGPVQIARMYKLTKVSAVKARTQAINQLKAVLVTADPVLREELAGLGNAELLRTCAQFTDARGHEDAGAESEVQATRITLGLLAQRIGRLSEEIRNVEARLTRLVEGHAPQLLDVVGIGPDTAVALLITVGDNPERLDSEASFAALCGVSPVERSSGRRQFRRLNRGGDRQANAALHRIVFTRLRVDPRTQDYYERRIKEGKTRREIVRCLKRYAAREVFHLVGQLQPGPRS

SEQ ID NO: 340322 - protein, 345 aa, unidentified
MKPMYYIGLDVHKRMISYCVKEGSGKIHSEGSIPATRLDLDRWLQALPQPWSAAMEATLFSGWIYDHLKPHAANLKVAHPLMLRAIAASKKKNDRIDASKICDCLRCDFLPECYMASTEIRERRRTLRYRNLLVRQVVQLKNKIAGLLMEAGVSYNKQRLHQAGYFRELLASNPDIDEGLCSLLRVCRETVVRLQRTESALVRSLERDRLLEERVERLMTIPAVGPITALTWTLEIGEVQRFSSIKKAISYCGLCGAEKSSGTTVQRTPLSKQRNKHLQTILIEAAKMAPRISPDLAALYDREKQKGNPNRATLAVARKLVAYLVAVDRRGKGFLVVKNETRTAA

SEQ ID NO: 340323 - protein, 311 aa, unidentified
MNSKGEWVGVDVSKRFLDVEASGLAAFRVANAADGYRELLARLAGVRVEGVVLEATGGYERNVLVALLEANLRASIVNPARVRAFAQGTHQLAKTDRIDARVLARYGAYMRPAPTALASNVRATLKEMIAYRAQIAQEMTARTSQLRLYESAGVRGRAEAAIAALRAERDKIEKEIEALISAHEELSRPFKILVSVPGVGLLVAATLIAELPELGRLSRRQIAALVGLAPFPRDSGERRGYRSIRGGRAEVRCALFNAARVGIRHNPVIKAFYEALRARGKKGKVAIVAAMRKLVTILNLMLKTQQLWRPA

SEQ ID NO: 340324 - protein, 337 aa, unidentified
MEQQTQYVGIDLHRRRSVIVRRTGAGETLDTVRIDNDPVALAAELAKAGEHPEVILEACYGWYWAADVIQECGGNLHLAHPAGNNWGSRRVKNDERDATDLVDLLRLGRLAESWIAPPCQRELRELVRYRAKLVHLRTSLKAQVHAVLAKEGVPVPMSDLFGVGGRRLLDQVHLGDAYRLRVNSLRDLMGHIDHEIELVQNQVAPIFAGDLGFHAVQAIPGVGPVLAAVFVAEIGDVSRFTSARHLCSWAGLTPKHKESDLMVRRGHITKQGSRLVRWAAVEAVARQSTDSPIRRHHRRVGERRGTKIGRVAAARKLLILVYYGLRDGEIRCLAQAE

SEQ ID NO: 340325 - protein, 368 aa, unidentified
MNEPITSFVGLDVHKDSTAIAEAEAGREIPGFVGTVGPDLGQLLKALKSLGKPETMLVVYEAGPCGYGLARQLRSRGYACEVVAASKIARRPGERIKTDRRDALTLARLARSGDLVKVMVPDERDEAMRDLSRAREDAVRARLKARQQLKALLLRHGHRYGGKSSWTIAHERYLATMSFAHPAQDIAFAEYRQAVREGHERVERLTEALRSQTQQWRLKGLVAALSSLRGIDFVAAVTLAAEIGDFSRFAHPTELMGFLGLVPSEYSTGETRRQGDITKTGNTHARRVLVEAAWNYRFPARISRILQLRQEGQPKAVREIAWRAQLRLTHRYRRLGSRKLHPNKICVAIARELTGFIWDIARQVKVAN

SEQ ID NO: 340326 - protein, 447 aa, unidentified
MKQKKPSKKGSIKLPKHLQHLNQHAAGIDVGSRSHFVAVPDGADEKPVQEFSTFTDDLERLAKWLRSCGVTAVAMESTGIYWIPVFELLERYGFEVRLVNARHVKNVPGRKSDVLDCQWLQQLHTYGLLRGAFRPTDQICTLRAYVRQRATLVRSSASHIQRMQKALAQMNVQLHNVVTDITGVTGMGIIKAIIAGERNPKVLAGLRDKRCKNTEETIARSLHGNYRVEHLFSLQQAVELYEFYLQKIADCDQQILEQLKSFDSSDGSDPDSKPPRSIEEALQQMSGADLSSINGINTNTALKIIAEIGTDMNRWKTVKHFTSWLGLCPGSKISGGKILSSATKPVANRAASALRMAALTLFNSKSALGAYLRRQRSRLGAPKAITATAHKLARLVYSMLKHGTAFVDAGQEQYEERYRSRVVQNLKRRAQEMGFKLVSLQDEPQTV

SEQ ID NO: 340327 - protein, 315 aa, unidentified
MSESKVEVFVGIDVCKSTLDVRIEPPGEAFQVDNDDAGIRALCTHLSELVPTLIVMEATGGLETRAAGELAARGLCVTVVNPRQVRDFAKATGQLAKTDRIDAGVVCSFARAIRPAARPMKEALTAELDDLVTRRRQLVEMRVQETLRLQGASKVQAQSLKAHIVWLNKRIKSIETDLGTRLRSSDAWRVKDDLLLSIPGVGEITSRSMLSRCPEIGQLNRREIAKLVGIAPLNSDSGKYRGQRHIWGGRADVRSVLYMAAVSAKRCNPLIKALAERLKRAGKAPKVVIVACMRKLLTIMNAMIRSNTPWNPKIA

SEQ ID NO: 340328 - protein, 439 aa, unidentified
MLPTLNPHAAGIDAGSTQFFVAVPDGTVSVFESFTADLYRLRDHLKSHGVTTVAMEATGVYWLALCEVLEAAGLEVCIVNGAHVKNVPGRKTDVQDCQWLQQLHAHGLLRKSFVPAEAIRALRSYSRLRDDHIRTSAMYVHLMQKALDQLNVKLHTVISQIQGVSGLAVVRAILAGERNAAKLAELCDVRILKNKRSAVERSLHGLWKEEYLFALKQALAGWEFCEAQVAECDQAITAQVALLTRDLPKPPPPNTPANKSGRHHVPAVPDLHQSLLTLSGGCDAVKLPGFTPANWLKLMSEVGTDLARWPNEKAFTSWLGLAPGKNQSGKKRRRVRYRPKTAAGQVFRLAAHSLARSKYLALGGYYRRLKARTSAAVANVATARKLAILFYHAMRHGMAYVEKGLQAYEAAYLERQKRFLKKRAAELGFNIVPASPQTT

SEQ ID NO: 340329 - protein, 362 aa, unidentified
MITLDSKSIVVGVDVHKYSHTAVAMDAWGQEKGKLEFSNDLLSAYAAWLRSLGEKQDIIVGLEDTNGYGVHLVEALSSEGFTIRYVPAILTERERKTSTKRHKSDYVDAKRVGKVILAKYEQTLPAKESIAGKEELQIAQSLDLLLQERRDLVKQKTMLKNQMHAMLHQYYGDHYADAFKKPFNKEAVAFFLDDLEANTKTAKEILATSIVRRLNRLGLIEEQISKITKGLTLVGSSSKEVAALQRELHGCGAVTACTIMAEVTTIKRFAGKNNLASYAGVAPTPHSSGSHHKLNTNPFGNRRLNRALHTVALSQIACKGDDRGKVYYQKKLKEGKTKLWGLRCLKRQIVNQVYRILKEATQ

SEQ ID NO: 340330 - protein, 409 aa, unidentified
MTAYRFYVGIDWATEAHRVVVLDADRRSLHDRTVRHEGVALETFAHWLAQDVAAGVASDVAVALEVPRGAVVDTLLARGFHVFALNPKQLDRFRDRYTVAGAKDDRRDAQVLASALATDQPAFRRLEPEDPLIVELRELSRLEDDLRQELGRLTNRLREQLHRYFPQLLQLVPAANEPWLGALLERAPTPSAAQHLPRATLRTLLTRHRIRRVDAETVRTLLRTPALAVAPGTVQAARRHLAVLWPRLRLVHQQQAECATLIDGLLERLAESQEHRDVPILRSVVGVGRVVAATMLAEASRLLAARDYHGLRAQAGVAPVTRQSGRRTLVAMRHACNPRLRHAAYHWGQSAARHDPVSRAHYAQLRARGHSHARALRGIVDRLLRVLIAMLTAGTLYDPTRRRVVADAA

SEQ ID NO: 340331 - protein, 343 aa, unidentified
MDEYDGRQFVGIDLHRQRSVIVRQSESGEQLSAVRIVNDPVALGLQLEQAGSDPEVVLEATYGWYWAVDVLHACGARVHLAHPLGVKGFRYRRVKNDVRDAGDLADLLRMGRLPEAWIAPPETRELRELVRYRAKLVAIRSGLKAQIHAVLAKAGVLIAASDLFGVTGRQRLATVPLGPAYAERIRSLLELIDILDGHEARFAAMIAERLHTHRGYQAIQQVPGIGPVLAAVFVAEIGDVHRFAGPAHLCSWAGLTPTHRESDTVVRRGHITKQGSKLVRWAAVEAIQRQPDTTKIALDRQRIEARRGRNIAKIAAARKLLTLVYYGLRDGHIRALAHRQVAV

SEQ ID NO: 340332 - protein, 346 aa, unidentified
MEISTIGLDLAKNVFQVHGISATGEVVVRKALRRSQMLPFFEKLPPCLVGAEACGTSHHWARELTRLGHEVRLMPAAYVKPYVKRGKNDAADAEAICEAVTRQTMRFVPIKSREQQAALSLHRVRSLLIKQRTQLSNMMRSVLAELGIAIPVGITKALQMAREIVDGESRLDLPTEAANVVAMLAGQLLQLHAQLRKLDLRLAALQRSDDRARRLATIPGIGPIGATALAASVTDPSQFSSGRQFAAWLGLTPRQSSSGGKERLGRITKMGDRYLRQLLIVGATALVRYAKEKPGTVDPRFVALLARKPARVASVAIANKMARIAWAVMARGGVFERGHAPMLAAA

SEQ ID NO: 340333 - protein, 541 aa, unidentified
MDHYAGIDVSLEYSSICVVDATGNIVREDKIASEPEVLIAWFGSLGYALTRIGLEAGPLSQWLYAAMKKAGLAVELLETRHVRDAFKAMPVKSDRNDARGIAQLMRLGWFRPVHCKSIGAQEIRAELTARKLVESKLRDIANSLRGILRGFGLKVGATTERSFPGRVRELVKGHPVLEAIAEALLSVHEVLLREFNGFQKRVQSAACSNVKARLLMTTPGVGPVISLTYAAAVDDAARFKSSKKAGSHFGLTPKKYQSGETDRSGRISKIGDASVRAALYQAAHVILTKPVKGCPELKSWGMRLAKRAGQEKAKVALARKLAVIMHRMLADGIPFNPNAKAERMAATATKAASKVLALPASERPWLRQFNEERSRVFRAGHDTSLPESEVPSPGRWIRSGRHAGCGIDHALRRLSRPILCESHQVAVSCADPVQKQVPGECGWSGEGSAPPRPRACGEGGVPGVKGFAFASPLDSPRPVTEARMERRLAGAQCGDPSAVVRWIPDGVIARVCAQSLHPGYGGDDCSPHERRAPLSLRVHGG

SEQ ID NO: 340334 - protein, 359 aa, unidentified
MAQSTMADPAVQGAMTQDTAPASSSASTPASSSAASYPACWGGVDVSKDHLDVNCYPRPAHVRGATCLRARNDAEGIARVLEHLQRLQVHAVVVESSGGYERPLMHALHQAQRTVSLVNPKRVRDYAHALGKQAKTDPIDALVLARFGADVRPAPTPPPPPGQEEREALVVRRRQLIQMRTAEKNRRQQTWEAAAQSSIDTMLKVLDEQVAELDRLIEQSVKQDEEALAKEKELRKVVGIGPVVSRVLVTELPELGTLDRGRIAALVGLAPFNHDSGKFKGQRAIGGGRFGVRCALYMATLTATKANPVIKAHYQKLRSRGKAFKVAMVACMRKFVIYLNQKMRELLSRRQREMAALPG

SEQ ID NO: 340335 - protein, 376 aa, unidentified
MNQDSTLYVGLDVHKDSITVAYAMGLDEVELFGKIGTTQMEVDRLCKRLQSKARHVHVVYEAGPCGYGLNRRLVEKGFDSMVCAPSLIPRKPGDRVKTDRRDAFKLVRSLRAGDLSAVHVPSVEDEAFRDLARAWSSARDDLKQARQRLKSFLLSHGVQYSGRANWGPAHRRWLSTLSFNSAWQQLAFNEHRRTIEDRLAQCERLEVALREAVAGWRFYPVVLALQAMRGIQFTSAVGLVSELGDLSRFDHPRQLMAWLGVTPSEHSSGSKRRQGSITKAGNSYARKLLVESAWSYQHPARVSKDIQSRQEGIPKPIVDRAWDAQLRLCGRYRRLVARGKSRQVAIIAVARELAAFIWDIGRMGMTLAVPQSEQPA

SEQ ID NO: 340336 - protein, 329 aa, unidentified
MDNQTGEYQEKRLGHREEAERFYGSLSGPVRVGMEACGHYPWFERLLEKLGHELWLGDAAEIGSSVVRKQKTDRRDAAHVLRLLLDERFPRLWVPSLEERDVRQLLVHRHKQVQARTRSKNQLQAMALGQGVQKQRKLWSAAGRAELEKLELLPYAGERRQQLLRALDQVELEIEGLNRRVEEEVKQRPAAVRLLSHPGVGPVTALAVVLTLGPAERFASGKPVASYVGLVPSEHSSGGRQQLGRISKQGSSFLRFLLVEAGQSAARYDAELGRFYRRLAARKHRALAKVAVARKLAMRLYLMLREDWNYAQLCRAVVQASPSHSVVKV

SEQ ID NO: 340337 - protein, 377 aa, unidentified
MSNIIKWPGEADGPNPNQFLYVGVDIHKDKHTAVATNCFGHKLMEMEFANTAKDFKQFVASMQSLADRQNREFIFGLEDSFGYGLHLAKHLFDSHLPVKMIPPVLVDRSRKYETHPEKSDSLDALGVAKVLIQRIDTLPDYSISITDELAKEIKELAMDRDFLVKEQTRIKNQLHRLLHKTYGSEYQKKFKDIFALKALRYWKKYPTGKAYILVDDSILKNQVRRKINRLMDIRQECKEIKNELKILLDRTGQKLPTMNGCGTVLASAVMAEIRNIERFHSLAALAKYAGLAPRQKSSGKTIRHVKSKSGNRKLNMAIHHIALSQISNSGNQYAKAYFKKKITEGKSKNQALCCLKRKLVNIIYMMLKHKQAYNYQK

SEQ ID NO: 340338 - protein, 355 aa, unidentified
MNQEKYIGMDVHDASISAAVKNAQGKLLMECVLETKAATILEFIQGLRGTLALTFEEGTLAAWLHDLLKPHVSRLVVCDPRKNALLRDGNQNDRADACNLAELLRTNQVHAVYHEKHGIRTLKELGRSYLALTQDTTRVMNRIKSVYRSWAIPCAGTNVYSRRHGGEWLAKLVEPGVRMRAEHLYQELDSLEPLRQAARREMLRESRKHAAVNLLRQIPAIGPIRSALLVVLLQTPHRFRTKRQLWAYSGFAVQTYDSGEYRFVRGKRQRNRERITVRGLNRNHNHDLKNLLKGAAVSAMERPGPLQDFYVALVEKGMRPSMARLTLARKIAAIILIMWKKGVSFDPKQLQRQAA

SEQ ID NO: 340339 - protein, 408 aa, unidentified
MEIIYPRCCGLDVHKRSVAACVRRQEADGSLGQETRTFGTMTRDILEMADWLAAAGVTHVAMEATGVYWKPIYNLLEDRFTLLLVNARHVKHVPGRKTDVKDCQWLAQLLQAGLLQASFIPSRPQRELRELTRHRSQLVAEKARVANRLQQVLEDANIKLASVATDVLGASGRDMLRSLVAGEQDPEKLADLARRQLRSKIAELRRALEGTVTEHHRFLLGQLLAQVEHLEGQIDALSRRIAELSGPLAPAREALVSLPGFEQRAAENVLAEIGADMSVFPSEHHLSSWAGICPGSNESAGKRKSGKTTKGNRWLRTALVQAAWAATRKKDSYFQAQYRRLAARRGKKRAILAVAHSLLTVIYHMLKTGSTYKDLGGDYFDKLNKNRLLPYFVRRIKDLGFQVTLEAA

SEQ ID NO: 340340 - protein, 438 aa, unidentified
MSNKVIFNFDELFISVGIDVGADFSWMSIALPNQQLVGKPYKILHSNMHSLTTAVSKIKEAEELYSLESRIFLESTGIYHYPLFCYLRDKGFNCSVINPIITKNSTNMNIRKVHNDRFDSKKAALIGLKPDLKVSLMPSDLALNCRNLCREYYDLMDNRSAYVNKLQAELRMAFPQYLGIFSKVTINTSLTLLEKYTSPNAFLEADKQEVIDTIKSTARFGLTYAHNKYNAIIQAAKDANEFGYIIDSNIKRIRLYISFIRKYDEEINGILDSMHELVNANEDTDFVKQIHLIETFKGAGFLSAISLMGEIGDFSAFSKPKQLFAYFGLDPAVKQSGKFEGTKIQMSKRGSAIARRVIHTLTLQSIGTSRKGEAKNPVLRDYYLKKCESKPKLVAMGAVSHKICNIIFAILRDNKPFEIITPQEHVKQYNAAKCGVAA

SEQ ID NO: 340341 - protein, 344 aa, unidentified
MEKDQYVGWDVHQASTSYAVLDSGGRLVEEGVLPTDPERLAGWVSGLGSRVHLTFEEGPYAAWLYELIEPLVAELVVANARRHLGTGEGKSDRLDARNLAERLRGGFLVPVYHDRSRLRDLQHLVHGHRALVQDSVRLQNRCSALARSRGLSVNMVLAGSSLGSASALERFTWLTDELAAITALRKKAYKAVAQASRRSDACKILQTVPGFGPIRSAIVVAKVRTPHRFRTKRQLWKYAGLAVVTHTSSDYVVGPQGLERRSWQRTRGLNRHYSRALKEAFKSAAVDASRRGVLRPAYEARLAAGQRPEMATLTMARKLAATCLALWKRGETFDAGKLSKISTG

SEQ ID NO: 340342 - protein, 359 aa, unidentified
MNSQKYIGMDVHQATISAAVIDDQGKLIMECILETKAATILEFIEGLRGTLSLTFEEGTSAAWLHDLLKPHVSHLVVCDPRRNALLKDGNKSDRIDARKLAELLRGNQLKAVYHGENGVRTLKELGRSYLTLTQDVTRVMNRIKALYRSWAIPCQGTTVYAARHRAEWLAKIQEPGVHLRAERLYQQLDLLQPVRQQARYDLLLESRKHQGVKLLRQIPAIGPIRAALLVGLLQTPNRFRTKRQLWAYSGFSVEIHDSGEFRYVRGKRQRNREHISVRGLNDNHNRDLKNLFKSAAISASTRPGPLYDFYAGLLAKGMRPTMARLTLARKMAAITLTLWKKGVDFDPKQLHRKQLERLW

SEQ ID NO: 340343 - protein, 382 aa, unidentified
MIIGVSAAPHPYPCNSTFAESAMNAVAVADGRPTHLWALEPVGELGSPSAVPSNPNSRLGRKRSPIRQGWEKMDATVVGIDVSKDRLDVHVLPSDEAFFEANDAAGLEKLAGRLAALSPRLVVLEATGGFERLAVATLGAAGLPVAVVNPAQVRSFADALGKRAKTDPIDAEVIARFGVASGVKPRPLPDEQSRLLADLVARRRQIMGMIVAEEARLKRADNRQLKQSIRRLLTALRRELKSVDADLDGQVHASPAWRTNEDLMSSVPGVAKTISRTLLAGLPELGTLDRRRIASLAGLAPFTRQSGKWRGKSFVSGGRTSVRAALFMGALVASRHNPVLKAFRDKLIAQGKPRMVALIAIARKLLTILNAIIRDQKPWQTA

SEQ ID NO: 340344 - protein, 343 aa, unidentified
MNRCVGLDVSQELTAICVVDENDRRLWRGQCVTDPEQIGRVLGKYAGDEARVGLETGPMTPWLVHELRGRGLDVTCLDARHAHAALKMQLNKTDQNDAEGLAQIMRTGWYRSVHVKSLDAHRARALLGARAQLVGMTTRLSNHIRGVLKTFDLLPDAMRGLPFDKRIDALLADRDDLAPIVRPMLAAWRQLREQTAAFDKAVRALAKASPICRLLMSVPGVGIVSVLAYVSTVEDPARFARSRSVGAHMGLTPRQYQSGEVDRSGRISRCGDTLARTLMYEAAVVILTRVKRASRLKDWAQAIAKRSGTGKARVALARKLSVILHSIWRSGEPFQWSEQPVGA

SEQ ID NO: 340345 - protein, 359 aa, unidentified
MEKRITKQTDMLKDRKLSKHDRLYVGIDVHKLNHHVAFWLNGKIIQTFVMPADNFKIAQMLAPCKTALRKVVYEAGPTGFHLARFLQSCDFPVEVIAPSEVPETRSSKAKTDRLDCKKLATYSAKGLLKSVSIPSQKQEADRQLSRLRDQLVAKRKRVKQQIKSLLLQYGIAEPEGLKNFSTAGIEALKNLEVCDELLFCIGSLTDQLAYFDTALKHVEKRLNDLFKHSEHKQAFAIVTSHPGIGDITARQFVLEVHNPQRFNKPAEIAGYLGLCPKVTQSGQKRKDGSVVMSSKATLRANLIESSWAWIRKDRHAYAVFLRLLHNTGQVKKAIVAMARRLAIHLWRMLCKQEYYRAAA

SEQ ID NO: 340346 - protein, 443 aa, unidentified
MGRYAGVDWASEKHDVLVEDEAGEELFAASFVHDEAGLRSLCRTLVRFKVRLVAIERPDGLLVERLLDAGLRLLALHPNQVAAARARFRVSGGKSDRFDSFVLCELARTDHHRFRVLEPDSDQTKALRALTRAREDLVGQRVALANQLRAELERFWPGPIGLFSALDSRISLAFLKRYPTPKDAKSLAAKRMHAFLAGQHYSGGKQPAELVVKLRRAPEGRAGELECGARRAVVLSLVAALEPIVAAVGQLERQIAATVRAHPDGEIFTSLFKHPDSVLTAAIMVAEIGDCRARYPNRDALCGDAGQAAVAIESGKRKVACFRWACNKRLREAFCTLADSTRHWHPWAADHYARSIAKGHDHQRAIRTLGRAWCRIVWRCWQDRVPYDPDRHRGLQQHITVIIPSSAGPGVVDQAATVRMAAPLLVNNTKRPHRSPQRSIAAG

SEQ ID NO: 340347 - protein, 444 aa, unidentified
MYTLPHPYDLVIGLDRSDKKADLCLIDTHSGQYTAQTVEAAPEALHQWLTQLRQQYPQARVGLILEQPALNLIGFLEAVDWICLYAINPITLQKYREAFVTSRAKDDAKDAQYLAELLFTHHHKLKVWKPEDPQTRLLQQLVRHRRAVVDERTGLTNRLQALLKQYFPQALMLCGEELWRPLATDFLLKWPSLQKVQRTRPETLKQFYYLHGSRSQKLIERRLDLIANAVALTSEPALVESFALRIQLVCRELRLVVLAIKAYDRQIARVFAAHEDHALFDSLPGAGPTLAPRLLATLGTQRERFSNHHALQHSSGIAPVTKQSGTKRHVHRRYLCSKFERQGWHEYAKESILWCRWAAAYYWQQREKGSPHHTAVRALAYKWQRVIFRCWQDRTTYDDARYEAVLRKRKSPLVKRFDLIEVGKSPWKTAQKNLNKSLAGSPQR

SEQ ID NO: 340348 - protein, 427 aa, unidentified
MVAVMIGVDPHKASHTAVAISPAEEPLDELRVRACPAQAQKLVAWAAAWPERTWAVEGAGGVGHLLAQQLLAAGERVLDVPPKLAARVRLLATGNINKNDPNDARSVAVAALRSATVREARRDDHAAVLKVWSKRYQDLGRARTQVACRLHQVLCELIPGGVAKEITAGQAAHILASVMPADAVAAARWELAAELTEDLRGVDAAIRQTRKKAAAAVRAAGTGLTGLFGVGPVIAAAVIGGVRHVSRFPGRDHFAAYNGTAPIEVSSGGRKVYRLSRRGNRRLNHAIHMVAVTQIRYRHSPGRAYYDKKLAEGKTGKEALRALKRQISDAIFACLQADAKRAAAACAKSPGGQPGNHSSSRAAGSHPDHRLFGQATPGPATHPTTPAAPFPAPLPSRASGRTGQGPGAARPRSGARRASSTRPRASR

SEQ ID NO: 340349 - protein, 317 aa, unidentified
MAQNGTIVGIDVAKGKIDAAIRFGAEASFANSAEGHRELLAWLNEHGVCKAVMEASGGYEKSWARLLRGAAVEVVIADPNRVRHFAKSAGQLAKNDPIDARMIAWFGAVFGQASGQPHDEERQELDQIVTARLGIVRLKEQIESWREHEQPKAVQKAQQALLKAVALQLAKLETIIAAKIDKTERFAQRAEIIQSVPGLAGTAAAGLIAFLPELGLVDRQAAAALLGVAPFDADSGQRHGPRHIQGGRHKLRKLLFMPILSAATQHNPVLKACYQRLIAKGKKAKVALIACMRKLIGILNTMLARGAKWDPAKHAVA

SEQ ID NO: 340350 - protein, 406 aa, unidentified
MRVLYERCCGLDVHKQSITACALTPEGKEIRTFGTLTDDLEELVDWLKEKKVTHVAMESTGVYWKPVYNLLEAEPIEVLVVNAQHIKAVPGRKTDVKDAEWIADLLRHGLLKGSYIPHRAQRELRERVRYRRSLIEERARELNRIQKVLEGANIKLSSVVSDINGMSARLIIRALIEGKDDPAALAQLAKGRLKQKTEELRRALKGVMGPHQRMMLAEQWRHVEYLDEAIARLDREIEERTSPFHEALELIDTIPGVGRQSAEQIVAEIGTDMSRFPTAAHLASWAGMAPGNHESAGKRLSGRTRKGNKKLRSCLVECARAAARTKNTYLSAKYHRIAKRRGANRASVAVGRTILEMIYYILTRKEPYRELGADYWDRQREASIVRQTVKRLEGLGYEVKLEKTSA

SEQ ID NO: 340351 - protein, 338 aa, unidentified
MNIVTLGIDLAKNVFHLHGVDEFGKVRLQKVVKRNNLAKVMANLPPCLVGMEACGGAHHWARTFREFGHDTRIINPQYVKPYVKTQKNDYNDAQAICEAVSRPHMHFVPVKEVEHQDILALHRIRSRLVGSRTALVNQIRGLLAEYGIVMPQQIGQVRRQVPGILEDAENGLTDLFRESLSQLYEELGDADARVDMMTNKINVACASNPDCQRLAKMRGVGPIGATALVAALGDAKTFKNGRQVAAWLGLVPRQYSSGGKTVLLGITKRGDRYLRMLLIHGARSTVTTAAGKIDSHSRWINALRKRRGFNKTCVAVANKNARVAWALLTKEQQYKRAA

SEQ ID NO: 340352 - protein, 367 aa, unidentified
MAQPPPLFVGLDVHKDSIAVAHAQGQSADPPVFVGAIGPRQSDLAKLVRRLQAKTPDLVFAYEAGPCGSGLHRYLTGQGFTCQVVAPSLIPKKPGDKVKTDRRDAIDLARLLRSGDLTHVYVPTVEDEALRDLCRARDAARLTLKNAKLRLKAFLLRLGRHYVGRADWTEAHRRYLAKVVCPTPTQPIVFQESVRAVDEQVDRVHRLEAELLERAPAWRLDPVVQALRGVQFLVAITVVAELGDLTRFDSPRQLAAFVGLIPSEYSSGQARRQGGITKAGNSRARRALIEGAWAYRHPAKVSEHIQRRIDGLPNPIQDLGWKAQVRLCKRFRRLVARGKHPNVAVTAIARELIAFMWAIAKVVPVMA

SEQ ID NO: 340353 - protein, 417 aa, unidentified
MENEEPIAVVHPRCCGIDIHKRAVQVCLLLSLPSGRVRQEQRAFGTATEDLLSLLDWLVRAGCTHVAMESTGVYWKPVYNLLEGQVEVLVVNAQHIKAVPGRKTDVNDAAWIAGLLRHGLLRPSFIPDRDQRDLRELTRYRTSLVQEKTAEVNRLQKTLEGANIKVAGIATDIMGKSGREMLDLLVAGETDPTVLAQCARGRMKEKIPQLERALAGRFGPHQRFLVARQLAHIDVLDRAIEEVSAEVATRMTPFEEEIALLDTIPGVGRETAEVLLAEIGTDMSQFPSAAHLASWAGMCPGNHESAGKRKGGKTRKGSRWLRAALVIAAQAAGRGKDTAVGARFRALAARRGKKRAAVAIGHSILLIAYHILQSHQPYSDLAVHPIRASRAPTSDHLVQQLQALGFEVSITPRAPAA

SEQ ID NO: 340354 - protein, 456 aa, unidentified
MYKVKEKKTKVIDVIEMSIVHPYSAGIDVGDKTHVVAVPPGITAERVRSFGTMTCDLKALTAWLKECEIDTVAMESTGVYWKPIFSILVSNGFEVYLVNASHIKNVTGRKTDENDAMWIQKLHSCGLLKSSYLPDNEQEVLRTLVRYRRILLQDSSRFINRIEKSLELMNIKFHTVISDITGVTGKAVVEAILKGERNPKNFLPCINNRVQATKEDILKSLEGNWKEEHLFTLKQSYEMYQTYRQKISDCDKEIEKQLQKYEARQNEGVIGSSENRPRAKRINKTKDKNHPRFDVRGYLERIHGVDVLAICGLSVTGGMEILAETGTDLSKWLTVNHFISWLNLCPNNKITGGKLISSKISKKKANAASQAFKRAANAVQRSDNWLGDFFRRMKSKGGNKYAIVATAHKIATIYYKMVRNKEEYKPMELELYQQKYKQAKIAYLERKLLALKNNAA

SEQ ID NO: 340355 - protein, 344 aa, unidentified
MATYYIGADVHTNNTELAVEQRGRIVARYSVPTSIPAIGAVLNSIQGKKILAMEEGPMAGWLYRNLNEKVDEFIVSEPRRNKLISSEGDRDDKIDSGKLAVLLRGNFLKAVHHTGDDHRAYLKHWINLYHDRVRDAVRDINKIRACCRMHGVRIPRKVVRNPVRRHQWLSGLDNPVLKAQLHMLWIGYDATKEQLEIAKKQFSSYARPYPIIKSWCDLPGVGMIRATTIFAYLDTPWRFKNRAKLHRYCGIGLVRMTSGTDKKGRPKPARLKLPWAVNRRIKNTVMGAAISAIERGDNAFKDYYERMLSHGITPVNARHSVARKLVSTMSAMWKTGRPYDQTLV

SEQ ID NO: 340356 - protein, 430 aa, unidentified
MNESVSEQPLSPKVAAFVGIDWADQKHDVVLRSAGDPAEPEHQVVKSEINGLNDWIAQMHERFGEKGKVLVCLEQSRGALIYQLMAYELFELYPINPSQLANYRKTFFSSGAKDDRPDADLLSELVMCHRDRLKAWKPDDQMTRELASLNEGRRNAVNRRTELANEIKSQLKLYFPVALQILENDITTALAADLLVQWPTLAELQKVSPGKLRKFFYGHNSRHEKKILERLALIKEAKPLTADAAIIRPTALRVKLLAQQLKSLLPFIAEYEKRIAELFGSHPDRFLFDNLPGAGPALAPRLLTAFGTDRDRFEVAGDLLNLSGIAPVRIASGKKTGKNASVHFRRACPKFLRQSFHEFGECSIRYCPWAQACYQAQRGRGKGHHAAVRAVTFKWIRILFACWKRRIPYDPQRYFQALQTRGSDYAQTTT

SEQ ID NO: 340357 - protein, 349 aa, unidentified
MSARFNSEIAVIGIDIGKNSFHIVGLDWRGAVVLRQKWSRGQVERRLANLPPCLIGMEACVGAHHLSRNLTSLGHDARLMPAKYVRAYSKGQKNDFRDAEAIAEAVQRPTMKFVATKTAEQLDLQALHRVRERLVSQRTGIINQIRAFLLERGIAVRQGLRFLRAELPRILATPRNILSPRMAHVIEDLAGDWRRLDERIEGLSSEIEALARRNAGCERLMSVPGIGPLISSAMVAAIGDGDAFSKGRDFAAWLGLVPKQMSTGDRTILGKISKRGNRYLRVLFVQAAWVVLIKPKSWDRHGLKPWLDAAKKRLHHNVLAIALANKLARIAWSVLAHGRAFETTKIQAA

SEQ ID NO: 340358 - protein, 378 aa, unidentified
MKNLRFVGLDVHAETIAVAVAEPNGGEVRSLGVIPNRAESVSRLIRKLGKPQHLRVCYEAGPTGYVLYWQLSELGVKCEVVAPTLVPVKTGDRIKTDRRDAEKLARCYRAGDLTAVWVPDAAYEALRDLVRARLAAKRDQLRARHRLGKFLLRHGRRPPANVNPWTQRYLLWIKREVRFDFHAQQITLEEYLHEVEHAAVRIARLEHSIDAVVESLPMKMRAVIEALQSLRGIAHVSAVSIMAELGEISRFEHPRQLMGYSGAVSREHSSGERTNRGSISKAGNAHLRRIVVEAAWAYRHSPAVGRGLATRLRRCSPTVTSLAWKAQQRLHQRYKHLMVKGKCKQQAITAVARELLGFVWAIGVEVERNAINLRDRTA

SEQ ID NO: 340359 - protein, 342 aa, unidentified
MESAVTIGLDLGKSVFQIHGVDAGGAVVIQRRLTRGRLLAFFAKQPACLVGMEACAAAHHWGRELQKLGHRVRLMPPRYVKPYVKRQKNDAADAEAICEAVTRPNMRFVEIKTCEQQGILVLHRVRLMLTRQRVQLSNAIRGHMAEYGLVAPVGRNGLQRLIAVIDDPDDARVPAVARASLAPLVRQLRLVNDQVLENDRLVRASARSTELGHRLMEVPGVGPVLASAMVATVADPTAFKSGRDLAAWIGLVPRQNSSGGKEKLGGITKQGDRYLRQLLVAGALAVIRYAQRHGTRRPWLMHLLARRTPKIAAVALANKMARMIWAMMVTGERYREPKVSAA

SEQ ID NO: 340360 - protein, 427 aa, unidentified
MPYRVAGIDVHKRMLAVVVADVAVEGEYVFERRTVGTTPNQLRALAVWLVEREVDEVVMESTAQYWRPVWEVLERQWQPLRRARADAGLTAGALHLAQAQSNQGPRGRKQDFPDAERLVRRLVAQELTLSFVPDVTQRLWRTVTRRKYQSTCNRVQLRNRLECLLEEAHIKVSSLVSDLLGLSARRMLRAIASGDADPATVAALGSPRLHATPDQLRDALGACVDLHPVYRRLLAMTLDELDVIDAHVRQLDEELARLLREQQQAVERLAAVPGLGVDSAQQIIAEVGPTAATFATAKRLASWVGACPGHEESAGVNHSRRSPNGNRQMRRLLNQAANAAVKTKGSIFELVYRRLVVRLGHAQTIGAIAHRLCRLVWKILHDGVVYEERGPAVTKARAQRRAAKMIRELRSLGYRVDLVSAPSESPA

SEQ ID NO: 340361 - protein, 404 aa, unidentified
MFYCGIDIAKYKHEASVIDATGVALLDSISFPNSKEGCEKLLALYRRQGISKDDLLIGMEATGHYWLSVYGYLLDQGFEVKVINPIQSEAFRRMYIRQTKNDRKDSFIIAQIMRFGQFSATELAEEAVVALRQLSRYRLALVDTCGDCKRRIISLLDQVFPEYNRLFSDTFGATSKEVLAKYPTPEDLLAVSPEKLANMLEKVSHGRFGKEKAKQLKAAASTSFGVSFAKQSFALQIRQLIEQLEFLEGQIEELEEQISLLLKQTESHITTIPGIGDTLGAIILGEIGDIHRFDAPNKLVAFAGLDVRVSQAGEFIGTRQKISKRGSPYLRRAIWLAASRAAFCDPILSEYYQSLRARGKHHLTAIGAVSRKLCNIIFAILSENRPYETVPPREIRQTSAPFTM

SEQ ID NO: 340362 - protein, 377 aa, unidentified
MKRLEFVGLDVHAETIAVAVAEQGGEVRALGIIPNREESIRKLVRKLGPVEQLRFCYEAGPTGYALYWQLTRMGAKCEVVAPTLVPVKAGDRVKTDRRDALKLARNYRAGELTPVWVPDAAHEALRDLVRAREAAKKDELRARHRLNKFLLRHGRRPPMGVKSWTMKYLEWIKREVHFEQMAQEATLLDYLHEVEHADARIMRLDGAIEEAVKCVPPKMRAVIEALQALRGIARVASVTIVAELGELSRFARAKQLMGYGGIVSSEHSSGECTRRGGITKTGNAHLRRVVVEAAWTYRHRPAVGASLRKRQEKVSEEVKEIAWKAQQRLHQRYRKLLAKGKNKGIVATAVGRELLGFIWAIGIKVEAAQKESLQQAA

SEQ ID NO: 340363 - protein, 364 aa, unidentified
MPSITQSTAPCHVPADAAEEVLLGVDTHKDVHAAAIVTVLGTDLDSRSFPTTAEGYRQLVAWARSFGVLRRAGVECTGSYGAALARHLRAEGIEVTEVNQPDKAVRRRRGKTDVIDAEAAARAVLSGRATATAKANDGPVEMLRLFKLAKRSAIKSRAQAINQLKSILVSADVDLRESLAGLSNPRLFRRCAELAILQVTGPAGAARHVLRLLARRIQHLTAEIDDLNERIAAAVEASTPGLLDVRGVGPDSAAALLISAGDNPERLDSEASFAALSGTSPVKASSGKTQRRRLNRGGDRQANAALYRIVLSRLRWDERSQNYLRRRLTEGKTRREIIRCLKRYVAREIYRLIASTRSAANESA

SEQ ID NO: 340364 - protein, 345 aa, unidentified
MKHYAGLDVSVKETSLCILDETGKVCRELKVTSHPDDLVRVLQDPAWRLERVGLEAGPLSQWLYSGLAAAGLPVICIETRHTKAFLKAQVNKTDRNDARGIAQMMRVNLFRPVHVKTLTSQNRCALLTARKLLQEKAIAIENDIRGLLRNFGLKVGIIGKVRFEDRIRELVAGLPELAEIMACLLEARQSLRERFAILHRKVLVTVRDDDVCRRLMTIPGVGPVVSLAFSATIDIPARFKTSKAIGPALGLTPVLNQSGESNRIGRVSLCGDAMMRALLYEAAQVLLTRVQKWSWSKAWAVNVARRRGLQKAIVALARRLAVIMHRLWSDGTEFRWTKEGAVATA

SEQ ID NO: 340365 - protein, 399 aa, unidentified
MKKPAGIDVHKDFLEVAFRDLSGNVKVVKIEYTPEGLNKLIRLLRRYDITDVYMESTGDYYLPLYYALKGAGIKLHVMNAYKIRRPEANKTDERDAVWLLEVGESELFSDSYVPDEDIQALRFLMRKRMKLVDRISDIKREINSILWRLGLHAAQFAKKLKSKRKRKLLLDLLEGRLKPSDISDGDVKALYEVLSKSEFRAYIFVLKSRLVDLAHLESQLEEFDREIVALAKKFEGVITILMSVPGVSFVLAAGILSEIGDINRFPSPGHLASYAGLVPTAKNSGGKRRSGKPSKKTNKYLRRYMFLAGMAAVRSNSQVVREFFQRLLGRGKHYKVAVVAVARKLLCVIWYLLRRGELWREDGYFKDPRRLPRRRRIRISVREAIAILVRAGYVVRKRT

SEQ ID NO: 340366 - protein, 344 aa, unidentified
MDYYSGIDVSLERSSVCVVDGSGKIARETKVASEPEALINWFGSLGFGLARIGLEAGPLSQWLYAAMKQAGLAVELLETRHVSDAFKAMPVKSDRNDARNIAQLMRLGWFRPVHCKSITAQEIRAMLTARKLVQSKLLDLENSLRGILRGFGLKVGKTTRTHFAGRIEELVKGHPNLQTITEALLRARAGLLAEFNGFEKRVRAMSRLHEKARLLMSTPAVGPIVSLTFACAIDDPSRFTSSKQAGPHFGLTPKKYQSGETDYTGRISKHGDASVREALYEAAHIMLTKPVRGCSELKSWAMRIARRAGTNKAKVALARKLAVIMLRMLKDNVPFNPAAKAATA

SEQ ID NO: 340367 - protein, 346 aa, unidentified
MENIALDVHKHYTWARVENKEGQQLYASRLAHSRGNIKNFVQQWTPGSPVAVETVGNWYWVVDEIEAGGGKPQLVNARLAKLMIGNVNKSDKLDAKGLNMLQRTGTLPTVWIPPSGVRDARELPRTRMVFSRQRTQLKNRVHATLSKYGYVVDEVSDAFGKRGRRIIEELSGKLPPHTKQALDHVLDQLDEVMENLKAIEADMINAFAPCSQTTWLESAPGIGKILAVVVWTEIGSIERFNRAEQLASYSGLVAREHSSGGKFHYGPIRRDVNVYLKWAFVEAAGSAIQNRQRCGYQHIGQLYERIKARRGHNRAKVAVARHLAEASFWMLKKGEPYREPRLSTHR

SEQ ID NO: 340368 - protein, 455 aa, unidentified
MGTERKVAGLSLECIEPNAAGIDVGARSIYVAVGAERVAEPVRCFATFTEDLRAMAAWLKQCGITTIAMESTGVYWIPVYEVLEDAGFKVCLVNSHHVKNVPGRKSDVSDCQWLQYLHSVGLLQASFRPERDICALRALSRHRAGLVEVAAVHVQHMQKALTQMNLQIHHVLSDITGMSGLAVVDGILQGERDPQRLAGLVQSRIHADRETVIKSLVGNYRAEHLFTLRQSVAAYRHYQKMLADCDREMEQYMGRLPDKGQGGSGQPLSGKSGKGKRRKNQFHFDMGKELYRVLGTDLTLVPGLSALTVHTLVAEVGSDLSRFANAAAFTSWLALCPGIKKSGGKVLSSKTRKTNSRLSLALRLAAQTLHRSHSYLGAFYRRLRARLGAPQAITATAHKLARIIYHLVTTRTAYDESVFRNEEEKHALRSQHRLQRQAEALGFQLVPISHQEVVH

SEQ ID NO: 340369 - protein, 393 aa, unidentified
MLLDHPSDGLTAIRTQFGAIFASLELSRSNWLITSLSPGKGEKMSKHSVTAGDVAGLMTLFADLRRKAEARTGQSYPIITIQEAGLDGFWLHRVLQQNGIESHVVDPASIAMPRRRRRAKTDRLDGETLLRALLAYKRGEPRVCAMVVAPSPEEEDRRRLCRERATLIAERITHVNRIKGLLFSQGISDYVPLRRDRRSRLETLRTGDGRELPSHLRAQIGRELDRIELLLEQIKAVEAERDVLLAAARKPAEKPADKKAAPDPVTMLLALKGMGANFAAVLWSEAFYRQFANRRQVAAYAGLAATPWQSGGIRHEQGVSKAGNPRLRTTMIQLAWLWIRHQPQSALTRWFKERSQQGRKRAIVALARKLLVALWKYVTQGVVIEGAVMKPAA

SEQ ID NO: 340370 - protein, 338 aa, unidentified
MELYAAIDLHSNNSVVMVIDAQDRTMFAERLPNDLGAIVAALRSCSGTLRGVAVESTYNWYWLVDGLQDAGFTVHLVNTAAVKQYDGLKHGGDFSDARHLAHLLRLGILPVGHIYPRAQRALRDLLRKRSQLVRQRSTQILSIHNLIARNLGARMRGDSIKRMEPKDVDAMELLEEQKQALKANLAVMDCLDEQIHQLERSILAKLKLREDVKALKTVSGVGDILALTIALEAGDIDRFAGPGNFASYARMVDSRRESNGKKKGEGNAKCGNKFLAWAFIEAAHFAVRFDATIKRWYQKKCASRLSVIAIKAVAHKLARACYHVIKHGQPFDVAKAFG

SEQ ID NO: 340371 - protein, 375 aa, unidentified
MKDTIKYVGLDVSKEKIAVAIADEGRDEPRYWGMIPNTPESIRKLVKKLGEKENLRVCYEAGPTGYGLFRLFLSLGIECEVIAPSLIPKKPGERIKTDRRDSIKLAKLFRAGELTSVYVPTEDDEALRDLVRAREDAKEDELRSKHRLTKFLLRHDIRPPKGVKKWTTRYCEWLNTLKFERSASRIVYEEYMHQLIEIQQRLNRLEEEIERQSIIGVHAPMIQALQTLRGVAVVTAASLVAEVGSFQRFSSPKQFMAYVGLIPSESSSGELRRQGKITKTGNRHVRRLLIESAWSYRYPPAVKGKLKKRQEGQPPELLQISWKANPFEQKIFSFTIPRKSCRKSHNSSGERIVRIHMGNYTRSREKTKKEYIINL

SEQ ID NO: 340372 - protein, 388 aa, unidentified
MQTVADRPEAPTAIRTDLGAIFVSLELSRSTWLITSLSPGSGEKMSKQVVRGGDVAGLLERFARLREKARARTGKVFPFVVIQEAGLDGFWIDRALQNEGIESHVVDPASIATSRRRRRAKTDGIDGEVLVRALLAYKRGEPRVCAMIKAPTPEEEDRRRLCRERKVLIGERVRHVNRVKGLLFSQGISGYEPLRRDRRERLDTLQTGDGRLLPDHLKAQVCRELDRLELLLEQIKAVEAERDVLLAAQQVAAPAPAAMLLDIKGIGPEFAAILWSEGLFRHFDNRRQVASYAGLAPTPWQSGSVDREQGVSKAGNPRLRTTLIQLAWLWLRHQPQSALALWFEERVRRNGGRLKKTTIVALARKLLVALWKYVTAGVVIEGAVMKRT

SEQ ID NO: 340373 - protein, 340 aa, unidentified
MNITTVGMDLAKNVFHVVGLDEHGHEKMKKQLSRRQVLKHFANHPACVIGMEACASAHYFARELRKLGHEAKLIPPQYVKAYVRGQKNDTNDARAIAEAVRVPSMRFVTVKTVAQQDVQSLIRLREGAINARTAAANRLRGLLGEYGLVRGKSLSTLRRALPEILEAVSNGLTDVFRRLLAQERRHLLELDAHIDTLTAELTALSKQDDRVQRLQTAPGYGPIVASVFASVMGDGKQYRRGRDASAAVGLVPRQHSSGGKNVLLGISKRGDRYLRSLLIHGARAVVNAAQKKDDPLSRWINHLREKRGMNKATVALANKLTRIGWAILRNGTTYQPAQAS

SEQ ID NO: 340374 - protein, 403 aa, unidentified
MEQIIIGVDPHKLSATIEVVDKQEHLLGSGRFTTDQRGYTAMRSYVKTWPNRVWAVEGANSAGRPLAQRLVEAGEQVVDVPAKLAARVRLFDTGHNRKTDALDAHSIAIVAVRTKGLRVLAADGELEALRMLTDRRDELAHLRVQTVNRLQRLLSELFPGQRKKDLSALQAKAMLATVRPRDIAGKTRRRMAAEELADLVVVDGKLKKIKAELKAVVIARGSTLLEIHGIGPSGAARTLADVGDITRFADRNRFASWTGTAPLDASSGEQIRHRLSRAGNRRMNHVLHMAAIVQLRHDTQGRAYFRRKVAAGKTRMEALRALKRRLSDVLYRRLVADAQTRDRTAGDTGPGGHRGATQESSAADLSPHVGTSDKPLPGPARTTLRPPIRTQKTARPRVPHPAS

SEQ ID NO: 340375 - protein, 429 aa, unidentified
MVFNSAVALSDHVEGFGQAISRVCTINMCAHMGPRIVEWMQRTTIKVSSPLSEGNEEKEERMIEKAHGIDRHKQFSTISVLNRQGEEVQFLGACREFGKYVEGLGPTDAVVLEASTGSFWWADQIEAKGAKCFVVDPRKFRIIKDSWNKTDKQDARNLAKALWVHVVTGEFGIPTVYKPAVVVRDLRKLFAQYCLLNRQIATHKNNAQAIFVENGVELKKEAKSRLFAPESGLELLKEMDVSAASRVCLELTLQVLWKIAEAKERLAVEILLAGEPLKSQAELLISIKGVTPLIALAFLADVADVRRFRTLRKMNAYLGLVPRASNSGGKSRPGHITRESRKLTRTILTQCVHHVAASSESLDRYYRELREKRGTGRARIAVIRKLCGMMRRMLLSGEQYRWMDRGLYEKKLRQYERVLKRAKEERPAA

SEQ ID NO: 340376 - protein, 348 aa, unidentified
MKSECNASAAAWIGIDVAKRNFDAALCVVDSQDDPRAFLNAPARTFPRTPHGCAELVTWVEQQVSDGPARATMEATGRYSTELAGWILEQRPAWSPAILQPTLAHNFIESLGLRNHTDRLAARGLARYGVERRPAAYRPPHPQYSKLRDLVRYRRTLVEQQTAEKNQAQEVTGTVAVSRMQNRRLRQIAKDITRIEADMRALVKKHPGLKDDVALLVSIAGMGFVVAVTLLGELGDLRRFASGRQLAAFAGLTPENIKSGDSVHPPTHLLKRGNAHARHILYLAAMAAIRGQNSFQRFYLRILAKHPDQPMIALAAVMRKMLVVARAILIHHTPYIAEWNPCGEPSAS

SEQ ID NO: 340377 - protein, 349 aa, unidentified
MTVYVAVDFHARQQTISYCDLADGEIHRLELRHQRDDVRGFYGALTGEVIIGFEASGYSAWFEQMLAELGHTYWLGNPAEIRRKAPRRQKNDRRDADLMLDLMLKGDFPRLHTFSEESRLVLRQLRYRQKLVKVRTIAKNSLHAIGMNAGLPLKRQLLTEKGIRQLQALPLSPVLAQQREEWLQLIAFVNQRIAKVEAALQLIADKDAAVVLLQTHPGIGLLTSLALRYTLMPVSRFRTTRQVTAYAGLDCMEEQSSERRRMGSISKAGSRLLRYLLNEAGQTACRKDPELKRFYQRLLQRRERPKAKVAVARKLLVRSFIMLRDQIDYAEFVRRGVAARVARQPHSLS

SEQ ID NO: 340378 - protein, 318 aa, unidentified
MTEVVTFEQIVQRGCGLDVHKQTVVATIDGAGLKRETREFRTTTSSLKELKEWLERSAVTHVVMESTGVYWKPVYHVLEPSGMTVWIVNARHVKYVPGHKTDKRDSKWLCKLLLAGLLKPSFIPPREQRELRDLTRYRRKMIEQIASEKNRVIRILEDCNIKLSSVLSDTHGVVGTKLIDKLCKSGKISMEDIEEVYHGKLQASREEIYEACEGFVTAHHVFMLQAIRKDISSCEAIISELDARIRKMLAPYENVLELLKEVPGLSTKSIEDLIAEIGLDMSVFPDEKHLASWCGVAPGNNESAGKKKVDAHRTATNK

SEQ ID NO: 340379 - protein, 371 aa, unidentified
MEQSSKTLYVGLDVHKDSIAVAYAPQDRGAEVVSLGPIGTRQCDIDKLSRRLEAKGAALVFVYEAGPCGYGLYRYLTGKGFACHVVAPSLIPRKAGDRVKTDRRDAMTLARLMRSGDLSSIYVPGVEDEALRDLSRGRDDAMQDLKRSKRRLKSFLLRQDIRYEGRATWNAAHLRWLSEVVCATPPQQIVFQEYLRAVSEQQERRQRVEGELHEAVKGWRLYPMVQAIQALRGVELTSAVIVMTELGDLTRFENPRQLMSYLGLTPSEYSSGARRHQGGITKAGNSHARRALVEGAWAYRYPAKVSRHLQLRLEKLPAEVQAIGWKAQVRLCKRYRQLTARGKHVNQVVVAIAREMAAFAWAIARMVPLAT

SEQ ID NO: 340380 - protein, 355 aa, unidentified
MTMLADDYEYVIGGDPDRDTIDLAVLDTATGSPRAHIEASADGPGYARMLQWAERYAPGRRVWALEGTGSFAAGLAAALSQAGEDVVEVGGFRRARGAKNDRLDAIRAARNAMARQLQAGPRARGLRDGIRALSVTRQAVLVSRTKAINELKSLVVVAPEHLRADLRGCSLAKQLDRIEAMTAPDGAAVEHRITIFTLQSITARIRFLSGQLAALDPVLGQLIRQHPAGPALLAEPGVGPIVAAQMLVSWSHPGRVRSEAAFASLAGVAPLEASSGLRTRHRLNRGGDRALNRALHTVAITRMRCHPETRAYEAKRTAQGKTHRDIRRCLKRSIARRLYRVMESAARANTAPAAA

SEQ ID NO: 340381 - protein, 345 aa, unidentified
MPVAEVDRFAGIDVSAHELSVALRGDQGHDKPAMAKFPNHPFGHKALVAYLLRGGGRVRVCLEASGNYSLDLALTLQAHHQVEISVINPRRARRFAESLGERSKTDPVDARVLCEYAARMPWVRWQPPSPVALHLRALTRAIADLGVIHTQQNNRAYAAAASQALPALVVKEMQRHQKYLEQRMTRLRREALRLIACDPELDRRFRLMLTTIGIAETSALQILGELAVLPDMLDARQWVAFSGLDPRLFKSGKSVEKQPRISRSGSRHLRRALYMPALVALRRDPYLRVFYQNLLARGKARLQAVVAVMRKLLHALFAMFHSNQPYDGSRLCALRLAVDGVAACA

SEQ ID NO: 340382 - protein, 312 aa, unidentified
MQNDTIGVDVSKDHLDAHRLADGANQRFANNKGGHKALIKWLAETPLCRVVFEPTGPYHRAVERALGASGVPFVKVNPRQARRFAEATGKLAKTDRLDAQILARMGALLELEARPARSEVLLELKELYVAREALVKDRTAAKNRGKALTLSLLKRQNAQRLEQIDRQMATLEAAILQIVEADASLADRFAILTSIPGLSNITAFALLIAMPELGALEAGQAASLAGLAPIARQSGRWTGRSFIRGGRADVRQALYMPALVAARFNPDMKAKYAHLIETGKPAKVALTAIMRKLLVLANALLKANRPWTQRTA

SEQ ID NO: 340383 - protein, 417 aa, unidentified
MQVVRPICCGADIHKDIIVATIATSNQNGIAEYTQRKFCTQNYDLINLKSWLKEHNCFEFAMESTGKYWIPIFNVLEDEIKVYVVHPKYTKSIKGKKTDKKDSKWIAELFRHGILTFSFIPPREIRELREISRYRIKLVAMRTSERNRYQNAMTVSNIGLASILSDPFGKSSKAIMEEVLKSSSLSEGKIRSLLNKSAKKKAKEVFASLEGSRIEPDQRLKMTVSSEHMNQIDTHIDTLELDLVQRCLPYANLINLLIDIPGISYISAIAVIAEIGIDISVFKSSKQLTCWAGLAPANNESANKKKSVRISRAGTYLKPLLIQCALSAIKSTSNPYYRIKYNTIKKRRGHKKAIVAIARMILVNIYAILSTGEVYNPCDFKEVTSPKPAKKEMTIENALFFLQAQGIDTSALVLNVS

SEQ ID NO: 340384 - protein, 407 aa, unidentified
MEVLYPRCAGLDVHAGSVTACARVASGPQITYEYRTVPTTTRGLLELDEWLTGHGCTHVAMEATGVYWKPVWHVLEAHFTLVLANAMHIRNVPGRKSDMNDATWIADLLAHGLIRSSFVPPAPIQELRDLTRTRRQLVHEIARHVLRVQKTLADANLKLTQVISDIVGVSGRAILNALVAGETDPDRLVDLTRGRLKASRAELLDALHGRVTDHHRFMIKLHLSQIDALETAVATIEARIGDALGPFRAAVSLLTTMPGLSETTARVLIAEIGTDMSRFPSVGHLISWAGLCPRLDESAGKRRSTRTRQTTPWLKPTLINAAWAATRKKDSYLRAQFLRIKSRRGAKKAILAVASSMLTAVYFMLRDGVEYHDLGAHYFEHRNKEQLTKRLLQRLRDLGVAVEVKAA

SEQ ID NO: 340385 - protein, 342 aa, unidentified
MYYIGLDVHKKTISYCVKDASGQVHQEGQIGATRWELDGWMKMLPQPWTVAMEATIFTGWIYDHLLPHAQQVKVAHPLMLRAIAAAKKKNDRIDAGKIADCLRCDFLPECHMASTAIRDRRRTLRYRHLLVRQMVQMKNRISGLLMETGVSHNKRRLHKVGYFRELLSSNAEVNESIRPLLRVSRDSIVRLQKTEYALVSSLQRDPLLAERIKRLRTVPGVGPITALTWALEMGEVSRFPSIREAISYCGLCGDEKSSADKVMRTPLSKQRNKHIQRVLVEAAKLAPRQNHDLALVYEREKQKGNANRATLAVARKMVAYLLAVDRGQRDFVPFADPRSVAA

SEQ ID NO: 340386 - protein, 391 aa, unidentified
MIYVGIDVAKDKHDCFITNFDGEVLFKAFTITNNLDGFNDLYQKIETVMKDITKVKVGLEATGHYSYNLLGYLIDKGLPTYVINPLHTNLYRKSLSLRQTKTDKVDARTIASILMSDVNLKSYSDISYHNEELKSLTRYRFDKVKERAKLKSSVSRLICILFPELEKLVPTLHMASVYALLSEFPGAKQVANAHLTRLTNLLSEASKGRYSKDTAITFRDAARTSIGSNMPAKSLELKHTIKLIKELDSEIDEIENEIKIIMDEINSPILSIPGINYRMGAMIIAEIGDFSRFDSPDKILAYAGFSPSTYQSGHLYGAYAHMEKRGSRYLRYALYNAAKYVCHWDPTFTAYLAKKRAEGKHYNVAISHAVKKLIRVIYHLEKTNQQYIKAS

SEQ ID NO: 340387 - protein, 352 aa, unidentified
MDRYVGVDAHAESCTLGVIGPSGKRLKSMVVETNGQALLEAVRSIPGRVHLCLEEGTQSAWLHELLSAHVEELVVVMPAESKGAKDDLRDAWARAEELRRGAIETRVYKAPLHLAALRNAVRAYGFAVRDVVRAKNRLKSVFLSRGIATDASIYHAERRRKRLEKLVPPHRQLADWLGRQLDELEPLREEAEGWLLKESKAHPIIRKLATAPGMGPIRTAQVVAIAANPERFRTRRQFWSYCGLSIVTRSSADWVRGRDRRWERSQVQQTRGLTRKRHPLLKSVFKGAATTVIAQLPDHPLHKDYERMLAAGIKPNLAKLTLARRIAAMVLSMWKHQEVYDPERHKGVTDKS

SEQ ID NO: 340388 - protein, 333 aa, unidentified
MAKTIFQIHGVDQYGKTIERKQLKRAEMTRYFANLPACLIGMEACGSAHHWARKLAGFGHTVKLMAPQFVKPYVKTNKNDMADAEAICEAVARPNMRFVPIKNVEQQAILSVHRARQGFVKARTAQANQIRGLLSEFGIVMPQGIYSILKQIPAILEDGENELPGTFRHLIARLTDNLKAMDSQVDALEQQINLWHGQNEASRKLADIPGIGPITASAIVATVGKAQEFKNGRQLAAWMGLVPRQKSSGGKQNLLGISKRGDTYLRTLLIHGARSVLHHAANKMDTESWLSKLVTRRNKNIAAVGLANKNARIIWALLAHDRLFRPDYAAAAA

SEQ ID NO: 340389 - protein, 360 aa, unidentified
MKKVSKHSQQGKVAKPEKSVGLDLGDRFIHYCVLNGEGEVIEEGRMQSSDSALRKHFANEAVLRMAMEAGTHSPWVSRLLKRLGHQVLVANPRKIRAISSSESKNDRNDAEQLARFAAFDPKLLSPIEHRSEQRQQDLNLIHARATLVRARTMIINVVRGLVKSAGGRLPSCSTESFAERTPAAIPAPLSEVSMPLLKQIGLLTAQIDLMDKQIDKLGRKYPEISLLKSTPGVGPLVAACYVLTLDSPDVLGDNRQAGAFLGLRPGQSQSGGSDPQRRITKTGNTYLRSLLVQSAQYILGRFGPDSALRRWGLKLAASGGKRGKKRAIVAVARKLAVILHSMWRSRIPFQAFPQPATVVA

SEQ ID NO: 340390 - protein, 337 aa, unidentified
MLGIDVSKHTLACALYDPAHGRFQWERSVPHTPAGLKDLLASTPPEVAWVMEPTGRFSLAVAQVAQAAGRKALLAPTRKAKRYLASLQDRAKCDRLDSRGLALFGASRPPTHPLSPYPIKTPAVDELDQLLTARRGVVDALTSLRQRLPDLPYAEGPLTQAVTDLERQRKVLDAQIAKAAAQTFPEVAEVQAVPGIGRVTATAAVSRIKSKGFTHAGQFVAYIGLDVATLDSGKRKGQRGLTKQGDGELRRLFYMCARATITAKGSPFRVQYERELAKGLPKTAALNAVARKMAKVCWSLVKYGSKYKPEDVYQQRDLSDPSPTPGAAEEERPRGPG

SEQ ID NO: 340391 - protein, 323 aa, unidentified
MNKDIKYFGIDISHLVFDVTDSDGNYYQFKNNSIGFKKFLKLLDLDSHCVMEATGYYHYQLAYFLLESGIKVSVENPLSVKRFIQMKLSKLKTDKSDSKLICEYAQQVDIKLWKGNSKNEIECLQITRALSVYTKQSTMLKNKLHGEAVLGNPSKVVVSSLKRSLKQLDKEIKNLEDKLLVFVKEAHQDLLTRLESIPGIGRKTAIMLVVLTGGFERFTNASELCSYAGLTPVIRQSGSSIKGRPHISKIGNQKLRNLLFMCSFNACKYNKACRDLYQRIVAKGKSKKLALIAVCNKLLKQAFAIAKSGLIYDDSYRSTLVKN

SEQ ID NO: 340392 - protein, 327 aa, unidentified
MKQESHFVGIDVSKAQLDVAVCPTAERAEERTERWKVSNDDTGIDRLVNRLRELQPARIVLEATGGMEVPASIALAIAGLPVVVVNPRQARDYGKAMGKLAKTDAIDAEVLAQFGRAVRPPLRPLPDAATRELSALLTRRRQVTEMVTAESNRLRTVSGHVRADIQAHVDWLKSCLERLDKELADALRSSPVWREKDNLLQSVPGVGKVTSFTLLAELPELGKLDRKQIAALVGVAPFNRDSGKFRGTRTIWGGRASVRAALYMATLVATRWNPTLRAFYQRLCNRGKPKKVALTACMHKLLTILNAMLKCHTPWNHRTVQLIGPCS

SEQ ID NO: 340393 - protein, 424 aa, unidentified
MKKHNNSAMKSEPISKRAKSRGPVQRDTKEVLAELVETLRKKLDPKVEAGSTGEEDRRGKFRPNLDRLTVGVDLGDQWSHYCILGLEGETLAEGQLRTTQQHIAEFFQALNAARVVFEVGTHSPWVQEVICGCGHEVLVANPRLMEGSKRRKRKNDRIDANKLARLGRVDPQSLHPMRHRSKEVRQDLVVLRARDALVAARTELINATRGLVKSMGARLPKCSSPSFAQKVEEAVPVEIREALLPLVRMAAALSDCIQGYDQKIEKLGREKYGHTALLRQVKGVGPITALAYVLTLENPGRFAKSRDVGPYLGLVPKQEDSEISSFKCGHDAPIYGVIEGIIEQSGTPYFCFKDLDENKPSGSIKIRVETIDYFLRRYREEVIRKRKAAEDVEVQLAALEAELRRPTASRPLQLEPEVQGMAAD

SEQ ID NO: 340394 - protein, 412 aa, unidentified
MEVLHERCAGMDISKKDAKVCVRIPSTRKGQFTHTVTTYGATTNEVLRLRHDLQDAQITLVVMEATGDYWKPFFFVLQETLNVELVNPRQAKNIPGRKTDVSDARWLAELAAHGLLRASYVPEEPMRQLRDLTRTRKNLVEEQNREYSRIDKGLQDAGIKLSTIASHIQTVSSRRILDALVAGERDPRVLSTLIYYTMKAKTPEYIEALTGRFTEHHAFMLKVHLDTIDYLHTAIETLEARIDEVMEPFQAARDALTMIPGISTTVANAIIAEVGPTAAAFPDAAHLASWAGVCPGQNESAGRVKSTKTRPGNRYLKANLGIAALAVSWSKDNHLHTKYWRIASRRGKKRALIAIEHALLVIVWNLLHDGVAYTELGPDYTARINPERTKSRALRQLRNLGYEITLTPAEAA

SEQ ID NO: 340395 - protein, 337 aa, unidentified
MEYFAGLDISMEETHVCVVDREGTVVHEEKAASTPDAIAASLAKARACLHIVFETGRMAPMLYHGLAVFGLPVVCIESRQAYQALKTLATHKTDRNDARDLAHLARTGFFKPVYVKSLPAHAVRALIIARKKLVGQRVMLENQIRGLAVVFGVRLPRALSPAFIDQALRASEGINGLSAAMEGLITARTAVLSAVAAIDADIKKMARLSGACRRLMTIPGVGQLTALAFTAAVDDPSRFRRSRDIGAYLGLVPRRYQSGEVDYTGSISKCGDRRMRTLLYEAANVMLTRYKGPLKLKDWALALARRSTMRKARIALARRLAIIMHAMLRHGTEFKAA

SEQ ID NO: 340396 - protein, 331 aa, unidentified
MKKLALVGIDVSARELVVALERAGGPLLEWTFANDAAGHRKLIKSLTKSGFRARVCVEATGVYHLDLCLALHGTKSIDVMVVNPRAAKDFHRAQLQRSKTDRVDARSLLEFLRRMDFAAWEPPRSEILHLRGLSRRIQALLVNRAQEKNRRHADAAVEDTSPAIQHSIERHIAAIEGEMKILSQAALELIHADARLAKRFTHLTSIKGIATASAITILAELAVLPADMTVRQWVAHAGIDPRCSESGSSVRGQVRISKVGNRHLRRALFLPAMVASQHEPQVKAYYQQLLERGKKPLQALVAVMRKLLHAIYGMFKNERDFDGVTFYAMNA

SEQ ID NO: 340397 - protein, 381 aa, unidentified
MKKELYLGLDVHKELIITATAEAGRQGEVRQSGGISNDLQAVEKWVGRLRKAHGKDVLLRACYEAGPCGFGLARRLRQLGVECEVVAPSMTPTRSGDRVKTDRRDACKLARLLRAGELTAVYIPEPTDEAIRDLCRARTDAVDDRRRARHRLKGFLLRHGYRYEGKSSWSAAHERYLRELMLPHPAMKVILEEYLQAIGAAGERIARCEVAMRDLLEQWRLAPAVRALMAMKGFQTVAAMILVSELGEIHRFAHPRQVMAYLGLVPTENTSSDKRRQGRITKCGNSHARWLLVECAQHYASPPKVSKELSRRQQGQPRAVRALSWKVQHRLHHRYTQLLGRRLQRNKALVGIARELCGFIWELLRTQPCYEAPVRSVLQES

SEQ ID NO: 340398 - protein, 341 aa, unidentified
MQITTIGLDIAKNVFQVHGIDAAEKVIVRKQLRRGQIIAFFEALAPCLVGMEACATSHHWARELTKLGHEVRLMPAKDVKAYVKRNKNDAADAEAICEAVRRPTMRFVRIKSAEQQGQLMLHRARDLLMRQRTQLINALRAHLAEFGVTAAQGREGIKELLAIVAQDESSRLPIDAHASLTVLAAQLQAVQTMIGSIEKRIVAQHRSNEASKRLETIPGIGVVGATTITAVVTDPKAFRSGRDFAAWIGIVPRQDSTGGKQKLGPISKQGDQYLRRILIVGAHSVLRRARQQPEKYPWLTQLLARRPFKVVAVALANKMARIAWALLARGGTYRAPQLVAV

SEQ ID NO: 340399 - protein, 456 aa, unidentified
MPTRPKRKTKAPPLPPQLQKVNLHAAAIDVGSTEHYVAVPPGRATETVRCFGGHTADLHALAHWLKDCGITTVAMESTSNYWVPLFQILECAGLEVVLCNSRHVKNLPGRKTDVLDCQWLQELHTYGLLSGSFRPADKVCVVRSYLRHRDNLTKAAASHVQHMQKALTEMNIGLHHVLSDLTGVSGLAIIRAILEGERDTLKLATLKHPYVRKSPQEIAQALEGDYREEHLFALRQALELHEAYQTRIAECDGKIQGALRQLESPHPIAPAGEVAAGKPRKTARAQADFELKSQLQQLCGVDLTALPGFQALSAQVLISEIGLDMSRWKTEKHFCSWLRLSPGNRISGGKRMRTKPHKGHNRAAQILRVCAQAAIQSKSALGAFGRRLRARLDAPKAIKALAHKLARLVYRMLKFGQSYADAGELYYEHKYRDHLLKRLHKQAALFGFQLTPAPTE

SEQ ID NO: 340400 - protein, 345 aa, unidentified
MELHTIGIDLGKTVFHLVGLNLRGEVAVRKKCSRTQLLRFTANIHVELIGMEACGGAHFLGRALREQGHEVRLIPAQYVKPYVKTNKSDYIDAEAIAEAVARPTMRFVPIKTDDQLDMQSLHRVRERWVMRRTAVINQIRGLLLERGITLRKGRRYVDDALPLILEDAEAKLSGAVRMLLAQLKMDLDQLAVRIDEADAVIHKTAHENEACQRLLAIPGIGPVTATALIAAVGNGGAFHKGREFAAWLGIVPREHSTGGQQKLLGISKRGNSYLRRLFVQGARAVLQQRTKQSSGLSAWLAQLTSRTHRNVVAVALANKLARIAWAVLAKNEQYRPPVLADGAAA

SEQ ID NO: 340401 - protein, 341 aa, unidentified
MKHYAGIDVSLESASLCVVDLQGRIVREGKVASEPAALIGWFSSLGLEVERIGLEAGPLSQWLFAAMREAGLAVELLETRHVRNAFRTMPVKTDRKDARGIAELIRMGWFRPVHCKSMGAQETRAMLTARKLVQSKLHDVEMSLRGILRGFGLKVGKTTRTGFAGRINELVAGHSSLQVLAEALLRVRAVLLKEFNGFEKRVRSMARHDARAQLLMSAPGVGAIVSLTYASAIDDPGRFRSSKRVGAHFGLTPKKYQSGETDITGRISKIGDSGVRTALYEAAHIILTKPIKGSALKRWAARLAKRAGMQKAKVALARKLAVIMHRMLVDGTTFDFAAAAA

SEQ ID NO: 340402 - protein, 411 aa, unidentified
MDLLYARCAGLDVHKATVVACVRRPGPRPDVRHAETQTFATTLRGLAALAAWLTAHGVTHVAMESTGVYWRPVFAVLEGTVRVQLVNARHVKMLPGRKTDVRDCEWLAQLLECGLLRGSFIPPAAVRDLRDLTRLRKTLIRERGHHVNRIAKTLELANIKLGSVVTDIMGKTGRAILQALSVGLDDPAQLAACAQGSIRKKEAALREAVEGRLTPHYAFLLQQHLALIDTLDAHIATLDTRIEAAMVPFAETAVLMQTMPGVATRAAEAILAETGVDMSPFPTAAHFASWARLCPGNHESAGKRQSTRTGKGATWLRATLQEAAWAAVHTKNSYYRALYYRLKARGGPKKAIVAVQHAMLVALWHMLTRRVPHQDLGANYFAQRNTERTLRHHLRRLEQLGYQVLLAKQAA

SEQ ID NO: 340403 - protein, 395 aa, unidentified
MQVMHPVCCGIDVHQKSIVCCILDGPLTSNEPKKYQTSFGTTTKELKAALDWILEHQVTHVFFESTGQYWIPLFNIFSDSDLELVLANPQHIKNVPGRKTDVKDAEWIAQLGRCGLINQSYIPSQEVLQLRYLTRYRLSVKQRLTQIKNHIHVILQRGNIKITSYLADIFCKTGQALLTLFINGEVINEDNVESCIHGRIKASTRQLIEAMEGKLSTVDRFLIKECMEEYKLQKKISDELNKEINEYILEHFPEEYQLLLTIPGISDNCCATILAEIGPNVDAFKTDKKLASWSGMCPGSNESAGVKRSSHTTQGNKYLKQALVMSVLSVQRAKEETFSLFYQRISSRGSKMKAIIACGHKMLRIIYKILQSHQPYNSQKALGLRQQTNALSLTI

SEQ ID NO: 340404 - protein, 408 aa, unidentified
MQVTFGIDVSKSTSTVCELIGESKNELTITNNRPGFIQLLHELTAFSKHPQIIFEATGVYSRTLQSFLEDYGYDYVILNPLKAKKEMDMGLRHNKTDKTDAYHLALIQRLYHHPINQLQSQTYKQLNALSRFYDQLTADLVMAKNRLHQALQSTFPEIENLFSSAKGKNYWQIVVRYPHCDLVRREDKKQLINWLMSLKGIAFKHALRTADKLIELAYQAYPVVSCSSIEVEQVQYYAHRLLNLSDQRENLIARMVKLAKSLPNHDLENLESIPGFAQTTAVRVLAELGDLRRFSNPNKINAFIGIDPGRYQSGEMDSNLSITKHGNAVARKLLYRAIGQIDNAAKTNPCHIADYYESKKLSSQTKGFKKIAIASIHKLIRTIYALIINDQLYDYNVATHNQKDFSRN

SEQ ID NO: 340405 - protein, 319 aa, unidentified
MQSKLTFGMDIGKNEVVVACHEGAFAILKMANAVAGLRRWLGSVPAGSRLGLEATGGYHEPVAELAYSLGFTVYILNPKDVHFYARALGARGKTDRLDAQIIAAYVAEHSVRLHPFTPLSADEKLLRELARRRATLVNAKSMLQQSLRVLPGFEREGRELLRAMGSFADRLERKLAQIAARSSERATLVKRLQTIDGVGTLTSIRCATLFTRVPLHSSDAAVAFFGLDPRPNDSGQHRGRRRLSKRGPSEDRRLLYNAAMSAIRTPTWRPLYQHLRSRGLASTEAIIIIARRIVRIAFAMYRNHSNFNPRLVPRPYCPA

SEQ ID NO: 340406 - protein, 360 aa, unidentified
MGEITRVGVDLAKRVIQVHAVDATGRVIVAKQLQRDGFTAWCAQLPPGCLVAMEACSGSHHWGRRLRAMGMEVKLIAPHFVSPYRLSGKTGKNDAADAAAICEAASRPSMRFVPVKSVEQQSMMALHRLREGYKEERTACINRIRGLLAEFGLVFAQRPEVLRAALAEVIEDASNELGAIARMALQRAHLHWIELECHIAWCDERIVRHARSDGQAKAAAELCGIGPVTASALVATVDDFKQFKNGRQFSAWMGLVPRQSSSGGKAVLGEITKRGDVYLRTLLIQGAKSAVFTAHRRSDRLSRWIVQLRERVGWQKAAVALANKHARILWSILVNGQSFDPEHVPSKHLMRPPAALPAAG

SEQ ID NO: 340407 - protein, 282 aa, unidentified
MIAGIDLHKLSTNISVMDEEGHVIKEVKIPADPDELMEFSESLPANSDIVIESSSTWYWAYRILSERHHVVLSNPLKTKAIASAKVKTDKVDAFTLANLLRGGYIAESYIPSGELLQLRELVRYRAELVRMRSALKNNIHSILLMYNTKIEGHPFTQEYINRLKQLNDYRINGYLDVIETLNREINDVDEMIKKQAEEDQNAKLLMTIPGISYYSALLIASEIGNVNRFPDSYRLVSYAGLAPSTRSSGGKTHYGPITKQGSKYLRWILTQVTWTNMSQKEL

SEQ ID NO: 340408 - protein, 428 aa, unidentified
MNRTNTTEFAATIGLDWADRKHDLWICPAVQAKAEHRRLEQTPEALHEWVAKLRERFPNQRVAIAIETSRGPVISALMAYDFIVLFPVNPKALKDYRAAFCVSGAKDDRTDAMLLEEWVRLHRDKLNALEPDTQLTRKLAGLVENRRHLVDERTRLVNQQHSTLKTYFPLALDLLEDQMNTLLAAEFLVRWPSLAALQKETPKVLRAFFYKHNSRNAKRIEQRIQAVPTAKPLTTDDAIIEPACALVSARAAMLRPLLKAIQHLDKAIAQAMDQHPDAAIFRSFPGAGPALAPRLLVAFGTHRNRFASAAEVAQFYGIAPVVQQSGNSKTVRVRYRCPKFGRQSFHENAACALKKEPWARCYYQAHKKKHDDKHHPACRALAFKLARIYFACWRDKRTYQPDLYLQALQKNGSPLHKALKNQSIPSCE

SEQ ID NO: 340409 - protein, 337 aa, unidentified
MKVTTISIDLAKSVFQVCGTNQGGTEVFNRQVRRNKLLETVIQFPDADIVMEACSGSNYWGRLFIKHGLTVKLIPPQHVKPFVRGNKNDRNDAFAISEASRRPNLTFTQPRSVAATDMAVLHRIRDRRQGSLTRLTNQIRGLLNEYGIVIPQGSEHLRRYIPLILEDADNELSQLMRSELHSLFDEWSMMESLIKQHDRAIEQFARADEQTTLLMTARGIGSITATALMSVMGSPANYRNGRHFASSLGLTPSEHSSGGKQKLGRITKRGNRYVRKLLVQCAMSHVRHLESRTDNLSLWLKKLKDRRGVQVAAIALANKLARISWAMLHKQQEFKLN

SEQ ID NO: 340410 - protein, 391 aa, unidentified
MTFFIGIDIAKYKHDCFILNHEGEVIRESFSFTNDRTGFAYLKEILSTLDSNQTMRIGFESTGHYAMNLKVFLEENGFSYMQFNPFLIKRFAQATTLRKTKTDKVDARLIALYLMSVDYKPYPSQSYHIKNLKSLTRDRDDLIKQRTHQLVKLTNLLDLIFPEFKPFFGHSLTSSTCLYLLDHYLTPSKIARMNLDSYHKMTFELRRTLSYARFCTLKQLARDSVGSEDPTLTYLLKKALELYHFINHQVLDIEQLIEQTYAQLDSHIHTISGIGIQSAACILAEFESVERFDTSDQMLAFAGLEPSRKQSGESESKGKMVKHGSPYLRQSLMNVSAFIIIHNPILYEYYRKKRNEGKLHRVALTHVAKRIVRIIFHLEKHHLDFDLAKMR

SEQ ID NO: 340411 - protein, 348 aa, unidentified
MALTIVEDTRAVTGGVDTHADMHVAAALDPVGGLLGVGEFPATAAGYARLLGWLGGFGTVCLVGIEGTGSYGAGLARHVTAAGIRVVEVDRSDRQDRRRQGKSDPLDAVSAARAAQSGRARGAPKGRDGAVEAIRALMVAKRSARSERTQTINQARALIVTGPDDLRARFARHTAAGLVSELAALRPRPGATVGYATRIALRELGRRAEFLDGQLGRLDELIVPLVTARAPALLALHGVGPDTAALLLIAAGDHPHRLRSEAAWAHLCAVAPIPASSGKRTRHRLNPGGNREASHALWRIVITRMSSHAPTRAYVERRTKEGLSKKEIIRCLKRYAARQVYRHLRPAG

SEQ ID NO: 340412 - protein, 409 aa, unidentified
MTKALHIGIDISGRENMACILNENGDKLGPAFTFTNDQLGLEQFLEHLFLCAKKHNPEKINIGMEATNFYWWHLQETLGETLIDGTDIDLFIINPKLIKGFKKAYTSLPKTDAVDAWVIADRLRFGRLTPLHKGSLIYAPLARLTRLRYTMKKSIQKDKNRALNLTFLKFSSFRQTAGNKAFNKSSCALLGEFTTDEVAEKPLDELVDFILNHGNNRITSPEKFISEIQKAARNAYRLNPKMDDMVSVALTMTIENIRYLEKQCKTLDKVITREFQAMPQVLNTIPGIGSVLSAGITTEIGDISRFTGEKALAKFAGLTWHRAQSGPFVAEETSLTKAGNAYLRYYLVEAANSLRLHNDDYAAYYRRKYNEVTKHQHKRALVLTARKFVRLVFALLSKGQIYNERMVNG

SEQ ID NO: 340413 - protein, 439 aa, unidentified
MARFIGCDIHKKQVTVCMLDVDGQVLARLRIACTREALVPFARQQLRPDDQLALEATTHTWSVVDLLEPFVERIVVSNPLRTRAIAAAKVKTDKIDARVLAELLRADYLATVWQPDAETRRLRALTRRRAGLVADRTAVKNRLHSTLAQRLIPIPFQKLFSAQGLEWLKQLELDDDGRLALDSDLRLLAAIEQEIQALEDILARLAYERQAVRLLMTLPGVDFAVAQGVLAAWGTIDRFPDADHAAAYLGLVPSTRQSDTKCYHGRITKQGNSHARWLLIQAAQHLDSHPGPLGHFFRRLAQKKNRNVAVVAAARKMALIAYFILKNREPYRYALPASSQTKLARLRVRVTGQKRRGGTPKGAPRPADYGSGKSTRRIPSLPEVCLREQLPPPTPLDDLPPGEHKHLKTTAALPYVQQIQQVQRIPRTPTPRQKELTES

SEQ ID NO: 340414 - protein, 334 aa, unidentified
MEKVTTLGIDLAKSVFSLHGVDGAGQVVLRRTVRRDQLVKVVAGIAPCLIGMEACSGAHEWGRRFQELGHTVRLMAPKFVAPYRKSGKNDGNDAEAICEAVTRPNMRFVPVKSLEQQALLAMHRVRQGFVVERTAIINRLRGLLCEFGVVLPLRSVTVRRQAAQAAENLPDLARRAIGDLLDELRVLDERIGGYDREIETQANLCEPAQRLMKIRGIGPTTALAIVATVGNAREFKNGRQFAAWIGLTPSQYSTGGKPRLGHISKRGDAYLRNLLVQGARSVLNSAGMHPDRMSRWILELQPRRGYYRTLVAIANKNARIAWALLAKNESMRSA

SEQ ID NO: 340415 - protein, 400 aa, unidentified
MRTVFGIDVSKASSEVAILVNGERVHSYTMPNDIIGFSHLLKDLKTVSNPEIIFEATGVYSRRLQAFLEENNYDYTRLNPLEAKKQLDSLRVRKTDKIDAEKLASSQFVLNRKPTYVQEEVYQNLHDLSRFYQNLTEDIVRTKNRLHKVLQVAFPEIENLLSTPTGEQYWNLVSIFPTKHWVLELSEVELKETIRNSTSKRISENRVGNLAEKLVGLAKQSYSAISKTSPMIEEVKYNAQELIRLTNRREQVLQQLIALAEPLPEYEILLSIPGIAETTATSIIGELGDIRRFKSANQINAFIGIDLKHYESGDFLGQEHITKRGNPYARKIMYKCIHNIASASHTNPCHIADFYEKRKRQSQTTSTKPHTIASIHRLIRTMYYLIMHNKLYDYTLAKSH

SEQ ID NO: 340416 - protein, 415 aa, unidentified
MKANPHTQYAALIGLDWADKKHDVCLMPSNTGKFEYTQFTHTPEAIEDWALALHKRFPHQRLSICLELKSGPIVYALLKYPWFDLYPVAPTTLAKYREAFTHSGAKDDPTDAFLMVDFTLRHNDQLRLIHPDNEETRILLRLVEQRRLLTSEKVRISNRVTRALKDYYPQSLNWFNDIDTVIFCDFIKKWPNHSKANRAHKSTLVKFFHAHHVRSQDRIDKRLNDIKTSMPLTEDNAVIEPSQRYVLCLIKMFKSILNMIKEYNQEIAKRFEAHPDYEVFHSFPGAGPVYAPRLLTALGSQRDRFESSDELVRQVGVAPVVKRSGQSTWIHWRYNCPKFVRQTFVEWANQSIHYSYWARLYYDRQLAKGKAHQTILRGLAFKWARIIYRCWKNHEPYNETRYLMILKKKGSPLVI

SEQ ID NO: 340417 - protein, 323 aa, unidentified
MNTYYIGADVHCNKTELAVERKNKIIQRFSVPTTITAISEVLKSIPGRKHLTFEEGPMAGWLYRNLNNEVDTITVCDPRRNKLIASDGDKDDKIDAAKLACLLRGKYLRSVYHGKDDKIVELKGWVGLYLGRVKQATACINKIRSQARMYGIKIPRRVLRDVQYRQEWLCSLSKESVAKRLQVLWIGYDASAQQTKLSKQQMSKLAGRYPIIRYWDRLPGVGPIRATTIFAYLETPWRFKRKNKLWKYCGVGLVRQFSGGGAGRLKLNWSSNKRLKNAVMGAAISAIRHRDNIFKDDYERMVKDGITPSNARHAVARKLLTVM

SEQ ID NO: 340418 - protein, 417 aa, unidentified
MQATGAGEKPLRFVGLDVHRRYATVAAVDSQQQVVLTARRVDFEDFEGWIHKHLRPTDAVTLEATNNAWYLHDLLVSLVASVTVANPIQVALIAKARVKTDPRDALALARLLAAGLLPSVWVPPHDVRELRALIAHRRRLVKQRTQARNRLRAVLFRHNLVAAPGEVFGPEHRSWWEGLNLPTSEQLRVRHDLTILDCLEALTKEVEAEVVHQSSLEPWAERVAFLVQLPGIGVLNAMLLLAAIGDIRRFAAAPKLVGYAGLGASVHSSGQEHYGGRITKQGRREVRSTMVEAAWVAVRSHPYWKAMFERLADRLGRPKAIVAIARKLLVVVWHVLAEQVADREAQPERVAGKFLDWSWKLGRANRAGLTTAAFIRRELERLQLGDEVTAVYRGKRTFRVAPPELSARSSRVAAREQ

SEQ ID NO: 340419 - protein, 392 aa, unidentified
MTYFIGIDLAKYKHDCFIMDENGEVIRDSFSFNNDKEGFNTLLNVLNSLDLNQEKRIGFESTGHYGSNLKIFLERNGYSFMEFNPLLVHRHFKSETLRRTKNDKVDARKISSYLYTREYKPNPNSSYHLNCLKSLTRTREALIKDRTRHIIHMINVLDKMFPEFKLQFGNQGLNAASAMYLLENYGSPSKMANMTRSSYDKMKSELRHTISYAKFLKIKELAKNTIGNEDEILVFELNTYLELFKELDKKILEVEDKITKEFSIMKCHIASIKGIGIITAASILAEIESIDRFDNPGQLCAFAGIEPSENQSGTHDGGGKMVKHGSPHLRNYLMQSAGYMLIHNPVLYEYYLKKRNEGKCHTVALSHVAKRLTRIIFYLEKNDTDFNIDKMR

SEQ ID NO: 340420 - protein, 359 aa, unidentified
MEMADHTSVEANVTLGVDTHKDSHVAVALDGLGRHLGTLSVPTTTAGYRKLLGWARELGTIEQAGVEGTGSFGAGLTRFLKAEGIQVREVIRPKRRDQYRSGKSDPIDAEAAARAVLAGTATGEPKGADGTVEMIRSLRATRRSAVKARTQASNQLKGMLLSAPQELREELRSLSTAKLVCRTSRFRLSGNPDTVEAATKFALRSVARRYQHLQEEIKELDEQLNRLVEQAAPELVAVDGVGTDTAAALLIAAGDNPERLKSEAAFAHLCGVAPIPASSGKTVRHRLNIRGNRDANRALYVVAFGRMSRDERTKAYVARRTAEGKSKKEIIRCLKRYIARELYRILVSPLSKAPSISVP

SEQ ID NO: 340421 - protein, 343 aa, unidentified
MEYYVGLDVSLKQTSICVVDQSGSVVREGVVDSDPEAISVYVGSKAPGAVRIGLETGPTSTWLWTELKRFGLPVICIDARHAKAVLKMQINKSDRNDAIGIARIMQTGWFKEVHVKDVDSHSVRALLASRALLVKIKRDLENHVRGLLKNLGLVIGRAKFNVFAVRAEELIEGRRDLIAAIRPLLEARNAVEQQVSELDRKVMRLARHDVQIRRFMTVPGVGPITALAFKATIDDPARFARSRSVGAYVGLTCRRHASGEVDWSGRISKCGDAMLRSYLFEAAGVLLTRVPKWSAVKAWGVRLVKRNGLRKAKVAVARKLAVILHRMWIDGTEFNWSRKEIAA

SEQ ID NO: 340422 - protein, 346 aa, unidentified
MMIIGCDFHPSWQQVCWLDSETGETGERKLVHAEGEAERFYRQVPAPALVGMEATGNSHWLVDLLAEIGHELWVGDAAQIRASYVRQQKTDKRDAAHIMKLLAEGRFPRIWMPSSEVRDLRQLLLHRYKLVIIRTRVKNELQHLCLNQGVQRKRKLWSQAGQKLLRELPLRPWAARRRDDLLRLMAMLNQQIEPLDAALKAEALRDKMALLLQSQPGVGPVTSLAYVLTMGDVSRFPRGKQVASYLGLIPREHSSGGRQKLGAITKQGNRMLRMLLVEAAQTTVRLDPGFRKQYLHRCHQKPKAVAKVAAARKLAVRLYWMLRTQTGYPEIVRIESSPRVPLVGAS

SEQ ID NO: 340423 - protein, 482 aa, unidentified
MKPKQKDKSKTATGRPTQPSWQEMNRKQRREMVRKIQSEELRLDVIHPDAAGIDIGNESHYVAVPPSRDSQPVRRFGCTTAELKVMAGWLHQCGIRTIAMQSTGVYWIAVYDILEEAGFEVYLVNARETKNLPGRKTDVQESQWLMKLHTYGLLRNSFRPPQEIRTMRTYWRQRNDSVQAGARHIQRIQKALTQMNIQLANVLSDVSGMTGQAIIKAILAGERDPHKLAELRDPRVKASEEQVERSLEGHWQEDLLFVLKQEQDGYEFCQDQMAECDRRLDQYLQQQKDRSQGASLPEEKRKERLKKKKGNKPRFDLRTGLFRMAGVDLTQIDCIDVMTATTILSEAGSDMSRWETEHHFVSWLRLCPDNRISGNKIIGKGRLPTSNRITSALKMAASTLRTSNTYLGAQFRRLRTKLGAPIAIKAMAAKLARLIYRMLRYGMKYVDQGAEFYEVQHRKLQIKHLKSKAAKLGFQIVQAPAA

SEQ ID NO: 340424 - protein, 341 aa, unidentified
MEQYVGLDVSLKETSICVVDGSGAVICEGKVSSDVDSISLFLEKHAPAAVRIGLETGPLATWLWHGLRGRGLPVICICARHAKPFLKTQLNKTDRNDARGLAQLMRFGAYREVRVKSLATHAERGLLTGRALLVKMRRDVENQLRGQLKTFGLKLGQVSGGRFEERVRELIGANDMLRAVVDPLLAVRAELRKRIAGLDRALSAAARRDPVCRLLMTADGVGTVVALGYKHTIEDPHRFRGSASVGAYVGLTPRRFNSGEVDYTGRISKCGDTMLRSLLFEAAGVLLHRCAKPSALKAWGLRLARKIGLKKARVAVARKLAVILHRMWRDGTPFRRTAAAR

SEQ ID NO: 340425 - protein, 394 aa, unidentified
MKLVGIDVGKNSHHFCVMDKETGEFNVAPSSFSNNKEGFDFLINSLKPYSKKSILIGMEDTGHYHVALLKFLLSNGYTVALINPKTTDLTRKMEGGITKNDKLDTITICDVLDTPERKKQYRITKVDRFDLYEQRQLTRHHHNLKEELNVYCNRLQKSIDLVFPEFNTLFSSKYSIVYMNLLKTFGSAEAIASTDIRTIRKCFEIKGRGGRISLTAEKLKECAKNSIGISSEVETIQIKHLVSQITLIKEQIAEIDKKIEEFSITNNSPILSIPGISHFSGTSILAELGDIGNYSKPSQIIKFAGVAPYHYESSQYNAQHTGITKKGSKYLRKTLYQIILTVINNNPVFKKYYRLKISQGKGHRCAQGHCIRKLLRIIYHLLETGQSFDPALLR

SEQ ID NO: 340426 - protein, 445 aa, unidentified
MGNGSGLSRGDRRRNARLTGLREIVSRDRAVIGIDLADEKQAVVVCDHDSVVLARRRVRCRAWELGPALDWALGEARLAGFSGAVVACEPTGHRWRSVAQLAGERGLELVCVQPVLVGRARVGEDFTRDKTDDKDAVLIARLTTELRCYVPEDPDETWARLRHLGSRRARLICESTACVQQLRDLLECVWPAALGAAAQPFDSMSWRASMFVVLDRCDGDPARVRAMGWKRFAAAVRRELPRWGTTRWFSPIVSAVFDATTDTTGVVVQRRGALERAAMVFEDWHATRARLADTEARMVGVLDELGLVELVTSITGLSVVGAAQILAECGDPNRFASPRSLVKHAGLCPREDTSGNHTGTSRLAGAGRPGLRLAAWRAVWGAIHANPVYAARFAHLTSRAENPLTPGQARAAIAAALLRQLHVVVTRRVYWNPDIAGTTTEALAA

SEQ ID NO: 340427 - protein, 473 aa, unidentified
MIKSVGIDLGGIGEHRVRCLDENAQMCDSFGFDTTRVGLAKLEERIFSNGSNPVIIFEPTGLAWLLVAVYLKSRYPDSRLVRVQAQKVVALRKYLNRSSKSDKIDSLTLAKMPFIDPEKLEEIYLPPGKIYAIQRLSRQRKRLESEIAGHKKRIGSIVDGHYPGIRSAFSDSWSAHARAFLRSRLNPITVVRAGEKTLCRFLIKARKHGRIEASVESHGVYLVCRELASLYKASSSVEIIDNDFFSALQEEIARELKLMEIKEAESAAIAKRLEKLYLEIHPSDNLRTIPGVGDITAPVFLATIGDPARFHSQSAFANYCGIVPGANQSSGSEAKGLRMTKAGPPIMRWALFQAGGIGRAHDPQLACVYYREMVHNGKNHMQAMGAVMSHMSARVLAVLREDKPYQLRDIDGRIVSREEARKIILTKYHVPEEIRRERRRRKIPGSPSMQKKLREMLVPKVREAAETPQPVVT

SEQ ID NO: 340428 - protein, 347 aa, unidentified
MRFYNRQHRHYCGIDLHVKTMYVCMLDATGQVLVHRNVPSTPEAFLEVVGPYRDDLVVAAECMFTWYWLADLCAAEGIRFVLGHALAMKAIHGGKAKNDKIDSHKIAVLLRGGMLPQAYVYPAAMRSTRDLIRRRLHLVRKRGQLLAHIQNTRAQYNLPAFGRKLAYKANRAGVVEHFGDPSVQKSIEVDLALIDHYDALVTDLELTIVREAKRHDADAFHRLRSVPGIGKVLALTILYEIQDITRFDRVQEFASYARLIKCTKESGGKKLGTGGAKMGNVHLKWAFSEAAVTFLRHNRAGKQLLTRLEKTHGKGKALSILAHKIGRAVYYMLSRGTVFSMEKFLAA

SEQ ID NO: 340429 - protein, 427 aa, unidentified
MPYRIAGIDVHKKMLAVAVADVEAEAEWRFDRRQFGTSPSQLHTLAEWLAECEVEEVVMESTAQYWRPVWETLERQWQPTRQTPTQARPTTGALHLAQAQSNHGPRGRKQDFPDAERLVKRLVAQELTLSFVPDVTQRLWRTVTRRKYQLTCNRVQLRNRLECLLEEAHIKVSSLVSDLLGLSGRRMLRAVASGETDPAIIAALGSPRLHATPDQLRDALGACVDLDPVYRRLLAMTLDELAVIDAHLRQLDEELARLLRVHQDAVERLAAMPGLGVDSAQQIIAEVGPTATTFATAKRLASWVGACPGHDESAGVNHSHRSPNGNRQMRRLLNQAANAAVKTKGSIFELVYRRLVVRLGHAQAIGAIAHRLCRLVWKILHDGIAYEERGPAVTKARAQRRAAKMIRELRSLGYRIEPGLSPAGALA

SEQ ID NO: 340430 - protein, 356 aa, unidentified
MGQNGYLYKVIILCFKREMMQKNYLGIDVSKLTFDVSLVTVLDGQKQPALITQFNNNPAGLEAFKCWLNEKRVSFDKHSLLVMENTGIYHRLIWNFCTTHLLPVFIGNAADLKWSFGIARGKNDKIDSMRLSEYAYKNHEDIKPTTGLNKALITLKDLLSNRSKLLKQKNAIKQTLGELKASNDKGTQQLIEKLNKAAVEGLAKSIKLIEAELLKLVKQDEAVLANYQRMLTVPGIGKITAIFIICCTNNFAIKITGKQLASYAGVVPFEHRSGTSIKGRTRVHFMANKELKALLTMGALSAIGAYPEFKDYYQRKIKEGKEHLQVLNAIKNKVLLRVAAVINKQKVYENKYTIIC

SEQ ID NO: 340431 - protein, 388 aa, unidentified
MEARLVDTTSTARNDAPARCLIAIELSKASWVVGVQTPLSNKTSQYRLTAGDWKSLLKLIERIRRQVGDELGRPVEMISCYEAGYDGFWLHRLLEAHGVRNHVLDPASLLVNRRARRAKTDRIDVERMLRALGRYLRGEPDACSVVRVPSVEQEDARRLHRERHRLIRERVQHVNRIKGLCATQGIYDYEPLRSDRKAQLEGLRTGDGRALPARLKAEIIRELHRLELVLKMVAEIEAERDAIVTEAAPQHLNAGKIKALANLRSIGPEFATTLVGEVFYRSFDNRRQVGSYPGLAPSPFSSGSTDRDQGISKAGNPKARSTMIELAWMWLRYQPDSTLSIWFRQRVGDRKGRVRRIAIVALARKLLVALWRYLETGLVPAGAVFKTR

SEQ ID NO: 340432 - protein, 450 aa, unidentified
MSRPQVIDDQEHERVYERVAAVDVAKDSGMVCTRIAHPSRPGARRATVWTVRARMGAIRVLGRQLKRDGIEIVTLESTSDYWRIWFFVLEACGLAVQLVHAAQAKNLPGRPKTDKLDAMWLARLTELGLLRASFVPPKAIRDLRDYTRARTRLVQERTRCWQRLEKLLESALVKVSAVASKLTTLSAQDMIKAMIAGERDPEVLAGLARTRMKAKHDDLVAALDGMFDDHHGELAGMLLDHIAFLDVRIARLTARAAELAAAMPAAWGVDPDGTTGPGAGTAPGAPVLPAVARLAEIPGVSENLARSVIAETGLDMTRFPTAAHLVSWAGLCPSARQSGPRTRPGKKGQGDTWLRGALGQAAVGASGTATFLGERYSRIARRRGKAKAQVAVARSILVIIWHLLANPETRYTDLGYGYYQARTDKDKKIKNHIRQIEALLGHPVTIIKAA

SEQ ID NO: 340433 - protein, 323 aa, unidentified
MNKYKETFGIDISKDVFDCYGSVQGHLQFNNTETGFKNFQAILSKGSLVVMEATGYYHYRFAQFLYHKKVYVSVVNPLSVKRFIQMKLAKVKTDKSDAKAICEYGLTQEVPLYSALTNVQSECLQLFRLMDNFLKKRTATKNKIHGEEVLGVPSNWVYRSLQRDKKHLDKELKGIEQKLLSLVKQDQQQQLSLLQSIPGIGLKTALFLIVVTDGFKKFETSSQLCSYVGITPTIRVSGSSVRGRSRISKVGNRKLRNLLFLCSFTACKHNKGCKELFQRITNKGKSKKLALIAVSNKLLKQAFAIAKSGHPYDPSFASVFEVK

SEQ ID NO: 340434 - protein, 482 aa, unidentified
MKPKPQEKTSKDSCRPKPGHWNEMNRKQRRETMRKIQSDDLSLEVVHPDSAGIDIGNESHYVAVPPTRDSQPVRRFGCTTAELKEMAQWLKQCAIRTVAMQSTGVYWIAVYDIFEAAGFEVYLVNARETKNLPGRKSDVQESQWLMKLHTYGLLRNSFRPSQEIRTMRTYWRQRNDLVQAAGRHIQRMQKALTQMNIQLANVLSDVSGMTGQAIIQAILAGERDPHKLAEFRDPRVKASKHEIARSLEGNWQEDLLFVLKQEQDGYEFCQKQMLECDRQVEQYLQQREDRSKGTPLPEEKRKGRLKKKKGNAPVFDLRGELFRMTGADLTQIDSIDIMTATTILSEVGWDMGKWETEDHFVSWLRLCPDNRISGDKIVGKGRLPTKNRVSIALKMAASTLRRSNTYLGAQFRRFRTKLGSPIAIKAMAAKLARLVYRMLRYGMKYVDQGAKFYETQHRILQIKQLKRKAAKLGFQVVQAPAA

SEQ ID NO: 340435 - protein, 387 aa, unidentified
MPKPNDLSRSLTALDQDSTLIAVIEMSLSRWLVSALVPGLKRDPLKQQGPDAEALLRLLHRWRDEAVKGGRVITRICVAFEAGRDGFWLARWLRARGIEAHVIHAASIPVQREHRRAKTDRLDVGLLKRAFLGWLRGEAKHCSMAAIPTLAQEDAKRPSRERENLVGERSRIVNRMKATLVRLGIRGFNVKLRQAPKRLEGLRTPEGELVPPNTAAELRREMARLDFLKAQIKVIERARLERLEAAPAERKHAMIQLLAKIRGIGIETADMLVHEVLARNLRDRRAVARYGGITGSPDESGSKRREKGLARAGNARVRRGMIQLAWRWLMFQKDSALAQWYRQRTADARGDTRKTMIVALARKLLIALWRLVTSGQLPSGVVLQPAP

SEQ ID NO: 340436 - protein, 348 aa, unidentified
MSKTSHFVGLDVSLKETSICVIDDAGKIVWHGRTDTTPEAIAAAVKRHAPHAARIGLESGQLSSWLFHALNEAGLPVICVDARHAKAALSLKVNKTDANDALGVAQIMRVGWYREVAVKGLDCQAVRALLVARAQIISQITTLKNCVRGILKTFGLVLPKGLRSQFPGRVRAAIDGHPVLGAIIEPTLRVLEATRAQLLVYDRAVVQRARSDDTARQLMSAPGVGTVVALAYMTGVEDPARFKRSSSVAAYFGMTPARYQSGEVNRAGRVSKCGDGMVRGLLFEAAKVLLSRSARPSRLKTWGEALGKRVGPKKATMAVARKLAVILHRMWTSGTTFQWNAEAASPAA

SEQ ID NO: 340437 - protein, 420 aa, unidentified
MAGVVDIVYPVCCGMDVHKNFLVACIATTDERNHTTHQLKRFSTFTGDLRKLASWLAANNCRDVCMESAGKYWIPVFNILEKTCNVCLTHPKYVKAIKGKKTDKKDAKWISELFKCDLVRSSFIPPPLIRQLRDLCRYHSKLTSMCSSDKNRVQNCLTMCNFKLDSVFSDVFGKSANRIIDALIEHGNSDFDFTPLIDGRCKATVEEIRAALDGELIPAQTEKLNLIRKHMEYLTYIKDSLEQLILDLAKEYQPQIDLLMTVPGISTHLTAVRILSEIGADMSVFETAKKLCSWAGLTPQNQESAGKKKTTRIGRGGDYLKPLLVQIVLAATKSDKCPELKNKHQSLKKRRGGKKATIAISRKILTAVWNILSKNEPYNAELYHKIDKAPNNRELTTEQAFALLRKQGYTISDKYAALAL

SEQ ID NO: 340438 - protein, 355 aa, unidentified
MNDEKYIGLDVHQATISVAVMDGNGKVVMESILETKAATILEFFAGLRGTLWVTFEEGTWSVWLYDLLNPHVDKLVVCNPRKNALLKDGNKSDRIDARKLAELLRGNQLKPVYHGETGVRMLRELSRSYLTIVKDLSRIMNRLKAVYRSWAIPCAGRDVYYRRHRAQWLAKIREAGVRRRTERLYEQLDMLQHLRQQARRELLAEGRKHAITARLRQIPYLGPIRSVLAVALMQTPHRFRTKRQLWAYSGLALETRTSGDYRYVEGQLRRSKKLVSIRGLNKDHNHDLKGLFKGAATMASVRPGPFQDLYQAALAKGIKPTMARLTLARKMAAITLTLWKKGENFDAEKLKSQAA

SEQ ID NO: 340439 - protein, 316 aa, unidentified
MQTPLVFVGIDVSKARLDVGVRPSDERTSVPYDAHGITTLIAQLTQVQPTRIVMEATGGLERLLLRALVDAALPVIVVNPRQVRDFAKATGQLAKTDTLDAQVLARFAEVIRPTLRVIPDAQTQELAALLARRRQVLAMQGAEQNRLDRAPDRVRKRIEAHLRWLRDELARLDADLDDLIQQSPVWRAREELLQSVPGIGPVMSRTVLAELPELGLLNRKQIAALVGVAPFNRDSGRLRGHRTIWGGRASVRRVLYMAALVATRWNPVIRLFYQRLRAAGKAPKVALVAAMRKLLTILNAMVHAGTPWQPVVAQEA

SEQ ID NO: 340440 - protein, 408 aa, unidentified
METIHPICCGLDVHQASVSACLRRLNAQGAVNVESREFGTTVKELVALADWLVAQGCPIAAMESTGVYWKPVWNILSPLLDVWVVNAREVKQRRGKKSDRADAKWIAELLAHDLVQPSFVPPPRIGVLRDLVRMRTVLVQGRTQVKNRVLAVLEDTNVKLASVVSDPFGASGRKIMEALVNGQRDCKVLSEMAKGVLRRKIPQLEVALQGSFTKHHAFMIRLGLESLDQSNRQIAELDAQIERLMDPLQEEALRLTSIPGVGQNAARVVLSEIGTDMTRFGSAERLASWAGLCPGNHESAGKRYSGKTRKGNRYLRRVMAECAWAASKTNTFLGRTFRRFQIRIGGKKAAVAVGHKILVIIFHLLNEGRLYDDGRYDHITQREQIRQRNRAMTTLQRLGYQVVLTPTP

SEQ ID NO: 340441 - protein, 429 aa, unidentified
MNYNTQNAKITSITEKSLIVGIDVGSETHYARAFNWRNYEYSKKPFAFSNDEDGFASFKAWMDDIAEKHEMEKVIPGMEPTGHYWLNLGAYLQGQGMRPVHVNPHHVKKSKELDDNNPNKNDRKDPKTIAGLVNEGRFSYPYIPTGIYAEIRNLSNLRIQTQEEITRIKNRIARWFSIYFPEIKDVYRNPDAVSGLMVIKQAPLPCDIKGLGVDGVNKIWRDARLKGAGIKRAKTLVTAAEHSIGNTEAPRSARKEIRNLLNDYEIYKSRMDELMEEIEELLSEIPYIDKLMGISGIGIKTVSCFIAEVGDIERFDNPKQVQKLAGYAIVADSSGKHKGESRISHRGRKRLRYALYEAAVSVIGKNKEFKEIHHYYRTREKNPLKKMQSVIAVACKLIRIFYAILTKGIDYDGQKMLRDIVRPGMQSAA

SEQ ID NO: 340442 - protein, 453 aa, unidentified
MVQRKQKISIKTSKSREALTITHPNAAGIDIGSSSHYVSVPPDRDDEPVREFPSFTVDLNALADWLDACGVDTVAMESTGVYWIPLFELLESRGFKVFLVNARHVKNVSGRKSDVLDCQWLQQLMTYGLLRGAFRPSEAVCVLRALWRQRGMLLRGQGRQVQHMQKALTQMNIQLTNVISDVVGETGQKILRAIVAGERDGQVLGAMKNARIRATSDEIAKSLQGNWRAEHLFALKQALDMFDFIGTQLSECDRQIEGQLESLKIHDGEPAKGKKRGRTRNAPKFDLRTQLFRMCGVDLTRIDGIDVTTALAVISETGTDMSRFPTAGHFASWLGLCPGTKITGGKVMSGKTKRVANRAAQALRLAAAALRSSQSALGAYFRRMCGRMDKPKAVAAAAHKLARLIYTMLTKGEEYTDQGQDYYEERYRERVLRQLAQRAEKIGMKLVANEQPV

SEQ ID NO: 340443 - protein, 369 aa, unidentified
MLMLAEQQSAGATVAEVYRYVVGVDTHATVHRYAIVEAGTGRVLDEGGFPTSGAGLARAVAWIARRTEGRVEEVLVSCEGTGSYGARLAKLLLEAGYRVVDAPSPKRDRGQDKDDTIDAIKAARGVLGKRADRLAEVRAGELQEALKVLLAARDRMASESTRSVNALTALLRGMDLGIDARRKLTATQIRQVARWRTRSESPAAAIARAEAVRLAARIMQLRVELAANKTQLRQIVQAHAPVLLDSYGVGPVNAAIVLSVWSHHGRIHHEAALAKLGGVSPIKIESGQSTEHRLNRGGDRQLNRALHSIARTRMERDPHTRAYVERRTRQGLSKRRIRRCLKRYIARQLFRTLTTHTEQINNQVTPSAA

SEQ ID NO: 340444 - protein, 364 aa, unidentified
MNKCHSNTELSSHEGTRSQFNGGKAIIKLGIDVHQDFYVVVEQVCGSNPKPPQRFGKAAFLHWAVKLKRGETEVYAVYEACGFGFTLQRQLSALSIQCHVVCPQKLDEQNRRVKTDGLDAKALCLKLDRFVQGNRDALALVRVPSEKEEQLRAIHRQREQLVKARKQLEAQGRSLMVNHGCEPVTSWWKPRTFAALPAPPWMKELLGNSQPILLMLQQKIVALTVQLQSAAAPNQPRGLGLMSSVIIDREIGDWGRFSNRRQIASYTGLCPGEYSSGNTRLQSCVTKHGNPRLRAALVELAWRLVRFQPNYKPIVKWRATLAKGALATGAARKKAIVAVARQLAVDLWRIKTSRLNAATLGLIS

SEQ ID NO: 340445 - protein, 366 aa, unidentified
MKKNITLVENTNEVFKSQQLTIGVDLGDRTSHYCVLDEAGNVILEQSVATTPKGIQQVFSKISRSRIALETGTHSPWLSRLLMQLGHEVIVAHARNVQLITESTRKDDRLDARTLARLARIDPQLLGPVRHRSAKAQIHLTEIRARATLVSARTALVNAARGLTKSFGERLAKCGTEQMNREIAKGLSPELRDVLEPLLKEIESLKERIAEYDRRIEQIAKEVYPEVALLKQVKGVGTLIGLTYILTLDDPHRFRRSRDAGCFLGLRPGRRNSGMSEPQMHISKEGDAYLRTLMVQGAHYILGPFGPDSDLRRWGLKLAQRGGKNAKKRAVIAVARKLAVLLHKLWVSGEVYEPLRNNHEVVSAVA

SEQ ID NO: 340446 - protein, 338 aa, unidentified
MPLYGGIDLHANNSVVVLLNEQDQRIYHKRLPNDLATIVEQLAPYHADIEGLVVESTYNWYWLVDGFMDAGYRLHLANPAAIQQYSGLKYTDDHSDARWLAHLLRLGVLPEGYIYPKAQRPIRDLLRKRAHLVEQQTANILSVQNIILRNTGARLSANRIKSVRQAEVEALLPDADQALAVSSALAVLHCLAEQIKTVETRVRTRLQSTPLYELLQTVDGIGPILAQTILLETGDIGRFPSVGDYASYCRCVDSTKVSNGKRKGQGNVKNGNPYLAWAYAEAAHFARRFNLKVQRYYQRKQAQTNVPVAHKTVAHKLARACYHMMRHQVPFDAAKAFG

SEQ ID NO: 340447 - protein, 350 aa, unidentified
MMIIGCDLHTRYQQIALVDTDTGEMLESRLEHGNGEARAFYGALAGRVRVGIEATGYTHWFEALLAELGHELWMGDAAKIRAAVVRKQKTDARDAAHLLDLLREGRFPRIWRPSPAERDLRQLVWHRQKLVWMRGAVKNQLHALAMGEGVCRKKQLFTAKGRKELEGLALGPWSSYRRQELLRMYDEMAAATAKLDLEVERAAKSLPLAVRLMTHPGVGPVTSLAFVLLIGPVARFERSKQLVSYLGLNPQEHSSGGKQRMGSISKQGNPMMRSLLVEAGHTAARLDPELKRVYQRLKFRRGASVAKVAVARKLAVRLYWMLRSAADYAQLVRMQGSPWATLVETSPSLG

SEQ ID NO: 340448 - protein, 348 aa, unidentified
MSQLLSTVTVIGIDIGKNSFHVVGLDGHGAPVLRQKWSRGQVDARLANMPPCLIGMEACVGAHHLSRKLKTLGHDARLMPAKYVRPYSKGQKNDFRDAEAIAEAVQRPTMKFVATKTAEQLDLQALHRVRERLVSQRTGIINQIRAFLLERGVAVRQGLRFLRAELPRLLAAPDEVLSPRMIRLIEGLAEDWHRLDDRIDCLSGEITAVARQDAGCERLVSVPGIGPIISSAMVAAIGTGEAFSKGRDFAAWLGLVPKQISTGDRTILGKITKRGNRYLRVLFVQAAWVVLIKPHSWERHGLKRWIEAAKKRLHHNVLAIALANKLARIAWSVLARGRSFEASKLQAA

SEQ ID NO: 340449 - protein, 412 aa, unidentified
MQTLIERGCGLDVHQATVVACLLIVRKDGKVQKQMRTFGTTTRELVGLREWLLSEGCTHVAMESTGVYWKPIYAILEGALEIVVANAQHIKKVPGRKTDVKDAEWIADLLCHGLLRSSFVPPKPIRELRDLMRYRRKLVESQAAERNRLLKVLETANIKLANVATDVFGMSGRLMLRALIQGKATPQEMAKLAKGLLRKKIPELELALEGKLEQHHRFLLELQLQRLEAAEKDLAVLEQRIRQMLEPYAAQLALLDEIPGVDWTLAAVIIAELGVDMSVFGNVSQLASWAGVCPGNNESAGKRKSSRIPSGNVYLKSGLVEAANAAARAKGTYLRDKFFRLKARRGYKRAVVAIAHKILVAIYHMLSQEVSYNDLGDLYLDKLNKNHLTRNLVHRLERLGYAVTLTLQQKAA

SEQ ID NO: 340450 - protein, 426 aa, unidentified
MWDAQRRVLKIKSLKHGIIQDKRGNVMRAVFGIDVSKTSSEVAILVNGEKVHGYTILNDAFGFNRLLGDLKTVHNPEIIFEATGVYSRRLQAFLEEYGYAYTRLNPLEAKKQLDSLRVRKTDKIDAEKLAKSQLVHNRKPTYVQEEVYQHLRDLSRFYQNLTEDLVRAKNRLHKVLQITFPELENLLSTPTGEQYWNLVMAFPCKEFVLRLSQSDLCEIIRQSTSKRISEKRIAYLTDKLIKLAKQSFCAVKKNSPMLEEVRYYAQELLRLSERRQVVLNDMVTLAQPLPEYDILRSIPGIAETTATSIIGELGDIRRFQSSNQINAFIGIDLRHYESGNFLAKEHITKRGNPYARKILFKCIHNIASASHTNPCHIADFYEKRKRQSTIASTKPHAIASIHRLIRTMYYLITHNKLYDYSLTQNR

SEQ ID NO: 340451 - protein, 334 aa, unidentified
MQNITLIGIDLGKHYFHIHCQDKSGKALLRKKFTRTKLMQFLATCPPSVVVMEACAGAHFMARCISDFGHETKLISPQFVRPFVKSNKNDFVDAEAICEAASRPSMRFVQPRTETQQAMRALHRVRESLIRDKVKTTNQIHGFLLEFGISLPIGDAVIKRLSLVLAEHEIPEYLSRLLVRLHTHYFYLVEQIAELESELSQSINADDTAQRIMTIPGVGPITASLLSSQLGDGKQFSCSRDFAASTGLVPRQYSTGGKSTLLGISKRGDKNLRRLLVQCARSFIMRLERKHGKLAEWVREQLNKKHSNVVTCALANKLARIAWAITTQKKEYQA

SEQ ID NO: 340452 - protein, 310 aa, unidentified
MLDTETGELTEKVIRHEGNTVREFYASLGKPVVVGLEATGSMQWFLELLEELGIESRVGDPAKIRAAETRKQKHDRRDARLILDLLERDRFPAIWMPTSEQRDLRSLLRDRDQWVKMRARLQHTLQAIALNHALRKGSSLWSGTGQEALAKLPLPAYTCQRRNELMSLYAQLQRRIQQLDKQVEEQAQHRPQARRLMTHAGVGPVTALATDVFLGDPSRFTTANEVASYIGMIPSEHTSGKRQRLGKMSKQGNSLLRYLWTEAGMHASGKDPELKRFYRRKLIQKGNGQVEDRSGAQTRHPVVDYDARRD

SEQ ID NO: 340453 - protein, 367 aa, unidentified
MMGWMAPLRHLSAKLLSDRISSEWEPSMSEVTTIGLDLAKHVFQVHGVDAEGATVLRKQLRRAQVLTFFSRLPPCLVGLEACATAHYWARELRGLGHEVRLMPAQYVKAYVKRNKNDAADAAAICEAVVRPTMRFVPVKTADQQAAVLLHRGRERLVRQRTGLVNALRGHLAEFGVIAPQGLGNVGKLIAIVRDEGDARLPDLARQVLQVLAVQIEQLEAAVAALEKQLMAWHKSNPVSQRLASVPGIGPIIATAIAATVVEPSGFRSGREFAAWLGLVPRQNSTGGKHRLGRISKRGNQYLRRLLINGASANLLRSKATNADPWVIGLRRRRPSLVVAVALANKTARIAWAVMHRQENYRRVAAAA

SEQ ID NO: 340454 - protein, 336 aa, unidentified
MHHDVAVVGLDLAKRVFQVHAVGRDGQITIRRKLRRGEVLAFFSSLPSCLVGMEACASSHHWGRELMVLGHEVRLMPPAYVKPYVKRGKTDAADAEAICEAVTRPTMRFVAVKTREQQGVLMLHKTRDLLVRQRTALINALRAHLAEYGIVTATGPGGVNALTKLLREEQDALRPHARSALSSLVEQLGALAEQIDRLEEQILEWHRSDEASRRLATIPGIGPITASAIAAAVPDPGQFRSGRQFAAWLGLTPRPNSSGGKERLGGISKQGDGSLRQLLVVGATAVVRVVRKDPKRQPWLAEFLERKTVPVATVGLANKTARIAWAVMTRKEVYAA

SEQ ID NO: 340455 - protein, 354 aa, unidentified
MPRSAETAVARTIGIDTGKNTLHMIGLDEKGAIVLREKVARTRIAARFVNLPPCLVGIEAGMASHYVARELAGLGHEVKQVPPAYCKPFRQSHKNDFRDAHAVAEAVERPSTRCVPIKTDGQLDLQALHRLRSRLIGNRTAAINQTRGFLLEHGIPVRQGHHFLRQQLPQILATRTDVLSPRMVRIIGDLMTDWKYLDERIEGVTDEIEALAHADEGCQQLITVPGIGPIISSAMVAAIGNGAAFCKGRDFAAWLGLVPKQRSTGDRTILGRITKRGNRYLRMLFIQGARAVLLRPASWAKHGFGSWLTAATRRLHRNVLAVALANKLARIAWTVLAQGRRYEARVEPRVEAAA

SEQ ID NO: 340456 - protein, 416 aa, unidentified
MQVIRPICCGMDVHKDIIVATIAITNQDGLAEYKQRQFNSQNYSLYELKTWLKENNCFDVAMESTGKYWIPVFNVLEDEVKVCLAHPKYTKAIKGKKTDKKDSKWIVDLFRHDLIKSSFIPPKEIRQLRELSRYRIKLISMRSSERLRYQNSMTVSNIGLASVLTDPFGKSATAIMKEAMASKTISEEKIKSLLKKSAKKKTEAVLKSLEGSHIEADQKLKMTIAMAHMEELDKHIEDVELEMAKRCIPYKNYIECLIKIPGISYISAMTIIAEIGVDMSQFETDKQLCCWAGLAPANNESANKKKSVRISKAGSYIKPLLVQCALSAIKSNSEPYYKIKYAYIKKRRGHKKAIVAIARMMMVATYHILLTGEVFNPSDLEEVHKPKTSKNKLTTESALAFLQAQGYDTSVLNLTV

SEQ ID NO: 340457 - protein, 355 aa, unidentified
MTRTVYCGVDFHARMQTIAYCDSANGEIQLAQLDHRKDDVRDFYSKLTGQVIVGLEAGGYSSWFEAMLEELGHTVWMGHAAEIRRRANWRQKNDRRDAELILEIMLRGDFPKIHRHSRESVEVLRMLRYRARLVKMRTMISNNLQAIAISSGLSERSRMRSRAGQQRLKNARMTPAIRHQSDDLISLLVPLNERIARVEKWLKEQASTDDRVKLLLTHPGVGVLTALGVVHTLEPFNRFTRQRAVVAYVGLEPMERSSAERKRYIGISKAGSRLLRFLLGEAAHTAVRLDPELKRFYERVGKRRGKPKATVAVARKLLIRCWIMLRNNIDYVEFRSRGVEARLARNMPRPSVPAE

SEQ ID NO: 340458 - protein, 367 aa, unidentified
MKKVNTAAAKQSKNLSQQKLTIGLDLGDRNSWYCVVDEAGQIQLEQRVRTTAKALQEVFGTMPRSRIALEIGTHSPWISRLLSELGHEVIVANARKVRLIGESRKKDDRLDAQTLARLARIDPELLYPVKHGSAQAQADLTVIRARAGLVRARTALVNTARGLAKSYGERLRGCNVRNLNPEKAESSSPELQAALEPLLNAIESLSERIVEYNERIENLAQQSYPQVALLKQIKGVGTLIALTYMLTLEDPHRFQKSRDVGCYLGLQPGRRNSGRSEPQLHISKEGDPYLRTLLVQGAQHILGPFGIDCDLRRWGLRLAERGGKSGKKRAIVATARKLAVLLHHLWVSGEVYEPLHNSSRTIVAAAA

SEQ ID NO: 340459 - protein, 344 aa, unidentified
MIIIGCDFHPSWQQIASLDTETGETEERKLMHASGEARQFYKGLAEPVRVGLESTGNSHWFVDMLAEMGHEVWVGDAAQIRASQVRKQKTDRRDAAHILELLVKDSFPRIWTPSREERDQRQLLIHRYKLVTLRARVKNELQHLALNQGMQKGRSLWSKDGQKQLLDLPLQFWAGTRRKNLLELLKQMDQQIVVLDQAVKKAAEENKSARLLMTQHGVGPITSLAYVLTMGDVARFRRGKQVASYLGLIPREYSSAGKQHLGGISKQGNRFMRMLLVEAAQAVVRYDPGFRNEYLHRCHHKPKAVAKVATARKLAIRLFWMLRTNTPYPEVVRIESSSRVPLAG

SEQ ID NO: 340460 - protein, 325 aa, unidentified
MQGKEASEQETRKCTAGIDVSKHWLDAHVLPAAQSLHVANTREGIRQLKRWLLKHKIDLVAVEATGKWHRELCRSLRASNIAVAVIDPYRVRNYAKAERILAKTDRLDAKVLAMFAVTMNPSCRPPTPQVIEDMQELVTARANAVEEETSLQNQFGAAQTTFLKRQLTRRIKQLKAHIKDLEQECLSQINADEALTRRYAILTSVPGIGAIVAITLIAFLSELGALNNKAIGALAGVVPIADDSGQREGIRVVWGGRGIVRRMLYLAALSASQHNKDMRSFRQRLSASGKSAKVCLIAVARKLVALANTLISQNRIWQPTAPQNA

SEQ ID NO: 340461 - protein, 350 aa, unidentified
MKKNSEISSYSEKEVFIGIDVHKKTYSVVSIVSGAVVKKWRTIAKPEQLTKQIQSYFPGAKIYSAYEAGFSGFVLHRQLEQAGIENIVVNPASVEVTINNRVKTDKRDALKLASLLEARRLKGIRIPSQQQEQQRLLTRTRQQLIEERTAIKNKIRMKCHQLGLIEADESRRMSHKLVEEMLSKSPSPEFSLAIEAYWQIWKTIETEVKKLEKRLESQAKEDPNEKIYRSAPGIGPLGARILSNELGSMSQFNNERQLFSYTGMTPCEHSSGESTRKGHITRQGNSRVRWLLCQAAWRAIREDLDLKEYFERLHPRTGKKRAIVAVARKLIGRIRAAFRQNSLYCLTPIS

SEQ ID NO: 340462 - protein, 345 aa, unidentified
MKITTVGIDLAKSVFQVHAVDERGRAVLRKQLRRDQMTAFFANLPPCLIGMEACASAHHWARTLQRFGHTLRLMAPQFVKPYVKTNKNDVADAEAICEAVGRPNMRFVPIKSVEQQAVLALHRVRQGFVRARTAQGNQIRGLLGEFGLIMPKGIVNVTKRVPTLLEDAGDELPASFRQLIERLTDHLKELDRHVDELEAQIKAWHRGSELSRKLEKIPGIGPLGASALVASIADANSFENGRQLSAWLGLVPRQDSSGGKPKLLGISKRGDVYLRTLLIHGARSAILAAQRKSVNTNVWLAKLLDRRHPNIAAVALANKNARTVWALLAHDREFRTDYAAETSGA

SEQ ID NO: 340463 - protein, 350 aa, unidentified
MDAQLEVVLGVDTHLNVDVGVVIDTVGRVLGTLSVPTNSEGYNQLLSWTRSFGCLRRAGVEGTGTYGSGLARLLTTNGIAVFEVNRPNRARRRLRGKSDPTDAENAARAVLAGEATALPKSQSGVVEALRVLAVTRRSAVKARTQAINQLRSLLVSAPDDVRARLLKTSPDECVAKCRRIRLLGNSPVFVALSQALRTLTKRWTSLSCEIKSLDRTLKQLTEHVAVRLLQQFGIGTQTAATLMVTAGDNPERPHSEAAFAALCGASPLQASSGKTVRHRLNRGGDRAANNALWTIAMVRMRSEERTSAYVARRTAEGMSHKEIQRCLKRYIAREIYPLLLADLHDASLPS

SEQ ID NO: 340464 - protein, 330 aa, unidentified
MTNHYWIGADLGKDSFHAALAPEGSKTEQWKSLPQKLFENSNEGINAFVDWVLAKGITVEQIAGVCVESTGSISWRWLFALDQRLGNVSIVNPYFIKTFGQSMGMRNKTDRIDAAVIALYGLQREPAPTATPSQAERQLRKLHRLYGVLEKDHTAHKNRLHEVGEDKLVRTHIEEIVADLNSHIERIEKEMDQLIQSDKVLNNDYKLLKTIKGIGPKTARLLLAELGDLRKFSRKEIVAFVGLYPKLFQSGSSVHKQTRLAKGGGAIIRRNLYLCAMSAKKHDAKLNAFFNRKVDNGLCKKAAVVAVMRKLILIARAVVVSGQEFIPDYA

SEQ ID NO: 340465 - protein, 345 aa, unidentified
MSEQYAGKQIVGMDLHRRRSVLVRMTETGETLETVRISNDPEYLRQVMERAGEAPEVVLEATYGWYWAADTLAELGAHVHLAHPLGVKMFSYRRVKNDQRDAADLADLLRMGRLPEAWIAPPATREVRGWVRHRAKLVGLRSGLKCQVHAVLAAAGVQVPMSDLFGERGKQLLTTARLAPESKARVESLLRLITTFDFEIDLYAKLVAGRMHTHPGYRAIQQIPGVGPVLAAVFVAEIGDITRFHRPQQLASWAGLTPKHHESDAIVHRGRITKMGSRLVRWAAVEAVQRVPAHTDLGALRDRVGARRGRNIGVVAAARELTEMVFYGLREGQVRRLSTARNPAA

SEQ ID NO: 340466 - protein, 393 aa, unidentified
MSVNDAAGPVRACSGGVDWAKDDYAVCVVDGDGEPVARTTLPYTISGLRRLVELLDRHGVDAVGIERPDGPIIDTLLAAGRTVLVIPPSQIKSLRRRYGSAGNKDDRFDAYVLADTVRTDRRRLTPLVLDSDATAALRKLCRARKDLVAHRIAVANQLRAHLQTALPAVVDLFRDIDSAISRTFLTRFTTQDALDWLSPKRLAAWLSSVGYSGRTPPTVLHTKISTAARGSTGEHGRALAGITHAYLATLQTISSQIEALAQQITQALTVHPDRDIFTTLPKAGTVRAARLLAEIGDARGRFPTPASLACLAGVAPSTRESGKARVVTFRWAVDKQLRDAVCDFAGDSRHKNLWAANLYTRARARGHDHPHAVRILARAWIDIIWKCWTTNTG

SEQ ID NO: 340467 - protein, 320 aa, unidentified
MTTSNKKTLGINVGIDVGKAQLDCYIHERGVYFSVQNNPQGIRKALGRLGRYTVARIVIEATGRYEHAFVETALDKGMPVIITNPLHVRRYAGAIGQLVKTDEIDSRLIAEYAAVIQPPVRKHKSKMILKIKDLLARRRQVIEMTTMEKNRYQIMPAFLRADIKRVIHHLQRQLEKLDKQLNTLVEQQEIWRNKREVMLSMPGIGPVVVNTLLGDLPELGALTNKQIAALTGVAPYNRDSGKLRGKRRIRGGRATVRTTLFMAVLTSVQHNPVIRQFYQRLVAAGKHKKVALTACIRKMVIMLNAMVRNSKMWQTNVSAK

SEQ ID NO: 340468 - protein, 343 aa, unidentified
MKYMGIDYHKQHFVATTMNEKGKVLSTEKVSTDRDSIRHYFKKANAKGDVKAVMEACYGWEYFYDEVEDLVEELIMAHPLKTRLIAEARIKTDTIDSQTLAHLLRADLIPKAYAPAAETRDKKNLLRYRSSLTAMKVRIKNMIHAVLARNHIEDKDFKALSDKFGQKGRSYLRAVSLKGTDTMILNQYLDLLGETEGKIRAAETQIRLVCRQDKTCQLLKTVPGIGDILAVTLRYEIDDIERFVSAGKLCSYAGLVPSTYSSGNRTYQGKITKQGDKWLRWAMIEAAQRAPLNDAWLESFYMRIAKKGRKLARVAVARKLLEIIYRIWKEQKPYYHRSVPAAL

SEQ ID NO: 340469 - protein, 406 aa, unidentified
MNIHSSPHLHVAVDIGSREHYVAIGLPEGEILDEFSISHTPAGFQSFFSRIEQQERLYSLPVDVAMEGYNGWARPLDAQVQRHGYQLYNVNNLKLARFKEIFPAPAKSDSIDARKILELFQLQNHLPLAKGVLQSVLPVPDANQHLKRLSRRRRQLTNEKIALQNRIQPDLQAVCPTLLDITHSVDNQWFLHFLTCRDDLEKLLRLQNKSLLAIKGIGKSYLSLICDWQKQAEFSDEIKEVGPMIQEDARRLLALITSIKMLEAKIDHQTQDSEYAQHINSIPGFGLVCSAELAGEIGTLERFSKQSSFSMYIGMSPLDNKSGAYEGTKAPKHVNTRARKAMMTAVCRHMACVPESRAYYDKKRSEGKTHNKAIRALGRHISRVILSMLRHDRDYLEPKLKKPIND

SEQ ID NO: 340470 - protein, 344 aa, unidentified
MDVTTVGIDLAKQVFQVHGVSNRGAVLIRKQLKRAEVAKFFATLPPCLVGMEACASAHHWARTIQAHGHTVKLMAPQFVKPYVKSHKNDAADAAAIGEAVSRPSMRFVPIKNIEQQSVLALHRVRQGFIKARTAQANQIRGLLGEFGLVVPQGIGYITQRVPALLERAAGDLPGAFRQLIGRLLEHLRLLSLQVTDIDEQVKAWHRSTEASRRLEKIPGIGPITASALVATVGDAKNFDSGRQLAAWLGLVPRQHSSGGKPMLLGMSKRGDPYLRTMLIHGARSVIYRATQKANPQNWAFRVTARRNKNVAAVALANKNARIVWARLAHHREFQGGYSSAAAAM

SEQ ID NO: 340471 - protein, 461 aa, unidentified
MNYKRSKSRADRTMPTVHPNAAAIDVGATVHMAAVGADAAPKPVRSFGTFTVDLHRLVDWFTECGVETVVMESTSVYWIPIFELLDARGFTVFLVNARDAKHVPGRKTDVSDAQWLQRLHSFGLLRASFRPKGQIAELRAYVRQRERLLEHAASHIQHMQKALTEMNLQLHHVVADITGATGLRIIRAILAGERDPEALACLRHYSCRSSAETIAKALTGNYRTEHLFALEQALALYDAYHEKTSACDERIEAVLKELSIHRGRGHGTAPSASRRQNRTDQAIALAFDVRAALFALLGRDITTIDGLGPYLSLKLIAECGDDLTSWPSEKHFTSWLGLAPSNKVSGGKLISSRTRRSGGRAAALLRLAAVTVGRTETALGAFYRRLSSRIGKAKAVTATARKIAVLFYNAVRHGMEYVDPGASSYETRYRTRVVNNLHRRAKAFGFVLQPLEPEAGAAAVS

SEQ ID NO: 340472 - protein, 406 aa, unidentified
MFYLGIDVSNKSHKCLIIKDDGEKLSPAFLIENSSDGFKLLLEKLAKFSVPKENLIAGLEATGNSWENIFEFLTVSGFKVVLLNPFYTNRFREALRKKAKTDDIDALVIAQLLRTGEYGNCLVPDETVQTLRELVKLRYEFIKDLKNYKRQALSLLSLVFPEVRTTAIRNPFAVASMAILKQFPTAKHLAATSVKHLEKIVRHIKGNNFNCEELEKLIATAKNSCYSGKSHLARGENLKMILSLIESLAVNIKNLDAQIEDILSPKSPNDSFPGENLLSIDGVGKKTLAALLSAVGLDGKSFDNAKAIIGHIGFFPQIYQSGESRHDNRMSYQGPKYLRWHLYMAAVASIKHNSEMRTLYHKKVSQGKSSKQALICVAKKLAQMMLSMLKSGQPYNPARVFVNSGI

SEQ ID NO: 340473 - protein, 373 aa, unidentified
MDMKVIYVGLDVDDTQYHGSALNKDTGEVISFQCRPTLAGLLKQLAKLDQVFPDSTLSLCYEASYIGYTLQRDLAKHGYHCDVVAPSSIPSPRGKQIKTDRIDAAQLAQFYANGLLTIVAIPEPEQEHDRDLLRSRKKLVDQRKELRTHILSLLRRNGRHFQQETPNKANWTMPHQYWLEKVVTTSSGSFAVNLSLLVRQLKAVNGILTEYAQEIHAMAKTERYERSVQALTCYKGIKNLFALTMITEIGDIKRFPHPRQLMSWVGMDIREYSSGGKHNRFGITKQGNRYLRSAFIEANQRGYRTARLSNDLKARRKGAEPDLIAIADRCLRRLNKKGNRLLIGGKHPNKVKVACAREMVGFVWESLNKAAAV

SEQ ID NO: 340474 - protein, 411 aa, unidentified
METIIARCCGLDVHKARLTACVRLLERGRVVELVESFGTTTPDLLALRDWLGSLGVTHVAMESTGVYWKCVYYALEDDFELLLVNAQHIKHVPGRKTDTIDAAWIAKLLAHGLLRGSFVPPKPIRRLRDLTRYRKALIEERSRAVNRLHKILEDAGVKLACVATDVMGVSGRAMMRALIAGEADPQALAELAKGRLRVKLPELRKALEGRFGAHHAFLLERMLAHIEDLESDIEAICGRIEEEIAPFEAAVELLRSIPGVQRRVAEVIVAEIGTDMGRFPTAQHLASWAGVCPGQRESAGKRKSGKTRKGSKWLRATLVECARAASRSRETYLSERYRQIARRRGDKKATVAVAHEILTAAWHMLATGELYREAGPAPLRERAVERARNRAIRQLERLGHKVALEPLAQAV

SEQ ID NO: 340475 - protein, 427 aa, unidentified
MAYLIAGIDVHKRMLAVVVADVEVDQEYQFERVKIGTSPNELRALADWLVERQVEEVVMESTAQYWRPVWEALELHWRPQRRSRDGATPVSGTLHLAQAQSNRGAGGRKKDFPDAERLVKRLVAQELTLSFVPDPEQRLWRTVMRRKYQVTRNRVQLHSRLESLLEEAHIKLSSVVSDLLGTSARRMLQALADGETDPATLAALADQRLRATPAQLRNAFGACAGLHPVYRRLVKLALEELRLIEDHLGQLDQQMAALLSHHHAAVRRLAEVPGLGVDSAQQIIAEVGATAATFPSAKHLASWMGACPGTEESAGKNYSHRCPKGNRQMRRVLNQAANAAVKAKGTIFAIVYRRIVPRLGHAQAIGAITHRLCRLIWKILHQAVRYEERGPAVSEEAKKVRARKMIRELRSLGYRVELLQAPSSSPA

SEQ ID NO: 340476 - protein, 419 aa, unidentified
MSFKILKNNCCGLDVHKTWIYACIGITDSFKRTEYKQARFSSFTKGLQELCLWLAKYNCIDVCMESTGKYWIPVFNVLEKNNIFVTLSHPKYTKPQKGNKTDRKDAKWICDLYMCGMVKPSFIPPADIRQLRDLVRYRFKLTCMITGEKNRAHNCLTVSNLKLDDVFSDIFGKSSRSITEQILQHPGEVFDVAPFVDSRCKTPIEEIQAAVDGAISHEQAVKLRQCLKHIDELEMHKAEIEREIFRLSQKYESVLDLIRTIPGFDKNPLTAIQVLSEIGADMSVFPTAKNLVSWAGCCPRNDQSSRKIKSTRISRAGSYFKPVLVQIANALIKSKKHPEFTTRYRRIKARRGHKKAIIAICRMILTAIWHILSDLKPYTPEGFLESRPVKEGKVLSTSQALNLLRQREYLIKDEPSPVS

SEQ ID NO: 340477 - protein, 441 aa, unidentified
MKNEPTQNNNSIPAADPIAAWVGLDWADKKQSLFVRPTDGAATTACELEQKPQALDQFFLQLHQKHPQGRIAVCLEQSRGPVLYALMKYDFVVIYPVNPRCLADFRRAFKVSGAKADPTDADLLSELGCKHHQRLRALVPEDLATRQLRFLVEARRDFVNKRTALANELTATLKSYYPLALEVVGENLEGPMGLEFLRRWPNLAKLQGAKPSVVRAFFYAHNSRSEEKIAARLEAINTAVPLTEDPAIVGSLQLQAAGLARQLAAVQKTVAEYDQQIRVVFEGHSEKWLFEKLPGAGPVLAPRVAAAFGTIRTNLGAALDLLCLSGVAPVKRQSGQQETVHFRFARPKFLHQSLVEFAKSSIGQCDWARLLYEKQITQGKSAYAAIRVVAFKWVRILWRCWKDGQAYDEVKYLRSLKKRGIKLYESLYNALPAETGPVNNS

SEQ ID NO: 340478 - protein, 338 aa, unidentified
MQSITTIGLDIAKSVFQVHGVDAGGQVVVRRQLKRRYVLAFFQKLTPCLVGMEACASSHHWSRELQALGHTVRLIPPAYVKPYVKRQKNDAADAEAICEAVTRANMRFVPTKTLEQQSGLVLHRARHLFIRQQTAVINAIRAHLAEFGIVATVGRHGVEELLNVVADPNDKRIPEIARACLSALGAQLRGIKEQILEFDRLIRAWHRSNEISMRLDEAPGVGPVVAAVADPKSFRSGRNFSAWIGIVPRQHSSGGKNRLGNISKQGDRYLRGLFVAGALSVIRYAKIHGTKHRPWLTALLARRPTKVAAIALANKIARMVWAMMARGERYKEPVAIAR

SEQ ID NO: 340479 - protein, 427 aa, unidentified
MSERDYNRQTARRQRVSKATLIVGVDVGKAFNAVGFMNKDGNVLGSCSKLYNSREGFEQFVKMIEGFKEKHRLRDVLIVMEPTGHYWRKLTYFAIEHGYEVRFVRTTALKHHRELDESSSAKSDRRDALTIANITREGKYIDTVIEDGVLRQLRTLSKARERLLRYSVSAKNSLHAALDDYFPELHEIFRSMGARSLWVILEKCPFPEDVVLMKTSILQEMIARSSRKKAGSARKAKALYEAAQKSIGVKQIGTADRYRVRMCLEEVKRTVLTLKDMDRQLKSMAKDIPSASYLMSIPGIGPLSAAVFLGELGNPAHFHNARQIVKYAGYDPQESDSGSWIGRKFISKKGRWLLRKYLFFMSMRVVVLTKYFQEYYHRKLETKNRVGQLPRRKEILCAVAIKLIKVIFALLRDKRGFEDMAPAAAKA

SEQ ID NO: 340480 - protein, 359 aa, unidentified
MSTQSKPFSFKGQKIFVGLYVHLRSWSVTVLSEKAVLKKFTQDPNPGALNKFLTNTYPDADYYSVYEAGFCGFWIHWELCRLGIYNIVVNPADVPTMAGERLRKTDAVDSGKLARSLRAGELKGIYVPDSVTTEIRSLIRLRDSLTKDQTRHKNRIKAHLRYLGIDIPEEFCRPGRTWTNRFVLWLKGLELETKYGKKTLDLLIAQYEDLRGQQLKMMKELRVLSRTERFDKPLQFLMSIPGIGQLAGLTILSEVDDISRFKDAAHFASFIGMVPMCYSSGEHDGTGNITVRRHAKLRWLIVEAAWIASRKDPVLSAAYVEYCRTMKPSKAIIKIARRLVNRIYFVMKHQQPYVNCYVS

SEQ ID NO: 340481 - protein, 477 aa, unidentified
MGEAETLCIGIDVSSRRLDVACCDSKGVLVGRPVSFANDAAGIQALCDAVVAISGKKGPDVQIIAGLESTSDYHRPAAKALSRETRRRIEVHVLNPREVKWFRRLELKDSKTDRVDAELIARFVAKIRPQPRLGMPEGYEELQQATRTRRRCIEERSALKNRLHRLLRTYWPNWREAMGKNFGGRVLVALKDCPLPQDALRRGASHIAQLRNSDGRRIGRAFSDRLTAVAKAAHSRELTVMVRLSIQDTASRILQLNGLLGQLDAAIAEELERIFPDNVLLSIPGLGPVSVASILAEVADVRRFPDKETFVGYCGLYPVAWESGDIRLRFRMSRKGNRMLKLTLLLASGPARQCNPVLRHFYHRLRQRGKSAKAAGGAVARKLAEIVWVALTRNQPWSEEIALRGIARSEEMAGTQQGERCLNGDAAGRTPVARPNKAASRSCAPQVHSITQTGRRKGPIDTQDRMAHRRAGGLVAT

SEQ ID NO: 340482 - protein, 447 aa, unidentified
MRIVYQRCCGMDVHKDSITACVLLIDEEGEFRTESRRFGTMTRSLKEMSGWLASLGVEAIAMEATGVYWKPVWNILEAEKKFALLLVNAQHVKRVPGRKTDQKDSEWIGELLQHGLLRASFVPPVEIRQLRDLTRMRARIRQTLASFANRIQKVLEDANLKLGSVASDVLGVSGRHMLKALMAGEQDPQKLANLAQGHLRKKIEPLQLALQGHFTDHHRLQLKLLLEFVEFGEQQLSHLDSEIQLLLSKVQGQHGLSGPADGTVAEAEASPPQATSPLQTAVELWDSIPGIDQLAATTLLAEIGANMDQFPSAHDLASWAGLCPGNDDSAGKRRSGKIRKGSVWLRRALCQAAWSASRTKNTYLAAQYHRLIVRKGKKPTIVAVAHSMLIIAYYLLKRHCTYQDLGPDYFNSLNEEAITQRLVKKLTGLGYYVTLQPARTQAVSQTA

SEQ ID NO: 340483 - protein, 363 aa, unidentified
MEHVNNMELSSHEGTRCQFNGSTGAIKLGIDVHQDFYVVVEQVGGSNPKPPQRFAKEAFLHWAAKVKSQGGEVHAVYEACGFGFGLQRQLAGLGIQCHVVCPQKLDERNKRMKTDGLDAKALCLRLDRFVEGNKDALARVRVPSEEEEQLRAIHRQREQLVKARKRLEAQGRSLMVNHGMEPTTNWWKPRTFALLPVPEWMKELLSNSQPILIALQDKIRALTVQLQAAAGPKQPRGFGALSTVVIDREIGNWTRFSNRRQVGSYTGLCPGEYSSGNTRLQSCVTKHGNPRLRAALVETAWRMVRFQPNYKPVRKWTETLHKGALATKAARKKAIVAVARQLAVDLWRIRTGRVTAEQMGFSN

SEQ ID NO: 340484 - protein, 344 aa, unidentified
MNDINRIAIDLAKNVFQVCALNSHNKVLFNKKLSRKKFIEFMVQLPLSSVFIEACYSSHYWGRTLTEMGHKVHLIPAQHVTPFVRGNKSDNNDALAIAEAANRPNIRFVPIKTIQQQEIMAIHRVRARLIKSRTQVTNQTRGLLSDFGIIFAKGFKPFRENIIELQENKSLSVSFRETMSDLYNEFNQISERLNNLEKHLKDYIKKNNNCTIISSAPGIGFVKASELVASIDRGQAFKNPREFGVWLGLPPKQYGSGDTFKSAGISKRGDRYLRTQLIHAARAAKKWAKHRDDQLSLWIKQLEARIGKHKATVAIAHKLARIIWVLLKKQECFVPQYPQKIMSS

SEQ ID NO: 340485 - protein, 375 aa, unidentified
MPTNLRYLGLDVHAETIAAAIAEPDGEVRALGMLPNRPEAITKLIRKLEPRHGLHACYEAGPCGYVLYWQLTQLGVHCDVVAPTLVPTKPGDRIKTDRRDAARLARCYRAGDLTPVWVPDAAHEALRDLVRAREAAKQDQLRARHRLGKLLLRRGIRPPPAAKPWTQRHRRWLDTLQLDPPALQATLDDYLHEVDHAAARVERLEGALDNAIAAAPAPLRAVITALQTLRGVRQVTAATIVSEVGTLSRFTHPRQLMGYSGTVPSEHSSGASVHRGAITKTGNAHLRRVLVEAAWAYRFPPRCGKALRTRQRGQPDTITAIAWKAQHRLNTRYRRLLGRGKPTAQVVTAVARELVGFIWAIGVATERASTAAAAA

SEQ ID NO: 340486 - protein, 387 aa, unidentified
MPQRNDLSRSLIALDQNSTMIAVIEMSQSSWLVAGVVPGVDRHPLKKLEPDEEGLLRLLRRWQDEAVRAGRTISRIAVAFEAGRDGFWLARWLRARGIEAYVIHPASIPVSREHRRAKTDRLDTELLKRAFLGWLRGEPNHCSMAAVPTLEQEDAKRPNREREVLVGERTRIVNRMKGTLARLGLRGFKPTLRRAPERLETLRTPEGAAVPPNTRAELQRDMARLRFVTEQIRAIEAARAERLEQAPETGPNAMIRLLARVVGVGIETADMLVQEVLSRNLRDRRAVARYAGLTGAPDESGAKRREKGLAKAGNARVRRGMIQLAWRFLLFQKDSALSQWYRARTTDARGATRKTLIVALARKLLIALWRFGATGEVPQGVVLRPAA

SEQ ID NO: 340487 - protein, 415 aa, unidentified
MEGLSPLHRRVAGIDVHRMLHVVTVLIEQPDGSIYKHSREFGGFKRDCRALAAWLAELQVQLVVMESTGIYWKSVYAHLENAGITAWVVNAHFIKHVPGRKTDMLDSEWLAVLARFGLVRGSFIPPKDLRELRLVSRYRRKLGAMCSSQINRLHKMLDDAGIKLGAVVSDINGVSARAMVRGLIEGQSQAMLLSHARGALKRKTEELAAGLDGELSPRHLFVLRHLSDSIDALQRQLADIDAYLMHAMQPYDWAHKLLQTIPGIDEVAAALILIEIGDDMQRFASPERLACWAALSPGNNESAGKRKSGRTRHGNNTIRYILCECANAARMTKSSLASKYRSLMVRKSHKKAIVAVAHKMIRLIYILISRRQPYLDQAIDYAAMSAKKNAPRWIKQLKAIGKWPQSSTPAASAAN

SEQ ID NO: 340488 - protein, 361 aa, unidentified
MSVYVGIDVHRKRSQVAVIDDEGKVLANRNVPNGVEPVLGVIGGLPPGTPAAFEAAFGWGWLVELLEDYGFAPHLVHPLQCKAIASARLKNDKVDAAILAQLLRADLLPEAWIAPPAVRQLRALLRHRAQLVRLRTLLRNRIHAVLADHGHDRPAGCWSGPGRAWLASLDLPAVSRAVIEDDLALIDALQVPIDRLDWEVHQRARSEPGVKVLTQLPGVGPFTAMVMLAEIGDVSRFGSARKLAAWAGLTPTVRGSDRTVRHGHISKQGSTWLRWIPGEAAQTAKRHPDFAASYQAIASRRGKKIATTAIARKLLTRAYHLLTDAQITAPRVAAATPATATAGALTDREGSPGPGRARVFA

SEQ ID NO: 340489 - protein, 369 aa, unidentified
MNNVIMNGCDLHDKNMALKSAVGTEKPQTKWFGNTTEGRQRTIDYARELAKKHGAERIVFAYEASGQGYGLYDELTAAGIECYVLAPTKMEKSAKQRKQKTDEKDALRILEALRGHFLAGNDLPAMAWIPDHQTREDREVVRCRLDAQEKVTLVKTQVQSLLKRNRVSKPAEVGKSSWTVRHRRWLAEVVGEKESLPAGARVALESLLRQLAFLEGEVARLDGKLENLSKEPRYAWPVKAMRKRQKGVGTLTAMVYLTEMGDLSRFRNRRQVAAYLGVVPSSNDSGERERKGHITRQGSPRVRKVLCQAVWSAIRSAPQLRAAYQRIAAKNPKKKKIAVVAMMRRLGIRLWHIGLEAQLQAEVFKKTAA

SEQ ID NO: 340490 - protein, 391 aa, unidentified
MTKPKTKTVNDFSRCLDPLDMDATVIAVIEMSQSSWLVAGIVPGVERQPLKKLAISEHGLLNLLNRWRAEAEKQGHRITRIAVAFEAGHDGFWLARWLAARGVEAHVIHASSVAVTREHRRAKTDRLDTELLKRGFLGWLRGERGHCKMVAVPTLAEEDAKRPSRDRETLVGEASRIITRVKSAFVRLGIRGFNPKLKAAATRLETLRTPEGEPIPPNTLAALKRDLERHRIVKQQIREIEQTRLDVLKQAPEKGPHAMVLLLARVIGVGVETADMLVREVLSRTMRDRRAVGRYAGLTGSPDESGAKRRDKGLARSGNARVRHGMIQLAWRFLLFQKDSALAQWYRQRTADAPSMRKTLIVALARKLLIALWRLARDGVVPEGVRMRPAA

SEQ ID NO: 340491 - protein, 596 aa, unidentified
MKQKNKKAKVPPDEVEINADHEDEKPADAPLDTFAEVDKDAIIGPALLSELSSAILYKLLQQKKVPGRAKIRKAAARAKALAGMVTAGDLAGLNIPVSTDATMAPRVNDLHVDVPDFIREHHEMYERIKPGSGKRIDEPVGAIDVHVDNLTYAVANPEGIVTADFVGNEINGMQHLAHVFREHGVKYVAMESTAEYWLKIYWFLHAEGIHVLVANPKQTKETQGQKTDLRDAKRIAIAFRDGRLKPSVLCTPEQFQLRKLSREMTERKQQATKEINAFKVICHMFDAPEWILKLNTSARGCRILSIAPALSSREEILSLLSKEFARGKGMIEDGKVLNAMASEMDAFLKRMSRVAGALVRFQQHFDQYLHFCTMAHDILLQILQIVEKDKTFIHNLELLLTCPSIDVDTAIPLLIEIVDVRFFWHPGALVRWVGLGPRVNQSGFNKRNNGHIYKGGNKGARRTLWLAAKVDHAHCKKGGHPIGEFVARLRSKNKPYKVSVTAGARKLVTVIYHVLALQKPFQEVYAHLDDVKQARNRDRKKQALLKLMKEVPVGDVLECLSKTLPRRCMRFLETEEKVARRVHALLGARLEFASIG

SEQ ID NO: 340492 - protein, 451 aa, unidentified
MRSKRQASSQLEPINANVAGIDIGSQTHWVCVPAECTVENIRSFGCFTSDLYALADWLQECRVESVAMESTGVYWLALFQILETRGFEVKLVNAHHVKTLPGRKSDVLDCQWLQQLHSYGLLSASFRPQDQICVLRSYIRQRDNLVRSACVHVQRIQKALTQMNVLLHQVVSDITGTTGMAIMRAIVAGEHDPQTLAALRHPRTRRSATEIAQALQGDYRPEHLFILQQELALYEAYQVQLAACDAQIEQCLSTFESPSELPLPATSSPRRKPQDNQPAFDLQTHLERISGVDFTQIDGMGALTAQTILSEIGLDASRFPSVKHFTSWLGLCPGSCITGGKVKNSRTRRVVNRAANAFRLAAVAAGKTRSALGAFYRRLRTRLGTPKAITATAHKLARIFYRLWSSGGTYDDPGVHYYEQRYHEQIIKGLQRKAQAMGFDLVATPSTQIVS

SEQ ID NO: 340493 - protein, 376 aa, unidentified
MNEKLRFLGLDVHAETIAVAVAEPNGEVRTLGMIANREDSIRKFIRKLGSPEHLRACYEAGPTGFVLYWQLTQLGVKCDVVAPSLVPKKPGDRVKTDRRDALKLARSHRSDDLTAVWVPDEGSEALRDLVRAREAAKQDQLRAKHRLTKFLLRTGQRPPLGVKAWTEKYVEWVQQVRYTHPAQEATLLDCLNEVQHMEERVKRLEQSIVEVIQLAPAPMQEVVRGLQALRGIAHISAVTIAVELGNITSRFESARDLMGYSGAFPSEDSTGKRIRRGGITKSGNAHLRRIVVESAWSYRHRPAIGARLRRRQEGLPAEITEIAWKAQNRLHKRYMTLMARGKEQRKTMTAIARELLGFIWAIGIKAEAACKQQMAA

SEQ ID NO: 340494 - protein, 339 aa, unidentified
MELYAGLDLHSRNTYIGIMDKAFNRVFKKRVPNHLEHILQTLDPFRDQIKGFVVESTFNWYWLVDGLMDAGYSSAHLANPSAIKQYEGLKHSDDQHDAFFLAQLLILGILPQGYIYPKKDRPVRDLARKRMFLVRHKTAHILSLQSLLQRHCAMKVRANDMRHMTVKELELWLEEEHLVLSAQANLDSINFFKQNIQRLEKAIRKKLKLKKAFHYLKTVPGIGDILALTIMLEVGDINRFPKVGNFTSYCRCVPSRRLSDGKSKGHGNRKNGNRYLSWAFTEAAQLGRRHNERFRAYYNRKVAQANTSLATKALGNKLARICYFIIKDQVPFRKELFGQ

SEQ ID NO: 340495 - protein, 323 aa, unidentified
MNDEKIYIGVDISQDTMDMVAYPTGQIWQYKNSKGGITKAITKFKGLEVKLFVMEATGGLEKPLCEALSQAGLPVAVVNPRRIRDFGRSMGILAKTDKLDAKVMAYFAAKIEPTPRPIQDEASQKLENLLTRRSQISDMIVAEKNRLRQSRDRIVQGHIGDHIHWLESELKELEKELKENIRQNPQFAEKVKLLKSMPGVGDTLSYNLIANLGEMGHLSQREISALVGVAPLNRDSGKQRGRRMIWGGRATVRKALYMPALSAIRCNPVIRDLYTRLVAKGKLKKVALVACMHKMLMILNSMVKNNSPWNYAVTRNELSPLEN

SEQ ID NO: 340496 - protein, 468 aa, unidentified
MGSHLRTSITVEIVSPGPSRATIEARPERAADRAPAHGRTSLPPRGPIGCCRRGTRRPRRLIGKCRAGAAAGNVSAEGEAIRSNDYRKDTTVKAPSTRPAAVLGLDVGKSSHWACLIDRDGEVLASAPVRNREAELDALFASAPAGTLVVVDQFRNIGSLAVRRARAAGLGVAHLPGLAASRAAGLFAGEAKTDERDAAVIARTALGVPDSLSGVPGRGEALEAARALSSQRDHVVACATRDKNRLRAVLLESCPALEAAVDLSDRRWLELLAGFGGAWGIARSGAEGPRAEAAGEAAAASTAPPPALVEAENRQVRFLAARISEALDEAGALEAETAALLEGDETYACLLTVPGIGPRTAAQLAASVDIGRFPDHDHLASYCGIAPRVRSSGTSVRSVRASRRGDARLKSLLIFSCNSLVRSSGRYGEYYRACRARGMGHGRALKAVARKRLRAIYAVMRDRVPYRE

SEQ ID NO: 340497 - protein, 377 aa, unidentified
MKKDISWVGLDAHKRNIAVAVLWPGRREAEQWEIENTPKSVERLLKKLEKEANGGEVRCCYEAGPCGYALQRQLEKDGRVVCEVIAPSLIPSKPGERIKTDRRDALKLAQLLKAGLLTAVQPPSEEQEAVRDLCRCREDAREDLHRVRHRLLKFLLRRGHIFNETSRPWSEKHRRWLKGLSFENAVDQSVLDEYLLAVAQTEQRLKALDQKLEEAAQLPIYKEPVGWLRCFRGIDTITAMIFAAELHGIERFDNPRKLAAYLGVVPSEYSSSDKTRRGSITKTGNRHIRRALVQACWQYRHRAGVGSKLAERRRGQPPRVIGIADAAQRRLCSRYARLSERGKPKNKVVIAIVRELVGFLWAALHPSQLESRTRRAT

SEQ ID NO: 340498 - protein, 354 aa, unidentified
MPSTASAQIAVIGIDIGKNSFHMVGHDSHGAIVLRQKWSRGQIEARLANLPPCLIGMEACVGAHHLARKLTAFGHDARLMPAKYVRPYAKGQKNDFNDAEAIAEAVQRPTMKFVAVKTTDQLDLQALHRVRERLVSQRTGIINQIRAFMLERGIAVRQGIRFLRTELPIILASRTDMLSPRMLHVIEDLAGDWRRLDERIETLSREIETIARQDAGCDRLMSVPGIGPIISSAVVAAIGSGDVFSKGRDFAAWLGLVPKQISTGDRTILGKISKRGNRYLRVLFVQAAWVVLVKPVSWERHGLKSWIEAAKKRLHHNVLAIALANKLARIAWAVLAKGRDFEATRTLDGSTKPA

SEQ ID NO: 340499 - protein, 341 aa, unidentified
MRMFAGLDIGGKRTAICVIDEFGKTIWRGTADTHPEMIDGALRRFQGSLDKVGLESGPFTPHLFRSLEAMGYPMICMDARRAADAIKSRRIKSDKGDAWSLAEMLRTGWFSSVYVKSVDTHRLKALLGARDQLVKLKRSLGNQVRGLLRPFGIRLPSRAGRKKFDEAAYLATQKDSLLHAAVRALLESLASIEGQQARLDDELDELVKRNEIAWRLMSVPGVGRITALAYMAAIENVDRFRRTRDIGAYLGLTERRYQSAETDVGMGISKQGDAMARHYLYEAANVLLTTVKKRFALRNWGLRLIKTVGPKRARVAVARKLAVLLGRMWKDGAHFAAAVAA

SEQ ID NO: 340500 - protein, 355 aa, unidentified
MSHLNSGIAVIGIDIGKNSFHLVGQDRRGAIVLRQKWSRGQVEARLANLSPCLIGMEACVGAHHLSRKLQALGHQARLMPAKYVRPYSKGQKNDFRDAEAIAEAVQRPTMKFVATKTVDQLDLQALHRVRERLVSQRTGIINQIRAFLLERGVAVRQGLRFLRVELPGILATRTDVLSPRMLRILEDLSADWRRLDARIEGLSSEIETFAHQDQHCERLMTVPGIGPIISSAMVAAIGTGDVFSKGRDFGAWLGLVPKQISTGDRTILGSISRRGNRYLRALFVQAAWVVLVKLGAKQWERYGLKSWIEAAKKRLHHNVLAIALANKLARIAWAVLNKGRAFTCVKTDAMASRPA

SEQ ID NO: 340501 - protein, 417 aa, unidentified
MNNRIIVPNTLVLGIDIAKENHYGQFIVNGEYIKKPFLIKNTRESFECLLDSIRQLKAKYNLDYVLVGMEPTGHYWKNIAYYLKSQGIDLCLVNPYHVNKTKELEDNSPTKNDKKDAKIIAKLIYQGQYLSCMFEEELYVNLRLCSKNRQELKKQFISEKVRLIALLDEYFPELKKMFSDILGKSALFILKTCPFPQDIVNIGVSELTQKLLDATHNRVGFKKAELVFNAADTSIGVPVGLEGARYRLKLILRQLEGLQKELDNVEKLMEEYLVQTGYSEYLLSIQGVGIVTAASFLAEIGDISKYESYKQIQKVAGLNLKETSSGMKKGKTKISKRGRSNLRNILYQAATVMVAKNVAFKEIYTHLTKRQENQLTGKQAIVALSVRLIKVMYTLCKKKTTYTHDRVHALASYQQAA

SEQ ID NO: 340502 - protein, 343 aa, unidentified
MTIKVLGIDIAKNTFQLHGADDAGKAVLKKRLPRNRLSPYVANLQPCTIVMESCGGANFWARVFQRTGHTVKLISPQFVKPFVKTNKNDANDAEAIVEAASRPSMHFVPIKRPEQQDVQSIHRVRSRLVKNRTALINEIRGLCLEYGVIIALGAARVKKSLCAVVADSGNGLTPSSRDCMQELYEELVDVEARLKKLDARNRQLCRQNDSCRRILSIPGVGELTATAIVAAVGDAQEFKNGRHMSAWLGLVPRQSSSGDKRVLLGISKRGDRYLRTLLIHGARAALSHYKTTDNDYGLWLDRKKTTLSFNKAAVALANKNARIIWSLLNSGEEFNYGVQTAAA

SEQ ID NO: 340503 - protein, 408 aa, unidentified
MNTGKDIVLVVDYHAENIEYRWFNEATGEERTGGYATGRAGILRQVQQAAGELEPGGRVVWVMESTTGWARVKDLVGDRVRFVLANVLQMPLPPKARRRKTDKIDTARLLREYLNGHLPQSFQPSAWWRQVRRVVDHRQDLVERQTAIKNWIGSLLHHETWEERANLWSGSGRSRLDAMKLADSDRRMLELKLAQLDQLGEQIRQVEGVMKGIYDRWPEAQWVDAIRGIGMVTGVSVLAHIGPMERFRTAEQLISYAGLAPGVQESDSTCRHGKIGGGGTDSHLRYLLIEASTWLSQIPRYRPTYERVVKKRGMKIARIVVARLVLRSIHKMLTQRVRFNPVRGRASADDAFIASGLPAERSDRNHRRRAGSKEKARRSRRALSAVQPPPGARVARQRCRILPAAIEW

SEQ ID NO: 340504 - protein, 319 aa, unidentified
MGKEIYIGIDVSKDTLDVAVYGDKQHLSFANDEAGIAKVISKLRQLSPELVVLEATGGFEVALAAELGVAKIPTAVVNPRQIRDFAKSVGMLAKTDILDARIIARFAATVQPTPHPMPDIEAQELGAIIARRRQIISMITAEKNRLGTASKMVKPRIRAHINWLEKELDDVNRNLRQKVKDSPIWQEKDRLMQSVPGVGPNLSITILAELPELGTLNRKQIAALVGVAPLNRDSGTLRGKRTIWGGRATVRAALYMAALSAKRYNPVIRRFYERLLAAGKAKKVALTACMHKLLTILNAMLKYHTSWNFDVSQILGPCH

SEQ ID NO: 340505 - protein, 355 aa, unidentified
MSQEKYIGMDVHQASISVAVMDARGKLIMECLLETKAATILEFIQGLRGTLALTFEEGTSAAWLHDLLKPHVSRLVVCDPRKNALLKDGNKSDRVDARKLAELLRTNQVKPVYHGKHGTRALKELGRSYLTITKDVTRVMSRIKAVYRSWAIPCAGTSVYTPRHRAEWLAKLVEPGVRIRAEHLYQQLDSLEPVRLEARRELLLESRKHAAVKLLRQIPSIGPIRAALLVALLQTPHRFRTKRQLWAYSGFAVEIHDSGEYRSVRGKLQRNRERITVRGLNDNHNKDVKSLFKSAAISASTRPGPLHDFYVTRVESGMRPTMARLTLARKIAAITLTMWKKGVSFDPKQLQRQAA

SEQ ID NO: 340506 - protein, 374 aa, unidentified
MSDHREAYVAFDTSKLRNAVAIADAGRAGEVRFLGEIENTEAAVAKLVRKLAAKYGRLTFCYEAGPTGYGLYRQIKGLGHACMVVAPSLIPRKPGERVKTNRRDALSLVKQLRAGDLTAVWVPDARHEAMRDLTRTRETAVEDLRRKRQQVSAFLLRQGLHYPSERTWTKTHRNWLASQKLEHAEQRLAFEEMLLAMRQAQERIERLEQAIRAAVPDWSLAEVVTALMAMRGIEFISATSFLAEIGDLSRFRSPRELMGYLGLVPSEASTGDTVKRGPITKAGNGRARRILVECSWSYQHPPRVGKEKQERVAAAPPAVREIAWKAQCRLTARYRALTRKGKLKTVAVTAVARELSAFIWAINRQIANPRAAAR

SEQ ID NO: 340507 - protein, 404 aa, unidentified
MGESTGGTNDSGASVVIGMDPHKRTVTIEVMSASEQVVGHGRFTTDEAGFSAMLDYASRWAQRMWAIEGCEGIGRHVAQRLLPLQVTVVDVPAKLSARMRVYATGQGRKTDDTDAHSIALVGVRMAGLRTVKHDERLEILRLLVDRRRRIGADHTRVVCQLHGLLLELIPGGAKRDLSAAQARRLLASVRPRDAVAKTRKRIALELVVDLEKTYQRKKAANKELVELVRDTGSALLGLHGIGPSGAARLLVEVGDITRFPDRGHFASWSGTAPVDASSGDNTRQRLSRGGNRNINQVLHIMATVQLRTRTTQGRAYYDRKVAAGKTPNEAMRCLKRRLSDIVYRTMLGDLIAAAATKPGTGPGGHRGASLTSSAAGSQPHTGTSDQSLPGPVTTKATTTLPRAS

SEQ ID NO: 340508 - protein, 414 aa, unidentified
MALKIVYKICCGIDVHKTFVVACIASTDSKGVTTYKRHRFSTYTKGLRLLLQWLLENNCTDVCMESTGKYWIPVYNVLETSCIIVLAHPKYVKAIRGKKTDKKDAKWIADLFKHDLVAGSFMPPAKIRQLRDLMRYRFKLTCFMSSEKNRLQNCLTVSNIQLGNIVSDTFGKSSQRIIDKILENTLDTSFDIEPLIHGSMKKKIPELELAVDGYITPEQAGKLKVIKQHYEDLKTRKSDLEDLILELAKPYQQEIDLILTAPSFKNIFSAICVISEIGVNMEAFPNAKHLCSWAGLAPTNNESAGKKKSVRVSKAGCYIKPLLVQCATAVVKSEKHPEIRNRYLRLKKRRGHKKAIIAIARMLLTAIYNMLKKKEPYNPDLYRKSDVLPVNREITVEQAILLARFQGYRIKTTG

SEQ ID NO: 340509 - protein, 337 aa, unidentified
MNYSGIDLHSNNSVITVTDETDRVVAEKRLPNDLAKIIGFLLPWREGLAGVVFESTYNWYWLVDGLQAAGFVVHLANTGAIKKYDGLKHSGDEADARQLSHLLRLGILPTGTILPPAHRAIRDLARKRMQLVRSRTSHILAIENIMARQQAVKITSNVIKRMTASDVDRMGLPEDVGLAVQSNLAVITTLSAQIDLLEKRLQERVGERPDYALLASVPGIGRILATIILLETGPIGRFAAVGNFASYARCVDSQRLSNGKKKGEGNTRNGNKYLAWAFVEAANFALRFCPEAKRFYERKKARTNTVVAIKALAHKLARACFHILKERKPFDVMRCFA

SEQ ID NO: 340510 - protein, 466 aa, unidentified
MRDSPLSPGGRACYIKGKEVVVRKRLYSFLKDRKLVKPTFKERSIAMKNGNTKKVRRLNEKTLLVTVDMGMIRHTGYCRCPNGMEVKPFDFANNRKGFEEFWFRVLQTQKSHNLQEIVVGFESTGAYAEPLLHFLRRKGIKLVQVNPLHTKRLKELQGNSPGKTDHKDPKVIADIIELGHALTVVIPEGTSAELRRLTSARERSMQRRTVLLNQLHVLIFILFPEFLQVLKNTGSKTSQYLLKHCPTPEGIIEKGVVALARILKTVSRGNMGNERAEALYKAAKETVGVKEGQKSIVFEITEIVFAIEATERFIATVEAEMKKYLKEIPYSLSILSIKGIGTITTAGLIGEIGDFGQFNTISEVMKQAGLDLYEISSGKHKGKKRISKRGRHLLRKILFFAAINTVRKGGMMHEHYQKYLQRGMLRMKALIAIARKLLRIIFAIVRDNSVFVSDFSGTQYQLKEAA

SEQ ID NO: 340511 - protein, 356 aa, unidentified
METAYDGRQVVGMDLHRRRSVLVRMTGDGRRLATARIINSPVELRSQIARAGKHPEVVLEATYGWYWAAGTLAAAGAEVHLAHPPGVKAFTYRRVKNDGRDAADLADLLRMGRLAEAWIAPPEIRELRELTRYRIKLVHLRTSCKDQVHAVLAKLGVPVTCSDIFGKAGPAWLDALGLPQPYAGKVTSLRQIIGVLDAGITMLGEVIADLLAGHQGYQVIQQLPGIGPVLAAVIIAEIGEVTRFKNPAQLCAWAGLTPRHRESGTKITRGRVTKQGSRMLRWALIEAIQRAGSDSVTGAVKAAIIARRGKETRNIAKVAAARKLLTLIYYGLRDGQIRCLPAPAPEPPVTTPARAA

SEQ ID NO: 340512 - protein, 406 aa, unidentified
MELVALHKRVIGLDVHQAQITACAILEEADGTTRIEQRQFGAFKRDRRALADWAASLRPDEVVMESTGIYWKSPYAALEAIGIRGQVVNARHVKNVPGRKTDVGDAQWLATLARAGLLRGSFVPPMLLRELRLISRQRQKLVGQLASEKNRLHKVLTDGGIRLGVVVSDLHGQSARAMVKAIILGQAPNEVLQFASRRLKASREEIFDALQGELTDSHRFVLDELMRHIEEIEARIARFDVRLLDGLKDERNTLALLQTLPGVDLIGAAMLLVEIGADMDAFGTADRLASWVGICPGNNESAGKRKSGRVRKGNLYVRRLLCEFAHAASRTKSVFQSKFKSLIVRRGHKRAIVALAHKILRTIFFMIKRREHYRDSATDYEALSVQRNAPRWIKALTRFGFIPAVA

SEQ ID NO: 340513 - protein, 422 aa, unidentified
MMDKERRWFVGIDWGSQEHVVSLYDEDGNKIGQRKFPHGGTGLTDMIAWLLKASGGKPGEIHVAIETPHGPIVEALLERGFVVYSINPKQLDRFRDRFTVAGAKDDSRDADVLADSLRTDMRAFRKLSVADPVIVELREWSRIDEELKVEHVRLTNRLKHQLWRYYPQMLELADDVGANWFLDLFEAAPTPEKAANVREKTIARILKSHRIRRFDAAYVLAELRKRALTVAPGTIEAATAHIRSLIERIRIINGQLADAQRQLDRLCKKLSEPVADENGETTQGQKNEQPDAAILDSLPGVARTVLATLLAEAPDPLQHRDYHALRALCGSAPVTRRSGKSCMVVRRYACNRRLTNAAYHWAQNAIQRDPTSRAKYDALRARGHGHARALRSVIDRLLGVACAMLNNGTLFDPEFASKRAAA

SEQ ID NO: 340514 - protein, 306 aa, unidentified
MKEIGFTQMVSVGCGIDVHQSLIVASIRKSSDEVETREFESYTSSLTSLREWCKSESVTHVAMESTGVYWKPVFNVLEEDFEVILVNARHVKNVPGHKTDKKDSRWLSKLLLSGLLKGSFIPPRDIRELRDLVRYRKKVVGQIASEKNRIIKILEDANIKLSSVLSNVDGAVGTKIINDLIEGETSVNKLMRHYHGKQKVSRVEFCKALEGRVTEHHRLMLRIHKNSISDKEAQLKNLDEAIDNATKAYSVEIDLLQTIPGVGKDSAISIVSEVGVDMSRFPDETHLSSWAGMSPGNCETGGKKKM

SEQ ID NO: 340515 - protein, 355 aa, unidentified
MNDAKYIGMDVHQATISVAVRDSRGNLVMEAILETKAETILQFIRGLRGSLCVTLEEGTWAAWLHDLLQPHVTRVLVCDPRKNALLKVGNKNDRIDARKLSELLYLNKLSPVYHGEPGIRPLKELARSYIAMTRDLTRVMSRLKAIYRSWAIPCAGKQVYATRYRAEWLAKISEAGVRRRAELFYQQFDALAALRQQARRELLAEARKHPAMRLLRQVPSIGPIRAALLIALMQTPNRFRTKRQLWAYCGLALRTYTSGEYRFVGGQLKRSKKVLAIRGLNINHNHDLKNIFKGAATRAASTVGPFQDFYQACVARGVKPHLARLTLARKIAAITLLVWKKGVRFDAEHLKQQAA

SEQ ID NO: 340516 - protein, 335 aa, unidentified
MSLKLLAIDLGKRSFHCHGVDSDGVIISRKTSRSKLLETIKELAPETIAMEACASAHYWGRRFLADGHRVLLINPRFVKPFVKGSKNDAADAEGIYEAALRPTMRFVPVKSTEQQDLQSLHRTRDRITCARTALINHMRGLLGEYGVILPQGAWRFLRQAHDAIAAAEVSDLTRELFTDMLDELRALDLRLDKLDRQLVALCRTNDACRRLSKLPGVGPVIATALVAAVDDGRHFRSGRELAAWIGLVPRQYTTGGKPRLGGIGRRANHYLRRQMIHGARSVMFRLAKHDDRRSQWLKGLTARRGFNRAIVALANKTSRIAWAVLARKEDYLAAA

SEQ ID NO: 340517 - protein, 461 aa, unidentified
MGRGTASGTKIKKKNKAARRKHSRILEQINHNAAGVDAGAEYHYVAVPEDRVSPSVRKFSTTTRGLYELADWLVEAGVDTVAVEATGVYCVPLLEVLDARGFRVVLAKPSSLKSVNDHQKSDMLDCQWIQLLHTFGLLRGSHRPSEMVATYRSYNRQRQMLIQQASRAIEHMKKALTSMNVRVELAVSDVTGKTGMAIIRAILDGQRDPQELAKLRDERCAKSEAMIAEALFGKYSDEHLFELDQAVRTWDHFQGQIAECNTRLEQQAKNFEKKADRKDIPKPRRIEHVRKNVLTFDARSLFYEVLGQDLTQIDGISTGTLSAFLAEVGTNVDAFATDKKFTSWLRVSPGKNTTGGKNRSGKNRSTTNRLTTALRIAAQTLHRSRSALGAFYRRKRAQLGEEKAVTAAAHKLARMIYFTLKYQRPYVDPGPDHYTEQHRNRILKSMEKRAKQFGYQLVKAA

SEQ ID NO: 340518 - protein, 417 aa, unidentified
MVNDVQWFVGIDWATQSHCVCLLDAEGRRVGEREFAHGGAGLTELRNWLLEKTRAVPGQIAVAIEMPHGPVVEMLLEHGFVVFAINPKQLDRFRDRFTVAGAKDDRRDAHVLAGSLRTDRAAFRQLAADNPVVIELREWSRMADELQQERTRLANRLRQQLWRYYPQAAKLTDDVADDWFLALWQKVPTPDSAAKASEKAIARVLSAYRIRRLDAATVLSILREPPLFVAPGTTEAACAHIRSLAARLHLVNQQIREAQHSLDRLCAELEGEENPSGQSCEQCDVTILRSWPGIGRINLATLLAEAAEPLRRRDYHALRALAGVAPVTRQSGKQRFVTRRLACNRRLQTAVHHWSRVAIQHDATARRRYDALRQRGHGHARALRSVGDRLLYALCTALKRHTPYDPNHKNVPMTSKG

SEQ ID NO: 340519 - protein, 387 aa, unidentified
MPSTPPKTSAQSRAATQGDTAMLCVSLELSSTTWLVTSLAPGCDKMSKHRIEGGDSCGLLDLLRRLQAKAAKRLGAPVRIVAIQEAGFDGFWIDRLLEAAGIESHVVDPASVAVPRRRRRAKTDKIDGELLLRTLLAWLRGEPRVCSMVVPPSSEEEDRRRLARERDILVEERSAHTNRIAGLLSTQGIRGYRPLRRDCRARLEELETGDGRPLPPGLKAEIGRELDRLELLRQQIAEVEAARDSLLAAEDNSPGKLLLQLRSIGPEFASVLWLEGLYRRFDNRRQLAAFSGLAPSPWRSGKIDHEQGIAKSGNAKLRSTMIELAWLWLRYQPDSELSRWFRARVRGNKTRRYRKITIVAMARKLLIALWRYVTEGIVPEGAVMKAA

SEQ ID NO: 340520 - protein, 378 aa, unidentified
MMVIGIDPHKQSHTAVAAGELGRKKAQKTVRARRDGHRELIAWAREIAPAGRLWAVEDVRHVAGGLIRELLAAGEQVVFVPPKLMAGERRGGRERGKSDLVDALAIARLALREGAGLPAARLDEQVLEVRRLTDYRDDLVAERTRFVNRLRWLVHDLDPELAPPPRSLGSGRTRAKLEAGLRALPAGAGRAVALSQLARVTALSAEITGLEQDLAGLVTVLVPELLAIPGVAVITAAKIIGEAGDIRRFRSPAAFARHNGTAPVPASSGTGTGGPQRLNRGGNRQLNAALHRIAVVQARCHPGAAALLERRGQDKHETRRASLRVLKRHLSDVIYRALNADAWRLDQPAPHAASGFPSKRGHFDLTDRACPRFVIAAM

SEQ ID NO: 340521 - protein, 411 aa, unidentified
MKVVHEICCGIDVHAKMLVACLIAANGEKKIRTFSTMTADLLQLRDWLVAAKCTHVAIESTGVYWKPVFNILEDPLAVILINPEHARALRGRKTDVKDAEWLADLLRHGLLKASFIPPGEIRELRELTRYRESLVREQSGVANRVQKLLESGNIKLGQVASDALGVSGRAIIKALAKGENDPRKLAALARGKLKEKSLSLERSLEGRLTVNQRYVLGELVKRWEELEAADARVTSEIDKYVQARPKLARAQEILDGIPGIGPRVAEVLIAELGITMAVFGDAAHLASWAGLCPGNKASGGKRMSGRTRKGNTYLRAALVQAAWGVTMKKNCYLSSQYFRLLKRLGRKKALVAVAHSLLVIIFHVLQSDQTYTELGGDYFDRHHVEQQREYYLRRLQMLGLKVTVEELPTAA

SEQ ID NO: 340522 - protein, 485 aa, unidentified
MQEKQQKRHIGLDLGVKSRSKVYIIDQEGKKVRSEFYIWTNPQGLDYMMKQALKGTSGEVSLDLTMEPTNSAWFAPAVYIRRVYPQVKIYRIKSEKVQHLRKFFRRHTKTDSLDAKTLAKMPMVDPDSLQELYIRPKKVLALYTRCKQRTRLVKDAAAKKKSICDQINADFPRLTDCFSSKFTTPFIRFCERYVDPFKVKGLGKEKLLKVLIKLGFRKDVPTLAEKIYRRAEETCILFGNEGNTVDYDDLQDRIRSEFKIFKTLQKEIDKVTKKVHDLYKACFPKKRANSFPGIADTSGAVIASTIGDPDRFSSDRSAVGYLGYYPKENSSGLSSKKGLRMTKAGPNMAKGSLYLAGDVARTIDPQLGKIYYEQMVMHGNHHTKAVCRVVRAMIPRILRAMKEDRDYVIRDLEGNPISKKEGRKIIKEQFFVPEEVRQRLSNRKRMPLNKKGRTKPQYARGSKAPQIRVDSSHRIVFSLNQVHFN

SEQ ID NO: 340523 - protein, 373 aa, unidentified
MSEYSAFVGLDVHKETIAVAVADAGRTGDVRFWGEIANTPDAVASMVRKLGGRHARIHFVYEAGPCGYGIHRQIMATDHDCEVVSPAQTPRKPGDRIKTDRRDAIILARLSRAGELTPVWVPDETHEAMRDLIRLRQAMVKDLRAARQRVKSFLLRHGRVFRGTSWKRGHRIWLGNQSFAHPAQQIAFQSYLNAVDQAQARRDEVDMHIRQFAAEWSMAPVVEALQALRGVAFITAVTVVCEVGDIRRFAKPRQLMAFLGLVPGERSSGETRRQGGITKAGNMLARAVLVEAAWSYRTPAKIGAQMMLRQEGIPQAAKEIGWKAQVRLCGRYRRLMARGKKSALAVTAVARELVGFIWAIAHTAEPAGAERAA

SEQ ID NO: 340524 - protein, 364 aa, unidentified
MDNITHIGLDVHKDTIAVATLRPGSTSCEERVIPNTPEAIRSLTRHLRDPASYAFCYEAGPTGYDTYRLLDSLGLRCDVIAPALIPRRPGVRQKTDRSDARNLARLHRAGELIPIGVPTPTQEALRELIRVREDLKNDRRISRQRIHSFLLRQGRHYPKGASRWGKGFEAWARAQTFDLPAVQATFSHLLSAEEVRRAQLEAVEGEITRAASDPEIAPLIALLRCFRGVDTLTAVTLVAEVGDFRRFRSAAAFMAFTGLVPSEHSSGLSVRHGSITKTGNAHIRRVLVEAAWAYRYRPGIGAGLAKRLEGQPPEAVAYAWRAQCRLSARFRLLSVKKGSNKAAVAVARELAGFVWGLMTENTAA

SEQ ID NO: 340525 - protein, 430 aa, unidentified
MGLVVPTTMHPEREDQPLPYDWFVGIDWGSEKHQVCVLDGDRRRVGERVVEHDGASLTQLAAWLWALTRGQPQRVAVAIEVPRGAIVEGLIERGFHVFAINPKQLARFRDRHTMSGAKDDRRDAFVLADSVRTDQPSFRRLQLEDPQFILLRDLSRAAETLLEDFRRSANRLGDQLHRFYPQMLQLCSAADESWLWDLIDLAPTPAHAALLSAEQVQRVLKVHRLRRVTAQEVLACLQTPALPVAPGAAQAAQAHCAFLLPCLRVLAEQLQACSQQVSALLSTLAGAPGEGEGPSDVAIVLSLPGVGRKITAWLFAEASQPLAERDYQVLRTHGGVAPVTRQSGKRRVVVMRRGCDPRLRHALYHMARVAMQRDAHFKSVYAALRAKGQRHGQALRNLADRLLRILMAMLRHRPCYDASQIHREPVVQMG

SEQ ID NO: 340526 - protein, 345 aa, unidentified
MSEIKRIGLDTSKAVFTLHCVDQTGRQVLQTNLRRAQMATFFNKLAPAEIALEACGSSHHWARELAALGHEVRLIPPQYVKPFVKRAKNDRNDAEAICEAAGRPGMRFVPVKTTTQQAQGMVLKVRETLVHQRTQLVNALRGHAAEFGVIAAKGISQITPLLEAIETEATIPPEAREMLALLGQEIEHLETRLDEIEMKLTAAHKANPISRRLATIPGIGPIIGLTLAVEIDPAAFQSGRHLAAWIGLTPKEHSTGGKQRMGGISRAGNERLRRLLVTGATAVIRFATRPGNRHASTWLLKLLQHKPRKLVAVALANKMARIAWAMMKSGETYRRSQAAAATVAA

SEQ ID NO: 340527 - protein, 355 aa, unidentified
MNQEKYIGMDVHQATISVAVMDSSGKLIMECILETKAATILEFIAGLRGTLSVTFEEGTSAAWLHDLLKPHVSHLVVCDPRRNALLKDGSKSDRIDARKLAELLHGNKLHAVYHGEHGVRTLKELGRSYLTITKDLTRVMSRIKALYRSWAIPCSGATVYAPRHRAEWLAKILEPGVRLRAERLYQQLDLLQPVRQEARRDLLGESHKHHAVKLLRQIPSIGPIRAALLVALLQTPHRFRTKRQLWAYSGFAVETHDSGEYRFVRGKLVRNRERITVRGLNHNHNHDLKNLFKGAAISASTRPGPLCDFYVARVEKGMRPTMARLTLARKMVAITLTIWKKGVEFDAKPLNRQAA

SEQ ID NO: 340528 - protein, 363 aa, unidentified
MEHELHYIGIDTAKEKLDVDVLRPDGRHRTKKFANTTKGHDELVSWLKGHKIDHAHICIEATGTYMEPVAECLYDAGYIVSVINPALGKAFAQSEGLRNKTDTVDARMLAEFCRQKRPAAWEAPHPLERALRALVVRHQALTDMHTQELNRTETAREVQRPSIDAHLLWLEAELKRLEKQIKDLTDDDPDMKHRRKLLESIPGIGEKTSAVLLAYIGLKDRFAHARQFAAFAGLTPRRYESGSSVRGASRMSKAGHVSLRRALYMPAMVATSKTEWGRAFRDRLAANGKKGKVILGAMMRKLAQVAYGVLKSGAVFFIPSAIFTPLPDYAVTHRTARLTSALHTPPVPACASSRRESPFLSCH

SEQ ID NO: 340529 - protein, 412 aa, unidentified
MKQQAERAAGLDVHRDNVVAATRINEPSGEVAVTKKRFPTTRRGLGELAAFLTKAAVTRVAMEATGVYWKAPYYALEGLFDELWLCNAQHVKNVPGRKTDLSDAEWLADVAAHGMVRPSFVPPPEIRELRELTRYRKTQIDARAKEIQRLEKVLQDAGIKLSSVASEVWSASSRKIIEALIAGERNPVVLANLVLGRMRPKIAQLEEALAGHFGAHHAFVCRQVIDHIDFLDTSIAALTEEIAARLLPFEAAVGLVCSVTAIGELFAQAIIAEIGVDMSRFATAGHLCAWAGVAPASYESAGKKRPAGTRHGGTWLRRVLIEVARAASRTKGSYFSAQYSRIARRRGTNKAAVAVANSILSVIWHVLTNGCLYEDPGADYFERRHDPAVEAKRLQARIEALGFDVTLSPKAA

SEQ ID NO: 340530 - protein, 327 aa, unidentified
MMFIGIDISKEKIDLSWLRDQLTNKIKTKVFKNKHQDFEKIEKWLLNTTKSVASELVITLEPTGVYHEALMYFLHEQGFNIILANTGKAKKYADALNIIHKTDKSDATMLAHYGCAKHAVVDYWQPEALEVRELKALIRRLDALESNRQREANRLEASEFSNVSARVRQSIKVTIAFLDDEIKQLKSDIDDHIDNEPGLKRNRKLLESIPGIGHVLSRELTYLFAAKKFNKAKEAAAYCGLIPRHNESGKLKGRTTISKLGPARIRCKLYMAAIVAGQWNKRIKRHKLTLINNGKTPMQAVCANMRKLIHICFGVIKNQEAFKLQVS

SEQ ID NO: 340531 - protein, 343 aa, unidentified
MQTITTIGLDIAKSVFQVHGIDAQGGVVIRRQLKRRYVLAFFEKLPPCLVGIEACASSHHWSRELKTLGHNVRLMPPAYVKPYVKRQKNDAADAEAICEAVTRANMRFVATKTPEQQSCLMLHRTRHLFIRQQTAVINAIRAHLAEFGIVAPVGRNGVEELLDVVADPSDKRVPEIARACLLALGAQLRKLKEQILEFDRMIRAWHRSSEMSMRLDEAPGIGPVLATALVATVTDPKAFRSGRNFSAWIGLVPKQHSSGGKDRLGSISKQGDRYLRSLFVAGALAVIRYAKIHGTKRRPWLTALLARRPTKVAAIALANKIARMVWAMMVRGERYKQPVALAA

SEQ ID NO: 340532 - protein, 315 aa, unidentified
MPRSSVVVGIDVSKAALDVAVRPSGTAWRTTNDAAGIAALVTQVRAVTPVCVVLEATGGLERAATAALAAAGLPVAVVNPRQVRDFAKATGRLAKTDALDAAVLAHFGEAVQPPPRPIPDAQAQALAELITRRQQLVEMRTAEQNRLGSLTGSRRTRVAAHLAWLRQELADLEAELDAAIQASPVWRARDHLLQSVPGVGPVVARTLVADLPELGTLDRKRLAALVGVAPLNRDSGRFRGRRGVWGGRARVRSALYMAALVGTRRNPVLAAFYARLLAAGKPKKVALVACMHKLLRILNALLRTQTPWQPRVEVT

SEQ ID NO: 340533 - protein, 349 aa, unidentified
MTLYIGVDFHPHQQTLSWCDSETGETQTRDLPGDPETVRNFYSSLPEPAIVGIEASARARWFENMLFETGHKLFVGNPVLIRKRATSRHKSDRRDAELILQLLLREEFPSIWRRPPESESVLDMLRLRQSLVRQRTGIYNRLQALAHDVGLPKGRIKTKSFQKLLVGVELDEVASIRRKHLFSLVDKLDEQISELSAWLEKIAARDSSVQLLLSQKGVGYLTALATVHTLGDVSRFPRLSKQIVSFVGLDPVEKSSAGTTRFGSISKAGSRLLRHHLGLAAQIACRSDAKLKSFYKRLAEKKPKPVAKVAIARKLLVKLAIMLRDHITADEFDQRGRTVGNARLTTDLK

SEQ ID NO: 340534 - protein, 356 aa, unidentified
MNKVSKLDFTGQQIYVGMDVHKKSWSISIYTDQFEHKTFSQPPEVGVLVNYLTRNFPGAAYKSVYEAGYSGFWIHDQLQEQGVQCIVVNPADVPTKDKERAGKTDRVDCRKLARSLRNGEIEGIYVPTRPKAEDRSLLRTRYSMVRKQTRCKNQIKSILCFYGIHIPDEVANSKWSKRFIAWIESVRMERASGDMALKVHLSELSHIRQTIAELNRAIRALSITDGYRNNVRVLKTVPGISILTAMTLLTELYDISRFKTLDNLCSYVGLIPNTNSSGETDRKTGMTGRRNIQLRVVLIESAWTAVRKDPALMMSCNELSKHMTKTKAIIRIARKLLNRIRYVLKHQQEYVPAVIQ

SEQ ID NO: 340535 - protein, 360 aa, unidentified
MIVIGADSHKRTHTLVAVDDVGRRLAEKTVRTNTEGHLDLLGWSRRLPGADAGEVRFALEDCRHLTRRLEADLLAGGARVVRVPTRLMAEARKVGREPGKSDPIDAQAVALAALRHPELPVAELDGPAREVKLLSDHRRDLVMQRTRICCQVRWFLHELDPDLEVASRGLRRQSLVADLLIELDQFDGVVARLTRELLERCQELNGQITILEHELRDLVRRLAPSLLAVPGCGVLSAALIVGETAGVHRFRDKDAFARFTGTAPVPVWSGSSKGKVRLNRGGNRSMNYALHMIAVTQARGIGPGRAYLDKQTGRGKDRVAAFRLLRRRLSDAVFASLKADDQVRSPAGRNHLDGELPAAA

SEQ ID NO: 340536 - protein, 338 aa, unidentified
MYYTGIDLHKFTSYLTTIDSSGAIVKQENLKNVAHNFIQYFGSIPGEHKTTVESTMTWYWLNDLLTSMNIPLVLAHAKYVKAIAYAKVKTDKVDSHTLAQLLRMNFIPAAHKISNDKRLLRDALRARLKIVQRHTSVTNSMQLLLAKYNFDTPTQLSGIPKFQYEQLTEVEALLDEQMLDLEKQLYPYLIPNDDIQRLLWIPGIGKMNAFTILLEIDDINRFADVKNFFSYCRLVPSARNSGGKSKQRSSKDGNRYLKVAFSDATVHAVHYYPVIKKCHSSLLRKKNKQIAKTIIAKEIAQTVYFVLKNKTDFNNKFRGAELEHTKSLQWPRITSPYA

SEQ ID NO: 340537 - protein, 342 aa, unidentified
MSAYYYIGLDIHKRTISYCMKAIDGALIGQGKIEADRKSLDEWAKGLPGPWVGAMEATIFTGWVYDFLKPYAVKLKVAHPEMLKAITAAKKKNDRADAEKIADLLRVNLLPECHMLSEEIRELRRILRYRNHIVRMAVNMQNKVSGLLMEVGASYSKKRLHGKKYFRELLERVEDIPPSVKELLKLSRSSYEMFRSFQKRLVETLHTNLIHDRVERLMTIPGVGELTALTWVLEIGDSERFTSIRKAVSYCGLCSAQRESAGKEQRGPISKKRNKHLQTMLIEAAKLAPRWNEQLAILHERELKRGDRNRATLAVARKLVAYMLAVDKKQADFKLPAEMQAA

SEQ ID NO: 340538 - protein, 406 aa, unidentified
MNYLGIDVSKAESRYVFLDNAGEKFIKPFTLDNNQQGFTKLLERLKELNLSPNNILIGIEATGIWWENLYSLLTENKFKVIVLNPHQTNKFREALRIKAKTDDIDAYVIAGLLRSQEYSSSFIPEESIQCLREITKLRFQLVKDRQNYERQTNALLGLLFPEHAQTAIKNPFAVSSMAILKAYPTAKHLAEAKLKNIEKIVRSIQGNNFNIKEIQYLIETAQKSIYSGRAKHDRGLNLIILLTQVETLQNAIAQLDERTNNILSPSDSNDANSFPGANLLTIPGVGPKTLAAILSAVGSDGQAFPDGKHLIGHIGFFPKIYESGETRHDNTISNRGPKYLRAALYMAAVASLKHNPEFKTLYHRKVSQGKTAKQALVHVAKKLAHLCLSMLKSGESYNPSRVFMPA

SEQ ID NO: 340539 - protein, 396 aa, unidentified
MYDCATGKRESSILEHTPEAIAQWARGLQERFRGNQIALCLEQTRGPLIYALLEYSFFVLYPINPATAARYRQAFKTSRAKDDPSDAQVCLELVLHHREKLNPWLPNDGQTRELSCLLQHRRVAVDLRTLLTNMLRDALKSYYPQALELAGQDLFAPLGCQLLLKWPSLQELQKARKQSVRKFYYAHNCRRMDVIEKRLDAIAQMTPLCRDRALLEPAMVQVKMLARQLLQLGGALKEYDSKIEQLFAQHSDALIWKSFPGAGLSLAPRLTCAFGSQRSRYQSAAAIQQYSGTAPVTEKSGKNQHWVHRRWARPHFTHQSFFEYASQSVLHCHWAKLYLKEQMARGKAYPTAIRALAFKWQRIMFVCWRDRVPYDETTYLQSLKRRGSHLARTLNQ

SEQ ID NO: 340540 - protein, 408 aa, unidentified
MEVLHARCCGIDVHQAKLAVCVSIKEGGRSEKYKLCCGTMTADLLRLCDWLHEHQVTHVAMEATGVYWKPVWHVLQGQFELLLANPTQVKALRGRKTDLRDGERIADFLQHGLLQGSFVPPQPIQELRDLTRSRTTLIQEQVRISSRILKVLEGANIKLKTVMSSVMGVSGREMLRAIIQGKTDPTELAELARGRLRGKIPQLQQAAQGNLTEHHRFLLEQWVGVWDELEVRIKKFDERIEEQMRPFEPVAKAWRSLPGIDQRTAETMVAEMGADMNQFPDAAHAASWAALCPGEKESAGKRQSGQTRKGNVWLRRALTQAAWGASVTKGSYFKSLYHRLAGRKGKKRAIVAVAHSLLVTGYLLVATGSIYEDLGEDYFDRIDRERLTKRLVKRLQRLGHRVELQPAA

SEQ ID NO: 340541 - protein, 445 aa, unidentified
MTRRTIGIDLAIRGDHVGQIFDDGRPVSKPIRFRNDPASLDAFVAKATEGMSPGGTVQALMEPTGMSWFPVAHRLADAGVEVIRVKGQRVRALRRYLSEHAKTDLADAHVLGAMPLFGGPRFDPVHIPAPKSHALQRLTKQRSRFQDAVAGAKRRLLDLVRWASPGLEAVLPDLRTRLSLALLQSWVDPAAVLKARRSTLARFVGQNASGNHPHSGPFVDALVDGLKRAARDALALHGRHVDFAELQAEVALEVGIIIRHLEAIAELDRRIATLYAEIHPSDALRTIPGVGLHLAPVLIGVLHTSERFRSERHIRGFCGLFPNRADSGGAERPGQKISQSGNDRIKRALILAADTARRIDPDLAEVYWRLMTTKGHHHNQALCAVANRLVNRIFRVLRTGAPYGLRDLDGRPIEIAEAKAIIAARYTVPESVRASRRVNRIQTAA

SEQ ID NO: 340542 - protein, 371 aa, unidentified
MELSRSKWLITSLSPGGGEKMSKHAVAAGDIAGLLAPFAELKRKAQARTGRCFPIIVIQEAGLDGFWIHRVLQAEGIESHVVDPASIATSRRRRRAKTDKIDGETLVRALLAYKRGEPRVCAMLRVPTPEEEDRRRISRERKALTNERVRHVNRIKGLLFSQGVSGYQPLRRDRRTRLEELRTGDGRPLPAHLKMQISRELDRLELLIGQIKAVEAERDAMLAVAPVGSAHFADCEQPAPAMLLALKGIGPEFAVVLWSEGLSRHFDNRRQVAAYAGLAPTPWQSGSIDHDQGVSKAGNPRLRTTLIQVAWLWLRHQPHSALSLWFKQRVKQNDGRLKKKTIVALARKLLVALWKYVNAGVVVEGAVMRTA

SEQ ID NO: 340543 - protein, 494 aa, unidentified
MKAKGCKAKGQHSNSSKRNAKMAARGQPEGMEIVNAHAGGIDCGAQEHYVAVPPQSVEPGKPSVRCFSAFTKGLDALVEWLKACGVTTVAIESTGVYWIALCQKLEAAGIEVYLVNARHVHHVPGRKTDVKDCQWLQRLHSFGLLSASFRPVDAICRLRSLQRHRLNLIWTAGAEIQHMQKALQQMNLHLHHVVSDITGLSGLRIIDAILAGQRDAVQLAKLRDYRVNKSTVAQMEAALVGDYRPEHLFVLSQSLQAYRFYQARIQECDAQIESHLQQLAQRFESSSALAAELPEPEVLNGAQSHNPQPAKRKVKRKPQANEPKIDLADYLRRICGVDLTQVIGLNVLSVLLIVSEIGVDMSKWRSAKAFCAWLGLCPRNKISGRKVLDTRTCKVISRVATTLRLAAQSVGRTNTALGIFYRRKKAHLGPAKATTATARKLACLVYHLLKYKEQYREPDPATYQLKVQKTILAKIQKQAAALGYKLLPTALLPA

SEQ ID NO: 340544 - protein, 420 aa, unidentified
MHNSIAYKLAQLPPSSLFVGIDSHKRQHTVCVIDQKVQVLAKFRITNLRPGFADLLERCETLRRQTGAAVCLFAIEPAAHYWRNLAYFLVEHKQDFRLINPFTLKRQREGNDLNRRKNDYRDAQMAAELLREGKYTWTTLPQGAYATLRQLHLTYQRLVRDHAQVLLRLTAALDQVFPEFLTVFKALDGATALAILRCSLTPEQIAALRQEDFVAQVRQRHEGQRLMVSKVCAVHARATQSVGLRAGAEALMAEVFLLTGQLLYVHHQRCYAEDQLVLAFAGFSESKYLLSIPGLGSLNGAGLLADIGDIRQYSSYKQLAKLAGVVPTQSQSADHSSARTPMSKKGRALLRLVTHRAVVSLLRHNQVFQAYVQRLMTRPAGQHPLTKRAAMGAAMNKLLRIVYTLLHGQQMFDAKKALAA

SEQ ID NO: 340545 - protein, 325 aa, unidentified
MPPTFILGIDIAKDTFQVTLLKAGRTSAAAFANDSAGFQQLTTWLKRRKARTVWACLEATGRYGDDLAEYLYDQGHTVSVVNPLAIKRYAESQLTRNKTDAVDARLIADYCATHQPAAWSPPAPEIRELRELARQYESLQTSRQQAHNRLTSGFQSAMVLAQLQAQVDLLDQQLTEVQEQMRQHIDRHPDLKRQRELLDSIPGIAELTATKLVAEDLGRFDSARSLAAYAGLTPHNQTSGSSVRRRPKLSKIGKISLRRALYFPAIAAKRKSVFQALYQRLLAQGKCKMAALGAVMHKLLRVAYGVLKSGRPFDPNHAAQFHFAS

SEQ ID NO: 340546 - protein, 460 aa, unidentified
MEKKEKVISVLKTISRADYAWSVAESAIRSMRHLHDIDDTGECCNFAIDNYYSQPKDNGTGRFTIQGKGKDPFTFFDRPVSVGSKAWIRFCLIALRFVGNEPASKVHQKDNAKMKKIFVGIDISKEKLNVCLMRDMDIIHEDEFENTVKGVRKWLRQMVKTTGCCMNEVMLCAEFTGRYIYPLTVACHDENAFLWMEDPTRIKNSLGLTRGKSDPIDARRIAEYAARYQDKAMAYKLPEKELASLRILMTDREQVLSDRKKYAAQLNDQKRFMSDEDYAMQCKIWKSIIKELQKQLDSIDKKVDELVAENKRASHQMELLKSVDGVGKRVAIAMIVCTDAFTRFDNARQFNCYAGMAPFTYTSGKSIQSKAKVSQRANKHIKSILHMAALSVATRIKTGEYAEYYKRRCSEGKHPLCVLNIIRAKIVSRMFAVIKRDKEYVRNYERVSIEKNLSTPLQIS

SEQ ID NO: 340547 - protein, 439 aa, unidentified
MSTRECFGFSHPASIACLTEEEFTLQVLYPRCCGLDVHKKSITGCCLWFDAEGRRQEEIRKFGTHTTELRRLAVWLRQHEVKHVVMEATGSYWRPIWNVLEGEGFEQTLANPQHMKAVPGRKTDPHDAHWIADLFQHGLIAASFVPNQQMRHLRDLTRMRTKVTEDRARVINRIEAVLEDANIKLSSVVTDIMGASAQAMVKGLLRGERDTAQLAELAQGRMRAKRPQLQTALEGNLQPHHVFVLQRLLMQSRFLQQQREAIERQIKRRLDPEMRQAIAFWDSIPGVDEDIATILVAEMGIRSDQFADGAHVASWTAICPGNHESAGKRKSGKMREGNRWLRGALTQAAWAATHTKGSYLSALYRRIAARRGSKRAIVAVAHAILISAYYMWKKKQAYHELGDNFLDTLKPEKTADRLLKRLAKLGYAVTVTGFPSPAA

SEQ ID NO: 340548 - protein, 395 aa, unidentified
MMYLGIDIGKNNHEAGIITEGGKKVGKSLRFSNDREGFTALLNFIGRSVPAGDDLSIGMEATGHYWIPLYSFLHEKGFKVHVINPIQSDSLRNFHIRQAKTDSIDCFLIAETLRFGNFTETQLADEDIMSLQKLARFRESLKDRCGDCKRQVIAVLDQVFPEYDTLFTDMFGESSKAFLKSCGTPEQTLEVDVKSLAALLSKASRGRHGTEKAGEIKDLAANSVGVTLCANTFAFQIRLLIEQIEFTEKQIEKIDKLLARLLKKLNSVIMTIPGVGPVTGAIILGEIKDINRFDNPKKLVAFAGIDPTVRQSGNYSGTNNRLSKRGSPYLRRAIWMSAVVAARFDPVFKAFYEKKRSEGKAYGTAIGAVARKLIYTIFAILKENKPYEVRLNPPG

SEQ ID NO: 340549 - protein, 346 aa, unidentified
MKITTIGIDLAKEVFQIHGVDEHDKIVLRKQLRRNRMTKFFANIEPCLIGMEACSSSHHWARKLSEFGHTVKLMSPQFVKPYVKTNKHDMADAEAICEAVSRPNMRFVPIKNIEQQAILSVHRARQGLVKARTAQANQIRGLLSEFGIVIPQGIHSIAKRVPDILEDAENDLSGTMRHLLKRLNDHLKELSRQVEELELQIKLWHKENESSKKLEAIPGIGPITASAIVATVGNATEFKNGRQLSAWFGLVPKQCSSGGKQLLLGISKRGDTYLRTLLIHGARAVIRYAENKAGPESWMRKLITRRNKNIAAVALANKNARIIWALLAKDTTYRLNHITTAAATKV

SEQ ID NO: 340550 - protein, 412 aa, unidentified
MKDLLEISCGLDIHKEKIVACILTGPLGKPTHSEIREFTTLIPDMLALRDWIISENCHHIAMESTGIYWIPIYEILEDAFSGDITLLVVNARHMKNVPGKKTDMRDSEWISTLLRAGLLNASFIPEKRIREFRDLNRYRKSIIRDITSQKNRVEKFLQSSGFRLSSFISDIFGASGRNIILHLMEHGWIDKISLDSYLKTKTRKRIDEILMSVNGTLSEHQKSFLKILMCHYDSMKEHLIEIETHLQEDMLPFALQIEQLNTIYGISTTASCAIIAEIGTDMKPFKTAEHICSWAGLCPGNNESAGKRKSTSITKGNPYIKSMLCEIAWVIAGKRNTYLSAWYWRIKQKKGARKAIVALARKLLVIIYTMLKQGTNFDENCFEVRRKNCEQKQLSRYIRELEKHGYTVEAQV

SEQ ID NO: 340551 - protein, 452 aa, unidentified
MKTMKGTNKPINEMISMPAVNPHAAGIDLGSKSHFVCVAQDNVKEFGVFTADLHLIAHHLQIYQVQTVAIESTGFYWRPLYLMLLDYGFEVILVNARHLKNVKGHKTDVVDSKWLQLLHSIGLLSNSFQPDAFTHELRILTRHRKSLIEDASRFISKMNKILVLMNIQLHVVLRDITGQSGLKVIEAILQGERDAKKLMELVSLKVKAKRLDIEKALTGDFRKEYLFELNHCYHLYKDYWQKIEETDVQIEILLKIRVADKPINNNYKSPKNKQYQKNDPNFNVGHYAYQMSGGVELLDINGVGSATVLTLISETGLDLAKFKTGKHFASWLGFAPNRKITGGKVISSHTRKKTNPLAKVIRDAANAAGNSQSRLGDFFRHLAFRKGRTVAIGATSRKIAVIFYKMLMEGKPFCYEYAQEETQHLKNNKLKNIIKTLKKYDISKSELELAMI

SEQ ID NO: 340552 - protein, 386 aa, unidentified
MPQLNDLSRSLVILEQDATLIAVIEMGQSNWLVAGIVPGVERSPLKKLAVDESALLKLLNRWREEAEKAGHRIERIAIAFEAGRDGFWLARWLRARGIEAHVIHASSVAVSREHRRAKTDRLDTELLKRAFLGWLRGERDHCKMVAIPTLAQEDAKRPNRERESLVGEQSRIVNRMKAALARLGIRGFNPKLKKAVERLDGLRTPEGEPIPPNTLAELKHDMERRRLVRSQIRDIEGTRLERLKQAPGDGPHVMVRLLARVIGVGVETADMLVQEVLSRNLRDRRAVARYGGLTGSPDESGKKRREKGLARSGNARVRRGMIQLAWRFLMFQKGSALAHWFYARTKNAPQTRKTMVVALARKLLIALWRLAREGAIPEGIVLRPAL

SEQ ID NO: 340553 - protein, 413 aa, unidentified
MLTVIAGRGFGKMSGTKKEHVKIILQTIENGTLSEAETEQRLLGLVRQEAERKDRPADLGLIRACVELGSEPVVFGMEATGHYWLTLYTHLRNDGFTVHVINPTQSDALRGMYIRKTKTDSVDSVIIADVIRFGRYCETSVDPGDLQAMRELCRQRFYIIDMASDLKRKVIALLDQVFPEYEKLFSDSFGLSSMELLSQYTTPEEMLSVSSQQLAEVLKKASRGRLGAEKAVEIQDAAKNSFGIVMVSSSFSLIIRQYIEQIRSLESSVDIFDTEIARLLSGFDTQLTTITGIGSTLAAVILSEIGGDIRRFSSPAKLAAYAGVDPTVKQSGDFSGTRIKMSKRGSPYLRRAIWLASTVAAFKDPVIHALYERKRAEGKDHMTVIGHVCRKMISIIFAVLRDNTPYVPAGISD

SEQ ID NO: 340554 - protein, 338 aa, unidentified
MAKAKLINSPSVVGGVDTHKDLHVAAVVDRNNRVLGSEFFATTRQGYRQMLAWMASFGTVERIGVECTGSYGAGLLRYLQSAEIEVLEVTAPDKMERRKRGKSDTIDAESAAHAAFSRIRTVTPKTRSGMIEALRVLKVCRKTAVAARRIALQMIQMNIVSAPDELRDQIRHLTRMQLIRTLAAWRPDVTAYRNVQDAYRIALKSLARRYLELHDEIADLDVMITSIVDELAPELIRRKAVGYECASQLLITAGDNPQRLTSESGFAALCGVSPVPVSSGKTNRHGLNRGGDRAANSALHIIAIGRLRTDTKTQEYVAKRVAEGHSKMEALRCLKRYI

SEQ ID NO: 340555 - protein, 338 aa, unidentified
MKISVLGIDLAKQVFQLHGVDEQGQVLCRKKLTRRKLLAFIAQLEPCLIGLEACSSANYWAREMKKFGHDVRLISPQFVKPYVKSNKHDAADAEAICEAVSRPNMRFVPIKGIEQQDIQSLHRARELLIKQRTALCNQTRGLLGEYGLVVSQGVNRLRSTLPEVLEDGENALSSQARELFSELYQQLVWLDARVQVFDRKIGQVFKTNEACQRLGQMEGIGPMIATALYAAVHNAKEFTNARQMAAWLGLIPRQHSSGGKTLLLGISKRGDRYLRTLLIHGARSVIYRVKDKENKRGRWLKQLIERRGVNRAVVALANKMARMAWVILNKGECYQAGN

SEQ ID NO: 340556 - protein, 405 aa, unidentified
MSEGRFAGVDWASEEHAVCVVDERGRILEGRRYGHNEPGIRALCARLVRLRVAVVALERPDGLLIERLLDAGLAVVAVHPNQVKAMRPRFSVAGGKSDSFDSFVLAELARTDSHRFRVLVPDSDRTKALRVMTRARDGLVRTRVGLANQLRDQLACFWPGASKVFWSVDSQIALAFLRKYPTPVDARGLGEQRLQAFLKRHGYTGRKPARELLTRLRGGAEGRAGELEMHARREIVLSIVSSLEPIVQRISELTIEIRHALDEHPDGPTFRSLFIAPDSWLCAATMIAEIGDCRERYPTYRALAADAGQAPVAVESGKSKHAQFRWACDHRLRQAVCTLADSSRRHNPWAADIYDRARARGASHTHATRILGRAWCQVIWRLWHDHDTYDPQQHTALQRLIAAAA

SEQ ID NO: 340557 - protein, 336 aa, unidentified
MKDTVVVYIGIDVSKEALDIDAGDLGAVKIGNTPAEIRKAFKAIARKAQGKPPHVCFESTGQYHAALAAECQKAGIAHSVLNPYKVACFAKSVAHAKTDAIDAAVIRRYAEVRRPEPAPPQNKAATAIDGLLVLRDALVKANVALRAVLGTVKDAAAGKPMRRVVACNEKQIAEYGRLIAEAAKAAEVAGLVGALEGVKGVGTLTAAAVIAWMPEIGTLGRRRAASLAGLAPYTRESGKWKGQSRIGGGRKGIRDALYMPATSARTHDPHMRRAYERLTAKGKKHNVAQAAVMRMLICRLESVARDYRARLKAEQLQAPPSSLPPPPPAPPLPPVL

SEQ ID NO: 340558 - protein, 387 aa, unidentified
MSRLAERHVRDHLRDHLERPEWPPGAVIGGVDTHKHIHVAAVCDPLGRVLASATFPTTTAGFKALLRFLRSHGQLAAVGIEGTGCWGGGLARWLAARDVHVVEVDRPNRQARRRRGKSDTIDAEEAARAVVAGRARTVPKTGTGPVEMARQLRVARRSAIKQRTQALLQLQALADTAPDDLRDTVKKLRYAQLIATAARFRPGELTTPAAAAKYAMSALARRIQHLDAEIEGLDAHLKTILTAAHPGLLAAHGVGPDTAGALLVAAGDNPERLVTEQAFAALCGASPVQASSGNTHRHRLNRGGDRQANSALWRIVLVRMKTHPPTRDYVTRRTAEGLAKRDIMRCLKRYVAREIYHHINPTPPAVTPLRLVSPIPVTAGETALSTA

SEQ ID NO: 340559 - protein, 336 aa, unidentified
MTNIIGCDYHPRFQMIAMLDKGTGEVKVMRLEHENGEAKKFYWSLPKGTRVGIEATGATQWFERLMAECGHELWVGDPAEIRARMVRKQKTDERDALHLLDLLMTERFPRVWVPSPEERDARQLLQHRQKLVRMRTSVKNQLHGLAMGQGLCRKQKLWSERGRKQLEALELGPWASRRRQELLKLLDELEPQITELNKAVEAEAARRPEVVLLMEVEGVGPVTGLAYVLTLGPVERFPRSRQVVGYLGLDPEEDTTGGHQRFGHISKQGNTMMRWLLVEAGQTAARLDPELRRVYKRLKVRRGANVAKVALARRLAVRMYWILREAPSAPAGSHVR

SEQ ID NO: 340560 - protein, 356 aa, unidentified
MVVVGADVHKRSHTFVAVNEVGRKLGEKTVKATTAGHHTAITWAREQFGTELIWGIEDCRNMSARLERDLLGAGQKVVRVPTKLMAQTRKSARVRGKSDPIDALAVARAVLREPDLPVASHDETSREFKLLTDRRDVLVAQRTSAINRLLWHAHDLDPERAAAVGSLSAVKQQQTLMAWLTELPGLVAEIARAELTDIIRLTSEINALAKRLAASAHRSAPALLEIPGCAELTAAKIVGEAAGVTRFTSEAAFACHAGVAPIPAWSGASAGQMRLSRAGNRQLNTALHRIAVTQIRMTGSAGQIYYHKLVDAGKTKAAARRCVKRRIARRVYQALRRDAGHPDHQTPSQPPQSAAA

SEQ ID NO: 340561 - protein, 372 aa, unidentified
MEERSKVHIGMDVHKDSISVGLAAPGREPGRLVGKVAHDVGRLTKVLSKLGSPDQLHLVYEAGPTGFGLQRKLTALGYTCEIIAPSLMPRRPGDRVKTDGRDCIQLAQCSRAGELRVVWVPDTGDEAIRDLSRAREDAVHARTQARHQLKGFLLRHDVRYTGKTSWCLAHLRWLSTLNFGAAAAQTAFTEYVLSVQASDQRVQRLDQALEQAIKGWRFEPVVAALQALRGVAMITAIGLVSEIGDLSRFEHPRKLMAYLGLVPSEQSSGDRVRRGSITKTGNSHARRLLTEAAWNYRFGARIGKQAQRRQESLSEPVRTMAWKAQLRLTRRFSMLNARGVQANKVCVAVARELAGFVWAVGMQALHEKPLTK

SEQ ID NO: 340562 - protein, 349 aa, unidentified
MIHVGLDMHKRYSRLEVMNDSGRVLDKSILYHENKEEMRNYFSSIEKPATVAMEATRSWYWLYELLEEEGINVKLAHPLKTKLIGEAKIKTDSIDAHVLAQLERTGFLPESYIPPKEVREQRELLRYRILLVSTKTRIKNRVHDIIDKLGIVHPYTGLLGSKGISFLKNLSLPPTYQEELNRCIEIIDFLNSKIKEAEKEIKKILKEDERAELLMTIPGVGNLTAFLLLSEIGDINRFNSSKKLCSYCGIVSGTHQTGGKEYHTSITKQGNKYIRWVLVEAAQIAIRKDPALYAFYEKLKRTKGNGVAIVAVARKLLVAIYHVLRNGEPYKFNSLSKIHMGKPVVPSGH

SEQ ID NO: 340563 - protein, 455 aa, unidentified
MPKRTTVARPELKPVNVGAAAIDIGSKMHMAAVNPASTDVPVRSFGTFTQHLHDLAEWFKSCGVTSVAMESTGIYWIPVYEILEQHGFDVILVNARYAKNVPGRKTDVSDAAWLRELHSYGLLRGSFRPDAKIATLRAYLRQRERLVEYAAAHIQHMQKALMEMNLQLHHVVTDITGATGMRIIRAIVAGEQNPDVLAAYRDVRCHSPLETIRAALVGNNRHEHIFALTQSLELCDVYQAKMLDCDRKVEVLIAALNSKGAKPVGRLSKPRIKTKQVNTPAFDVRTALYGVLGVDLTEIHGLGPSLALKLVGECGTDLRAWPSAKHFTSWLCLAPGNKISGGKMLSSRTRRSSSRAAALLRLAATTIGRSDTALGAFYRRLASRAGKSKAVTATARKIAVLFYNTLRHGMNYKDPGAAHYEQQYRSRVLANLRRRAKLLGLVLQAIPGDANPAVS

SEQ ID NO: 340564 - protein, 343 aa, unidentified
MDYFAGLDVSVKDTSVCIVDETGKIVREVKVASEPDAVLQVLRTAAYHFKRIGLEAGPLSQWLFSALAEAGLPVICVETRHMRAVLKAQINKTDRNDARGIAQMMRVGLYRPVHVKTLRSQKLRMLLTDRKLLQAKAIAVENDLRATLRNFGLKVGIVGAVKFEARVKELVDNFPDLLALVEPLLVVRRVLREQMSILHRRVLVAVRNDEVCRRLMTVPGVGPLVALSYRATVDVPARFRKSKSVGAVFGLTPARDQSGESDRPGAISRCGDEMMRTTLYEAAQVMLLRSAKWSWLKAWAMKIARHRGMKKAIVALARRLAVIMHRIWIDGTEFKWTREAVAA

SEQ ID NO: 340565 - protein, 388 aa, unidentified
MQIVADRAAAPTAIQTDLHAIFVSLELSRSTWLITSLSPGSGQKMSKHSGQAGDMAGLRKRFAQLKEKARARTGRDFPIITIQEAGLDGFWIHRVLQSEGIESHVVDPASIATSRRRRRAKTDKIDGETLVRTLLAFKRGEPRVCAMVKAPTPEEEDSRRLCRERKVLIAERVLHVNRIKGLLFCQGISGYEPLRRDRHERLDELRTGDGRPLPQHLKAQVNREIDRLELLLKQIKAVEAERDALLLAAHTPAAMPAAMLLNIRGIGPEFGAVLWSEGLFRHFDNRRQVAAYAGLAPTPWQSGAVDREQGVSKAGNPRLRTTLIQLAWLWLRNQPHSALTLWFHERVSRNGGRLRKTTIVALARKLLVALWKYVTAGIVIEGAAMKAA

SEQ ID NO: 340566 - protein, 359 aa, unidentified
MRALYAGFDLHGNSNYLGIVDGDGKRVFRKKLSNDLGWIGKVLVPFKEELVGIAVESTYNWYWLVDGLMEEGYKVHLANPSAIQQYEGLKHGDDKHDAFWLAEMLRLGILPEGYIYPKEERPARDLLRKRGHLVKLRTSLVISLQNILSRHLGRKVSVNDVKVLKEDRVTPLLESSEDLALAGRVSKETIDFLTHQIRRIEGVVEKRMELKEQYRYLLTLPGVGKILALTMMLETGPIGRFATVGDYVSYCRKVPSQWTSNGKRKGSGNKKNGNKYLAWAYAEASELARRFYPEPRVYYNRKMQKTNASVAHSALAHKLARAGYYVMRDQVPFESQKLFGRGQGWNGEPELGLAKSHET

SEQ ID NO: 340567 - protein, 374 aa, unidentified
MADYNEVFVGIDTSKLRNAVAIAEGGRNGEVRYHGEIENTEAATSKLVKKLAAQHRRLTFCYEAGPTGYGLHRLIKTLGHECVVVAPSLIPKKPGDRVKTNRRDALNLAKLLRAGELTAVWVPDARHEAMRDLVRAREAAVDDLKSKRQQVLSLLLRLGRYFTGKRTWTRAHMNWLVSQKLAHREQRIAFEEMLLAVRQANERVIRLERAIAAAVPDWSLAEVVTALMAVRGLDLISATIFLAEIGDLSRFATPRQLMAYLGLVPGEESTGDRVWRGGITKAGNHRARRILVECSWSYRHPPRVGKKKLAKVEAAPPAVQEIAWKAQARLTARYRALARRGKRPTLVVTAIARELSGFIWAVSRAAGAPATPTM

SEQ ID NO: 340568 - protein, 345 aa, unidentified
MVRQGLMFFFKYKSMKKVKETVGIDVSKLTLDVHLCKAGLHQQFGNDLSGFKKILAWLKSKELKSEDVLFCFEHTGWYCVLLGYFLHEKGFDYCCVNPTEIKRSMGLKRGKSDKADAKEIAYYAWLRREDLTPSKPPAANLIELQRMMSMREQFVKQAVALKNLRCGMEQLTGKTSQDFSILAITETIEHLENQAKKVEKAMETLIKSDEAMQLNYKLSKSVKGVGLVLAVQMLLHTHNYTRFESWRQFSSYCGLVPFPYQSGTSINGRSKIHPIADRKMKSLLSMSAISAIQHDKELKIYYAKRVSEGKPKMLVLNIIRNKLVSRIFATVNRGTPFVELNQFIA

SEQ ID NO: 340569 - protein, 318 aa, unidentified
MNTNTLQNINVGVDTGKSQLDIYIRPLDIYFTVPNTDKGISDTIKAIKKHKPQRVVIEATGRLEMPFILACDKAKLPYVVANPLRIKRFAEAIGQRAKNDRLDAALIAHYAERVQPELTKLKSENIRLMSDLVTRRNQLLTMQTMERNRLQILPKNISSTITPVLTALKNQLEKVEAKIAKLIESSPEYQAKSTILQSMPGVGKVLAASLISNVPELGFITNKQASSLIGVAPITRESGRFKGKRMIKGGRPQVRTVMYMAMMTAIQCNPVFKATYERLLAAGKPKKVAIVACMRKMVVILNSMIRDGVMWDKGSAKN

SEQ ID NO: 340570 - protein, 398 aa, unidentified
MHGLTHSINFNRILAIDLGKFNSVVCLYDPASTQHSFVTVQTTPQAMQDLLVQHGSADPAQTLVAFETCDCGGWVYDLASALGFTVAVANPSSEAWRWTKVKRKTDRDDAHKLASLAAMRQLPTVHMPSPQQRQKRRLVHQRRSLVQRRTEVKNTIRSIFSQQGLQLVRGNKQWTIAGIEQLKQESKPLSECSVDELWRGRLHVELALLEAIDEQLKCVDRKLDALGSKDAQIARLQQVKGVGPRLAEALVVHLDDPHRFKSGRQVSAYVGLVPRQFESGQMKRVGRITRRGPSLLRGMLIEVAWMVYRYNAWARRFVQNVSRGMKQRKKIAIVALARKLLVALWAMLRDGSNWRDPDQPREKEKDTDSRCAAAGCAVSPPEDTARVTALSSVEVAIG

SEQ ID NO: 340571 - protein, 312 aa, unidentified
MDNRKYIGMDVHQASISIAVSDVAGKVLMECVIETKAVTVLEFIRGVRGSLWVTFEEGTSAAWLFDLLKPHVAKVVVCDPRKNALLKTGNKNDRVDARKLSDLFRAGLLTPVYHGESGVRTLQELGRSYRTVNQDLTRVMNRLKSVYRSWAIPCAGQEVYSPRHRVAWLENLRETGVRRRAERLYEQLDFLIRIRKETRTEMLAESRKHPASHLLQQIPRLGPIRVALLIALIQTPHRFRTKRQLWGYCGLALRTRNSGEYRYTGGQLQHSKKPPALRGLNVNHNHDLKSIFKSAANASSAPSDAIIREKPI

SEQ ID NO: 340572 - protein, 365 aa, unidentified
MLPVLLNCCVGLDVHKKVVVATMLKGGEEGGRKTVREYRTFPGELAAMGLWLKEEGVQLAVMESSGVYWKSAYEALEALDLPVMVVNARHVKKVPGRKTDVSDSEWLAELARCGLLKGSFIPPKDLRETRLLTRYRLKMVRNLASEKNRLHKVLDDCGVRLGSVVSDIDGVSSREMIGLLIAGDRSPEEIAKAARGSLKEKTEELRLSMEAAISDRHRYLLRQIQEHIQWLQYQIADIDSRIVTALQPYRQEWQLLQTIPGMDEMSAAMLLVEIGPDMSAFRKKSHLSSWAGICPGNNAGAGKKSPDGPRKAIGTSRRFSAKPRKVREEPLANSRKSLKGSSAVGGTNEPLSRLDAESWKPPTLC

SEQ ID NO: 340573 - protein, 386 aa, unidentified
MTVRVINLPAAMHVETARCLFAIELSKQSWVIGFVTPFSSKISRRILSGGDWKGLLKLIEEVQTRVSRETGRAVEVMSCYEAGYDGFWLHRLLEEHGIRNYVIDPASLQVDRRARSVKTDRIDTERLLRSLMAYLRGEPKVWSVVRAPSIAEEDARRLHRERDRLISERVQHVNRIKGLCALHGIYDYQPLRPQAMARLEQLRTAQGISLPPRLKSEIKRELQRLELVVEMIATLEAERDAIVEDAASTHINAKKIRELHKLKAIGPEFAAVLVGEIFHRNFNNRRQLASYVGYAPSPFQSGNVAHDQGISKAGNRKGRTTGIELAWLWLRYQPGSDLSAWFRARVGATKGRIRRIAIVALARKLLVALWRYLETGLVPRGAVLKG

SEQ ID NO: 340574 - protein, 413 aa, unidentified
MDKIYDICCGIDVHKKLIVACLNHKRKKELREFGATTRELMELAEWLQKNECEIVAMESTGSYWKPLYNIMESYGLHAIVVNPAHMKAVPGRKTDVKDAEWIAELLQHGLLQPSYIPSKDQRELRELVQYRKSLVGECTRELNRLQKMLEGANIKLSGTVTNINGKSARKILEYILSGNEIDEKKYDEMYEEKLIAHNLKASKEQILDDLKGFMSPLQRRMLKELLQHLDELNVHIENLNDEIDNFMKPEEKQASQVIQDVTGIGNTSAQTIIAVIGTDMERFPSDRHISSWAGLCPGDNVSAKKRKSGKIRKGNALLKSTLVLCAHAAVRHKSSYFHAQFKRISTHRGKKRAYVAVAHSILIAIYHILKDGVKYQDLGAEYYNQFNAERKIHAYLKKLKALGWEPPKEAVPA

SEQ ID NO: 340575 - protein, 364 aa, unidentified
MKRKVYVGMDVHKETIRIACLTNNTKEIVKEQQIKHNEVQIKKFVNKLKSEWNEIHSCYEAGVTGYPLYRNLKSLGVNCILVAPGKIPRQSSDKIKTDKRDAIKLAKLLRSGELESIHVPSEEDEAVRDYLRSRDSLRLDLGRNRQRLMKFLLRKGITYSATKYWTVSHNKWLNNLQFNNEILQETFNDYYSRVRVQEENLKAMDKRIQEIAESEPYREKVGVLRCFRGVDYLTAMFLLCEVCDFKRFKTAGSFMSFLGLVPGEYSSGSKRKQTGITKTGSPRLRRILTEAAWQHRFPGTGSKIVTARRSGQPALVVALAEKASLRLHKKFRNLQQRGKTPQVMITAVSRELSGFLWAAMNLVA

SEQ ID NO: 340576 - protein, 430 aa, unidentified
MNEQAQAVERIIGFDSHPDSFTAAVVSGPTPVAALTEKVFNKIAMAQLQSWAKKHTTAQDLFVLEASGNSFQVVRALRACERRAKVLESCQMGKLKEHHANNDKISAVRIAKAYLAGTAKEVWVPDDKTQEWRDWFHAYRKATKRTTQMRARLRSYLSDNGVRLRAHTSLTKIGQLEEQIRQARQWSTRQWQVIEITLLELRHADQQRQHWRSLIAQEVLADPELLSLVRLCGVREMVAFALGAFIGDIKRFAEPKKLVKYVGLNPAFDDSGETSWSGGIGGHGNKYLRCLLIEAAHSILRCSQTPLAQWGKRLLARKGSLNLAVAAVARKLTVAAWYLFKGQWTPLEEIDDRLVFKVGKIIGSVGQPKATTAAKERKEYREEIYQRLKIGRVYILDPNQKFIPKTPAAKTAAAATDAPATNLAQEYGLR

SEQ ID NO: 340577 - protein, 334 aa, unidentified
MLYVGLDVHSRQSSLCILNSGGGTVNQIQLNGPRATVVDQLRQLKEPFSICYEASCGYGHLYEQLQPLAAHVSVAHPGKLRLIYGSKRKNDRVDAQKLAKLLLLDLVPPVHVPNIDVRGWRSLILLRQRVLQQVVRAKNQIRGVLREHDISGAKWLWSKKQLAWLESLELHPIAKLRLELAIEEFKSLNAKMKRIERELQRYADAHPAVALLMTIPGVGIRTAETFVAWVDDITRFRNNRRLGSYFGLVPCQDASADRNRLGHITRDGPPVMRKLLCEATWTAIKKCDVFKRFFDRIVGGKSERRKIALVATMHRMTRVMGAMLRSGEAYNGAH

SEQ ID NO: 340578 - protein, 336 aa, unidentified
MIAVGVDTHKHEHVAKALDGLGQVLGGLQIKANLQGYLELLRWLRALDDDVVVGIEGAGSYGAGLCELLLAEGIAVVEVERPRRQERRRGKSDQIDALAAATKVLAKEGLSTPRAGGTRQALSALLVAYGSCISERTRLLNQLQALHTTAPVALRERVGPGNGRKLVARLHRMRARQGAPEAEQLIFAVLRDLARRARELGGRAEAYKRELSRLIGSLDPTLLDEPGVGPISAAKLLACDPQRLKGEAAFARCNGTAPKPASSGQTIRHRLSRGGDRQANNALHTIARIRARHNEQTRAYLDRRISEGKTPREAMRALKRHLSRSLYKRLITVPLT

SEQ ID NO: 340579 - protein, 310 aa, unidentified
MDAIFIGIDVSKDRLDVHVCPSGEAFTVSRDGRGLEALIERLRTLSPQLIAIEATGGFETIAAAALAGAALPLAIVNPAQVRHFAQAVGKRAKTDPIDAEVIARFAEAVKPEVRSVPDAQARLLGELVARRRQIVEMTVAERQREQRASVVRVRKSILRHIKMLEKELAEIDTDIGTLVRSSPAWREKEDLLVTVPGIGNTLARAFLAELAELGSLSRRQIESLAGLARITRESGRWKGKSMIAGGRAPVRTALYMAALSAISWNPPLKRFYQHLLAAGKPKMVALIAVARKILTIINAMLRDRKQWQLA

SEQ ID NO: 340580 - protein, 391 aa, unidentified
MICVGIDVAKDKYDCFILSSEGEVLADVFTIPNNAEGFDTLLQTIRRCARPEDKIKVGLEATGHYSYNILGFLLDNDLPVYVMNPLHTNLYRKSLSLRKTKTDRVDAKTIATMLLSDVDLKSYTDTAYHNEELKSLTRYRFDKVQERAKLKQSVSRLVTILFPELEQLVSSIHGTSIYALLSEYPGAKQISEAHLTRLANILVKTSRGHYRKDKATHIRDAARTSIGSVMPAKSLELKHTIKLIQELTSEINEIEDAIRKIMDELKPPILSIPGMGFHSAAMILAEVGDFSNFNSPDKVLAYAGCSPSTYQSGKLTNCYAHMEKRGSRYLRYALYTATKYVCYWNPVFTEYLTKKQAEGKHYNVALSHATKKLVRLIYALQKSGKAYLAVT

SEQ ID NO: 340581 - protein, 430 aa, unidentified
MKSNTQNAKIEAITEKTLVLGIDVGSETHYARAFDYRGIEYSKKPFKFSNTEAGFATFKEWILDLKERHEKDKVVPGMEPTGHYWFNLGKFLQDNEMKPVLVNPHHVKKTKELDDNNPTKNDRKDPKVIAGLVREGRYMIPYLPDGVYADLRTASNIRFQLQAELTRIQNRISRWFNIYFPEYKTVYGKPDAKSGMLILKAAPLPEDILTLGINGVNQIWRDAKLRAVGKARAKTLIEAAKHSVGSKEGAVAARMEIRMLLEDYESRNIRLQEVMTLIEGLIKQIPMAEKLLEIKGVGIRTVSGFLAEVGDISRFNNPKELQKLAGLALVENSSGKHKGETTISRRGRKRLRYLLFEVAMSLVSKNQEFRELHNYYTTRRLNPLKKMQSLMAIAAKLIRVFYAMLTKGVDYDPKKMVSDIKRPAVYLQAA

SEQ ID NO: 340582 - protein, 428 aa, unidentified
METPIANRDQRLESLRREPSAGCSKGREIGERGMEVAVDKVWVGIDAGKGFHWAHVLDSSGRELLSRKLENDEAGISEFVGKVVPLAREVVWAVDQPGGSAALLLALLWERGQGVLYVPGLSVNRASDAYRGESKTDARDARVIADQARMRSDLGELKPGEEELAELGILLGRRRDLLVDQNRTITRLGEALLSLSPALERTLDLNRKGPLTLLTRYQSPQRLRRAGHKRIAAYLRARGVKGFDSVAGKALAAAKSQSISLPAEQVAAHIVAELAAEILVLKDRIEEIDEEIERRFFDRPEAEILASLPGMGPLLGAEFLVAIGDLSAFDSADHLAAYAGLVPAANDSGKRVGNNRRMRGGNKNLKRVFYQSAFASLRSSPESRAFYDRKRTKGKRHVQALIALARRRVNVVWAMLRDGTTIEARTAA

SEQ ID NO: 340583 - protein, 360 aa, unidentified
MNATTVAVDLAKSVFQIAVADEHWRIVETQRLTRLQFERWFANRAVSLVVMEACGSAHHWARWLNGLGIEVRLLPAQYLRAYVRRNKTDATDAAALLEAARASDMRPVRVKSVEQQALQGLHRVRSLWMGTRTSRINALRGFLREFGIAVPVGARTGLEAISRVLADPSSAVPELIRGTARLLVEEVRLLEARIAQLERELAALARLSPACTTLLSIPGIGLLTATALVAATSGDVTHFKDARHFASWFGLTPREHSSGGTRFLGSISKRGDRYLRMLLTHGARSVLRAAKVAEAAEREVCGVRRWALDVQRRSNHNKAACALANKLARICYATLRDKTPFGEAERLNRKIHRESFVMPA

SEQ ID NO: 340584 - protein, 340 aa, unidentified
MRHYGVIASDLEPLDKVVRALRAPDRRLHFVYEAGPCGFGIYRHLTTRGEECVVVSPSMVPKRSGDRVKTDRRDSQALARLHRAGELRAIYVPDDTDEAMRDLVRAREDAVGGGTQAKYRLKAFLLRQGRRYPGREGWTLPYRRWLADLSFPTAAQHITLQEYRDTIDETERRIDRLTEQLRQLAPTWRWAPVVNALQALRGVSFITAVGVVAELGDLTRFRHPRELMAYLGLVPSEHSSGSSVRRGGITKAGNPHVRRLLAEAAWAYQGIPRIGRQHAYRQEALPKVVCDIAWKAQLRLTVRFKRLVARGKAKPKVATAIARELTGFIWAIAREVSPAR

SEQ ID NO: 340585 - protein, 425 aa, unidentified
MNYKQNEKINQVKESTLVVGIDIGSTTQYARAFDWRGIELGKVFPFSNSREGFESFKAWMQHLQDKYKKLDAIVGIEPTGHYWFDLGAYLEDEGILLVMVNPYAVKQTKELDDNSQSKNDRKDPKVIAKLVTEGRYSAPYTPDGVYADLRIMVANRKRLIREMTQIKNRFARWFAIYFPEYTDVFGDYEAQSSMLLLKKVCTPEAIVELGAEKINKIWRDAKLRAVGMKRATTLCETAKRSIGLKKGSSAARYEMKLLLEDYEYKKAQLDAVMEEIEKLCRKIPESEQMLAIKGIGVITVAGFLAEVGDVRRFESPRQIQKLAGLSLRENSSGKHKGQTTISKRGRSKLRAVLFNAAIPLIAKNPEFKSLHEYYTTRANNPLKKKQSVIAISCKLIRVFYAILANGVTYDAQKMLSDIHRQPQAA

SEQ ID NO: 340586 - protein, 338 aa, unidentified
MEFKRIAVDTSKAVFTLHGVDLAERPVLRRDLRRAGFEVFFAKLPPTEVALEACGASHHWGRRLTALGHRVRLIPPQYVKPFVKRGKNDRNDAQAISEAAARPDMQAVPVKSAEQQAEAMVLSARELLVRQRTQLANAIRGHAAEFGVVTAQGMARLEGLLAAVHSDDAIPQAARDMLAFLAAQVKQLDSQIAQLEQRMQRLHKANPLSRMLAEVPGIGPIGALSLALTVDATRFTSGRHFAAWLGLTPKDRSSGGKQRLGKISKAGNERLRQLLVVGAIAVIKVAKPGSRIASAWLLKLLERKPRKLAAVALANKMARIVWAMMTSGEAYRRQPVAG

SEQ ID NO: 340587 - protein, 377 aa, unidentified
MKKDIRFIGLDVHAETIAVAVAEESGETRWLGVIPNRPQAVRRLIKKLGAAESLWACYEAGPCGYVLYWQLSELGVHCEVVAPTLVPVKSGDRIKTDRRDALKLARSYRSGDLTPVWVPDAEQEALRDLVRAREAAKKDQLRARHRLQKLLLRRGLRPPEGIKAWTVRYVTWVKTLQLEPAALAATLLDYITEVDHAHERIERLERAIDQAIQAAPAEVRAVIDGLQSLRGVARISAATIVVELGQLSRFRRAKQLMGYTGVVSSEHSSGERIRRGAITKTGNAHLRRILVEAAWAYRHRPYLGGALRRRQKNASERVKEISWKAQHRLHYRYARLMGRGKTKQQAMTAVARELAGFVWAIGVEVERQLASRPARAA

SEQ ID NO: 340588 - protein, 361 aa, unidentified
MQAVIGVDPHKRVFSAVALDERGGVIGRWQGSSSRQGVKALQRWGVGCSPGATWAIEGANSLGRNLALALIGVGVDVRDVCPTRTADRRRKLPARGKSDAVDAEAIARELLAHPDLPCAFKTTAASGPDPDRDALAVLARARRQFVDRHRRLLNEAEALLGELPAQLIERLPGGPKVEPRLAMAARLRATGNRATDLRLRLLRVQAHEERTLSKERDSLEREIASLLHDVGTSLTHLFGLGPLGAADLLVEVGDPRRFRSADAFGSYTGTAPIPASSAELHGRPVHHRLSRHGNRRINSVLHIMAVTRLRTHPETQAFLARVTATGKTRRDALRIVKRRLARLVWLTMMRDVASGLQKAVA

SEQ ID NO: 340589 - protein, 438 aa, unidentified
MSNKVIFNLDELFISVGIDVGADFSWMSIALPNQQFVGKPYKILHNSIDSLTTAVSKIKEAEELYSLESRIFLESTGIYHYPLFCYLRDKGFNCSVINPIITKNSTNINIRKVHNDRFDSKKAALVGLKPDLKVSLMPSDLALNCRNLCREYYDLMDNRSAYVNKLQGELRMAFPQYLGIFSKVTINTSLTLLETYTSPSAFLEADKQEIIDIIKSTARFGLTYAQNKYNAIIQAAADANQFGYIIDSNIKRIRLYISFIRKYDEEINSILESLHELVDANEDADFVKQIHLIETFKGAGFLSAVSIMGEIGDFSAFSKPKQLFAYFGLDPAVKQSGKFEGTKVQMSKRGSAIARRVIHTLTLQSISISRNGETKNPVLREYYLKKCDSKPKLVAMGAVSHKVCNMIFAILRDNKPFKIIAPQEHIKQYNAAKCDIAA

SEQ ID NO: 340590 - protein, 344 aa, unidentified
MPVSTSHWKVQGVCVVDATGRIVREAKVASEPEILIGWFRSLRFAVTRIGLEAGPLSQWLYAGMRDAELAVELLETRHVRDAFKAMPVKTDRKDARGIAQLMRLGWFRAVHCKSLPAQEVRALLAARKLLQTKNHDVEMSLRGVLRGFGLKVGPTTPRTFPGRIRELVATHTTLSTVAEALLAARSTLFEQWQKLEKRLRSLAREDGRVRLLMTAPGVGAIVALTYASAIDDAARFRSSKSVGAFRVDPREVSVGRDRRLWPDFQDRRRRRAHRPLRGGQRHSDPAGERFYLEELGDAPGRSRGHAQSKSRACPQARRGSPPHVGRRNKLPGRQGGYSGHSPLT

SEQ ID NO: 340591 - protein, 311 aa, unidentified
MEHACFVGIDVSQTHLDVHVRPTGDSFRVNHDDTGVGTLLERVRPLAPTVLVLEATGGYEVPVAATLASAGLPVAVVNPRQIRDFARATGQLAKTDTLDARVIALFAEAVRPAARPVPDEQAQALGELIARRRQLVEMLGAEHNRRRLLRDRRLQRHLDAHIAWLEEALRRLDHDLTPLIRSTPVWRETDDLLRSVPGIGPVTACTLIADLPELGRLDRRRIAARAGLAPFARDRGAFRGRRMIVGGRGHIRRVLYMAPLTAIKHNPAIRTFYLRLRAAGRPGKVALTAAMRKLLTVLNAMLRDRRPWRPA

SEQ ID NO: 340592 - protein, 314 aa, unidentified
MSTTEEINVGVDTGKSQLDFYVRPLDQTFSVPNTPAGIRDALQQLKKVNLTRIVIEATGRLELPFVIAAQKAKLPVCVVNPLRVRRFAGAVGKLAKTDQLDARIIAHFGEGMQPEPTGIKPQNVRLISDLLVRRSQLLAMATMEKNRLSILPKALHASLNRHLKQLQVEVKKIEQLLDKHIDQTPDWQEKRDLLMSANGVGKVLAYTLLSDLPELGQLNRKAIAALVGVAPMNRESGDYKGKRHIRGGRARVRKVLFMAIMSAMQSNPKLKRQYTALKAAGKPPKVAMVACMRKLITILNVMVKTGQHWNPELA

SEQ ID NO: 340593 - protein, 352 aa, unidentified
MIVLGADMHKSSHTLAAVAATTGEMLDEKTAAVGARGFDAVLRWARGLGGDRVWALEDCRHVSGSFERFLIARGERVVRVPTRLMANTRRSSRERGKSDRIDAIAVARAALAEGIATLPTAELAGPELDVRLLVDHRERLVRQRVGLNNTLQWHLHDLWPELELPGSSLFYGRWGPRIARRLARAEQTMRVRIARDELRRLRELTQAINQLEREIAGLVAQVAPQLLCEPGFGPLTAAKLVGEIAGADRFSSDAKLARAAGLAPIPVSSGRTNRHRLDRGGNRQINAAIHRVAVTRARCHPETIEFLARKKSEGKTHREAIRCLKRHLARRIWHLLRAPHPVPETAPYPSTS

SEQ ID NO: 340594 - protein, 315 aa, unidentified
MTITSEEYVGIDVAKDKLDVAVLGQKATSETLNTKRGITALVKKMYQLNPKLIVVEATGGYEEALVLALYEAGIPVALVSPQRVRQYAKARGLLAKTDKLDAQNLAEYGKNIQPRLFVAKSEEGRRLSAIMGRRRQLADMQKAEKNRLRTAYLEMKSSIQTVIDCLEAEVERLDEEIRNFMNEHKNFKEQEELLRSAKSIGPVTAATLLADLPELGKLDRKQIAALVGVAPMNQDSGKKRGYRKTKGGRPEVRSVLYMSALSGIRYNPIIKAQYDQLVKRGKEKKVAITACMRKMLTILNAMMRDQLPFREVSMV

SEQ ID NO: 340595 - protein, 311 aa, unidentified
MTETNIGIDISKDHLDVHRLPGDERRRFDNSKAGHKALIHWIGETPARVVYEPTGYYHRALERALAAAGMPIAKVNPRQARRFAEATGNLAKTDALDAAMLTRMGAVLSLQARPVPSGIISDLRDLRTARNALIKDQVAAQTRAKAITLPLLKRQNAARLKQIDAQREAVDAEINALIQGDPDLAQRFAILCSIPGIAEVSAAMLLIEMPELGSLDEKQVAALAGLAPIARQSGNWKGKAFIRGGRRQVRQALYMPALVAIRFNADFKAKYEQLIKAGKAPKQAITAIMRKLIILANALLKKGRKWQTQLA

SEQ ID NO: 340596 - protein, 422 aa, unidentified
MRSTQEKKLGMVTQATLIVGVDIAKKVQWARFCDYMGRELCKPLRFENTTEGFECLRETIEKLRVAKGLFRALVGMESTGHYQKTLIHYLTLQGYTVVLVNPHHTKRAKELDDNSQTKHDQKDALTIARLVKDGRFYECYQPEGCWAELRVLTATRLDVKRQENACKNRIVAVLDEYFPEFATVFKKPLTGKASLHLLKECPLPADILALGAEGVLIEIKKAVKKSVGAKKVRQLLKAAESSVGVTYGLEAVRLRLRILLSEHELYRLRLEEIEAAMERELDKTRLKERLLRIPGIGVVSLASFLGETGDLNRFSNGRQLVRLAGYNLTENSSGKSKSQRGISKRGRKVLRNILYQMALVMVAKNAEMKSIYQRLKIRERNPLKKKQALIAIACRIAKMLFSIAKHGETYNPGRVADIQKAA

SEQ ID NO: 340597 - protein, 350 aa, unidentified
MPMLAEVVDAVVGGDTHRDTHALELTAPSGATIATLMIGNDERGFAEAIAWVAEHAPGPRVVVGLEGTRSYGIGLARVLQAAGLTVVEIERPRRGERRRGKSDPIDAHLAALHALRLDADRLPTPRADGDREALRILLGARRELTTAKTRTINRLRALLLTGSDADRALSRGALSSDRLAAITRRRGGQHETREYAVRRAEARRLALAISGIDRELADNKWHLADLVTHLAPQLLAKRGVGPVSAAQAIVSWSHPGRCRNDAAYAALAGASPIPASSGRIVRHRLNRGGDRHLNRTLHDILLTRWRTCPRTRAYIARRRAEGKTDPEIRRCLKRYIARELYRSLNTAMAA

SEQ ID NO: 340598 - protein, 357 aa, unidentified
MNFIGIDLHKKTISVCVVNQERKVLKRRTLSCAEASKIGAFFREWGEFRAVVEATASYEWLWQLLEPLAQRLVLAHPGKLRVIAESKNKSDKLDAQVLAEFLALDMIPEAYRPTPRQRQHRTLVRQRVFVKKNLTRVRNKIRRVLSNYNADRPDLFTKAGLTYLQEAKKKVSAADQFVLDQLLEEWHYHRRQFQAVGRQLQAFARQAPLKEKEIRAVLRSMPSVGPTTVEVVLSEIGDIERFRSNKRVVAYAGLAPGQRESAGRKKELGITKQGSGLLRWVLVQTAWRTLRCSLRWRSVYENLKKRRGSKKAIVAVARRLLTVMAALWRTGQRYRHAAQDGAPTVPKARRARRAAQA

SEQ ID NO: 340599 - protein, 340 aa, unidentified
MGVFVGIDVSLENSAVCAVDEHGKLLKETKVASDPGALNACIRSMPGVVEAIGIEAGPLSQWLHKSLTDLGLPVVLMETRQVKAALKAAPVKTDRRDAAGLARLLQMGWFRPVHCKSLSAQELRVLLGARRSVQDAAINIEMSIRGMLRNFGLRLGRIGKVSFEDRVRELTDGNKLIQLSIEPMLRARAALRSELVRLERMARDITREDPVCRLMMTMPGIGPVVALTVRSTIDDPGRFRRSKDVGPSIGLTPRRYQSGETDIIGGVTKAGDMDMRTALYQAATVVIHRSKKPNWLRAWAEQVVRRRGVKRAAVALARRMGVILHRMWVDNTEFQAAKMA

SEQ ID NO: 340600 - protein, 422 aa, unidentified
MNKQQNITQLGNDTIAVGIDWADTEHVVCLIDRHDRPNISTLVQSPEAIDEWVAELGRRFPGKTIAIAIEQSKGPLIHALMKYEQLVLYPINPKQLSRYRDALYPSGCKDDPVDAKLLARFLKLHAGQLRPWKPDSEATRKLARYTEIRRKIVDERKRLNLQLGSTLKQYFPLMTQLFGRNTSRMVAALRRWPSLAKLKRAHIDRLRTFLKEHGMANQQKQTVVIEAVRAAVPLTRDKAIVETNAIYAQMLARQIQDLTKTIQQLDETIRAATEKHPDRNIFRALPGAGDALVPRLIAAFGSDRDRYNSAEEIQCQSGIAPVTRQSGKTLHVSRRYACPKFLRQTFHEFADHARKWSAWSAAFYRQKRETGTKHHAAVRALAFKWIRIMFQLWKTNTIYNEAQYIQQLKKRNSPLVKLIQNA

SEQ ID NO: 340601 - protein, 349 aa, unidentified
MGEVSTIGVDIAKSVFQVHGVDAEGTVVIRKRVGRARVLEFFADLPPCRVGMEACATAHQWAREFKKLGHDTRLMPPTYVKAYVKRGKNDAADAAAICEAVTRPSMRFVPIKSVEQQSVLMLHRTRDLLIRQRTQLINALRAHLAELGLVAAKGREGVHQLAAVVMECGDERLPSNARFACQAIVTQLHAAQIEISGLDKRITQIHRVNVDSRRLDTIPGFGVLLSTAVVATMTDPKAFKTGREFAAWIGLVPRQNSTGGKERLGSITKQGDRYLRRLLVVGATSVINSARARPYKYPWVIELLGRRPTKVVAVALANKMARIAWAVLAKGEPYRAPTRPWNAVVPAAA

SEQ ID NO: 340602 - protein, 427 aa, unidentified
MPYKVAGIDVHKRMLHVVVSDVQVDGEYDFTRRVFGSLPEALRSLAAWLLEQQVEEVVMESTAQYWKPVWGTLERYWKPICQMREGALATSGTLHLALALSNRGRRGRKKDFRDAERLVKRLVAHELTLSFVPDVEQRLWRTVVRTKYQLTRNRVQLQNRLEALLEEAHIKLSSLVSDLLGASARRMLGAIAGGETNRETLAALADRGLRATQEQLQDALGVCQELNPVYRRLIKMVLDEVASIDKRIEQLNQEMANLLRPHEDQVKRLAEVPGLGVDSAQQVIAEVGATAATFPSEKHLSSWVGACPGDEESAEVNRSRRSPQGNRHMRRILNQAANAAVKYKGSIFEILYCRYVPRLGHNQTIGIIAHKLCRLVWKILHRGIRYEERGPEVKKASKQKRTRKMIQALRRLGYRVEPSPSQSPITP

SEQ ID NO: 340603 - protein, 345 aa, unidentified
MDYYAGIDVSLESASLCVVDATGRIVREAKVASEREILIGWFHALGLAVTRIGLEAGPLSQWLYAGMRDAGLPVELLETRHVRDAFKAMPVKSDRNDARGIAQLMRLGWFRPVHCKSLPAQEVRALLTARKLLQTKNHDVEMSLRGVLRGFGLKVGPTTPRTFPGRIRELVAGHTTLSTVGEALLAARGALFEQWQKLEKRLRSLAREDERVRRLMTAPGVGTIVALTYASAIDDPARFRSSKAVGAHFGLTPKKYQSGETNVTGRISKIGDGGVRTALYEAANVILTRPVKGSTLKSWGMRLAARAGMRKAKVALARKLAVVLHRMLADGTNFLADKAAVAAAR

SEQ ID NO: 340604 - protein, 309 aa, unidentified
MKEQLVYCGVDIAKSYLDAAIANEKRRLANDPVGHREFIKWIKQIEGEVQVICEPSGGYERPFIHALVRAQIKVSLVQANRVRAFARAAGILAKTDRLDARVLCAFGEAMEPPMVTASKMEQEHLRELESQRRHLSRLLVMEQNRGARLADSSVRVLNGSLIKQLQKQIEKIDLLIKEHIARSQELSAKAQKLTAISGVGARTAALLLAQMPELGQLNRREVAALVGVAPFNRDSGKLRGKRTIFGGRRCVRHGLYMAALVAARHNPILRSFYQRLRGAGKPAKLALTATMRKLLIVLNSALKTDPITT

SEQ ID NO: 340605 - protein, 416 aa, unidentified
MELQKNKVCGIDVHKRFLIATILFRDGKKDTQRFSVTLEDLLKFRDWVIENGCEQVAIESTGIYWHPVHSVLEGKIDLIVANSYKIKHTPGRKTDVGDSEWIAELCLNGMIEPSRIFPKDDRELRRLTRAREGYVKQMTQEKNKIHQSLDSACIKLASVISDIFGKSGMYLLNCVLEGRDIDEIIEGIPSGRLKKKADQIKESIKSRLEISQVILIRGSLSLMKSIQERIDELDGEISARIQYRKNDLAIAMSIPGTGFVSATAILAEIGNCTDFKKPEQLAAWCGLVPSLYQSAEKTILGGITKQGSKHIRRMLIQVAYAISRTKDSKLKKFFLRIQAKKGSKVAAVALARKVLCILHHLLMNQEMYLEDRDKKNMRQKVLTPPSPIKMSMQEMIDCIVRAGYVVTKSDSRGGFG

SEQ ID NO: 340606 - protein, 341 aa, unidentified
MNAIYYIGLDIHKKTIAYCIKKVDGTLVRQGTVCAERKALRQWQTELPGPWYGAMEATIFTGWVYDFLKPYAVDLKVAHPAMLKAITAAKKKNDRADAEKIADLLRVNLLPESHMMSEELRELRRILRYRNMIVRTAVKMKNKMSGLLMEVGAQYSKKRLYGKKYFSTLLERVEDVPVSVKELLKLSRSGFELFDCIQKKLVNALLKNKQIHGRVQRLMSIPGVGEVTALTWVLEIGELDRFSSSRHTISYCGLCSAQHESAGKEQRGPISKQRNKHLQTTLIEAAKLAPRWNEQLALLHEKELARGNKNRATLAVARKLVEFMMAVDRRESEFETMKLAA

SEQ ID NO: 340607 - protein, 415 aa, unidentified
MALKIVYKICCGIDVHKNFVVACIAKTDKQGITTYESHHFSTYTKGLKELLKWLLDRNCKDVCMESTGKYWIPVYNVLEKDCSIVLAHPKYVKAIRGKKTDKKDAKWIADLFKHDLVAGSFMPPADIRQLRDLMRYRFKLTCFKSSEKNRYQNCLTVSNIQLASVVSDTFGKSSQKILDKILENPDDASFDIESLIHGSMKDKLPKLELAIDGYITPEQAAKLKIIKEHFDNLESRKAELEELILALASPYQQEIAIILTAPGFKNTFSAISVISEIGTNMEAFPSAKHLCSWAGLTPTNNESAGKKKSVRVSKAGCYIKPLLVQCANAAIKSKKHPEIRDRYLRIKKRRGHKKAIIAIARMLLTALYHMLKNGENYNSDLYKKSDILPTTREITVEQAILMAQFRGYRIKSATE

SEQ ID NO: 340608 - protein, 330 aa, unidentified
MPERKPLSVGVDVSKATLAVTLRFPDAEQHLTVPNTKTGLTALCRKLGKQDCPVIMESTGRYHILAAFLLTERGYDVRVVNPVHAKRYMVSNTRNRKTDKSDAAALAQMGVTDQKLPPRFHLSAADVQIRHKIGLLASLEHKLQSMRQVVKTYRAFQGSMGLAVSPAERGVEALVKTLERHKETLEREIEAAILADEAKRAAVRLAASVPGITARTAGILCQTLNPSCACAKQWIAFVGFDVAERQSGTWRGRGKLSKRGNGYLRKRLYVSAWGAMHNDAQFRAYYERLRADGRTYREALVIIARKLLRIVFGVLKQRRPFDPVQCILPA

SEQ ID NO: 340609 - protein, 412 aa, unidentified
MELIVERPAALDVHEAQVTACVRVPDEHGHREEHVAEFATTVRGLLGLRDWLAAQRVQQVVMEATGVYWKAPWAILEDEFECLLVNARHVKQVPGRKTDVSDAAWLCRLAEAGLLKASFVPPKPIRQLRNLTRYRKTQIQERGREVNRLHKALEDAGIKLDCVAADVMGKSGRDMLDALVAGETDPAVLAQFARRQMRKKIPLLREALAGHFDEHHRLWIGAILAHIDFLDEQIARLSVMIEEQIRPFASQVELLCTITGIQRRGAECILAEIGADMTCFATARHLASWAGQCPGNDQSAGKRRSGRTREGSKWLDFALEEAAMSAIRVKDHYLKAQYRRHKPCRAHKRALGAVQHTILTTIWHMLSTGEIYRDLGRDYFTKRNPERQTRRLVAQLERLGHTVTLTEAAAAA

SEQ ID NO: 340610 - protein, 346 aa, unidentified
MQAKYSIGIDLHKSVIQVCVLDERGEVIEEFRESIETREEGRIVVERLTTWREGGRLVVEAVGVNRWFVNACHETGLGIVVADPVKLNLQMLGKKTDRRDARELARRLYLGDIDAYGTTYYPTEEEYGVRKILRVRHHLVKVRKQITSQLRAFLNAYKLPARVVLYGTRSMEQLKRLLFPTEELNVCFSSLLSSLESIQQTIEHLSEQIRKRAAEEKLRNVRTALPGVGPQTAATLVYELGDVNRFANAKAVAAYAGLVPRVSQSADTKHHGRLTKRGNRELRWILGEWAVRLLKTNRLAQAWAKPLLRRMHKNKVRMALARRLLIGVYILLKRGEVFSLERCLAV

SEQ ID NO: 340611 - protein, 408 aa, unidentified
METIYERVGALDVHKAQVTACVRVPGPSGREPQLAEFSTTVAGLVALRDWLAAYRVTHVAMEATGVYWQPVWHILEDDFELTLCNARHVKQVPGRKTDVSDAQWLCQLMEAGLLRGSFVPPKPQRQLRTLTRYRKTQIAERQREANRLHKALEDTGIKLDCVATDILGASGRAMLDALVAGTTDPEILADLAKGKLRAKIPALREALEGRFEAHHALVIGAILAHLDFLDEQISRLSEAIEEQLGPFATGVELASSLTGVARRTAEVMVAEIGVDMSVFPTAGHLASWAGRCPGNDQSAGKRRSGRTRKGSKWLGIALEEAALAATRTKNTYLAAQYKRLRPRIGHGRALGAVKHSILIAYWHMFTTGETYRELGGDITVIVREGEGHFPLAPNDPKAAVDFILSHQR

SEQ ID NO: 340612 - protein, 345 aa, unidentified
MKTVIKQVLGIDVSKKELIVCLGKMDSDLQVELCAHAAFANTEKGFAALQKWAVKFAFKDLPLQYVMEATGVYHEALTYFLDSKGEYVSVILPNKINNYARTLTVKTVTDKTASQAIAQFGLSRPLDKWMRPSPVCKKIKQLTRERDQLMNERTIVKNQLHAEQSEAEPNKFTVNRMKKRIVFLNKQDEEIKKELLKLLKSDEKIGATVSLLTSITGIGEITAAIVIAETNCFEHVRNRRQLASYAGLDVKEKQSGTSVKGKSRISKKGNRYLRKALHMSALTAIKYDSKFKAVFDRLVARHGIKMKAIVAVQRQLLEMMFAVHKTRNRYDPNFMQNQVQEMKIN

SEQ ID NO: 340613 - protein, 313 aa, unidentified
MEPQEINVGIDTSSKQLDIFVRPTGQFFSVTNDKDGIKDAIKQLQPLKPKRVLIESTGRLELEFVCAAHKAGLPIVVCNPSQVRNFAKSAGRLAKTDKLDAVDIAHFGEAMKPRLSSIKPEKLRNISDLLAVRSQCLEMGTMQKNRLKRMPKSVHKPIQAILKAIKKELEVIDKQLDKLVSSIAEWRQKRDLLLSAKGVGNVLAYTLMSELPELGKLNRKEIAALVGIAPMNRDSGSFQGKRYIRGGRHRVRTVLFVSIMSAIQCHPKLKPMYKRLVDAGKPKKVALIACMRKQLTILNTMVKNNTYWDENMA

SEQ ID NO: 340614 - protein, 388 aa, unidentified
MYYVGIDIAKYKHDCFIFTSEGEIVLESFTFENTREGFSKLKLILDALDHSQKIKIGLEATGIYGKNLKLFLSSIGYDFDELNPLQVKRFTNALSNRKTKTDKIDASQIARFVSTGASRTYVYSSYHTEALKQLTRARNSLIDERSKHQTVLTGILDVEFPEFKGFFNNKFTDTALYLLNKYKTVKRISRLSHNDCVLLHNKSRVISTSRFEELRESAKNTCGHHFDYNDSLISANLQIIKCLNNEIDKIEKEINSIMSTINSPVVSIPGISAISAASIIGEFGDFARFDNAKQLCAFCGVEPSIYQSGTSYHEGKMVKHGSSNLRRTLFNAVPYIIMHNKTFKTFYNKKRSEGKAYRVAQSHVVKKLLRVIFTLEMTGSTFDPSKLY

SEQ ID NO: 340615 - protein, 313 aa, unidentified
MLNGKVIGIDVGKATLVVGQNGTDETKTFFNTPNGIGKLLKHISQFHPEKVIVEACHYQKLVHRLLTEKGLKVHVANPFRARAFANAFGAHGKTDAVDARMLAEYGIALPTLPTPIPSIDEESVKALLKRRNELIHNRAKEKNRRHKSPEMEASYVRSLEFIESEIKYIDAQIDKMLEKDTLKAMCRNVEILESIRGVGRTSALNFIVYLPELGTVNRREIASLAGVAPRNNDSGNFSGKRFVGAGRSNVKHALYMCVLAAVQFNAELKHFYQHLKNKGKHNLICRVAVMKKLVVLMNTLIAEQRNWEPRMAE

SEQ ID NO: 340616 - protein, 450 aa, unidentified
MNLYIGVDIGKELNYASFLNEKGVEIDKRFKFKNNYLGFLKLKDNIDKLTYDYNLKYDDILVGFESTGHYWINVDWFLTEKLNIKTVMVRNDAVRHTRALNSQGKGKNDSLDSRTIAECLKNGYYFDVQGRKEDYIVLRRLTRERSELEKEIARYKNRFRAWLDVNNPIFLENFSNVFSSGALALLKVYPSPLDIIKDSYLEVREKLREVGYSRTNKTLKIYYEEVQTYKNIINGISYADRLEISEYIEALEMYIKKKENLDERIEALMNFLEGKVYNSLSEIKGMPKAQVASLIAEIGNINNFKSAIHLLSYAGLNLQGEGSGKNKGHSWISKTGNRKIRKELYVITFNLVRHNDYFRGLYCYYKSYKRPNEKSSKEMLIALMSKLLRVVYGMLKYNVEFNLNEMLKNYDFRNINKEKFIDEFLGNSEKKQKIIPLEIEDIFLNNRKSN

SEQ ID NO: 340617 - protein, 324 aa, unidentified
MDKDTEPHRYVGIDVGKDQIEVYIRPDGIAFSCGTDPGDLAALVTRVTPFRSTLKVIVLEATGGYEAVIAGALSAAALPVAIVNPRQTRQFAAALGQLAKTDKIDAPVIAHFAEAVKLEPQPPADAQITELRALLSRRSQLIEMRTAEKQRVAKPVNKLARRSCEKILRQLEAEILLIEKAIGKLIDASPVFQGKAALLKTIPGIGDIVARMFIAELPELGQVDRHSIAALVGVAPINRDSGRSHGHRYIKGGRPQIRAVLFMPCLAIVKHNQPLREFYNRLIKAGKPKKLALIAVMRKLVVIANAMIKSGKPWSGASIDAAPV

SEQ ID NO: 340618 - protein, 343 aa, unidentified
MDYFAGLDVSVKDTSVCIVDSTGKIVREVKVASEPDAVLAVLRNPAYHFKRIGLEAGPLSQWLFGALGEANLPIICVETRHMRAVLKAQINKTDRNDARGIAQMMRVGLYRPVHVKTLRSQKLRMLLTHRKLLQAKAIAVENDLRATLRNFGLKVGVVGTVKFEARVRELVENLPDVAELVEPLLIVRQVLREQLGILHRRLLVIVRDDDVCRRLMTIPGVGPVVALTYRATVDVPVRFRKSKSVGAVFGLTCAKYQSGEIDRTGAISRCGDEMVRTTLYEAAQILLVRSTKWSWLKAWAMQIARRRGMKRAIVALARRLAVIMHRIWVDGTEFRWTRKAAAA

SEQ ID NO: 340619 - protein, 428 aa, unidentified
MQYALIQVLPDVPPGGVCAGIDWASTDHVACVVDMAGRVVDRFTAAHDRAGIAGMIARLRRAGAGEVAIERCDGPLVAALLAAGLTVVVITSRQVKNLRSRFSAAGGKDDRFDSYVLADTLRTDRARLRPLVPDTPATAALRAAVRARKDLVAHRVAAANQLRAHLAVAFPAAIGLFSELDGPLSLAFLARFGSQDAAAGLDEDAMAGWLSTLPARGNPAPPAVLCARLRSAPPGATGGDGGAQAGVTAALAASVASLATQIKALEIQIAGQLAGHASAHIFTSLPRAGTLRAARLLAEIGDCRSRFPDPWSLAALAGVAPVTRRSGSHTAHTFRWAVSHQLRDAVCDFAADSRHASPWAASIYHDARDRGKDHPHAVRILGRAWIYVIWRCWQDRTAYDPAKHTALQRLLDQQRAAQAARPAPQEDR

SEQ ID NO: 340620 - protein, 462 aa, unidentified
MTPPPPASPGLRTGNREMRRRAPVSDRPGASPGAAESSLPSQRGPLLSLSVPEAVFFTGIDWAAEAHAVCVMDPSGKVVARFTIAHSAEGLDRLVRKLARLADPAGMPVAIERPSGALVDALLEAGHPVVPVSPNAIKTWRESEVLSGAKSDPGDAEVIAEYLRLRQHRLRTATPYSDQTRALRTVTRTRDDVVDLRVAAVNQLGALLEAHWPGGKAIFADLESRIALEFLTRYPTAASAAHLTEDGIAAFCREMGYSGKRPAAILLERLRSAPARNCGDQLTAAVRDAVLALVTVVKAVTAATRDLNRSVIARLGEHPDGKIFTSLPRSGQINAAQMLAEWGDCRQAYDGPDPVAALAGVTPVTRESGKHRAVHFRWACNKRFRKAMTTFADNSRHASPWAASIYNQARAAGKDHPHAVRILARAWIRIIWRCWQDRTPYDPARHGAAAALKRHREEKLAA

SEQ ID NO: 340621 - protein, 461 aa, unidentified
MKNKHSNPKKKKFKKIALDENWEKINPNACGIDIGARELFVCVPADRDKASVRRFGTKTPDLGEMAQWLKDCRIETVALEATGIYWIASFQLLERKGFKVVLVNPRQIKNVTGKKSDVMDCQWIQKLHTFGLLGGSFRPADPYCVARTYMRLRDDLIAGSTCQIQLMQKALHQMNIQLSHVLSDITGSSGLAIIEAIIAGQRDPIVLAELASRRVKSTKDEMAKALIGDWRPEHLFCLAQAHQMYLRYQLDISQCDAQLADELEKLPNKVDPNSKPMPPKIDRKKQINEKLRLGLYCKFGVDVTAIEGIGPTAALTLLTEVGADLSAFPSEKHFCSWLGVCPDNRISGGKVLSSRTRRVVNRMADVLRMSATTLKSSQTALGAFYRRMVARLGPAEGITAVAHKLARLLYSLIKHGHDYIRTGLEEYERKNADRKMKVLRKMAESLGVQLLEPQLVRAGVS

SEQ ID NO: 340622 - protein, 360 aa, unidentified
MMETMTWVGLDVHARSTHAAALTLPTAELQRARFGAESEAIVAWLQRLPQPVHACYEAGPTGFVLYRTVRAAGIAIDVVAPTKTPRATGDRVKTDRKDAELLARLLPTGSLRPIAVPPPEVEGARDLARAREQLRVDLCRARHRVSKMLLRHGRVYPGKSTWTQAHHRWLAGQCFDNANSELAHLDYLAAVDGLVARRRALDERLSRLAVEGDWWPTVQRLRSFRGLDTLSALVLALEVGDFARFRSPRQLASWLGLVPSLSQSGESSTQGAITKTGSRYARRLLVEAAWHYGRPPRIGVTLRQRQDGQPAHVLQIAWRCQHRLYRLHQLLSQRHKPGNIVTVALARSLACYLWAAAVAP

SEQ ID NO: 340623 - protein, 365 aa, unidentified
MIGNENYCNESSGTVAEVVLGVDTHLDVHLAVALDHLGRRLSSFSVPTTKNGYESLLAWAEGFGPVRCAGVEGTSSYGAGLARHLRAMGIAVVEIERPKRRHLRRKGKSDPIDAEAAARAVLAGEATGVPKSADGRVEMIRTLRSARHSAVKARSQAANQLQGFVVTAPEELRHRLRELTTKKLVSVAARMRPGKDLDDVEAATKFALRSVARRYQALSEEISELDAQLDSLVAEAAPELISLQAIGTHHAATLLLTVGDNPERLGSEASFASLCGVSPVEASSGKVVRHRLNRGGNRDANRALHLICVVRMRIDERTRRYVARRTAEGKSRREIMRCLKRYIAREVYRVLVSAASPPPIGLSTT

SEQ ID NO: 340624 - protein, 427 aa, unidentified
MKKIKIDYLSTLFVGIDIGSRTNVISALNFDQDFLIRMVPVANAQGGAEQMEEMVAQVLSQHHEFKAVIISLESTGFYGVHIANYLSTSEKLAPFSTRVYCLNPNEVKQYKKSFNSLDKNDGIDSFVIADFARVGRIHTEPWRGAQYLALQRLTRHRLHITECIAREKTYMLNNIFLKFSEFAMLNKDEHPFSDKYGATAEAVLTDYLSTEDIVDASVDDLVAFISSKSRGRISDPEQTTYLLQKAAQDSYRLDKCLYEPLTVSIGCSFNCISAFEKELKAINDAIQRSVKGLNPTEYQILTSVPGIGPVYASGILAELGTIRCFKSNDALAKYCGIVWKENQSGEFQAEDTPMNKAGNRYLRYYMIEAAGSVVQHCPEYKAFYDKKFAEVRTHQHKRALALTSRKLIRMLFGLLANGKLYSVEKSR

SEQ ID NO: 340625 - protein, 394 aa, unidentified
MFYVGIDIAKQNHEASIIDAEGKLLSASLTFSNAEQGCQKLIAMLERFRAVKENTVIGMEATGHYWLNIYSYLLELGYNLKVINPIQSEAFRKMYIRKTKNDSKDSFVIAQIMRFGQFSTTALSDENIIALRQLSRYRINLVDSCSDWKRKVIALLDQVFPEYSSCFSDTFGVTSKEILIKYPTPEDMMSVSTRKLTSLIEKSSRGRFRSEKANEIKDCAKNSFGVKFAKDAFAFQIKQMIAQIVFIEEQLVQLEKEISKLLKQTNQVITTIIGIGDTLGAIIVSEIGDISRFDSAPKLVAFAGLDVTVNQSGQFLGTQNKISKRGSPYLRRAIWTAAMRAAFNDPVLSVYYQSLRKRGKHHLTAIGAVARKLCNIIFAVLRDNKPYVPNIISS

SEQ ID NO: 340626 - protein, 413 aa, unidentified
MNEGYRRCCGMDIHKDTVVVCVLPPVGGDGQVVRKVYGTFRNDLIRMRVWLKQLKVTEIAMESTGVYWRPIWNVLDEEGFRLLLVNPVQVKALAGRKSDGRDARRIAEYLQDGRLDGSFVPSSEIRQLRMMLRHRISLLEQRNEVHNQIRDLFETANFKLSSVITDLMGVTGRGIVEALIAGEDSADRLSWKVRGSLRKKEKLVKESLKGYFNDFHRSMLESHYKHYQFLTKEVATFEERIAKAMEPYARQVELLISIPGIDRMVAWHVLAELGIDLKAFPDAAHCCSWAGMVPGENESAGKQKSSRCRKGNKTLRRVLTQSAWAVSHCKSGYLRAFFHRVKARRGWAKAIVATSHKILVIAFQVLKTNTPYVELGGDYYDRLTPARTARKLVQRLEALGLQVQLSSIAGSNA

SEQ ID NO: 340627 - protein, 439 aa, unidentified
MSQSEFAAYVAIDWADRKHYWQLTDSGHQHREHGALLNTPESVDIWATGLLARFPSGSIAVCLEQSRGPLAYQLGKYERLVLFPVHPATMASFRQAFFPSGSKGDPSDAGLLLELLLHHRQRLRRLDPDSVATRLLHMLIELRRKLVDERTRQSNRLTAWLKMYFPQALDWIDNIDSPLGCDFLERWPTLQQLQRAHAETIERFFREHNSRSQARIDERVKAIRQAVPAVQDTALLQAGAAASTSLVALLKALNGAITSLDQQIADQVPKHPEAYLFAELPGVGPALLPRLIVAFGTRREQFQSASELAAYSGIAPVTRQSGKSKSVHFRLACPKFLRQTFHEFAAHSVAKSHWAQQFYQQQRNRGMGHHAAARALAFKWIRVLFRCWNNREPYDEVRYIKALEQRHALPNPPSESPSPASSGGVTDNATPIVSNPNLE

SEQ ID NO: 340628 - protein, 445 aa, unidentified
MPRGESAPDLCPAFRAPVQGSAEVTVARRLELGKDMTDQRQWYVGVDWASESHHVFLTDADGRKIAERVFKHGGEGLAEMAAWLVAASGAEASQIQVAIEVPHGPVVETLVERAFKVHAINPKQMDRFRDRYTLAGAKDDSRDAQVMASALRTDPRCFRLLAAADPVVIELREWSRIAEDLSAERNRLTNRMREQLWRYFPAMLELDGDLGAEWLLDLWEVVPTPAKALRIRDKTIAALLKRNRIRRFDATHVLDVMRKPPVRVAAGTTEAASAHISALVARIRLVNRQLVQAHRQIDALTARLIPPEPEPGQRKQHDVEILASLPGVGRIVLATLLAEAFDALQRRDYAALRSLTGVAPVTKRSGKSCIVVRRQACHDRLANAMYHWARVAVQHDPRSRAKYAALRSRGHSHGRALRSVADRLLNVACAMLKTGTTFNPSPAAP

SEQ ID NO: 340629 - protein, 412 aa, unidentified
MQILHSCCCGLDVHKKQIVACLMFTDSAGKRQKEIRTFGTMTADILSFSDWLAGAGCTHLAMESTGVYWKPIYNLLEGLLEILVVNAQHIKMLPGRKTDVRDAEWIADLLQHGLLRSSFIPSVNQRELRDLTRHRSTLVAERARIVNRLQKVLEDTNIKLASVASDITGVSARKMLQALIDGERDAAALAAMAKGRMRSKQVLLEQALNGRMREHHSFLIAEHLNHIDYLDESIARFTTEINQRLMNEMQEIELLDTIPGVSARTAEILLAEIGTDMTRFPSAKHLSSWAGMCPGNNESAGKRKTGKTRKGSRWLRQVLTEAAHGAAATKKTYLGALYRRLAPRRGTRKALVAVGHAILVIVYHVLKRGEPYQDLGANYFDERDQQNVRRRLVRRLEQLGYEVNLAAIAEVS

SEQ ID NO: 340630 - protein, 412 aa, unidentified
MKDLLEISCGLDVHKEKIVACILTGPLGKPTRSEIREFSTLIPDMIALRNWIVSKNCHHVAMESTGIYWMPIYEILEDAFYGDITLLVVNARHMKNVPGKKTDMRDSEWISTLLRAGLLNGSFIPEKRIREFRDLNRYRKSVIRDITSQKNRIEKFLQSSGFRLSSFISDIFGASGRNIILHLIEHGQIDKTALDSCLKTKTRNRIDEILMSVNGTLSEHQKAFLRILMTHYDSLKKHLAEIETSLEEDMAPFTLQVEQLNSIYGISTTASCAIIAEIGIDMKPFKTAEHICSWAGLCPGNNESAGKRKSTSVTKGNPHIKSMLCEIAWVIAGKRNTYLSAWYWRIKQKKGAKKAIVALARKLLVIIYTMLKQGTLFDESCFETRRKHCEQKQLSRYIRELEKHGYHVEAQS

SEQ ID NO: 340631 - protein, 345 aa, unidentified
MNITTVGIDLAKNVFQVHGIDARGKVVLRRQLRREQVVVFFVNLPPCVIGMEACASSHHWGRTLERFGHTVRLMAPQFVKPYVKTNKNDAADAEAICEAVSRPNMRFVPIKSIEQQAVLSVHRVRQGFVKARTAQANQIRGLLGEFGLIIPQGIRHVAQRVPALLEDASNELPLAFRQLIDRLTCHLKELDQQVRELERQIVAWHRSSELSRKLEKIPGIGPLAATALVASIADARSFDNGRQVSAWLGLVPRQCSSGGKSTLLGISKRGDTYLRTLLIHGARSAIRAAQCRSEIKNVWLANLLNRRHVNIAAVALANKNARTVWALLAHGRDFKPDYVPALAAA

SEQ ID NO: 340632 - protein, 429 aa, unidentified
MTAGTQFAAIVGLDWEDQRHAVCLLPPAGGDPQHGEVAQTPQAIAAWVAGLREQFGGRPVAVCLEQSRGALAYALMQYDFLVLHPINPKQLANYRAAVYPSGAKSDPNDAELLARFLHDHPDKVRAWHPDDPITRGLRMMTEQRRKWVQDRVALTNELQQRLKESYPLALELAGEAVYSAWFLALLEKFPSQRELQRASPRQLAKWLPKPRRAVDDPPAEELPRDRIAAIRKAAPITTDGPVLEHARLAVSHLVAMIQKLNGAIAECERKIEELFAKHPDGQLFASFPGAGKAMAPRLAAAFGTDRDKFRDAQEMQQFSGIAPVTRASGKTKVVLMRWACPKFLRQTFHEFARCSIKYSRWAQAFVDMRKARGDRYQEIVRALAFKWQRILFRCWKNREAYDEDRYLQRLRATGTKLVLTPNQVGSGSV

SEQ ID NO: 340633 - protein, 338 aa, unidentified
MKFKRIAIDTSKHVFTLHGVDEQERPTLRRELKRSQMEAFFSKQDPTEVVLEACGGSHHWGRVLSRLGHQVRLIPPQYVKPFVKRAKNDRNDAEAISEAAPRPSMRSVPLKTVDHQAGGIILKHREMLVAQRTQAINALRGHAMEFGIIAAKGTVKIAALLAELAAESAIPATARAIFAKMGAHIEALDQQIVVVDGELAELHKSNPVSQLLAEIPGVGPLGAITLALTVAPENFASGRHFAAWLGLTPKEHSTGGKQRLGKISKAGNERLRQLLFVGAMSVIRFAKPGSRSASAWLLQLLERKPRKLAAVALANKMARIIWAMMARGEAYRRQPATA

SEQ ID NO: 340634 - protein, 388 aa, unidentified
MHIVTDRPHAPTAIRTDLGAIFISLELSRSTWLITSLSPGGGEKMSKHTVRSGDVAGLWARFSQLKDKVQVRTGQTVPIIVIQEAGLDGFWIHRLLQDKRVESYVVDPASIATSRRRRRAKTDKIDGEALVRALLAYKRGEPRVCAMVRAPTPQEEDRRRICRERKTLTAERVEHVNRIKGLLFAEGITDYEPLSRKRRERLEELRTGDGRPLPEHLKAQIGRELDRLELTLQQIKSVETERDAMLSPSDEGTRAPGAMLQNLKGIGAEFAGVLWSEGLFRSFSNRRQVAAYAGLAPTPWRSGSVAHEQGVSKAGNPRLRTTMIQLAWLWVRHQPRSILTLWFHQRVALNGGRARKVLIVALARKLLIAFWKYVTTGVVPEGAETTAS

SEQ ID NO: 340635 - protein, 370 aa, unidentified
MKRIAQFVGLDVHKDTVCMAVAPGGPGLLVHELGVVPHDVPKVVQRILQLGPPECLQVAYEAGPTGYGLCRALEAAGVRCIVAAPSKTPVRSGDRIKTDRRDAAKLARFLRSGELVAVAPPDRETEALRDVVRAREDVVFAQRRARQQLSAFLLRHDRKWTGKTSWTEAHLAWIRSQLFESEAQAQVLEDYVAEVRRLTARLAEATERVEHFAEAFEACKPLYRALQTLRGVGPIVAATVVAEVGDLRRFPSASKFMSYLGLVPSERSSGPRTSRGSITKAGNPHVRWKLIESAWSYRHRPAHTLALERRSKDAPQEVRDIAWKAQKRLHKRYWAMTGRGKRAQTVVVAMARELAGFVWAIGQVVPSPAR

SEQ ID NO: 340636 - protein, 356 aa, unidentified
MLKKLNSEIAVIGIDIGKNSFHIVGQDRRGAIVLRQKWSRGQVESRLANLLPCLIGMEACVGAHHLSRKLTALGHDARLMPAKYVRPYSKGQKNDYRDAEAIAEAVQRPTMKFVATKTAEQLDLQAMHRVRERLVGQRTGVINQIRAFLLERGIAVRQGLRFLRAELPGILATRTDVLSPRILRIVEDLVGDWRRLDERIKGLSGEIETLARQDQGCARLMSVPGIGPIISSAMVAAIGSGDAFSKGRDFGAWLGLVPKQMSTGDRTILGSISKRGNRYLRALFVQAAWVVLVKLGPKQWDRYGLKSWIEAAKKRLHHNVLAIALANKLARIAWAVLHNGRAFECVRVNETASQSA

SEQ ID NO: 340637 - protein, 394 aa, unidentified
MFLVGIDIGKHKHSFCIINKETGESIVKPKFFNNNKVGFEELLSSFKGLPKKDILIGMEDTGHYHFTLLKFLLDKKYQVALINPVTTDLTRKLSGSHTKTDKLDTLTICDVLTSNQRTKPYRISKVDRFDLYEQKQLTREHHNLKEQSNVLKNRLQKSIDIVFPEFNSLFKSMYGVVYMNILKEFGSADALAHSDIRTIRKCFDFKGRGKRIELTAKELKKAAINSIGFPSIAEVVQIKHLVNQIELIEEQIEELDKKIEEFSINNNSPILSIPGISHFSGTSILAELGDIHNYSKPSQIIKFAGVAPLTYESSQFMAKHTAITKKGSTYLRKTLYQIILPVINNNKVFKDYYNLKLSQGKGYRCAQGHCVRKLLRVIFQLLSTNTQFDPTLLV

SEQ ID NO: 340638 - protein, 310 aa, unidentified
MTGGEADFVGIDVSKAHLDVACDGKRTIARHINDAQGCAALAHELRDAGLVVVEATGGYELEIVLAMQSAGVPVAVVNPRRVRDFARASGRLAKTDRIDAVVIAQFGRAMRPAQTPHIEAGRMALGDLVTRRRQVIEMVVAEENRLEHASPAIAALIKEHVAQLKDQLANIDTAIALAVRADDALSRRKAILESVPGVGEITAAVLIAELPELGAIDDKKIAALVGVAPVAHDSGTLRGQRHIAGGRGSVRCALYMATLSAVRSNPSIKTFHRRLRDNGKRPKVALVAAMRKLVILLNTLVRRDQLWKTI

SEQ ID NO: 340639 - protein, 392 aa, unidentified
MFYVGIDIAKKNHEASIIDSTGKLLDKSISFSNSQAGCSKLVSLLDGFEADSSDVIIGMEATGHYWVSLYSYLIDLGFTVYVINPIQSDAFRKMYIRQTKNDSKDSFVIAQIMRFGEFSSTSLADEDIMTLRQLSRYRLALVDECSDWKRKCIALLDQVFPEYSKLFSDTFGVTSRELLSKYPTPEDMLSVDTDTLTKLLSKASKGRFGISKANEIQESASNTFGVNFTKDAFAFQIKQIISQINFIEEQLEELEIEISNLLHQTNQVITTITGIGDVLGAIIIGEVGDISRFESAPQLVAYAGLDVAVKQSGDFVGTQTKISKRGSPYLRRAIWLAATVAAFKDPALSVYYQSLKSRGKHHLTAIGAVARKMCNIVFAVLRDNKPYVPHIK

SEQ ID NO: 340640 - protein, 391 aa, unidentified
MVCVGIDVAKDKHDCCILDSDGTIRADCFTIPNNMDGFKQLLQTIRDCTKKSDKIKVGLEATGHYSYNILGFLLDNDLTVYVMNPLHTNLYRRSLSLRKTKTDRVDARTIATMLLSDVDLKSYTDTAYHNEELKSLTRYRFDKVRERAKLKQSVSRLVTILFPELEKLVSSLHGASVYALLSEYPGAKQISEVHLTKLTNLLKTASKGRYGKENAIQIRDAARASIGSVMPAKSLELKHTIKLIQELTSEINEIEDSIQQIMDELNPPILSIPGIGVNSAALILAEIGDFSNFSSPDKILAYAGCSPSTYQSGKLTNCYAHMEKRGSRYLRYALYNATKYVCHWNPVFAEYLAKKRAEGKHYNVALSHATKKLVRLIYALQKSGKTYLAAA

SEQ ID NO: 340641 - protein, 344 aa, unidentified
MNVKVIGIDLGKTVFHLIGMDEHGSVVLKKRLSRSQLMKFLVNVPPCRIGMEASCGCHHLGRHLLGFGHDVRLIPAQFVKPYVKSQKNDYGDAEAIAEAVQRPTMRFVPIKTEDQLDVQAMHRVRERLLEQRTSLVNQLRAFLLERGLIVRTGRAYLWRVLATVMAEAEQTVSPRMFRLMSTITDQWRTLESQIAAMDSEIAVIAKTNDACQRLQTVPGVGPLAATAMVAAVGNGSAFDKGRQFSAWLGLVPQQCSTGGRTKLLGISKRGNEYLRRLFIHGARSVALQVKRERHAWGPWMTALQHRTRANVATVALANKLARIAWSVLNRNESYRLLTAPAVTG

SEQ ID NO: 340642 - protein, 408 aa, unidentified
MLCGCSIIYFHSGGIIMVCVGIDVAKDKHDCFILNSEGEILADVFTISNNREGFETLLQTIHSCKCPADKIKVGLEATGHYSYNILGFLLDSGLATYVINPLHTNLYRKSLSLRKTKTDRIDARTIAAMLMSDVDLKPYTDTAYHNEELKSLTRYRFDKVRERSKLKQSVSRLVNILFPELEAIVPTLHIASVYALLAEFPGAQQIAAAHLTHLKTLLEDASKGRYSRDKAVEIREAARRSVGSKMPAKSLELQHTIRLIQELDKEINEIESAIKTIIDEMVSPILTIPGISYRMGAMILAEIGDFSRFESPDKLLAYAGLSPSTYQSGKLNATGAYAHMEKRGSRYLRYALFNAAKYVCIWEPSFAAYLAKKRAEGKHYNVAISHASKKLIRLIFALQVSGEAYKPI

SEQ ID NO: 340643 - protein, 346 aa, unidentified
MTIVETRAITGGVDTHADVHVAAALDPVGGLLGVREFPASPAGYAGLLSWLGGFGTIALVGIEGTGSYGAGLARHIAAAGVRVVEVDRADRQDRRRQGKSDPLDAVSAARAAQSGRARGAPKGRDGAVEAIRALMVAKRSAAGERTRTINQARALILTGPDDLRARFAQQAPAALVAGIASLRPRPGDVAGYATRVALRELGRRAAFLDGQLERLDELIVPLVSARAPGLLALYGIGPNTAALLLIAAGDHPGRLRSEAAWAHLCAAAPIPASSGKVTRHRLNPGGDRQANHALWRIVFTRMGSDAATRAYVERRAKEGKSKAEIIRCLKRYVARQVYPYLRPGAG

SEQ ID NO: 340644 - protein, 334 aa, unidentified
MTGSSDYESVQVFIGVDVGKDTHHAVAVNRSGKRLFDKALPNDENKLRSLISDLKQHGQILLVVDQPATIGALPVAVARSEGVLVGYLPGLSMRRIADLHAGEAKTDARDAAIIAEVGCELSMICGFDDDLAAQATQASNRIRGLLTQIHPALERVLGPWLDHSAVLDLLQRYSSPEKLASQGEKRLASQLCKLAPRLGKRLAADITQALAEQTVVVPGTNAAVVVLPRLALQLITLRKQRDEVAMEVEQRVLTHPLYPVLTSMPGVGVRTAARLLTEVACRAFASTAHLAAYAGLAPVTRRSGSSIRGERPSRRGNAVPVNQTRYPGLTTHAK

SEQ ID NO: 340645 - protein, 407 aa, unidentified
MIPSYFLGLDVAKQKVRVALRGADERFLCERSLPVTAAGLRELLALLGHHVPQPERVLVVLEATGVLHLHWAAALTRAGYTVLVLNPLMARRLHTVKNSIRDNKTDPVDARALCAIGALHGEELRTKYRFTPHPEQLALQRLHTVRKALRSALTNLKKTYGSLLELSFPELDRLLEIDGAGIRALLAQAPTPQAIARKRLGTLQKDWRLRGKAAELHALAADSMADPDLAEANAPALQAILQSLAAVEAQLHSVDQQIDRLTTQSIDPKHQELIQTIPGFGPIIGARVLAYLPAELLASGRRRTAAIRLQAFMGNDPRLQQSGQWTGHVKMSKRGVEPLRTAFFQAAFNASQHDPELKAYYLRKRNAGKKHEVALTHLMRILTGRLVAVLRSQQPYSPKEVLLKHAA

SEQ ID NO: 340646 - protein, 456 aa, unidentified
MVQTKRSHRRQHDLRSIHPNAAAIDIGATIHVAAVGPDRDPEPVRTFKTFTDDLHRLADWFEHCGVKTIVMESTGIYWIPVFEILEQRGFEVLVVNARDAKHVPGRKTDVCDAQWLQRLHEYGLLRASFRPQAEIAALRAYLRQRERLLDYGAAHIQHMQKALTQMNLQLHHVITDITGVTGMHILRAIVAGEHDPNVLASYRERGCHAPVETICQALVGNYREEHVFALTQALELYDVYQAKVEACDMRIKMLLKQLSKASHEPANKLPAIKHRSTQPNALAFDVRAALYALLGVDLTQIHGLGPYLALKLVGECGTNLAAWPTAKHFTSWLTLAPHNKISGGKVLSSRTRRSGNRAAALLRLAATTVGRTDTALGAFYRRLAARVGKAKAVTATARKIAVLFYNVLRHGMDYSDPGASYYEERYRQRVLTNLQRRAKSLGYVLRQVNTEAAGVS

SEQ ID NO: 340647 - protein, 349 aa, unidentified
MSITMIGLDTAKSVFQVHAVDGAGQVVIRRKLHREELLAFFEKQSACTVAMEACGAAHHWGRALTGLGHTVRLIAPEAVRPFVKRGKKNDAADAAAICEAASRPDVTFVPIKSVEQQGTLAVHAARTLLVKQQTMLANAMRGLATEFGLTVPKSMGKLGDLMTLVDADEAMPEEARQVLGALFGQCRALEESIGTLEAKIVAHARRDDAARRLATVPGIGPITSSLIAATVADIGVFQSARHFAAWLGLVPRQHSTGGKTRLGRITKAGNREIRRLLVLGATSMVHRAAGWNSAAGAWTRGVLQRRPVRLVTVALANKMARIAWALMTRKEVYHAKGRPAAAAPAPAAA

SEQ ID NO: 340648 - protein, 320 aa, unidentified
MDAVLGIDIGKTKFHVTLRFADGTRRRKACANSPAGCADLLAWMRRHGATRVHACLEATGTYGEVLATRLVDAGHHVSLLNPAIIHHYAKSRLSRAKTDAVDADVIAEYVAKEHPPLWTPLPREVRELQALVRRLDALIGMQTEERNRAQAGGLTPAVEQSIAAVLGHLEQQIQQVRTQIRTHMDQHPGLRVQRDLLTSIPGIGEATAAVLLAELFNKTFTSARQAAAFAGTVPRPRDSGLQQGRRVMCKVGPSRVRKALYFPAIAATRFNPSLQPLARRLKREGKPPMLIIGAAMRKLIHLAFGVLKSGRAYDRTFAKA

SEQ ID NO: 340649 - protein, 354 aa, unidentified
MNYVGADLHKEQTWFYVMDENGNKISSMSISNSQESLQDFFATIPKPFTLAVEATYNWYFFVDIAERFAENVYLANSYELKAFAKRHKKTDKIDARLIANILRKGFLPTVFIPSREMRQIKELLHYRMNIVRDRCRNIFRLKNILDKLGVDSSGDFTTEKRLRNIPTETLPEYYRYAICDYIKRIIELNQTIHRMKTYLKKVFSSDEEIQHLITIDGLDYFSAALIKSEIIDIKRFATFSRLCAYAGLAPRVSQSGSKEAKHGALMTNRRKKLQWILLETVFHFIKSTEENKNRYDELTIRIGANSAKVVMARQMLKIIYHVLKEQRPYYKNKIEQKKKNKKIQSVATVALYGV

SEQ ID NO: 340650 - protein, 360 aa, unidentified
MPDRIEGLLSLNLQGRHQPLDPPSLPKVEEETMTPTTWIGIDIAKADFVAAQRTQKGFDTQTFPMTSQGFEALRNWLPEAPDLGIVFEATGPYWLRLACWLDELEVSLPYACINPRQLRDFAKASPERNKTDPIDAALLVHFAETFPPSLERPKSLSSQRLRALWRHHLELQNLLDRTRDRQEKASADPRLPAEVAEGLETLLTCLRNELDNVLRQASALVREDTTLRQAHRLLLSIPGIGPKTALTLLAEYGPQLHQATPRQLTCYVGLDPILFESGSSVRKRPHISKQGNWRLRRALYMAALVGVRFNPVLKTFYERKLQQGLAKKSALVAAMRKLLHLVYGVLKHQQPFNPDYGPQT

SEQ ID NO: 340651 - protein, 339 aa, unidentified
MSFPVTEAGVVELLTLLNNTGLTLDRIGIEGSGGLGRPLMLALTAAGYDVREVQANRTADRRKRRRRAKTDIEDAEAIARETLSDPALPPAGKHVAPSPAWETLVAVRDWRESLVQQRVRLLTEAEPVLVSLPLHLREQLPTTSRVLAALKRLTHLDDITSSLSASDRTKLDRLAATLIDITAISARIKDLDKQIPALLKNLGSTLTTIHGVGVVTAMTLLTEIGDPHRFTTEGQFARWCGIAPVALSSGEGDGPPRRHRLDLGGNRRVNSVLHIVHVTQARCHPPAQAYLARLADEKKPKRMARRSHKRQLANVIIRHMWTDTAHLTAADQPTTAAAA

SEQ ID NO: 340652 - protein, 342 aa, unidentified
MKDTMIGIDLAKNFFQVHGASMTGEVKFRKKLSRAQFHRFMATQPAAVVVMEACGSAHYWARAMVALGHEAKLIAPQYVRPFVKRQKNDMADAEAIVVAAQRPEMRFVEARSQEAQARAMLFRGRERLVHQRTELVNALRSHLYEFGRTYPQGIGQIRRIAEALEDPCCDLPVLVRDECRDILGQIAEKTERIEARTKKIKALAEATGIARRLQTMPGVGPLTALAVEAFAPPMDAFRCGRDFAAWLGLVPRQHSSGGKERLGRVSKAGQADIRRLLIIGAMSRLNWMGRRSIPEGSWLAQLRARKPKMLVAIALANRMARGIWAMLTRNEDYMEPATVAPA

SEQ ID NO: 340653 - protein, 414 aa, unidentified
MEIVYRCLAGIDVHKKMLAVVVRQDQAGEPSYERRKFGTTRSEIEHLAAYLVQHRVTEVVMESTAQYWRPVWYGLEAHFALHLCHPLRTRGRRGRKDDFRDARRLVDRLHSGDLEDSYVPSAEQREWRWLTRTRVDLKDKIGMVRNQVEGLLEQAGLKVTAVFSDSFGASGWAILQRLAKGEDDVEALLGELRGALYKKKTAMREALAGRLSSTAQLLLKQYLAQVQLLREQVAEINQALGEAMKPYAAILHRLCRMPGVDLAAAQEILAEIGPKAAAFPSADECASWVGAIPGSQISADINYSSRSPKGNRYLRRLLCQIAWAAVHTKDTFFASLFQRLKPRVEAKGAVWAVAHRFIKLIWLMLHEEVDYQEKGPAAKNPNTLRRKFRRLIKDFERLGVDPRTLIQEAIQSPA

SEQ ID NO: 340654 - protein, 355 aa, unidentified
MVLHVGLDLSRRRVDVCAIGESGELVGQFRSPVDRDGLYGLARRLEPYGERVRAVVESMNGARFVHDELTAYGWRVLLCDAQKVKGLAPLACKTDQVDARVLAELSWRDLVPAIWLPTAGVRRERERARYRMRLVKHRTTLKNRVHSTLIAHGHQAPVSDLFGAQGRRLLASLELPEPWAGTTNATLELIDDLDRRIAGIERELQRAGAEHRYVPILMTAPGIGWILAYTIAAEIGEIERFPTAKRLVSYTGLCPRVHQSGEVDLRGRLSKHGPRYLRWALIDAAAHASRHPIYAQRYQQIKRRVGRQRGSKVAQIDLARRLAEAIWHMLTKNQPFTPFTPAGAARPLAATTAPH

SEQ ID NO: 340655 - protein, 318 aa, unidentified
MVCVGIDVAKDKHDCCILDSDGTIRADCITIPNNMDGFKQLLQTIRDCTKKSDKIKVGLEATGHYSYNILGFLLDNDLAVYVMNPLHTNLYRKSLSLRKTKTDRVDARTIATMLLSDVDLKSYTDTAYHNEELKSLTRYRFDKVRERAKLKQSVSRLVTILFPELEKLVPSLHIASVYALLSEYPGAKQISEIHLTKLTNLLATASKGRYGKDKAIQIRDAARTSIGSVMPAKFLELKHTIKLIRELTSEIDEIEVSIQKIMDELNPPILSIPGVGIQSAAMILAEIGDFSNFESPDKILAYAGCSPSTYQSGKLTNC

SEQ ID NO: 340656 - protein, 421 aa, unidentified
MSQRTLSKKLSSLKPGTLYVGVDLALGYNVAVVLTERAKQLTRFRFPNERDGYDYFYHRLATLQQRHQASAVLVGMEPTNYYWKLLAADMEQHQPDYGYRLVNPYTVKKNREGDHLDQSKDDNRDAFTIADLLRTGKYTETRLLQGGYAELRQYVTLHTRLQKDLRRQKMLINNLAGQLFPELRQVFEDFTGLTAVAMLRRHAVAMVVKALSEEAFIAGVRADFEGRRLLTSRLRRAHHLAQQSVGLQADSEALQLALRLHIDTWQALQQQLISVDTALAETFLALPEAPYLLSIPAMSLVSAATILAEIGDPSHYTNGRQLIKLAGIQPVPNTSGRKTRSQTPMSHKGRPRLRTALFFAVMRLVRLDSAFAQAYQQLKQRAKNPLTPMQALGALMNKLLRIVWALIRQRPFYQPDLPAVV

SEQ ID NO: 340657 - protein, 341 aa, unidentified
MSNANSYIGVDLHKKTCFITIMNESGKIKKQTEISTDADKVSKFFSKHTDASVAVESTMNWIPFYENLESLGCSVVLSNPLQTKAIAAARIKNDKVDSKILADLLRTNLLPTAYIQPREIRDLKELVRQRVNYVEIRTRIKNKIHSVLFKNNLKHDFTCLYGKAGMIWLRQLELRDIYRQEMDRYLTTLNLLDKQIAEMSDQIMATAKTDYDCKLLMTIPGVSYFTALVVKSEIGDINRFASAGKLCAYAGLIPSTYASAEKIRHGRISKRGSKWLRKALIDSVTSGSKHPSRLGFFYRKLKKNKGTGKAKVATARKLATIIFAMLTDKQPFREFAPVKQR

SEQ ID NO: 340658 - protein, 342 aa, unidentified
MSGMIIGLDLAKSVFQVHAVDADGKVVITRKVRRSQMLEFFGRLNPCLVGMEACPSAHHWARELSALGHEVRLMVASYVKPYVKRQKNDMVDAEAICEAVTRPTMRFVPIKSESQQAILMVHKTRALLVRQRTMLVNALRGHLTEIGVVAPKGIRRHADLVERVLAHGADEIDVPPLVRDIVLSSARQIGSLNAEIKELERKILEWHRTSEASQRLATIPGVGVITASAMAATVVDPAAFRSGRDLAAWLGLTPRSNSSGGKERLGRITKAGNRYLRTLLVIGATAVVGFSRRTTEGPLMSWVRKLLQAKSARLTTVALANKIARICWAVMARKAVYGEAAA

SEQ ID NO: 340659 - protein, 350 aa, unidentified
MEKYAGIDVSLELSSVCIVDAQGTIVKEAKVASEPEALVGFFEALGFAVKRVGLEAGPLSQWLHARLKQAGFETVLLETRHVKAALSAMTVKTDRKDARGIAQLIRMGWFRPVHAKSIGAQEVRALLVARKQLLGRLIDVELSIRGILRGFGLKVGPVTRKNFEARIRELVAGQATLERVATAMLSARLALKAEYGRLHKAVLAIVRDDAVCRRLMTVPGVGPLVAITYRSAIDDPHRIVKSKAAGALFGLTPKKYQSGEKDVTGGITLAGDEIVRTVLYEAANVLLSRITRFSKLKRWGMDVAKRRGSKRAKVALARKLAVILHRIWVDGTTYRWAEGVDGSVGHVEEI

SEQ ID NO: 340660 - protein, 322 aa, unidentified
MNIYNDYLGIDISKETFDVINKEGQHLQYCNNNKGFLRFYKVISKGSLCVMEVTGIYHLCLAKFLYSKGIAVSVVNPLRIKRFSQMHLRRNKTDKADAQIISLYAQKQELELWSPAPQVIEQSKDIYQIMEQYIEFRAGLKNKLDALKSKDAPERLIESIISQIDHITGSINELQTELDELIIGYNPVMLSNITSIVGIGQRTASLLIVATEGFKKFDNAKQLCSFFGLAPTETSSGTSVKGKQKISKMGNPLVRKKLYMCSLQASRYNKTCIDLYQRLLAKGKPKKVALIAVANKLLKIVFAIAKSGLPYDREYMSYIASR

SEQ ID NO: 340661 - protein, 421 aa, unidentified
MKKIKPKTIKVVNQKVLIATIDGGKDTHYGYYRCPDGTESKSLPFWNNGRGFCEFWERILTAAKTHGLEEIIVGFESTGPYMEPLAQFLRNKKGVRLVQVNPMHTKRLKELPGNSPLKTDRKDPKIIADIIELGHALTVVIPDGPAAELRRLTQGRERTIASRTRLFNQLQCILASFFPEFLKVMKDVKTASARHLLKNHPMPHDIVAMGLPALTAELRKVSRGRIKEDRGRELFEASKESVGIHAGRDSALMEIELILETIAAYDVFIEKVEAEMERYLNEIPYSRVILSLKGVGPVTTAGLIGEVGDFTKFSTISEVLKLAGLDLYEISSGKHRGKLRISKRGRPLIRKLLYLAALSAVRKGGVMHEWYQRALGRGMIKTKALVGVSRKILGVIFALVRDHSVYIENYTKQVPTLQKAA

SEQ ID NO: 340662 - protein, 343 aa, unidentified
MIEVTTIGVDIAKSVFQIHGANAVGEVVIAKRLTRGKVLAFFEKLPPCLLGIEACPTSHHWARELTKLGHDVRLMPANYVKAYVKRSKNDANDAAAICEAVTRPSMRFVAIKTKEQQAASMLHRSWQLLIRQRTMLSNAMRGHLAELGIVAPVGRKGLATLIKAIGEAQDTRIPVMARRCLAGLARQYMAVQDEIGALEKHIHAWHRSNEMSRRLQEIPGIGPIVATALVASIPDAKTFSSGRNMAAWIGLVPKQHSTGGKQRLGGVSKQGNRYLRWLLVVGAMAVIRYAKQHGFKKRPWLARLMERKPTRVAAVALANKMARMVWVVMARGERYTEPALLAG

SEQ ID NO: 340663 - protein, 437 aa, unidentified
MTSPCQFYYFKNQEVILLSFKIFRKNCCGLDVHKTWIYACIGITDANGRTDYKQARFSSFSKGLKELCDWLAKYNCSEVCMESTGKYWIPVFNILEKADNSIILAHPKYTKPQKGNKTDRKDAKWICDLFMCDMIKPSFIPPADIRHLRDLVRYRFKLTCMVTGEKNRAQNCLTISNLKLDDVFSDVFGKSSRSITEHMLTHPGELFDVKPFVDGRCKTPVEEIQAAVDGAISPEQAIKLRQCLDHIDELDKHLEQIEREILRLSDKYQAALDLIRTVPGFDKNPITAIQILSEIGGDMSVFPTAKHLVSWAGCCPRNDQSNKKIKSTRISRAGTYFKPILVQVANALLRSKKHPEITIRYKRIKAHRGHKKAIIAICRMLLTAIWHILSDLKPYTAEGFLESRPVNESKVLTTSQALNLLKQRGYIIKDDVIPTMN

SEQ ID NO: 340664 - protein, 422 aa, unidentified
MEPEKIDYAAWIGLDWGSDKHAICLQPAQCSAALEHCSLEQKPEALHGWFMNLLARFSGQKVAIAIEQTRGAVIHFLLGLDSVHIFPIHPKSLKNYRDALHPSGAKDDPTDAELLLQFLTLHQNRMKPWIPDEPEIRLLLRLVEFRRKIVGKRVRLTNELTQLLKEYFPAALDCAGDLDKRMACDFLSKWPTLEKLQKSRPETIRRFYQEHGSRSCNVIDDRLTQIRSALPLTTDVPVIEPSVFMVNTIAPQLHSVIDAIAQFDRRIKEVFQKHPDAQIFNSFPGAGPALAPRLLVAMGSDRSRFNSSLEVAEYSGIAPVTERSGKSKWVHRRFACSQFVKQSFHEFAAQSILYCNWARGYYDQKRNEGKRHHAAIRALAYRWIRIIYRCWKDRSPYDENKYVKSLQQRKPGWIQSFPTIDS

SEQ ID NO: 340665 - protein, 343 aa, unidentified
MQIRSVGIDLGKTTFHLVALGDNGKVLLKKKFTQRQLIVFTANMQASLIGMEACSGAHFLGRTLREQGHDVKLIPAQFVKPFVKSNKNDFIDAEAIAEAVDRQNMRFVPIKTDDQLDLQALHRVRDRLITRRTSVINQLRAFLLERGLVFAKSPARLRERMPEILENADEDLTPRMRNLLALLWNEWKDLELQIVQMNNEVELIASSDAACQRLRQIPGIGPLVATAIVAAIGNGAAFRKGREFAAWMGLVPKQYSTGGKAKLAGISKRGNLYLRKILIHGARAVVLRSKRERVAMGAWMTALETRAPRNVLIVATANKLARIAWAVLSSGQDYRAVQQPVVA

SEQ ID NO: 340666 - protein, 327 aa, unidentified
MSKSIVGIDVSKDSLDVVLLKESSNAYASFPNHMAGFDKMMRWLISQGSGQVHACLEATGQYGDGIAEFLYQAGHAVSVVNPARIKRYGDSKLHRNKTDKADAALIAQFCLKETPALWAPLPTYLKQLRQMVRRLEDLQVNYQQERNRLASGVGDAWVVEDITGHLEELSRHIKALKKAIFQVIADTAQLKEQFDLLLTIPGIGKLTAARLLAEMGDIACFEDAPQLAAYAGLNPKGFRSGSSVHKKTRISKEGRALLRYILYMPAIVARTHNPIIRTFCDRLAQRGLPKMAIVAAAMRKLLHLVFGILKHKRPFDPNYLMQPTFAS

SEQ ID NO: 340667 - protein, 315 aa, unidentified
MKYVGVDISKQTFDAFNDELGSRQFNNDSAGFKLFKKWMGTSAQVVMEASGPYYLRLAHDLYSANIPVSVINPLVIRRFCQMNLQRAKTDKKDAASIAQFAQLTNPSSWSPAPEYLQQLLQMQSVMEQLSRQQTSTLNAMEALKQHPMIDKKAQNALSKVAQIQKEQIAKLEKEIMELTRQHYQTEYVSLTSIPGIGKKTAMLLILATDGFTRFENIKQLVAYTGIAPRIFQSGKTINKKPKISKLGMADLRRSLYMCTLRAIEQNEACKNLYERLRQKGKAAKVALMAVCHKLLRQAFAVVKNKMQYKTELSFA

SEQ ID NO: 340668 - protein, 354 aa, unidentified
MAAKPPLVIGGVDTHRDLHVAAAIDPVGHLLGHRSFPATPAGYRALLAWLRGLGRLQRVGVEGTGAYGAGLLRHLRQAGVTVVEVDRPDRRTRRSKGKSDPLDAEAAARAALAGTATGTPKGRDGRVEAIRALRVARRGAMKARTAAGNQLGCLVVSAPEPLRGTLRALSGKELVVAAAGLRPGPDLTDAVAATKAALRRVAHRYQLLSQEIAELDQALELVVATTAPRLVALLGVGTDVAGQLLVTAGDNPNRLVNEAAFAHLCGVAPLPVNSGRTTGRHRLSRGGDRAANNALYTIVICRLRWDPRTRAYMQRRTKQGMSKLEVVRCLKRYVAREVHQILTAPQPPQRLDEP

SEQ ID NO: 340669 - protein, 367 aa, unidentified
MTIRLVTDHSELMSIGVDIGKDVFHIVGFDTAGEIVLRRKIKRLALTKTFEKLPRCVVGMEACLSAHFVSRSLRGLGFQPRIIPAKYSRPFNKGQKNDYNDAEAIAEAALRPNLKTVPEKSQEQLDLQALHRVRSRLVSRRTATINQIRAFLIEQGITVRSGARSLRNSLLTILEKRSDEISPRMEGVIMGLYEDWLWLDERIESTTDEIEMISKREGNCQRLMTVPGIGPLISTAVVAAIGTGEAFERGRDFGASLPGSGMPAYRERGLGLVPQQFSTGGKPVLGRISKRGCRYLRTLFIQAAHVILMRPQNWQNFSFGPWLEQASQRLHKNKLAAALTNKLARIAWSVLRHGKTFDDDRIEATAI

SEQ ID NO: 340670 - protein, 403 aa, unidentified
MNSVGIDISKGRSTIAVMRPFGEVVISPFEVRHTDSELSELARQLKSLNGETRVVMEATGNYHAPVAKLLHDAGLYVSVINAKLVHGYGNNDLRRVKTDRKDAVKLANYGLDRWLTLPRYVPEEDTRLLLKNCYRQYRQYSKVQTVLKNNLISLLDMVFPNVNRLFSSPIRGDGSEKWVDFVAEFWHCRCVSEKSQKAFTNKYQRWCRKHGYNFSEAKAHTIHAEACGHIDVIPKSETTKLLVEQAVAQLRATSAALAALKHEMQALASILPEYPVVMDMFGVGPTLGPQLMAEIGDVRRFYSKKALVAYAGLDAPPNDSGDVTGRHKSMSKVGASSLRRTLFLVMTVYLQNAPLDESVYQFMDKKRAEGKPYRVYMMASANKFLRIYYATVKAYLESLEHTA

SEQ ID NO: 340671 - protein, 361 aa, unidentified
MQKSSTLRRSEKNIFRGQLTMGLDLGDRSSSYCVLDENGEIILEQKLSTTPEAMKQIFGRMPRSRIAMETGTHSPWVSRLLTALGHEVIVAHAQRVRLIVKSRRKDDRLDARTLARIDPELLSPVQHRSAQAQLHLTEIRARAGRVSARTALVNAARGLVKSYGERLRPCGTQQFRRETTNGLSTGLREAWEPLLREVESLSERIQEYDRRIARMAQERYPETALLKQVKGVGDLIATAYVLTIEDPQRFRKSRDAGCFAGLQPGRRNSGESEPQMHISKEGDEYLRTLLVQGAHYIWGPFGEDSNLRRWGQKLSARGGKNAKKRAVVAVARKLAVLLHRLWVSGEVYEPLRNSQKMSAAA

SEQ ID NO: 340672 - protein, 412 aa, unidentified
MEQVYERCCGLDVHKDTVVACLRVPGEGVRRHKEVRTFGTTTAELLALGDWLMANRCTHAAMESTGIYWKPVFNLLESVCEVMLVNARHIKAVPGRKTDVKDCEWIAELLEHGLLRSSFIPPEPIRELRDLTRYRKTLIQQRAAEVNRVQKFLETANIKLGSVATDVLGVSGRAMLEALIAGERDPAQLAKLAKGKLRKKRPALVAALAGRFTQHHAFLLGQILAHIDELDQHIVQCDLKVDEHIRPFVHEIELLDTIPGVGRRTAEAIVAEVGVDMSRFPSAAHLASWAALCPGNNESAGRRRSGKTRRGNHWLRTVLIECSLAATRSHDTYLSSLYSRIARRRGGKKAAVAVAHNILIAVWHILHDGVPYQELGANHFDRLNAERLARHYVRRLQELGLEVTVQPIPEAA

SEQ ID NO: 340673 - protein, 426 aa, unidentified
MRFIGLDVHKDFCEVAVVEDHACWSGPRVRSTPEDLEVFGQSLGPEDQVVLEATGGALAIARILERYAGRVVMANPMAVRAIATAKAKTDRLDARTLAKLLAAGFLPAVWLGDERTRLLRRLVSRHAQLIRQRTRAKNQIHAVLQRTLKGRPPASDLFGKRGRAWLGDQELPADERETVQASLRHVEFLDGELRLVDRTIAEQVLSWPEVRRIMTIPGIGPTAAAGVMAAIGDITRFPTPRHLVAYLGLDARVRQSGSAPARHGGISKRGSSEARHLLVEAAWAAVRTPGPLRAFGERIRARRGANIATVAVARKLAILCWHLLTREEDYAFGRPSLVREKVRRLELAAGAPNRNGYRNPVRVFATPAQRRLEREVGDQAEKAYRRFVKDFRSSGKKGAGATTGARISAARKGQAARQEQAPDPAL

SEQ ID NO: 340674 - protein, 343 aa, unidentified
MDQYVALDVSLQKTAVCVLNVSGRVLIEADVPSEPAALIAFIQTHAPRAARVGLESGPTSPWLWHSLKAAGLPVVCMDARHAHAALSVRPSKSDRNDARGLAEMVRMGWYREVQVKSLAAHERMALLGVRRRLVDMRVEIDGQIRGILKTFGLVVGRGNKGAFAQRARMLAQDHPVLSALIDKLIEVREVAVAKVAALDKEIRRFVRDDLTLRRFMTVPGVGPVTALAFRSTIDEPNRFKRARDVGPYLGLTPRRYQSGETDRQGGISKCGDRFTRTCLYEAASVLLTKVQRWSPLKAWGTRLARRIGSKKARVAIARKIAVILRCIWTDGTEFWWTKETATA

SEQ ID NO: 340675 - protein, 344 aa, unidentified
MKITTVGIDLAKNVFAVHGVNEHGRTVLKKVLKRNHVAEFFANLPACVIGLEACAGAHYWARKLQAMGHTVRLIAPQFVKPYVKTNKNDAADAEAICEAVARPNMRFVPVKSIEQQSVLSLHRVRQGFVRARTAQANQIRGLLAEFGIVIPTGIGHIERQVPELIEDAENELTGSFRLLIQRLMDHLNELGRQVRELEAQIQTWHRSDETSRRLARVPGIGPLTASALVASVGDAKSFRSARQLAAWLGLVPRQNSSGGKNVLLGISKRGDTYLRTLLIHGARSLLQIAKRKECKNGWLNGLLQRRNANVAVVALANKNARIVWALLVHGREFHPDYHAPLATA

SEQ ID NO: 340676 - protein, 352 aa, unidentified
MDATTVAVDLAKDVFEVALANRAGRIVERKRLTRPQFGRFIEGLTPETEVVMEACGTAHYWGRVCQARNLPVRLLPGQYVRPYVRRNKTDRTDTEALLEANRCGGVDPVPVKTVEQQTLQVLHRVRTQWQAARTARINAMRSMLREFGFPIGVGARTALKRIPALLEDATIALPELVRQTVWVVLQEARDLEARIATIDQQLACVVREHAVARRLMQIPGVGVITATALIGAVGHIHAFRRGRHFASWLGLTPRESSSGGRRRLGGISKRGDVYLRCLLTHGARSVLLRAQRTARIAPNQVTRFQQWAVDIAARRGHNKAAIAVANKLARIIWAVWSRDIDFDAAAGGKVAA

SEQ ID NO: 340677 - protein, 375 aa, unidentified
MVLSRKLANDEQQISKLVAEVDRLGAQVSWTVDLTTVYATLLLAVLAEAGKSVRYLSGRSVWQASVIYRGGEAKTDAKDARVIADQSRMRGDDLPVLHPDDDLVTELRMLTAHRADLVADRTRTINRLRQQLVAVCPALERAAQPAQDRGWVALLARYQRPKAIRQSGLSRITKTLTEAGVRNASTIAEAAVTAVKTQTVRLPGEEVAAALVAELAQGVISLDDRIKATDADIEGRFRRHRLAEVITSIPGIGFRLGAEFLAAVGDPTLIGSADQLAAWAGLAPVARDSGKRTGRLHTPQRYSRRLRRVMYMSALTAIRCDPHSRTYYQRKRDEGKRPIQATICLARRRTNVLYALIRDNRTWQPDSPHITKSAA

SEQ ID NO: 340678 - protein, 322 aa, unidentified
MSTKTVLGVDISKKKMDVLLTLSTKPLKKIFENTPKGFRLLYAWLQTLRVEHDVHICMEATGPYSEPLAEFLFEKGCRVSMVNPLKIHEFGGAQLRRNKTDAADARLIADFCLAMEPELWHPLPPEIKQLQAFTRRIESLDQILQAERNRLKESAPKEVKPSLKRMINSIEKEIEKVTKLIKEHIDNNPDLKEQSDLLKTIPGIGEKTVPLLLGELEFSAFDSARGVAAFAGLTPRKDQSGSSLDKTRISKLGSGRVRKALYFPAITALKHNQIIKSFASRLSRKGLKPKQVVCAAMRKLLHIAFGVLKHHRPFDPNVAFNV

SEQ ID NO: 340679 - protein, 342 aa, unidentified
MDHFAGLDVSVKETSVCIVNDTGRIVREVKVASEPEALLAVLKNPAYHFERIGLEAGPLSQWLFSALAEAELPVVCVETRHMQAVLKAQLNKTDRNDARGIAQMIRVGLYRPVHVKTLRSQKLRMLLTHRKLLQSKAIAIENDLRGTLRNFGLKVGMVGKMRFEARIQELVENLPDLAELVEPLLIVRRTLRAQIVILHRRLLAIVRDDEVCRRLMTTPGVGPVVALTYRATVDVPARFRKSKSVGAVFGLTCSKYQSGEIDRSGSISRCGDEMMRVMLYEAAQSMLRSKKWSWLKAWAMQIARRRGMKKAIVALARRLAVIMHRIWVDGTEFRWTREAAAA

SEQ ID NO: 340680 - protein, 340 aa, unidentified
MTSIHILGIDLGKHCFHAVAHNYSGKEVLRKKYNRNQLLSFLSQLESTAVAFEACGGAHWLARKCSEFGHQVRLIPPQYVKPYVKGNKNDFIDASAIAEAASRPSMRFVAVKTEEAQVIAAIHRIRDGYIKERTACMCRIGAILLEFGLSLPKGHAKMKVLFQWLADQKQPLPQSLMGELRTIHDHYSYLNEQVKAQDIKLHNIAEQNELARLLKTIPGIGDLTATLCVADVSSSNNFTNGRNMAAWLGLVPKQFSTGGKPKLLGVSKRGNKQLRTLFVHGARAVLSRPETTGKAFGQWLVTLRTTKPFNVVVVALANKLARIAWAVLQHRQAFKAAEQP

SEQ ID NO: 340681 - protein, 330 aa, unidentified
MHTITDETLLVTGGVDTHRDVNVAAVVDYAGRVLATDEFPTTLQGHKRFLTWLRSFGEINKVGIEGTGTYGSGLARFLSEAEVGLVEVDRPNRRMRRHRGKTDYVDAEAAARAALNGEAKSTPKSRNGAVEMVRALRVARRSALSDRTRAANQLHALVVAAPSELRETLRDETLAVLVDRAASFRPGELSSPTAAYKFSMREIAQRYKRLSEEIVRLDTEIKKLVAMTAPKLLALKGVGSEVATHLLVAAGDNVERFKNEASFARLCAAAPIEASSGLTQRHRLDRGGDRLANYALWRIVLVRCPAMNKPGITSHGELKKEHLSERSFGA

SEQ ID NO: 340682 - protein, 408 aa, unidentified
MRRPRYSSGHGRRRRIQGRSGQAKVEIRTFATTGGSLGLLADWLAENKVTIVGMESTGVYGKPVYYLLEDRFECWLLNAAHVRNVPGRKTDVADAVWISDLVAHGLVRASFVPPKPFRDIRDLTRARRTVVEEKTRDVQRLEKVMQDAGVKLTSVASQLLGVSGRTILEELIAGETSPETLADLARGRLRGKIPQLQEALAGRFRSGHHGFLAAQLLERIDLCDAQIEELDHRIAVMLAPFQEKVEQIMTIVGVGRVTATVLIAEVGLDMSRFPTAGHLASWAGICPGNHTSGGKSKSGRTRHGNRWLRTALTEAAHAAARSKDTYLASHHAQIRGRRGVLKAIGATRHDILVAYWHMFTNTDYHDLGGDWHTRRRRNPERRKKTLIAELKKTRCHRHSGTSRITTSH

SEQ ID NO: 340683 - protein, 381 aa, unidentified
MKRSHFIGIDVHCQFCQIAVINSAGAVVQRARCDTSMPALLQLIEAVPRWRAVAIEEGPLAGWIWRGLHAAVDQMVVSQPRRNRLICADGDKDDPIDAEKLAQLLRGGFLKEVHQVESLEGAVFKQQVALYHFRVRQRVRESLRLTWLFRQHGVMIREKAYVASADRPALLARLPEQALLREAVQLLWLGYDELVQQEEVWRRRVVKLAQQVEQVQRFEALPGFGWIRAATFYAYVDTPWRFRSKSALWKYLGIGLERARSGNGPEHLGVPFLAHRLLKSTILGAAQSAAVSGNNPFADLYGRWIKQGLSSKLARRNVARAQSATLWGMWKNGSAYRPDWVGVPAAAQRGDWGVSARTMADSVRSGVPERCMDPHDGVPVR

SEQ ID NO: 340684 - protein, 373 aa, unidentified
MPKYSTAFGMDVHLRSTTVCALDADTGEAVTRRFPGNPWGEIAGWMDGFPGPSLAAYESGYLGFAPQRELAGLGVECVVAAVSKIPRSAADSASKNDRNDAARMAKAILAHDISPVWVPSPEVEGIRDLAGAYDGATARLATAKQRLLAFLARRGFVYGGTTPAGNPRKYWTYDFLRWLDKVRPEDDGGVRALAALRNEVEAAAEARADLLSEYRAAVDASPIAAEVAALQSIKGCAFALAAAFSAEVGDFTRFRSGRQVTAYFGLAPSQRSSGDSVRLGGISGAGNALVRKLAVEGSWCYAAARHQPKLMPRDTGVPLEIRMHGRKGSERLLRRREEMLARGMPAAKANAATAAELVRWLWALGMMCREGAE

SEQ ID NO: 340685 - protein, 404 aa, unidentified
MIFVGDDWSEDHHDVCLMDQAGKRLASRRLPEALTGIRQLHELNAEHAEEPDQVVIGIETDRGLWAGALAAAGYQVFAVNPLAVARYRDRHHVSGGKSDASDAKLLADLVRTDRHNHRPIAGDSLDAEAIKVLARAHQSLIWARTRHTNAMRSALREYYPAALLAFEDLAHGDALGVLGRAPTPEQGAHLDLPAIQSALKRGGRKRNIAARARQIRAALRSEQLAAPAPVAAAFGATTRAAVGIIVELNRQIAELEAELATHFEAHPDADIYRSLPGLGVILGARVLGEFGDDPNRYTTAKSRRNYAGTSPLTVASGKKRAVLARHVRNRRLYDAIDHWALCALTSSPGARAYYDHHRAAGDVHHQALRALGNRLVGILHGCLRHHQPYDEHTAWAHRQNTRAA

SEQ ID NO: 340686 - protein, 333 aa, unidentified
MSSVTWFVGLDYHQAFVQVCVMDSAGRMVVNRRCDNSVQSLIAVLAPLGGKVCAAIESCCGASDLAEELVAAGWQVSLAHAGYVHKLKQSPDKTDWSDARLLADLLRVGYLPQVWLAPYSLRQLRHVVRYRQQLVQARRAAKLRVTALLRAERIEFAVSRWTKAWVRAVRLSAALGEQGSWTVNRYLNEIERLQQDIEETDEQLEALTRHDSFVLHLRELAGIGLVTAVILRAELGTMDRFRTGKQLSRFCGLSPRNASSGLKQADAGLIRFANNTLRSVVIEAAHRLMRLDPHWRQLGQSLKGRGKPGSVAAAAVANRWMRWLFHQLRSIAV

SEQ ID NO: 340687 - protein, 404 aa, unidentified
MKGPIVSIDVSKGKSDYQAFKEMNVKYTGSRSIKHTKEGFDEIVNLVREMEKKLETEVCVVYEATGVYHRVLKKVLEDNNIKQFIINPLLSAKTRKNDSLRSPKTDKLDPKSIAKTYYSHSLHNSHKQETIYHELRELSRYYEDILVHIRKDKVAFRAQLDIVFPGYDTLYDDLYGPVALAIIEKYPHPEMLQKKKINTVSKVIQNKTCHRQAVSDTMADKAIEYSKTIYSGCDKDDIEVLILQRFIKKLNEDMAEAERTIGEMIKLAQELPDFSIIKSIPGIGDNLAARIIAELGNMTRFKKKNELVAFAGLDPRISESGKNDGDHMHITKKGNKRLRCLLYLAVTCSIRLKRDDNSIKDFYIKKKQQSNPMCSKAAKTACTSKLVRIIYSMCKTGELYQYNK

SEQ ID NO: 340688 - protein, 341 aa, unidentified
MSDFSYFCGIDLAKNHFSLHAVDQNGKVILHKSVTRSKLLTTIANMPLMRIGVEACGGAHYWARTLNKLGHDARIIAVKYVVPYRTKGKNDLNDAVAICEAVQRPSTRFVPIKSPEQQAILSVHRMREHWVRERTALMNRMRALLSEFGLIIPVGRSSLMKHVPLMLEDAENELPHLARTVIADAYHHLGELNQRIADTEQVFDSFAKVSANVQRVMKVRGIGPQTATAILASIGNGSQFDKSRDFSAWLGLVPKQYSTGGKPRLGRITKHGDKYLRTLLVHGARTVIANLGDKQDKLSQWCRGVLERRGMNRAIVALAAKNARIIWSLLHNQTEYENYAA

SEQ ID NO: 340689 - protein, 350 aa, unidentified
MLIIGCDYHPGFQQIALVDAETGDVSEHRLAHREQAEQFYRELKQQNLCARVGMESSGHSRWFERLLQELGFELWIGDPAEIRTKRVRKQKTDRQDAQLLLRLMLEDRFPRIWVPDAANRDLRQLLWHRHRLVQMRTRVMNQLHVVALNEGLRRKKALWRPAGRTELESIALAPWASRRRQDLLDVLDQLTPKIQDLTHALEEEVEKRPVTRLLMTHPGVGPLTALAYELVIGTPERFHCGKQLASYVGLVPTEESSGDRRRLGHISKQGNVLLRFLLVEAAQVTVRSQQEWRSKFFHLAMRRGRKIAKVAMARKLAVHLYWMWRQGLDYGQTQKLGSHAGEPGHPYGVQ

SEQ ID NO: 340690 - protein, 312 aa, unidentified
MPDNSQPDYVGLDIAAARLDYCFNETEEGNCTNDPEGRRSFIARLSKWTHPRVICEASGGYEKIVVAELLAEGFEVCVVQPSRVRAFAYAEGLLAKTDRIDARLLRRFGQKVEPRLAIPAIPALVTLRELLEHRRALTLQCSEVEGRLPLAGATLTKLLNKQRTFLQKQIEEVEKMIRQHIDSDPDLRSKSERLQQIKGVGPVLASTLLAYVPELGNIESPQLSALIGVAPHPRDSALTKAPRHVRGGRSQVRHVLYMAAVCASRRNPILAAFYQRLKSHGKPPMVCLVAVMRKMVCLMNRLIQDPNFILAR

SEQ ID NO: 340691 - protein, 406 aa, unidentified
MNYLGIDISKSTARCVILDNDGEKSVKPFTLKNNKYEFNELLERFKKHGLNSENLLIGIEATGIWWENIYCFLTEQKFKIVVLNPHQTNKFREALRKKAKTDDIDAFVIAGLMRSNEYAQSFVPEETVQILRDFTKLRYRLIKDQKDYQRQALSLLALVFPEYEQTKLKKPFGIAAASILKKFSTAKHLAQAKPKHIEKIVRSIKGNNFNIKEIIHLIQTAKDSIYSGRAANARAINLNIMIEQVQNMNKSIDELNKEIENILSSKNDNEPFNFPGGNLLSIPGVGLKTIASIISAVGVDAQSFKDSKKIIGYVGFYPKIYQSGETLKANKIAKRGPAYLRSALYIAAVACIKHNAQFRALYQKKRSQGKASKQALIYVAKKLAHLCLSMLKSGELYRPERVFMPV

SEQ ID NO: 340692 - protein, 412 aa, unidentified
MNAVGVDVSKGRSMVAVRRPFNEIVVKPFEVRHTGSELSKLADYLKSLDGETRVVMEHTGRYYEQIAQYLHDAGLYVSAVNPKLIKDNSGGNTLRHVKTDKADAKKIAKYALDNWAELRQYAPIDTIRYQLKTLNRQCGLYTKTKTMMKNNLIALLDQTYPGVNALFNSPVREDGTQKWVDFAASFWHVDCVRSMSQTAFTERYRKWCRKHGYNFNSVKANEVYEKARDQIAMLPKDGMTKLLVKQAIESLNAVSATLERLKGEMLKLASQLPEFTVVMDMRGVGDSLGPQLMAEIGDVSRFAHRSAITSFAGVDPGTDQSGDHEAKSVRTTKSGSPELRRALFLVMDCLLKTMPQDEPVYRFMDKKRAEGKPYLVYMTAGANKFLRIYYGRVKEYLAKLEELSAPDPSPHI

SEQ ID NO: 340693 - protein, 441 aa, unidentified
MAMRKRAEDEVFPNAAGIDVGGSSHWVAVPRQADDEPVREFGAMTDDLNAMADWLLACGVDTVALESTGVYWIPVYEVLERRGLVVWLVDARQMKYVPGRKSDVQDCQWLQKLMSLGLLRAAWRPGDEVCVVRAVVRQREVLLTEQADWVQRMQKALVQMNLQLTEVLTDVMGMTGQAIVRAIVAGERDPKVLARHRNGRVKASAADIERALTGNWREEHLFVLGQALAMVDSLAQRVLECDAKIEALLVPLGCHEVELSGPGKRRGKNTPQFDARTALARWAGVDLTRINGLAVTTVMTILSEIGPDLSRFANVKHFCSWLGLCPGTKVSGGKVLSARTRRSTNRVRQALKLAAMSLSRNDSALGAFYRRLCSRMDKPRANTAVAHKLARMVYFMLTRGEAFVDQGQQHYEEQQRQRSIDALRRRATALGFQITPAAQTP

SEQ ID NO: 340694 - protein, 390 aa, unidentified
MTVVIGVDPHKSTHTAAALNAGTNKTLETIRIDAALPEYRRLLVWAKRFPERYWAVENAWGLGRHLAQWLIAHGEKVTDVPSTATARVRELSRGGRRKNDNIDAAAAASVAALHGDAVPVEAEGASTVLRMLDERRTNLTRQRTRTVNQLHAVMRELLPGGVSTDLTANQAADALLRVRPSSPVERARKELARDLVADVRILDARLKANQQRMQDTVTDSGSSLLDVIGVGPVVAARLLGRTGRASRFRTAGAFAVHTGTAPIEIASADKARHRLSRHGDRQLNNALHTIALTQVRMPGTRGRIYYDGKIAEGKSHKEAMRCLKRRLCDHVWRIMIAGERRHTSGAGSGGHSGATTKSCAASSTPHASSSDKSLPEPAIDQATTKPAPAA

SEQ ID NO: 340695 - protein, 329 aa, unidentified
MKNYKEAIGIDVSKKTLDVSCHLLGKHKVFTNDIRGYRSMLSWVGKEVKDSFFYCFENTGNYSLKLSCYLSRQGVDYVEENPLRIKRSLGLVREKTDKVDSRLIARYAWLCREELTVSEAKSLVYQELGRLLGLRDQMVRNRAGLLGTLKEMEHLLGSPSTDIGCISIKRAIASLDKQVKAIEARMDQILREDEELSGNYGLLLSLRGIGFVVACQLLYHTQNFRQFDSWRKFSSYCGLAPYDHQSGSSLRKRKQCHWIGDRKMKTLLSMAGISAIQHDPELRAYYKRKIAEGKPKMVALNNVRNKLLARAFSVVKRGTPYVVLQKFAA

SEQ ID NO: 340696 - protein, 350 aa, unidentified
MIIIGCDYHPGFQQIAFVDTETGELQERRLQHREEAEKFYRDLAAQGMKVRVGMEASGHARWFERLLSELQFELWIGDAAEISSRRVRKQKTDRQDAQLILKLMLKDDFPQIWVPSGENRDLRQLLWHRHRMVQARTRMMNQLQAVALNEGLRCKKKLWREAGREKLESFQLAPWASQRRRDLLELLDQLNPTIAKLTQAIEEEVKRYPAAQRLRTHPGVGPLTALAFVLIIGKADRFQGGKQIASYLGLVPLEKSSGNQRRLGHITKQGNSLLRFLLVEAAQVTVRSLPEWRSKYCHLTMRRGRKIAKVAMARKLAVRLYWMLRKEWDYEQLTKFGSHAGQPGNRHGVK

SEQ ID NO: 340697 - protein, 344 aa, unidentified
MMAIQLKNNEPEVNPIHQAGIDVGAEELVLVVRKNSKLFNPQTFTNTRADRTRLVNKLVKLPGVIVCMEATGIYHFDLAVALHDAGVLVMVINPKSSHNFAKVLMKNSKTDAVDANTLAEYAARMDFVAWTRPSDETIAVRCFSRRITALTTQKAAAKNHLHALTATQETPKAVLRDAKLAITQLQKRIDSLTTEALLLIAKHPKLERTLTLLISIKGIAQTSAISLMGELLLLPPDLSHREWVKFSGLDPKAFDSGKSVHKKSRISKAGNRNIRAALYMPALSAKQHDPHVSAYFQHLVANGKKPLQAVCAIMRKLIHAIHGMLKNNEPFDNTRFYKIPTTVV

SEQ ID NO: 340698 - protein, 375 aa, unidentified
MSKATRFVGLDVHAATISVAVADAEEEVRSVGVVPNRPESVSRLVKKLGPAARLRVCYEAGPCGYVLYRQLRDLGAHCDVVAPTLVPVKAGDRVKTDRRDARKLAHCYRAGDLTPVWVPDGEHESLRDLVRAREAAKKDQLRARHRLQKFLLRQGLQRPEGMSAWTLKHLLWIRGHQFEHATRQAAFQDYLYEVGRARERIEQLEKSIEEALDQVPEPMSALIKGLQALRGVGQLSAATIVAEVGPLSRFPHPRQLMAYAGLVPSEHSSGGKTIHGGITKTGNAHLRRVLVEAAWAYRHRPSLWGALRRRQGGVSQEIKTIAWKAQLRLHRRYQRLQARGKPKQYIMTVVARELAGFLWAVALEVERQRDQKKAA

SEQ ID NO: 340699 - protein, 344 aa, unidentified
MSAAYDGPQIVGIDLHRRRSVIVRMDEAGQRLDTVRIDNDPMALAAQIAKAGEAPQVVLEATYGWYWAADVLRDAGAQVHLAHPLGVKGFAYRRVKNDVRDATDLADLLRMGRLPEGWIAPPAVRALREMVRHRAKLVAWRSALKASVHGVLAKQGLHPPVTDLFGVAGRQWLSVAPLDAAYRLRINALLRLVDAIDFEITAVAGPLRAVLADDPGFRAVQQVPGVGPVLAAIFVAEIGDVTRFASPAHLSSWAGLTPKHRESDIVVRRGPITKQGSTLVRWAAVEAAQGARNADWLTESRTRIAERRGRNIATVAVARKLLTYVFYGLRDGYIRALEQTAKAA

SEQ ID NO: 340700 - protein, 362 aa, unidentified
MFESTTIIAFDQHAATTVAAVLLPGQPTPALHSLTSDSARILRFIDGLRRTRAVQCCYEAGPCGFELQRALTAQGIACDIIAPSLIPRRPGDRIKTDRRDAGQLAVLYRAGALTPIHIPTDQEEAVRDLLRCREDIRADLLRARHRLSHFLLRHGRRFTATKKAWTKRHHEWLQAQQWPLAALEQTHQAYVRAVHEGVARLQTVDLELREFLTLEPFRPRVERLRCFRGIDDLTALTIAAELGDPRRFPSAPSVMAFLGLIPSEYSSGPKRVQGAITKTGNAHLRRVLVESAWHYRHHPFIGDALRHRQRGAPSAVIDHAWLAQRRLHRRYRRLAARGKPKQVIVTAVARELTGFLWAALTQ

SEQ ID NO: 340701 - protein, 325 aa, unidentified
MSQSDIPLGIDISKDTFHVALLKGQKQSKYQQFDNTADGFAQLSQWLNRQGVNHVHGCLEATSIYGHALATYLNQQGHRVSIVNPMRIKGYAKSQLARTKSDRADAKLIAQFCRDLKPAPWQPSEAEVMTLQAYTRRLDALEQMLTQEKNRLKITPDELKADIEDHIAFLKAQVTSVKKRLLEHIQTHDSLKTQHDLLTTIVGVGDSTAARVLSEIGSIHHFSSARQLAAFAGVTPQEHESGTSVRGKTRLCKIGNRRLRKALYFPALNLMRRCPQMHPFCERLLAAGKPKMQVVGAVMHKLMRVIFGVLKSAQPFDPDKLLAAA

SEQ ID NO: 340702 - protein, 422 aa, unidentified
MASDADVVDYAAFIGLDWGSEKHSVAFQAADSKQIEIYTLKQTPEELHGWLFKLRDKLGGRPVAIAIEQTKGAVIHALLGYGFVHVFRINPHSLASYRKAFSSSGAKDDPTDAVYLLEWVKLHRDRMKPWVPDNAQTRALQQLVEFRREVVAQRVAYTNHLIQVLREYFPQALDWAGEIDRVMACDFLLKWPTLEKIKKARPDTIRAFYRQHGCRNSELIEERLMEIYRAQALTEDPAVMATSVCIVQTIVRALYPVIESIARLDKEIAERFQAHPDMACFDSFPGAGPVLAPRLLAAMGSDRTRFESASEVQQYSGIAPVTDRSGKHVWIHRRFACPKFVRQTFHEFAGQSIKLCAWARAYYDMKRSSGMGHQAAVRALAYKWIRIIFRCWKNRVCYEDEIYIRALKKNGSAVVDFMQKAA

SEQ ID NO: 340703 - protein, 338 aa, unidentified
MSAIKVIGIDLGKSTFHLVGHDYSGREQYRHKLSRSKLLQFISVHEPTLIAMEACCGAHWLARKCQEYGHQVKLIPPQYVKPYVKAHKNDFIDAAAIAEASTRPNMRFVSPKSEQAQVGVVIRRVRTGYIRERTATMNRISSMLIEFGISFPRGHANMKKLFQWLADNKEPIPPLLVQELQNQLDYYNQLNERIKEQDRKIEKLSSEDELYTLLQTIPGVGPMTASCCLSCVGKPSDFSNGRNFAAWIGLVPFQYSTGGKQRMLGISKRGNKELRELFVHAARAVMWREETAERYFGSWLLDLKRRKPFNVALVALANKLARIAWSVMTSHKPFELRV

SEQ ID NO: 340704 - protein, 356 aa, unidentified
MGDGSWVGVDLHARSAVAGVLDGLSGELWTERVPPGAEALVVWLARLPAPVRVAYEAGPTGFELARACARLGIDCLVAAPGKIPRAAAERVKTDRRDAERLARLLRLGELTRVRVPDESEEQTRDLVRAREDARADLMRVRHRLSKLLLRHGLLWERSAWTREHDRWLAALRFDGPLAVCFDESYGAVLQAKARRDRLDQAIAEQAAAPAYAQVVARLCCLRGVSTLTALALTVELGDWRRFDPARLGAFLGLVPSESSSGEQRRQGPITKTGNSHARRLLVEAAWHQRKPLRPSLALAGRRANQPAAIRAQADAIARRLHRRWWDLERRGKRRTIVAVAVARELSGHCCKIATME

SEQ ID NO: 340705 - protein, 423 aa, unidentified
MTSMTLDAPLTNPLSPPDELVAGVDTHKNTHHVAILDLVGRPVADREFRADGRGYAQVIAFLHEHGEVTRVGVEGTGSYGAGLARALKAAGLTVVEVARQDRQARRRQGKSDPLDAHQAAVAVLAGTDTAIPKSGDGAVESMRILLAERRSAAKARAQVMNQIHALLITAPELVRQAFRHLNGQRLVTTLAKTRPGTIASPDPDVVARQTLRRFAVRHLTMQAEIDLIEQQLDVLVRQVNPTLLSLSGVGPVTAATLLVAAGDNPERLGTRASFAALAGVAPIPASSGQRTRHRLSRGGNRHANAALHRIVLLRMRHREPRTMAYFERRRAEQLTDRDIMRCLKRHVANEVYAALLNPATDNPVGRELRARRQAIGTPISVLAATLGVPYQRLRRLEIGTRADPELEQRANLALAQLETPQAA

SEQ ID NO: 340706 - protein, 341 aa, unidentified
MLYAGIDIHKSVFQVVVLDPDTGELNESRFAPSRERLGEWAAEWQGKLAAVAIESTTGWRWVARELEQRGFEVHLVDPGRASALRGRRRSPKTDKLDARWLALVLARQLLSECEAWMPPAGIQLLRDQTRLRKSLVDSRTSWAQRLHALLAHEGWPCSRGRLLTPEGRRWVIALELEPCVRAQIDVMLTLIVALDQQLKVVETELRRFARSDARCQALETIFGVGPIFACHLLAEIGDARRFKRSRQVVRASGLDPAVIESADSRRRGRLAKQGSPYLRWALVEAATHSSRSTSPDHDLYTSTAQRCGRGRARLTVARKIARRAYHLLAAVEATTLETHTA

SEQ ID NO: 340707 - protein, 377 aa, unidentified
MAGRKLGDRQIPTTTAGYESLRSYLESFGHVRLVGIEGTSSYGAGLARYLRSHHVDIREIIRPRRSQRRRGKSDPIDAYAAAQQALAEPESLPQAKTGDGIVEQIRVLLTVRRSAVKARVAVVRQIKSLLVTASEAIKTQWDRSSEHQAIAKLAATRPGAPTASVDAATGHALRRLARRHRYLTGEIEELDEDLRELVATAAPAMIATKGYGVIATATLLVTAGSNPERLRSEASFAALCGASPIPASSGKTHRFRLNRGGDRQANWALHQIALVRLSSDQRTKQYSARLRANGKSTKDVLRCLKRAIAREAFHLLVHPAPVLATDDLRDLRHRRGVTLVRAAKSIGAEPSRLSELERGRRPNAELATAYRAWLTAA

SEQ ID NO: 340708 - protein, 355 aa, unidentified
MDSKKYIGMDVHKESISIAVMNGAGKIVMECVIETKASMILQFFDGLRGDLQVTFEEGTSAAWLYDLLKPHVTKLVVCDPRKNKSMREGNQSDKIDARRLAELLRLDHLTPVYHGEHGLRTLKELVRTYLTVTKDLTRVMSRVKAIYRSWAIPCTGKQVYARRHRAEWLGKINEPGVHRRAEFYYQQLDALRVVRQEVRKDLLAESKKQKAWKRLCEIPSIGPIRAAVLLGILQTPHRFRTKRPLWNYGGLAIEMHSSADHRKVDGQLQRSRKNVLVRGLNRNCNHDLKNLFKGAAAVASSKSGPFQEFYTALVAKGMRPEMARLTLARKIATIVLIVWKRGVCFDAQHLKPQTA

SEQ ID NO: 340709 - protein, 389 aa, unidentified
MRVEQIAPVAGDEVSPVFVALELSRSKWLVGVGAPQQWTVRRHQVEGGDLEGLLALLSRICAGEAKRSGLAIKVHVGFEAGRDGHWLYRALKSAGYEVYEIEPASVAVERRARRVKSDGVDVDKLVRTLSRYVRGELDACRMVEVPSEAEEDAKRPHREYERLVKEQTSHRNRMKGLLFAQGVRDFDPMAPDGLARLAALPILPRLKAELVRECRRLAAIAADIAAIAAEMAAAVVPPKRTERKSEASPIASPVQAKAMQLYKLKSLGVHFSTVLAGEVYYRTFQNRRGVGQYLGLAPSPFQSGDMARDQGIAKAGNKRARKAMIELSWLWLRHQPGSALSKWFHERVGDKKGRLRRIAIVAMARKLAVALWRYLETGVIPEGAVLKRA

SEQ ID NO: 340710 - protein, 284 aa, unidentified
MSSEKYIGLDVHQATISVAVMDSQGKVVMESILETKASTMLEFLAGLRGSLFVTFEEGTWAAWLYDLLKPHVSEVLVCNPRKIPLLKQGNKSDKIDARKLAERLRLHDLKPVYHGETGVRMLRELARSYLTVVKDLSRVMNRLKALYRSWAIPCAGRDVYYTRHRSQWLEKIPEPGTRRRAEQLYQQLDMLQHLRQQARRELLAEGRKHTITAKLRQIPALAPIRSALAVALIQTPHRFRSKRQLWTYSGLGLETRDSGEYHYVGGQVRRPSGCTICATRTPAA

SEQ ID NO: 340711 - protein, 356 aa, unidentified
MNSLKHQMEKRSMEHFAGLDVSVKETSICIVDDTGKIVREVKVASEPDALLQVLKNNAYHFKRIGLEAGPLSQWLYSAFAEVNLPVICVETRHMRAVLKAQINKTDRNDARGIAQMMRAGLYRPVHVKTLRSQKLRMLLTHRKLLQSKAIAIENDLRGTLRNFGLKVGIVGKLKFETRIRELVENLPDLAVLVEPLLVVCRVLREQIAVLHRRLLVIVRDDDVCRRLMTVPGVGPVVALTFRATLDVPARFRNSRAVGAALGLTPGKYQSGESDHTGGISRCGDEMMRVMLYEAAQVMLVRSTRWSWLKAWAMQVARRRGMKKAIVALARRLAVIMHRIWVDGTEFSWSRQEAAEA

SEQ ID NO: 340712 - protein, 387 aa, unidentified
MNQEKYIGMDVHDATISAAVMNAEGKVLMECVLETKAATILEFIQGLRGTLAVTFEEGILAAWLHDLLQPHVSRLVVCDPRKNALLRDGNQNDRADARNLAELLRTNHVHAVYHGNHGTRTLKELGRSYLALTKDSTRVMNRIKSVYRSWAIPCTGTSLYSRRHRAEWLAKLVEPGVRMRAEHLYQELDGLKPLRQAARRELLREASKHTAVKRLRQIPVIGPIRSALLVALLQTPHRFRTKRQLWAYSGFAVQTYDSGEFRFVRGKRQRNRERITVRGLNRNHNPDVKNLLKGGYLRHRTPRATAGFLCCPGGERDAAQHGPSHPNPEDCRHRFNHVEERSEFRPQTVAATSSLSIAEEAPSIRRVPSASGRSISRDARFEGSISQ

SEQ ID NO: 340713 - protein, 343 aa, unidentified
MNITTIGIDLAKNVLQIHGADANGKPVLRKQLKRSEVMKYFANLEPCVIGMEACGSAHYWARQLQSLGHEVRLISPQFVKPYVKSNKHDIADAEAICEAVSRPTMRFVPIKNVEQQAMLSLHRAREGFVGDRTATANRIRGLMAEFGLVIPQGIGHVRSKVPELIEDATNELPGMFRALIDQLLDHLKWLDQQIEAIEIQIKTWHKNNTDSQRLAEIPGIGPIIATALIATIGHARNFKSGRELAAWIGLVPKQHSTGGKQTLLGISKRGDGYLRKLLIHGARSLTYYAGKRLSPDSWLSKLMARRHINVAVVAQANKTARIVWAILAHGREFRPDYALKAAA

SEQ ID NO: 340714 - protein, 341 aa, unidentified
MSTIHILGIDLGKHCFHAVAHNCAGKEVLRKKYNRSQLLKFLANLEKTTVAFEACGGAHWLARKCVDFGHQAQLIPPQYVKPYVKGNKNDFIDAAAIAEAASRPSMRFVAIKSEEAQVIAVIHRIRDGFIKERTACMSRIGAILLEFGLSLPTGHTKMKVLFQWIADQKYQTLPQSLMHELSLIHAHYLYLNEQIKIQDTKLKQLAEHHEQAKLLKTLPGIGDLTATLCVADVSAASNFSNGRNMAAWLGLVPRQYSTGGKTKLLGVSKRGNKHLRTLFIHGARAVLSRLETTGKVFGQWLVDLRASKPFNVVVVALANKLARIAWAVLYHRQAFKTASQS

SEQ ID NO: 340715 - protein, 359 aa, unidentified
MLYLAIDQHRKQLTVNIRDEKGDVVLKRQVSTQWERGRKFFDDLLDRSGPEGGFVAILEVCGFNHWLIAMLREYDCRDIVLVQPDTRSKKKTDRRDANSLGELLWVNRSRLLAGQNVHGLRRVTMPEHEDEENRQLTVLRKRMGELRTRTVNRVHHILLKHNLHQECPTKGIKGKNARRWLAELPLDEIDRMEMDLLLAQWELWDTQLAALEKKLEQRQAADKKAAIVATMPGAGAYSSLALASRIGSIDRFPRPSSLANYWGLTPGCRNSGDVTARLGSITKQGSPMARFILGQMVLHVLRRDAAMKAWYKRIKHRRGSKIARVAVMRRLATVLWHMLKYEEPYAFGGPPRSRRGKAA

SEQ ID NO: 340716 - protein, 423 aa, unidentified
MMKLKYSICCGLDVHKNVIVATIVITNKDGISEYKQKSFSTINSDIQKFHNWLIENHCYHVCMESTGKYWIPIFNYLESDIDVCLTHPKYVKAINGKKTDKKDSKWIADLYKFDLVRCSFIPPKDFRQLRELARYRFKLVCMKSSEKNRIQNCMTVSNVGIASVLSDPFGKTTTDIMSYLLEHTADSMDEKAVRKLIKKGAKAKSDEIIEAIRGYNIETDQAKKLELARGHLEYLDDMITQTEVELYVRIKPYYEFVEFVSTMPGMTELSSTIVLAETGVDMNIFDDAKHLCSWCGLSPASNESAGKKKSVRIGKAGDYLKPMMIQCALAAVKNKKQPYFAIKYGRIKKRRGHKKAIIAIARMMMVCIYHMVSEKKSFNPTDYEELMDPRNHVERVVLNETNVFAYLESLGYDSSKLVKRNDS

SEQ ID NO: 340717 - protein, 314 aa, unidentified
MKMAMLSFCGIDVSKDRLDVVVLPEGWFFSVSNDTAGWAELVVRLRPLTVSAIGLEPSGGYERGIIRALLAAGMSVRRINPNKLRQFARARGVLAKNDRLDARLIAEYVAIMPTRVVQRDAAVERLAEIVTMRRQLCDEHVAAENQAAHLEDAMLRRLSKRRQTRLEADIRLLDKRLAEMVAANVALAQRYELLTSMPGVGPVLAFTLIALLPELGKMTRKQIAALVGLAPYDFDSGKLKGHRSIYGGRMPVRNVLYMAALSASRYSPALKAFHNRLADADKKSKVIIVAVMRKMITTLNAMLRDNTVWQPQSA

SEQ ID NO: 340718 - protein, 433 aa, unidentified
MAEVPPDRRREAMAAFRMKRRDAMEVMFDRVAGLDVGKETVTVCLRTPGSKGRRHAETRTFKTMSGSLRVMRDWLVGAGVSIAAMESTSAYWKAPFYCLVEVMEVWLLNAAHMKAVPGRKSDVRDAEWIAQLLEHGLLAPSFVPPPEIRRLRMLTRYRVQLMGDRRRDIVRLELMLEDASIKLSSVASSLKTVSARAMLTAMINGETDPLRLADLAKGRMRRKIPDLAQALTGHFDANHARLARSMLRRLDLVEQAMAELDQVIVEACQPWARQIELLQTIPGVGEKVAQVIIAETGGDMSRFPTAAHLAAWAGLAPAMNESAGKQSPAGKRHGNKWLTAMLVEAAGSVGRMHGKNYLAAQHARLMRRRGMGRAQVAVAHSMLVAAYWMLKRDEPYHDLGADWHRRRNDQAHTRRLVAQLERLGHKVIIDPAA

SEQ ID NO: 340719 - protein, 316 aa, unidentified
MDNKSRVFGIDVSKARLAIGDYEGAVRLNIDNVPTAIAQWLSGLAPGSIIALEATGAYYQGLAALAHAAGMRVFVLNPRTLKHYAEAIGQRGKTDPIDARMIARYAMHEQAKLFAWEPPPAATDRLGQLLQRRERLVHATQLLAQSLAGVSALKSAREELLASLKRMIKNVELLMRAELAHTPTLAALHQRLSSIVGVGFVVAMQLVVALTRLRFARVESFVAYTGLDPRPEDSGERCGRRRLSKCGPRLLRCLLYNAGMAAAHSKLFKPTYLKLRARGLRSTEAIVILARKLARIAYALYRSGETFNPTRHLQTA

SEQ ID NO: 340720 - protein, 394 aa, unidentified
MNEQKESAALGRILGLGLHPDVCRAAALSGRDAATAKPVQQWDRLATAQLETWAKTLVAGDLVVLEASGNSFESCERLKRCGVAAVVLESQRAGQIRQTYCANDRSDAVKLARIYLSGLAQPVWQPDAATRERREVLHAYRKAVTTATRTRNRLKSFLSDHGVRLKPGVRLVQASGQKSGRECRTWSALQSVLVEQVLEELQLADARRGQLSAVMAQEVAADPQLLRLVRLLGVRHIIAFAIAAVVGDIARFANPKKLVAYLGLAPTVDQSGNGPRGQQGLVTFGRGDLRALLTQSAQNALNQRSSPLHTWGWKLCLRKAHKNVAIAAIARKLTVSIWYMLRGLFTPLKQADASLRVKLAKIATAIGVEKLRHLGYKSKAAFLEEKHQWLLNPA

SEQ ID NO: 340721 - protein, 335 aa, unidentified
MQVYGIDLSKEKFDVNFLDVNGKEKHRTVKNEFSAICGFLREVPMGSILCAEHTGTYGDVLVFLCNQYGVGIALVPGYTVRHSLGLVKGKSDPVDAFRLREYGERFNDKLSFREYQGEHMSELRQLYSLRSQLVKARKELRTGAHARDQLPVQSVAANLILKASLDALDDQVEQVEKEIREIIMNDGDFKENYSLSVSVLGVGPVIAREMIIKTGNFKVIDTARKAASYAGVCPFPNSSGNMVGKSRTSPFADRALKTLLYMGAKAAVKHNKEYQLYYRKKQQEGKPHFLIMDNVMNKLLRTVYSVVKNRTPYSRDYICLDPREKNVNSSEKNVA

SEQ ID NO: 340722 - protein, 369 aa, unidentified
MKKNSTVPQSPKRAAGGKEGPITIGMDLGDKASRYCVLGGDDEQWEGSVATTKKAITQKFAGMRRCRIAMEVGSHSPWLSRLLTRLGFEVIVANARQVQLISASSRKNDRMDARLLARLARADPKLLRPIRHRGEQAQSDLMAIRIRASLVEARTGLVNAARGFAKAVGERLPSCDADALGVEKMEVLPAALQERLRPLLEQVESLTAQIKKLDSSIEQIARSSYPETELLRQVSGVGILIALTFVLTLEDRERFQKSRDVGCYVGLRPKQSESGQSQPQLRITKEGDRYLRTLLVQGAHIILNRRGPDTDLKRWGLKLASHGGKNAKKRAIVAVARKLAILLHRLWVTGEVYEPLRNSRAVRSRKKAA

SEQ ID NO: 340723 - protein, 355 aa, unidentified
MDSAKYIGLDVHKESISIAVLNAAGKIVMECVIETKAITILQFLHGLRGELHVTFEEGTSAAWLYDLLKPHVARIVVCDPRKNASMKQGNKSDKIDARRLAELLRLNHLNPVYHGEHGLRTLKELVRSYLTITKDLGRVMTRVKALYRSWAIPCNGKQVYAPRHRAEWLEKIGEPGVHRRAEFYFQQLDALRSLRQQVRRELLAESKKHQAWKQLCQIPSIGPIRAAVLLGILQTPHRFRTKRQLWTFGGLGIETFSSADHRYVEGQLQRAKKPVLIRGLNENCNHDLKNLFKGAAIIASIKPGPFQEFYAALLAKGMRAEMARLTLARKIATIVLVVWKRGVCFDAQSLKSQAA

SEQ ID NO: 340724 - protein, 367 aa, unidentified
MKQSSKIFVGMDVHKESIDITLAEQGGEVRRFGEVGGERTALLKAIRKLTSRGSELVFVYEAGPCGFWIQREITALGHVCWVVSPSLIPQRPGNHVKTDRRDSENIARLARAGELTPVHVPDVRDEAIRDLVRARDDAVIAQRRARQQLKALLLRNDIRYVGKTSWTSAHLRWLSELKLPQPAQQIAFQEYVDAITVATARIERFEQAMRDEVLTWRFAPAVAALQAMRGIRFVHAMTLVAELGDLTRFASPRQLMAYLGLVPSEDSSGQRRHQGSITKAGNAYARRALVEAAWAYRHPARLTRIIALRQDALPKQACDIAWKAQLRLCAKYRRLRARRVLETKIIVALARELSGFVWAIGQHVKAQ

SEQ ID NO: 340725 - protein, 415 aa, unidentified
MEIVVERVAGLDVHKASVTACVRVSADASERAEALETFATTVPSLLALADWLEAHGVTQVAMEATGVYWKPVWHILSDGDVTLILANAAHVKNVPGRKTDVADAAWLADLLAHGLVRASFVPEAPTQAMRALLRTRKQLGREQASHAQRIQKTLEDANLKLASVLTQVMGKSGRAIIGALIAGERDPDALLRLVQRGVKAPPERLRAALTGRVTERHRFLLRLHLRQIDALEAAIAEIDQEVDRDLDPFRQAVRLLRTIPGLSDLTAQVIVSEIGLDMSRFPTAGHLISWAGLCPRNDESAGKRRSTRLRKGAPWLKTTLVQCAWAGTRKKGSYLQAQFQRLRHRRGPKKAVCAVAASILTAAYHMLRDGTFYQDLGPDHLRRATPEAQACRLARQITKLGFTCTIAPADTRVSV

SEQ ID NO: 340726 - protein, 375 aa, unidentified
MTITTATTEETAITSISQNPAPDRHCTIGVDTHKDVHVAVALDQLGARLEELHVPATAAGYAQLEGWATGLGPVKVFGVEGTGSYGAGLARFLSTRGHLVVEVNRPDRATRHRIGKSDPIDAEMAARSVLSGVATGTPKHGDGEVEMVRMLKMAKDSGVKARTQALNQIKALLVTAPAELRETLDGLPVGKLLDRCAALRPGELSCPTAVAKHTLRLLARRNLELRVEVKGLEEQIRLLAAVAAPKLLDVFGIGPDGAARFLVTAGDNPHRLRSEAAFAALCGSNPIPASSGKTQRHRLNRGGGRQANAALHRVVVVRLRWHEPTQAYMTRRLAEGKTKAEIIRCLKRYVAREIYAILCPPLAAASTGKNLARAA

SEQ ID NO: 340727 - protein, 345 aa, unidentified
MEPMYYIGLDVHKQKLSYCVKDSSGRIHSEGWIPATHFDLDRWRSTLPQPWSAAMEATMFTGWIYDYLKPHAVALKVAHPLMLRAIVLAKKKNDRVDARKICDSLRCDFLPECYMAPTAIRERRRILRSRNLLVRQMVQMKIKISTLLMEAGVVYNKQRLHKADYFRELLATNPHIDGGLRSLLRQCREMVVRLGKTENALIRSLQHDRLLAERVERLMSIPAIGPITALSWALEVGEVQRFSSIKKAVSYCGLCGEQKDSGNTVQRTPLSKQRNKHLQTTLIEAAKMAPRYSPNLALLYDREKQRGNANRATLAVARKLVAYLMAVDRGQTHFLVLDRETYTAA

SEQ ID NO: 340728 - protein, 371 aa, unidentified
MTSIIYVGMDVHTTNYTLCSYSIATGNIFAETSVDPDYVNIVKYLDKMKRDLGGDCHFQCGYEAGYLGYSLHNQLAAHDVDCIILAPSTMATTKKKNGIKNDKRDARNIAKCLAYGTYSPVYVPTAEDNAVKEYIRMRNDERDTLKRIKQQLLSFCTRHGKRFTEGRNYWTQKHMTWLGKLDFGDAVLNETFLEYIALYHQAKDKVERFDKRIEELARTERYDEKVKKLSCFIGVKAHTALATIVEIGDFARFPSAQHYASYLGLVPGEDSSGDSIQRTGITKAGNSHVRSLMVEAAQCYSRGAVGAKGKALKDRQAGNEPRIIAYADRANERLKRKYYRIMFHSKRNIAVTAVARELACFIWGMMTDKIT

SEQ ID NO: 340729 - protein, 351 aa, unidentified
MGIDISKANFAAVLCYRSSTDDLRFSVSKKFDNDKKGFNQLMRWVAKESEKAIPTVFLMEATGVYHQKLAHHLYGIGKVVHVILPNTSKNYFRSLNIKTKTDDVDARVLAQFGVERAHREWCPPKKIYQEMRNLSRYRIQLQEQKTALSNIAHSKEYSYDVSTDIKKSNTKLIKLLDKEIDAIKAKLEALVATDLDLSERIRKICTIKGIAIQTAAGLIAETNGFDGFRNGKQLASFAGYDIVHQESGTSIKGKTRISKKGNRYIRHLMYYPALSASRNVTEFTNLRERVLKRTQIPMKAQGAIQRKLLLLVFTLWKTESEYEPEFHLKKIAQAKARATQDKLTRSFPLVG

SEQ ID NO: 340730 - protein, 403 aa, unidentified
MTESSDYESVQVFIGVDVGKDTHHAVAINRSGKRLFDKALPNDENKLRSLISDLKQHGQILLVVDQPATIGALPVAVARSEGVLVGYLPGLAMRRIADLHAGEAKTDARDAAIIAEAARTLPHALRTLKLADEQIAELSMLCGFDDDLAAQTTQASNRIRGLLTQIHPALERVLGPRLEHPAVLDLLQRYPSPEKLASLGEKKLAAQLCKLAPRLGKRLAADIAQALAEQTVVVPGTNAAAVVLPRLALQLITLRKQRDEVALEVEQRVIAHPLYPVLTSMPGVSVRTAARLLTEVACRAFASAAHLAAYAGLAPVTRRSGSSIRGEHPSRRGNKALKRALFLSAFAALRDPLSRAYYTRKMSQGKRHNQALIALARRRCDVLFAMMRDGTFYTRRVITCLTT

SEQ ID NO: 340731 - protein, 482 aa, unidentified
MKKRSIYQNRSQELLSLFEKAGSSEKVMCVPMDFAKKDHLVMFCNGYGDILRKPFSVKNSPEGMTYLIDQASRSCRKRSIKEQHVFFGGEDANSYAENFVSTLRSKGWLVAGVNAHDAKKQRANLQASTDRLDLMGIATMLLNCRANCCPAQSGIYRNLRTVVRHRRKLVAMSTEVKNRIYGIVDRLFPGFLDERKSGITPFTQSSLYLMEDRFTPKQIRRRKRDKLIEILRRYGTYKAESTADKLQQYAAKVFCTPVEHVDTLQLSLAQHVKHLRCLYEGVEQMEKEIALNLAQTQGAFLTSIRGIGIVLAAGVTAEIGDPFEQKPLNHLVSYAGIIPRVKQTGGTHGQTYTGKVAKRCNRILKDYVVKSAHHLGLHGPKDLMVDYKRREASGQHADFGMGRRYLRMGVSLMRTSQVYLPYWLRNADVTLKERADYYLKTWPKWREKWLKLGALEFAFEKNRPLGQWRQIVQELYDIKLKL

SEQ ID NO: 340732 - protein, 317 aa, unidentified
MGPYETIVAGIDVSKESLDVFLLPCGASQRFSNNESGCAELVKLLTEKAPSRVIFESTGGLETLAVGMLSAASLPVVVVNPRQIRDFAKACGLLAKTDKLDAKVIAMFGQRIEPEIRPLKDEAAQELSALISRRRQLVDMQTAEKNRLTAAPKAVRGGIVQHIEWLEQQVASFDDDISRFIQSSPVWKEKEQILTSIKGVGPVTASTLLAAIPELGSVSRHKISALAGLCPYNRDSGKHKGKRSIWGGRAAVRSVLYMATLAAVRFNPVIKAFYERLRNAGKLHKVAITAAMRKLLVILNAMLRDNRKWDDSFYTFT

SEQ ID NO: 340733 - protein, 342 aa, unidentified
MQHTTIAVDVAKSVFEVAISQRPGKVSARYRLTRQRFARFLGEQPPATVVMEACGMAHYWGREAQARGHAVRLLPPRDVRPYVRGNKTDRSDTTGILEANRNEAIRPVPVKSVEQHALTGLHRMRATWVATRTVRLNTLRGLLRELGVTIPTGSRQVVPRVWELVSDAESALPDALRPVLAEAAREVAELERRIGEVEAQLEGLARQSPLVRRLRSIPGVGLLSATAIVASIGNFTRFPSARHFASALGLTPRESSSGNVRRLGRITKRGDPYLRTLLIHGARSVLHHAKRNPKPDRLRAWALEREQARGHNKAAVAVANKLARIVWAVAARDVDYRGETAT

SEQ ID NO: 340734 - protein, 415 aa, unidentified
MGGRQQWYAGVDWGSQSHHVVLTDGDGRKIGERSFKHGGEGLAEMAAWLMAASCAAEPGQILAAIEVPHGPVVETLIERGFKVHAINPKQMDRFRDRFTMAGAKDDSRDAEVMASALRTDPRCFRSLAAADPIIVELREWSRIAEDLGVERNRLVNRLREQLWRYFPALLELEDDLGAEWLLELWEAAPTPNTASRLREATIAKLLKRHRIRRFDAAFVVNTLRRPPVCVATGTVEAASAHVALLVPRSRLLNRQIKDAHSRIDGLTARLMPAEAAEPGQKKQHDAEILASLPGVGRTVLATLLAEASDALQRRDYAALRSLAGVAPVTKRSGKSCVVVRRQACHDRLANAVYHWARVAVQHDPRSRAKYAELRSRGHSHGRALRSVADRLLNVACAMLKSGAAFNPSSADQKPA

SEQ ID NO: 340735 - protein, 372 aa, unidentified
MNHNTIYVGMDVHKENFSLCAYTLEAEKASYHQRTEADYKEVLKYLEFLRSIYGNDANFICGYEAGCLGYTLYHQLSANNVNCVILAPTTMLEQRSKKRIKTDKRDAEIIAKCLAQHNYSSVHIPTAKDEETKEFLRMRDDHKLALKKIKQQILAFCLRHSYRYDGKSHWTSAHLKWLRSLTPEDLYKEILDEYLLTYQNLSDKLERMDKRIEELASLEEYREAVKKLCCFIGVRTHTALSVLVEVGDFKRFASAKNFASYLGLVPGENSSGENQTRLGITKAGNRHIRLLLTEASQCYARGKIGFKSKELKSRQSGNTPEIIAYADKANERLRRRYYKMVLGSCKKHNVAKTAIARELACFMWGMMTDCIA

SEQ ID NO: 340736 - protein, 415 aa, unidentified
MEPIHKRVAGMDVHRMEHVATILLEQEDGTVLNETRKFGGFKRDMRALVDWLRSHRIELVAMESTGIYWKSVFSHLEAAGIEALVVNAFHVKNVPGRKTDVSDSEWLAQLARFGLLRGSFIPPKDLRELRVVSRYRRKLVQSLTGEKNRLHKVLDDAGIKLGGVVSDIDGVCARKMVEGLIAGKTPAELSALGHGKLKSSDELLQASMDGDLSPRHRLVLSTALNHLRYLEQQVAQLDRYLIEAMKPYAWAWRLLQTIPGIDEMSAAMILIEIGVDMQRFGSASRLASWTALCPGNHETAGKRKSGKIRHGNPIVRYLLCEAANAARRTKTVFQAKYTSLVIRRGHKKTIIAIAHKLIRTIYFVLTRRKPYHDTTVDYEAAIVARNAPRWIKALKKYGYWPKAAAANPATATAMA

SEQ ID NO: 340737 - protein, 471 aa, unidentified
MDVISERVAGLDVHKRTVVACVRRMSGRQVSRECRSFATTTAELLALLAWLRESGCTHVAMEATRVYWKPVWNILSDGGFALIVANAAHIKNVPGRKTDLNDAMWIADLLACGLIKASFVPPEDLQELRSLLRTRKQLVREQTSHVQRIQKTLEEANIKLDAVISDILGASGRRMIEAIIAGVRDPRQLAGLADRRLKATPKQLYDALHGRVRDHHRFLLQLHLAQWGALDAAIRAVDREADARIAELDDEEDAGQAPFCEMIARLSMMPGVSVLAARTIVAEIGRDMSRFPTAGHLVAWAGLCPDQNESDGKKKSTRLRKGAPWLKTMLVQCAWAAKRKKGSYYQAQFFRLQSRRGPQKAICAVAASLLTAIDHMVKNGTLHRDLGGAHFDRRSSEAQAKRLLAQLAKLGFQVQLQPAAACGVTQSIQSILFLVRSKATKQSRRLYTGSVEIATSPFGLLAMTADLRKAR

SEQ ID NO: 340738 - protein, 458 aa, unidentified
MSKKRSSGTGKKNRRILEQINHNAAGVDLGAREVWIAVGDHVSNEPVQKFGTTTSELRRSAEWMRSCGVNTVAMEATGVYWVAAFEIYEEYGLTPVLVSSRAIRSFNGMKKSDYIDCQWLHMLHTFGILQASLRAEAEMIELRAYMRQRRMLTERASEHIQHMQKALVVMNVRLDQAVTDITGVTGMSILRAILNGKRDPKELAMLRNPGCAKSEEQIAEALTGHYRDEQLFALKQAVELWDFHRNLIRECDQKIQTVIEKLPIKADRTSVPEARGKRGKPRKNEVQFDVRTLLYERLGLDLTQIAGLHILTILTVISECGIDLSRFPTAKHFCSWLGLSPGTKITGGRVISSRSRRTANRAATALRVAAQALADSKTELGAFYRRKKGQIGPEKAITATAAKLARRIYDSLRTGRPYSDRGPQFYEQMDRERTLASLQKRARRLNMRLVPIDQKEAA

SEQ ID NO: 340739 - protein, 315 aa, unidentified
MTITLEEYVGIDVAKDKLDMAVLGQKATSEVFNTKRGITALVKKMCQLNPKLIVVEATGGYEEALVLALYEAGMPVALVSPQRVRQYAKARGLLAKTDKLDAQNLAEYGKHIQPRLFVAKSEEGRRLSAIIGRRRQLADMQKAEKNRLRTAYLEMKSSIQTVIDCLEAEIERLDEEIRNFMNEHENFKEQEELLRSAKSIGPVTAATLLADLPELGKLDRKQIAALVGVAPMNQDSGKKRGYRKTKGGRPEVRSVLYMSALSGIRYNPIIKAQYDQLVKRGKEKKVAITACMRKMLTILNAMMRDQQPFRKVSML

SEQ ID NO: 340740 - protein, 346 aa, unidentified
MTKPQPAVEVFAGVDVSAREISVARMLAKEGKPTLVAFANNASGHKALLAFLLEKTERVRVCLEASGNYSLDLALVLHAHRQVEVSVINPRRARKFAESLGERSKSDPVDARVLGQYAARMPWEPWQPPSAIALRLRAITRAIESLGVMHTQESNRAHALASSQALPLLVLRERQRHQHYLENRMRQLRREARRLIARDADLERRYRLMLTVPGIGETSALQILGELVVLSDTADARQWVAFSGLDPSIFTSGSSVEKRPRISRGGSRHLRRALYMPALVALRREPHLRGFYERLLSHGKARLQAVVAVMRKLLHALFAMFRSNQPYDGSKLCASEPMVSRTMQCA

SEQ ID NO: 340741 - protein, 386 aa, unidentified
MQKLNDLSRCLTPLEPDSTLIAVIEMSLSSWLVAGIVPGVERQPLKKLAVDESVLLKLLHRWREEAEKAGYMIKRITVACEAGRDGFWLARWLLARDIEVHVIHTSSVAISREHRRAKTDRLDTELLKRAFLGWLRGERDHCKMVAIPTIKDEDGKRPNRERESLVGEQSRIINRIKATLVRLGVRGFNPKLKKAAERLEGLRTPEGEPIPPNTLSELYRDMERRRLVRDQIRQIESARLDRLEHAPGEGAHAMVRLLARVMGIGIETADMLVREVLSRNLRDRRAVARYAGLTGSPDESGKKRREKGLARSGNPRVRRGMIQLAWRFLLFQNDRALAQWFRARTDNARGTRKTMIVALARKLLIALWRFVREGVVPDGVVLRPAS

SEQ ID NO: 340742 - protein, 349 aa, unidentified
MKIQKHCVGIDISKSTFTACICSEFENQDLRFSEVKTYSNDKIGFNQLNRWVRKLVKDSAPMVYLMEATGVYYENLAYHLFKIKKVLHVVLANKSKHYFASLNIKTKTDEMDAKVLSQFGVERKHTPWAPPKEVYLKLRNLTRYHLQLQDQKINLLNIQHAKNEAHETQSFILKSNKKLIKVIEKQILECKKEIQEVINSETELSEKVEKLVEIKGVGILTIATVIAETQGFEHFKSVKQLVSYTGLDVVQRESGTSIKGKTRISKKGNKYIRRALYMPSIVACRYNENLRITYMNIITRKPSKMIGVVAIQRKLLILIYTLWNKNEHYIDGYKTKVAPEQAEATRDNS

SEQ ID NO: 340743 - protein, 423 aa, unidentified
MDILYERVAGLDVHRDTVVACVRIMVDGKAQRECRTFAATTDPLVELRRWLEESRCTHVAVEATGVYWMPVFRILGEGAFELIVANAAHIKNVPGRKTDMNDAMWIADLLACGLIKGSFIPEEKVQELRALTRTRKQLVREQARHVQRIDKTLAEANIKLGSVISDIMGASGRRIIQAMIDGVRQPNKLAELAGKQLKASPKELYDALHGRLTDHHRFLLALHLKQRDGLDETIRKLDVEIAQRIEGMEAEAGGGKTPFRHLIGLLTTIPGISAVAAPAILSEIGADMSRFETAGHLVAWAGLCPGQNESAGKRKSSRLRKGAPWLKTMLVQCAWAAKRSKNSYYRAQFFRLQARRGPQKAICAVAASLLTAIYHILKNGTEHHDLGAAYFDRRPTEVKASRLVARLKKLGFTVQLQHIAEAA

SEQ ID NO: 340744 - protein, 412 aa, unidentified
MKVVHEICCGIDVHAKMLVACLILANGEKQVRTFSTMTADLLRLRDWLVAAQCTHVAIESTGVYWKPVFNILEDALTVILINPEHARVLRGRKTDVKDAEWLADLLRHGLLKASFIPPPVIRELRELTRYRESLVREQGAVANRIQKLIESGNIKLGQVASDALGASGRAILWALARGEKNPSKLAALARGKLKEKSLSLERALDGRLTVNQRYVLGELLHRWEELESADARVTSEIDKYVQAHPKLARAREVLDSIPGIGPRVAEVIMAEIGIEMTAVFMDEAHLASWAGLCPGNKATGGKRLSGRTRKGNTYLRSALVQAAWGASRKKNCYLSSQFFRLTKRLGRKKALVAVAHSLLVIIFHVLQRDQTYTELGGDYFDRHHVEQQREYYIRRLQMLGLKVNVEELPAAA

SEQ ID NO: 340745 - protein, 378 aa, unidentified
MGLDVHKQSWYVTIRSLGIEVGHFSQEPDAVGLHQYLQRNFPGGHYHSAYEAGFCGTGAHEQLCKVGIDNMIVHAADVPSTDKQKKNKTDLHDSRAIADHLERGNLHGIYVLSQEQQELRSLFRLRECKVKDTTRVNNRLKSFLMYYGIIIPAGVSKRGDLTGRALAWLDIELRSAAGTIVLQQYIAELKYQRKQLFQLTKTLRRQVMAHDKQTYINLITIPGMGSITAMGLMTEIGDFRRFDDPDEYSSYLGLYPWEDSSGDCIKTKGMQPRCNSHLRPLLVEASWHSIRKSRNLFAFYSKHAGGKNGKKAIVKVARKLAMIARGVAISGQPYQEDYQKKDNKHEPAEKMKAGRFSSGITEQHINKQPNYGRMSMPG

SEQ ID NO: 340746 - protein, 376 aa, unidentified
MEHDSTVYVGLDVHKESITVAYAVGMGDVELLGRIGTAKGDIDRLCKRLRSKGRQVHVVYEAGPCGYGLYRQLVEEGFECMVCAPSLIPRKPGERVKTDRRDSVKLARALRAGDLSAVHVPGIEDEAFRDLARAWVSAKDDLKQARQRLKSFLLLHGVRYPGKADWGSSYRRWVSQHSFSNEWQQLAFEEHRRTLGDRMAQCERLEAALRDSVVNWRFYPAVLGLQAMRGVQFTTAVGMLAEVGDLSRFEHPRQLMAWLGVTPSEHSSGDKRRQGGITKTGNSYARKLLIEAAWSYRHQARVSENIGRRHPGLPKPIIDRAWDAQLRLCRRYRKLAARGKNANTAVVAVARELAGFIWDITRLSMSLAIPRTGLSA

SEQ ID NO: 340747 - protein, 343 aa, unidentified
MALIIGVDPHKATHTAVAIDHTEAELARARVRATRTQVPQLLGWAEPLGERTWAIESAGGLGYLLAQQLVAAGEIVLDVPATLASRVRVLGTGRSDKNDPNDALSVAIAALRAPSLREVAPAEHAQVLRLLAKRNIDIGKHRTRVVCRLHNLLMELSPGGIAKELNVSDAVALLEGVRPVTPVEGARHGLAAELLADVQRLDEQLKDSHRRIRTAVAASQTSLTELFGVGPIIACYLIGFTGDIGRFVSRDAYAAYNGTAPVERSSGGRIVHRVSQRGNRRLNHALHFAAICQIRQPHSEGRAYFERKLAEHKTNKDAVRSLKRHISNAVYRQLVTDAEPPKG

SEQ ID NO: 340748 - protein, 367 aa, unidentified
MQQQTSAATETEIKGRNIVDFSGKTICVGIDTHEKDYQVAKVINGICLGNHRMKASPQELIEHLRSHYPGATFKCVYESCAWGFTLQRQLQKASIECMVVHAADVSTTDKEKRRKTDKVDALKLARDLESNQLKAIYVPDEDLQKERNLVRFRKRLKGDLIRSKNRLKSLLKYQGINIPVQFGKNCWSYKFMDWVEGEAKKDILLQDTLLLMLEQIKQLRCLLLNCEKKLRELMKRKYQQKAELLMTTPGIGRTLATLFVLEVGDIYRFEDFDALNDMIGFCPDTDDTGDTKRDKGITARRHKQLRSGLLQAAWQAIRIDPALLEAYQQFIKRMKPHQAIIRIARKLLRRMRAVLISGIPYQQGVIA

SEQ ID NO: 340749 - protein, 349 aa, unidentified
MIKNAPKEAAVFGVDLGKNLFHVVGLDARGGVVQRAKFRRDTVLAFFQRAAPTLVGMEACPGSQWFARKLQEFGHEVRIVPAQFVKPFVKSQKNDTIDAEAIAEAVTRPTMRFTQVRTVEQIDVQALHRMRDQLVSSRTRLINQARAFCLEYGIALRQGVGTFRVDLPRVLADDSNDLSQAMRQMLAEVLDDISHVDHRILSVTRQIEALADREDRARRLMTIPRIGPMAATALLAAVGDGRQFRRARELTAWLGLTPREYSTGGKTTLLGISKRGNRYVRKLLVHGARSCIAHMNRTKDRIGDWLDALESRMHVNKVTVALAAKMARMAWAIIVRPGAIYDRRDPAVA

SEQ ID NO: 340750 - protein, 317 aa, unidentified
MPQSERIVGIDVSKRQVEACLRPRRERLSQPSTPEGRQAMIGWLRQHDVAVAVMEASGGYERDWAAALRGAGIAVRIVDPKRVRYFAKSAGRLAKNDPIDAEMIAWFAETFATEATPAHDPEREAVDRLMTVRAMLVRLESQIGQLGEHRQPPLVERAGRAIARVIVRQRKQLETAIAARIARHADLAERHQIIQSVPGFGPRFAAGIISWLPELGRIGGKPTTALVGLAPYDDDSGGHRGERHIKGGRREIRDLLYMAALAATRCNPVIKAHYQQLRARGKKFKVALVACMRKLMVILNTMLMRGQMWNPPAAAIA

SEQ ID NO: 340751 - protein, 345 aa, unidentified
MALYVGLDVSLRMTSICVVEADGSSVWEGKAESEPVALVTVLSPWRDKIALVGIEACPLSEWLYGALVDSGFQIVCIETRHAQRFLSSRPNKTDRSDARGIAEMMRLGHNRSVHVKSKASQLLRTILIARKKFVDHMLAIEDTIRGLMKVHGLRFGAVHRSRFAAKVETLLADAPDLRMAIEPLLEVRNMMRKHKALMDRQLSQMARKDDVCRRLMTVSGVGPLVSLSFKATINDPNWFKDSKAVAAHLGLTPRAYQSGEIDRSGNISKCGDKLMQHALYEAPNSHMRISKKWSKLRAWGVKLGKRIGSRKACVAVARKLAIIMHRMWVEETDFRFGKPPVTQPT

SEQ ID NO: 340752 - protein, 309 aa, unidentified
MDTIAIGIDVSKDRLDVHVLPTGEAFAVTRDGAGMEAMIERLRPLSPQLIGVEATGGYESVVAASLAAAGLPVVVLNPAQVRAYAQALGKRAKTDPIDAAVIARFLTAVRPQVRPLPDAQTQALADLVSRRRQIIQMIVAEGQREKRAVPRMKKSIARLVKALTRELSTIDTEIDETIRSSPQWALKEELLSSVPGVGPTVARTLIAELPELGSLDRRQIASLAGLAPFTRQSGQWRGRSFIGAGRTSVRSVLYIAALVAGRFNPQLKAFRQRLIDAGKPKKLAVIAVARKLLTILNAIIRDKKSWQDA

SEQ ID NO: 340753 - protein, 419 aa, unidentified
MSKSMFCGCDVALENNTVWLMLDDGSQPTKLFNVDNSQLGAEVLVERICSIAKEHCVSDILIGTEATSMYDWHLLEYLAESKLALEFDLKLYRFNAKWIKNFKKSLAPRGKTDPIDSFAIAERLRIGRLPKEYIPDSKYQPLRKLTRFRFHLMQQIAREKNFFLANLFLKASAYSRVSPFASTFSATSLAVINDFFSVDELAAMPIEELTEFILEKGKAHFSKPGEIADNLKRVARESYRLKPELAPTVNLILASTFNNIRCYKEQVKIVDAAIAENLKAFKHTIESTPGIGPVYTAGILAEIGDVHRFLNDSALAQFAGLTWPKYQSGKFQAEETRMSHTGNQYLRYYLVEAANSVKRCDATYKAFYEKKYKEATKHHHKRALVLTARKLVRLVWTLLTKQTLYQPGYCSFEDLSKIS

SEQ ID NO: 340754 - protein, 402 aa, unidentified
MNCVGIDVSKGKSMIAVMRPFGEVVISPFEVQHTASELSELAKLLKSLDGETRVVMESTGNYHTPVAWLLHDAGLYVSVVNAMLVHDYGNNSLRRAKTDKKDAVKLANYGLDHWLILPRYVPEEDTRLMLKTCYRQYQQYSKVQTMLKNNLISLLDAIFPEVNRLFNSSPRADGSEKWVDFVSTFWHCQCVSTLSLKSFSARYLKWCRKHGYYFSQEKAFEIHSKAQSCIGVMPRNETTKLLVQQAIAQLKATSAALAALKQEMQSLAASLPEYPVVMEMFGVGSTLGPQLMAEIGDVRRFHSKKALVAFAGIDAPPCQSGKMDIHSRSISKRGSAALRRTLFLVMGVYLQSAPLDEPVYQFMDKKRSEGKPYKVYMMASANKFLRIYYASVTAYLNTLARI

SEQ ID NO: 340755 - protein, 345 aa, unidentified
MENMYYIGLDVHKKTISHCVKDGSGRIHAEGKIPATRFDLDRWMKTLPQPWTVAMEATIFTGWIYDHLRPHAAAVKVAHPLMLRAIAAAKKKNDRIDAKKIADGLRCNFLPECYMAPTAIRERRRTLRYRNLLVRQTVQLKNRISGLLMEAGVNYNKEKLHKVGYFRELLKSNPDIDESLRPLLQLCRETLVRLQKTESALIRSLARDRFLVERVEHLMTIPAVGPITALTWALEVGEVSRFSSIKKAISYCGLCGDEQSSGEHVKRTPISKQRNKHLQWVLVEAAHMAPRLSPELALLYDREKQKGNANRATLAVARKLVAYLVAIDRSQRDFLLVEKENQAAA

SEQ ID NO: 340756 - protein, 354 aa, unidentified
MNIKYIGMDVHKETISIAVMNGEGKLVMESIIETKAITILQFIQGLRGDLHVTLEEGTWAAWLYDLLKPHVTKLVVCDPRKNALMKEGNKSDKIDARKLADLLRGGYLRSVYHGENGLRTVKELARSYLTISKDLSRVMNRVKALYRSWGILCGGQQVYAPRHRSEWLNKIGEAGVRRRAEFFYQQLDALRALRQAVRRDLLAESRKHGATKLLRQIPYIGPIRAALLIALIQTPYRFRTKRQLWTYSGLAIETRDSAQHRYVAGQLRRSKKPQQVRGLNQNHNHDMKAIFKSAATMASSREGPFNDFYQGLLTKGMKPAMARLTLARKIAAITLIVWKKGAHFDAEQLKPQAA

SEQ ID NO: 340757 - protein, 329 aa, unidentified
MEAVSNKLRDFSGQNIYVGMDVHYKSWKIHIYSDEFELRSLSQEPDVERLSNYLNNHYPRANYQLAYESGFCGFWIQRAFAAKGINCQVVHAADVPTNNKEHLRKTDKVDSKKIAKGLRSGDLNFINVPDIGLELDRQLLRSREQLAKDATRIKNRIKAILKLQGIEIPVLYKDGRWSRAFVKWLQELDFKAISGKLAMQTQVNELLFLESQKKNIDTAIKELSKTGRYSTNAGLLQSIPSIGLLTAMILLTEIGDINRFKRLDELCSYCGIVPNCHNSGEAENTGGLSRRGNSIIKKILIECAWVAVKKDPALLLYYKQQITHIISTL

SEQ ID NO: 340758 - protein, 403 aa, unidentified
MSIFVGLDWGGASHAVCVLDGSGKVLERFLVAHDLDGLADLVTRLRRWGPPAGTPVAIERPGGLIVDCLVDAGFIVTPIHPNVVKDCRPRYRAVAAKSDPGDAYILADILRTDGHRLTPLSPQSDAIKALRALVRGRDDLVAAKVGLANQLRALLDSFWPGAIACFADIASPIALAFLDRYPTPGSAVRLGEKRMAAFLGQNQYSGRRAAAEVLARLRAAACGLAAEAEAEAKGELVKALARALETIVAQIAKLTSRIEHAVAELPEGRIVMSFPRAGKICAAQIAAELGDVRARFQSEHHLAAEAGVAPVTYQSGKSRGVGWRWACNKRLRAAVTCFADNSRHASPWAALVYRKARERGCNHAHAVRILARAWLRILWRAWQDGSAYDPAKHSSARELIASG

SEQ ID NO: 340759 - protein, 377 aa, unidentified
MGDHSEAFVGIDTSKLRNAVAIADSGRGGELRFLGEIENTPAATAKLVRKLAAKYERLTFCYEAGPTGYGLHRQIKGLGFECTVVAPSLIPKRPGDKVKTNRRDALSLAKLLRADELTAVWVPDGPHEAMRDLTRARETAMLDLRTKRQHVSAFLLRLGRPYPENKKTWSKTHVSWITSQKLEHPQQRLVLEEMMLAIRQAQERLARLEQAVAAAVPEWSLAPVVTALMAMRGIDMVSATTLLAEIGDLSRFRTPTELMAYLGLVPSENSTGDTVKRGPITKAGNRRARRMLVECSWSYQHPPRVGQAKQPKVDAAPPAVREIAWKAQCRLYRRYRMLIRKGKLKTVAIVAIARELAGFIWAVARAVSTMRVAAAAT

SEQ ID NO: 340760 - protein, 387 aa, unidentified
MPQLSDLSRSLVALEQDATLIAVIEMSQSSWLVAGIVPGIDRQPLKKLAPDRDGLLQLLYRWRKEAIQAGHTIKRIAVAYEAGRDGFWLARWLRARGIEAYVIHPSSVPVSREHRRAKTDRLDTELLKRAFLGWLRGEPKHCSMAAIPTIEDEDARRPSRERESLVKECTRIVNRVKASLARLGIRGFRPTLAQAPKQLETLRTPDGSAVPANTLAELRRDMARLSFVKQQIKEVEMTRAKRLEQTHGERRIAMVRLLARVVGVGIESADLLVQEVFSRELRDRKAVARYAGLTGAPDESGQKRRERGLAKAGNARVRRAMIELAWGHLLHQKDSPLAEWYRRRTADARGGTRKTMIVALARKFLITLWRLVTTGEAPAGLLLRPAA

SEQ ID NO: 340761 - protein, 362 aa, unidentified
MSYRIAGIDVHKKMLAVVVSDVEVDAEFQFERRMFGSNPEQLRALAAWLVEQEVEEVVMESTAQYWKPVWEALERYWKPLCEKREGAKRKSGRLHLAQAESNRGRRGRKRDFVDAERLVKRLVARELTLSFVPDAEQRLWRTVTRKKFQLRRARIRLQNQLESLLEEAHIKLSSFVSDLLGFSARRMLKALAEGETNPAALAALADERLRATPEQLSDALGACTELNDVYRRLLQMALEECRLIDEQIGKLDQEMASLLSQHQDAVERLAEVPGLGVDSAQQIIAEVGPTAATFPSEKCLSSWVGACPGEEESAGVNYSHRSPKGNRHMRRLLNQAANAAARTKGSIFELTYRRSVPRLTGC

SEQ ID NO: 340762 - protein, 460 aa, unidentified
MKRNELSLQIVNPHAAGIDVGSRSHMVAVDQNKDNVREFGVYTKDYEQLIIHLNNFGINTVSMESTGSYWQVLFSTLQKAGFEVLLVGGNQTKNVKGRKTDVIDCLWIQKLHSLGLLTGSFLLSDAIQELRTYYNYRQHLLEQSARYLNKMQKSMRLMNIRLDIVIRDITGKSGLAIVEAILAGHRDTHYLASLVDIRVKKTQQEIADSLNGTWREELLFELKTSLDFFKIYEKAIHECDKTIEQVLIKYAPPLVLTATQEKLLKVNKKKHSKHSPEFNISRIAFQYFGTDLFAISGMSHGSILCLLTNMGNDLHKFPSAKSFSAWLRLVPNNKITGGKVISSRTPSGKNQIAKALRQAANSIGNQKDHELTPFFKRIAFKKGRIVAITATARKLAVIIWNMIIKGEPYNKDKGKISNEKSKAIKLWQIEKRINSLQLSNEELNNLFLKTSFSTVQVQVV

SEQ ID NO: 340763 - protein, 358 aa, unidentified
MQPEASSEMKEMRYVGIDIGKLRCRAAVMDQEGSIIDEFFFNNNHQGIEHLASGLTMDGKIVIESTGSVWTNLYNILDERHIPVVLANPLKTKAIASARIKSDKIDARILAHLLRTNLIPESYVPPKELRETRALIRHRASIVKIRTMAKNKIHALLDKHGLTSDCSDIFGKRGMEWLNSLELPSLDGLILNNHLQHIDSLNHQIERVDEEIRIKASQDEDVKLLLSMTGIDVYTALLIKSEIGSIDRFPDYKRLVSWAGLAPSLHQSGNMEYHGAITKQGSRMLRWIMVETARVAATHDERMKQFYERVKHRRGDQKAIIAVANKMLKIIWFMLTRREPYQSRNLQLYKRKLNFLTE

SEQ ID NO: 340764 - protein, 314 aa, unidentified
MTSMTLDPPLPNPLSPAVELVAGVDTHKNTHHVAILDLVGRPVADREFRADGRGYAQVIAFLRAHGDVVRVGVEGTGSYGAGLSRALNAAGLTVVEVARQDRQARRRRGKSDPLDAHQAAVAVLAGTDTAIPKTGDGAVESMRILLAERRSAAKARAQVMNQIHALLITAPELVRQAFRALSGQRLVTTLAKTRPGAIASPDPEVVARQTLRRFAVRHLTMQAEIDLIEHQLELLVRQVNPTLLSLSGVGPVTAATLLVAAGDNPERLETRASFAALAGVAPIPASSGQRTRHRLSRGGNRHANAALRDCCTSR

SEQ ID NO: 340765 - protein, 371 aa, unidentified
MGAYYVGLDVHSRETVFVIQDPTGAVIGRGALPTTPEALARLCHQYQLPAGTPVALETGTSAFYVARALSALDLKPIVIDAHEVRLKAHRPGQKSDRRDAFELCDGLRRDLYRSIVHIPSPAISALRTALSRRRHFVRIQTAEVNATKRLLRGAGWLGGHRGSLRNASGWERLIDALAREPALQTHTRSHYAVWQQAGEQVRAIDRLLAELGHGVRDEVRRLETVPGVGPIVALTAVAVFADVERFGSAKHVASYAGLVPSTYQSADRDCHGHITKRGSAELRTMLCEAAQHARRPSHPLHPYFLKLCARRGYKSAVVAVAHRLCRVLYALLRDGTDFQPSRLGIEEGPFTQTVTRRFRLTPKSAGRLALV

SEQ ID NO: 340766 - protein, 324 aa, unidentified
METTGKTPAYVGIDISKSFFDAALPQAGEYRHLHLGNDEKGFGKLLEAVEGLGAVCVLEASGPYYLRLAYYLHRQGVEVSVVNPLSVRRFCQMRMSRAKTDRKDAVMIAEYGKSETPDKWQPEPEHHLELKQLQTVLEGLQKTLHQHRRQLEALQEAPRVNRQAVASLKRMIREAEREIGQVEEQMQLLIEQHHGRLYEQVKSIPGIGSKCSLLLIVITGGFTRFSHHKKLIAYLGLSPRVYESGTSVKGRGRICKMGMSRMRQVLYVCSWSAIRCNKACKELYERLVSKGKAKKLALVAVVNKLVKQAFAIATKGGVYLEKSN

SEQ ID NO: 340767 - protein, 336 aa, unidentified
MYKSMNNFYFIGVDVSKKKLDFCVMFENKVVHEEVVANHQGAVIALIRQLESDYGIDNAQMLICAEHTGQYTYPLVCACESVECKLWLEHPSNIKYSSGVQRGKNDKIDARRIAIYAARFEDKVRYYERPEKEIERLKQLEAERSLYVVDLAKYKAQLKDQKEYMAERTYNDKARRLKKLMKGLEEAIKSITDEMESIVSSTEVLDRQYKLLQSIDGVGPVVALNMIIVTEGFTRFDNARQFNCFAGLAPFQYTSGSSQHSRARVSHRADKCIKALLHLSAVSVISKAGGELKEYYLRKVEEGKNKMTVINALRAKIVARMFAVIKRNEFYKPIFS

SEQ ID NO: 340768 - protein, 354 aa, unidentified
MSQTQNAAIAVVGIDIGKNSFHIVGHDERGAIVLRQKWSRGQVEARFANMPPCLVGMEACVGAHHLSRKLNSLGHNARLMPAKYVRPYSRGQKNDFRDAEAIAEAVQRPTMKFVATKTAEQLDLQALHRVRERLVSQRTGIINQIRAFLLERGIAVRQGQRFLRAELPRILATPPDVLSPRMVRIIEDLAGDWRRLDERVESLSNEIETIARQDAGCERLMSVPGIGPIISSAMVAAIGAGDVFTKGRDFAAWLGLVPKQISTGDRTILGKLSRRGNRYLRVLFVQAAWVVLIKPKIWERHGLKPWIEAARKRLHHNVLAIALANKLARIAWSVLARGRAFEARKIDQAANQSA

SEQ ID NO: 340769 - protein, 379 aa, unidentified
MRYFSLDVHRNYCEGAELLPNNTVRRFRFPNELKAWKQFARGLDEQCKVALEATCNAFMIYDILSEHGAQVVLVNTLKTRAIAEARIKTDKLSAEILVRLLAADFICEVWVPPKEERELRTLLHHRAALKRQIVGVKNRIHAILMRHGIPVPVSDLFGVKGRRFLYSLEELPEVERVVLASNLKVLDSLEAEIKEIEDELYLRAQARPEVKILLGIPGIDVLAALTILAEIGDIRCFASAKKLASFAGLVPSVHQSGKVRYTGHITRAGRSMLRWILTQVALQAVRHPGPLREFYLRIRERKGHKVAIIAAARKLLTIIWVLLTRQTSYEGAREELRERKIKRMMKKGAPYMIDIDIPQKLVFCIEMDGNVFERPDSAA

SEQ ID NO: 340770 - protein, 380 aa, unidentified
MKNVRFIGLDVHAETIAVAVAEPGGEVRSLGTIPNRPEPVARLIRKLGKPEQLRVCYEAGPTGYVLYWQLSELGVQCEVIAPTLVPVKAGDRVKTDRRDAEKLARCYRAGDLTPVWVPDAAHEALRDLVRARLAAKRDQLRARNRLGKFLLRHGRRAPEGTTAWTLKYLGWVKQQSFEQAAQQATLVDYLHEVEHEAERIVRLERSIDTAIETLPQKMRAVIEALQSLRGIAKISAVSIMAEVGEMSRFEHARQLMGYSGAVSWENSSGPRVHRGGISKAGNAHLRRIVVEAAWAYRHRPGLGATLLARQREQNEDIKAIAWKAQHRLHSRYAKLLAKGKPKQKVITAVARELLGFIWAIGVAAERSQAAAPRRTLKRAA

SEQ ID NO: 340771 - protein, 346 aa, unidentified
MKYYAGLDVSLKEISICVVDQDGEIAMRGSAPADAEGVAGWFRNRSLQPETIVHESGQLSIWLQRGMAEIGLPAICIDARKAHKSLSARLNKSDAADAEGLAQLARTNWFTPVHIRSEDADRLRSLIGARERLIRLRKDLEGHIRGMLKTFGIRMIGVGRGRQRQCFRDQLAAAGETDPILRTIADGFIAAHNTLCEAAADLERAVKAKAKSHPVARRLMTIPGVGPIVSLSFLSLIDDPNRFSKTSDVGAFLGLTPRRHQSGEMDWSGRVSKCGDAAMRGLLFEAASCVIRQVKRFCSLKSWAVRLAGRRGFRKAAVATARKIAVLMLTLWKSETDFQWTTEATA

SEQ ID NO: 340772 - protein, 424 aa, unidentified
MFGTASRAREERKLEQEWELFVGIDWGSEQHRVCVVTRSGDIVDQKWIEHSGQSLSELVVWLRSKSSASPDRIAVGIEMPRGPVVETLMEQGFAVFSINPKQLDRFRDRYSPAGAKDDRRDAFVLADSLRTDMHCFHAVRLDDPAVIRLRELSRLDDDLRQEQNRLHNQLREQWHRFFPQLLKLSSAANEAWVWDLFQAAPLPPKAAKLPESRIQRILSKNRIRRMDAHTVHTTLAEKPLTVAPGAAEAASEHALLLLPRLRLLQQQRAAIAKKLEALLEQLAMPDQTNGEIIEHRDAEVLLSLPGVGRQIAATMLSEASQAIAERDYHGLRCYTGAAPITRQSGKKKLVLMRQGCNERLRNAIYHWSRVSVVCDPKSKAQYTQMRAKGHTHGRALRGIADRWLNVLFSMLRYKTLYDPTRRTA

SEQ ID NO: 340773 - protein, 386 aa, unidentified
MRGKTFVPQDYDVFAGLDVDKKTIAATFSSQQGFIRSLQMPYNVDHLLNHVRKHFGDQKIAFVYEAGPTGYGLYDGLAAQGYRCLIAAPSMITRAPGQRVKTNRLDSRALSESLRGGQLKSIHVPSQIYRELRHLTQLRDTMVREAAAHKQRIKAMLLLEGIGFPPAPAGSQWSFRVKEKLRKLVCSRTVRFKLDQLLDSLEFCEKQVVNSTKEIRRFCKEDAELSQSIQYLMSIPGIGWIVASQLLARIGDWRQIDNVRQLGSFLGLVPTENSTGDTVDRGSITRVGDGRLRSKLIQAAWSAIRQDAELREFYRSVCQRNPRGKGPRIAIVAVARKLSTRIYAVLKNQRPYIVRQQVHSVPLTQEETSPQGTTRRCAEPGETDAS

SEQ ID NO: 340774 - protein, 283 aa, unidentified
MDATTVALDLAKDVFQVARANRAGRIVERKRLNWRQFERFVDGLEVGTTVVMESCGTAHYSGRRCQGRGAAVRLLPVRYVRPYVRRNKTDRTDAGALLEANRCGGLQPVPVKTVEQQALQTLHRVRTQWQAARTARINVMRGILREHGLPIRVGARVALTRITVMLEDTDLALPDLVRHTVGLILDEVRSFEARIATIDQQLARVAREHPVAHRLQQVPGVGMLTATAIVAAVSHIHAFHRGRQFASWLGLTPRGSSTGGRRYLGRISKRGDRYLRCLLTHGA

SEQ ID NO: 340775 - protein, 331 aa, unidentified
MTAEYIGIDLHKAFVQACAMTPAGDRVWEGRFARTADGVARFVAQGVGASHAIAVEASGPTWAFVDALHPTGAQVCVVDPRKTRLKAGFAAKTDRLDARRLADALRRESVVSIYVPPPAIRELRELCRGRHQVIRLRTRLAQMIRALLLRCDAGEPPGTRLWAPAALSWLGTVQLPTDVDHSLRRLERLYRAVLVETQAADQEIRHRARVDPIAIALDDLVGIGPVLALTLRAEIGDITRFRGGPALASYAGLVPRVDSSADRVHHGRITHQGSPWIRWALVEAARYAIRRDDARARWARRLAVRKGLNKARVALARVLCDQVITTWRQAN

SEQ ID NO: 340776 - protein, 354 aa, unidentified
MEKITTVGLDLAKQVMAVHAVAADGRAVLRKTLRRDQLLPWLAALPPCVVAMEACGGAHHWARELTRQGHTVRIIAAEFVQAFRKGGKNDANDAEAICTAARQPNMRFVAMKSVEQQAALCVHRLRQGLVEERTALINRLRGLLTEFGVVAPLSPEKLRRELARCQDPDDLRLPATVRQLVGEQVSALDQVEERLAAYAEHIAAQARGSEVAKRLQTIAGVGPTTAAALVATVGAPQEFSNGRQFSAWLGLTPKQHSTGGKTRLGRITKRGDGYLRTLLILGAKSALQAALRKAPELRHPLQRWIVATVDRIGYHKTLVAIANKHARIIWAMLVKGEDFDVQRMTPKVAAVATE

SEQ ID NO: 340777 - protein, 355 aa, unidentified
MNDAKYIGMDVHQATISAAVRDSSGNLVMEATIETKAETIFAFVHGLRGSLRVSFEEGTWAAWLHDLLKPHVTEVLVCDSRKNALLRVGNKNDREDARKLSELLFLNKLHPVYHGETGIRTLKELARSYLTITRDLTRVMNRLKAIYRGWGIPCSGQQVYAPRYRAEWLAKITEAGVRRRAEIYYQQFDALAALRQEVRRELLAESRKHPAMRLLRQIPSIGPIRAALLIALMQTPHRFRTKRQLWAYCGLALRTYDSGEYRFVGGQLKRSKKAVTIRGLNKNYNHDLKNIFKGAATRAAATAGPLQNFYEARIANGMKPPMARLTLARKIAAITLLVWKKGVCFDAEQLKQQAA

SEQ ID NO: 340778 - protein, 342 aa, unidentified
MDIEFLRVDLGKTVCSLAGLDASGAVVFRKRLQRHRLLDFLGGLPTCVGAMEACGGAHHIGRYCLQLGHEPRLMSPLYVRPYVKLHKNDDRDAEAIAEAATRPTMSFVAIKSEEQLDLQALHRARERLVTERTRLINQGRGFLMEHGVRVGTGRHVFQKELMRLAAEGAADLSTRMLSMLSDMAIELGTINGRVDAIDTEIKSLAKADADMQRLMEIPGVGPTIASALVAAVGTGRSFAKGRDLAAWLGLVPRQITTGGKAKLIGISKHGNRYLRKLFIHGARTVLHLVRDRSSPIPRWADGPKERAHVNVAAVAMANKIARIAWAVLTKGERYRPTALVGA

SEQ ID NO: 340779 - protein, 343 aa, unidentified
MKLSRVGVDLAKNVYQLHGVDRSGKTVWKRRLKRHQWFKVLLDTAGPECEIGMEACAGAHHWGRQLQSRGYTVKLIPPQFVKPYVKSNKSDAKDAEAICEAMGRPNMRFVTVKRVEQQDIQATHRVRAELMTQRTAKANQIRGLVAEYGLVAPKHLSSLRAAIPCWLEDAENGLTGDFRALLQGVWTDLLLLDDRVGEMDQKIKQLADNNEDCVRLQQLRGVGPMTSTAMIATVGDARQYQKRRQMAAAIGITPKQHSSGDRDRLLGISKRGDVYLRTLMIHGARAVVARAKHKDDRLSRWVTNIANKKHPNVAAVALANKTARMAWAMLRHGTDYDPDFAIR

SEQ ID NO: 340780 - protein, 390 aa, unidentified
MSQPNDLNKSVTALEQHNTLIAVIEMGQASWLVAGIVPGLERQPLKKLGSDEQALLQLLQRWRNEAAQAGRVIKRLVVAYEAGRDGFWLARWLRTRCIEAYVIHPTSVAVPREHRRAKTDRLDTELLKRAFLGWLRGEAGHCSMAAIPTIEEEDARRPNRERENLVGDRTRIVNRIKATLARFGIRTFKSTVRHADERLNDLRTAEGVPLPENTHAELRRDITRLRIVRDQIKEIEQERLHRLEQAPPAEKGPHAMVRLLARVIGIGVETADLLVNEILSRNLRDRKAIARYAGLTGSPDESGKRRREKGLARAGNARVRRGMIQLAWRFLTFQKDSALAQWYRERSADGRSGTRKTMIVALARKLLIALWRMVMTGEIPEGISLRPAVA

SEQ ID NO: 340781 - protein, 364 aa, unidentified
MQESQDIIVVADYHAENIEFRWFNEATGEERVGKYPTTREGILRQVEQAKREVSRDGQVVWIMESSTGWARVKDLIGTRARFVLANVLQMPLPPKARRRKTDKIDTGRLLREYLHGDLPQSFQPAAWWRQVRRVVDCRQDLTERQTAIKNWINSLLQHETWEDRENLWSGKGRRRLERLGLSVSDRALVELKLEQLDQLAAQQTEIEKRMKAIYEGWPQAQWVDQVRGIGMVTAVSVLAHVGPIERFATAEDLISYAGLAPGVSQSDATCHHGRIGGGGTDTHLRYLVIEASVWLRDIPRYRPTYERVLKKRGKKIARIVVARLFLRSLHKMLKDRLQFNPARSERMKAATTTATATATAGCSG

SEQ ID NO: 340782 - protein, 425 aa, unidentified
MTGDEKIRWLHAEATIVAGIDMAKRKPWAQIVDLKGLNVGSPFPFENNLHGFRRLVQNCDQAKKQIGATRVVVAIESTGHYWKPLARFLKASGIVVVLVNPYHVKRTKETEDNTPTKTDRKDARLIAVMAKDGKFLTCMLPVGAYADLRWLSQARRDKVQKLNAVVNQLHALLDQFFPEFPELFGKLTDKTPMKLLEICPFPGDVLAYSDAELFKKLKESGLRARKKTMALVRQAADESVGMTEGLSAARLALQAMIAEIHFWWAEIERLETAMTDSLQATGVGEFLVSIPGVGNISAAIFLGEVGDLSHFEDWRQLRRLAGLNLVENSSGDRTGQRRISKRGRPYLRAILFQMCASLIAWNAEFKSIYQYFRTRKFNQLKGKEALVALISKLLRVVFSLAKYGKHYNPALVMGPVRMEQIAAAA

SEQ ID NO: 340783 - protein, 342 aa, unidentified
MKDTMIGVDLAKSIFQVHGALMSGKEQFRKRLTRPQFWKFMAGHSPAVVVMEACGSAHFWAWEMIKIGHDVKLIAPQYVKPFVKRQKNDAADAEAIVIAAQRPEMRFVGPKTEEQQARAVLFRGRERLVRQRTELVNALRAVLYEFGYTAPQGLRQLKRIEAIVEEPNSDLPALVREECQGLIEQIFEKTVRIDTKTKRAKNIAAQTDTARRLQTMPGVGPLTALAIEAFAPAMESVPCGRDFAAWLGLVPRQHSSGGKERLGRVSKAGQADIRRLLIIGAMSRLNGMGRQSIPEGSWLARLSARKPKMLVAIALANKMARAIWAMLTKQKDYRDPMLAVAA

SEQ ID NO: 340784 - protein, 391 aa, unidentified
MFYIGIDIAKKNHEASIIDSSGKSLSKSISFPNSTKGIEKFNNFIAEFGVTTNNCIIGMEATGHYWISLFSYIVDLGFTCYVINPIQSDAFRKMYVRQTKNDSVDSFIIAQIMRFGEFSISNFSDENTFALRNLTRYRFALVDECSDWKRKLVAILDQVFPEYSSLFSNIYGVASKELLSKYPLPEDMLSIPAEELGDLLCKCSKGRLGINKAEEIQSRARETFGIKFAKRSFSFQIKQIISQISFLEEQLKEIEIEISCLLEDICPVITTITGIGSVLGASIVSEIGNISRFERANQLVAYAGLDTRIKQSGDFSATNTKLSKRGSPYLRRSIWLAATVAAFKDPALSIYYQGLRARGKAHGTAIGAVARKLTNIIFAVLRDQKPYTPNI

SEQ ID NO: 340785 - protein, 346 aa, unidentified
MSYSTTVGVDLAKNVIQVSVVNGRGKELSNRSLSRKKFAEFLGKQKPSLVAFESCATAHYWARAAERHGHEARIIPAKAVAPFRQGHKTDSNDALAVAEAARRPNIKEAPMKTTEQQGLQAIHRSRELLIQECTALSNHLRGILLEFGIAIPQGFASLLRTLPEVLEDGDNELPDLYRPTLHRMYSRLLELREDIEAMTGEVASLVKDHPVCSKLTALERIGPIGALLLYATMGSGKAFSGSREFAAYLGLAPRQYSSGSKTNIVGLSKKVGNSRLRSVLILGARAYTYRMKEPKGSKDKWLKAIIERNGVSRAAIALANKNVRTAWAMVTQGTEYQRRPQLEMAA

SEQ ID NO: 340786 - protein, 402 aa, unidentified
MNCVGIDVSKGKSTIAVMRPFGEVVVSPFEVCHTASELSELARLLKSLDGETRVVMESTGNYHAPVAWLLHGAGLYVSVVNAMLVHDYGNNSLRRGKTDKKDAVKLANYGLDHWLTLPRYVPEEDTRLMLKTCYRQYQQYSKVQTMLKNNLISLLDTAFPNANRLFTSPPRADGSEKWVDFVATFWHCECVCGLSEKAFTAKYQKWCKKHGYNFSEDKALDIYASAFAHFGVMPKTDTAKLLVEQAISQLRATSAALAALKQKMQSLAASLPEYPVVMEMFGVGPTLGPQLMAEIGDVRRFHSKKALVAFAGIDAPPYQSGQIDVRSRSISKRGSASLRRTLFLVMGVLLQCAPMDEPVYQFMDKKRSEGKPYRVYMMASANKFLRIYYASVKAYLDSLEHD

SEQ ID NO: 340787 - protein, 497 aa, unidentified
MAKAGASASRSRSIQKVLDTERRFIDDSVTRKMSAGIHPLSPGGTDSVTRKLSAGIHPLPPGGTDSVTRKLSAGFTRYPRGGTDSVTRKLSAGIHPLPRGGTDVMKQAPPSVSAKLTDQSPIDMGLKGGAMDPIYIGVDFHARQQTICYLKTESGELVISELQHQDKEQVRAFYQQFQGHVIIGLEASGYSPWFEAMLEQLSYEVWLGDATEIRRRARWRYKDDRRDAELIWDLMVHKEFPLLHRPTVQSREVLRMLRCRQKLIKVRTMSKNSLQAIALQAGLAKGPRLFSQAGQQEFKAAAMSPALQWQRDHWFELLKPLNQQLLETMVWFKAQAKDDAAITRLRTHPGIGLLTALCLWHTLQPVSRFRNQRKVVAYAGFDPMVRSSAERAIYLGISKAGSRMLRYLLVEAVHTAIRYDEDLKRFYKRVAERRGRPKAKVAAARKLLIRAYIMLRDEIDYAEFRRRAVAARLARRGQGPAPVVPEVLIGQSASPGA

SEQ ID NO: 340788 - protein, 370 aa, unidentified
MKLSIGSDLHKTQFTTLSLSEDRKIEESGMYPTNKTGYEEFLKQVKEWIEQGYEISIAVESTGNARFFRNKMISAGIEVKVVNTLKFKVINESVKKTDKHDARTLAEFLEKDMLPESILCSQESEDIRRILKSRSILVKTVVSLKNQVHGLLLGYGIESKRGQLQSKKERQRILVGLEDHRFNGNAANAVRPLLNTIDQVSSEVKILEKVLAKMVEEDEDVALLQTIPGVGIITASTIRAFTDDIERYSSAKKYAAHAGLVPWVQNSNMTIHHGHITKRGPVELRTAFVQTVMGMIRSKKHTMGYRLMSRYTDMKKHKGSGKSIIATARKMSTIVYTILKTREPFDPQKMAHNSKYKEMQATALGAALAV

SEQ ID NO: 340789 - protein, 368 aa, unidentified
MDTAYCTTIGADVSDRTTKICVMSKVNGRPKIVQETTIQTTPDGFRTFLEHQDKAAPLIFETGTHCRWINKVGMGMGFKTFVANPCRLRMITESTTKNDKNDARMLARMALADIGLLHPVKLRDDEHQKMVNLHEIRDQLVKERTADVLQIRAIAKSMGFRIPDCSAEYFHNVAKSDLPKELSDIVWPLMKELKNKAVTIKAVEKLMRRLAKSDTFNAQVERLMEIPNVGFITATCFVAVTGGDMERFDRPRDIGPWLGVAPKQCQSGDIDRQCHITKAGSRMLRWKLTECAQRTLQKNSADTDLKVKGLRIRARGGKIARSKSITAVARGLAVLMVAMLKKPDEPYVPISKDKAKELAQIRAAMSAA

SEQ ID NO: 340790 - protein, 402 aa, unidentified
MNCVGIDVSKGKSMIAVMRPFGEVVVSPFEVLHTDSELSKLARLLKSLDGETRVVMESTGNYHAPVAWLLHDAGLYVSVVNAMLVHDYGNNSLRRGKTDKKDAVKLANYGLDHWLTLPRYVPEEDTRLMLKTCYRQYQQYSKVQTMLKNNLISLLDTTFPDANRLFTSPPRTDGSEKWVDFVAAFWHCECVCGLSEKAFAAKYQKWCRKHGYNFSEDKALDIYASACRHFGVIPKTDTAKLLVEQAISQLQTTSSALAALKQEMQSLAASLPEYPVVMGMFGVGPTLGPQLLAEIGDVRRFHSKKALVAFAGIDAPPYQSGQIDVRSRSISKRGSASLRRTLFLVMSVILQCAPIDEPVYQFMDKKRSEGKPYRVYMMASANKFLRIYYASVKAYLESLEHD

SEQ ID NO: 340791 - protein, 346 aa, unidentified
MFFAGLDLSRKRLDVHVVDAGGATVLETAAPPDADGLRGLVERLDEFGPVCAAIESMNGARFVHDRLEQLGWDVEIADAQKVKGLAPLACKTDRIDAWVLAELGRRDLVPAIWLPDPAVRAERERARWRLHLVRHRVQLKNRVHATLIAFGTPCPVSDLFGARGRRLLDRLGVPDPWRSDLLAAVALIDELDREIDDCACELRRLGADHRYVPLLTSIPGIAWVLGYTIAAEIGDINRFASAKKLCGYTGLCPRVYQSGATDHRGPLTRNGPKFLRWALIEAAVHAARHPLYHEHYQRTARRLGKQRGKKIARVEIARKLAEAIWHMLTHNQPFAPAGPTRSALAA

SEQ ID NO: 340792 - protein, 388 aa, unidentified
MFAGIDVASERHVLARLDGTGQPLGRPIGIDEDAGGYCMLLEALGPPPALVVMEATGHYWKNLFASLVAAGHDVVLLNPIVARRFQQAQLERTKTDAIDAAALARFAFEKRPTPSYIHDDAAESLRELVRHRDRLQQDFEDRVLQLHRLVDLGFPEFTCYVKGMHTMLATALLAECPTAAAFARTPPRRLAKLRYDGRHRVGEDLAGRLVEAAKRSVGQHHGPVYDLQVRHICQDLDLWRRRLKELESDIGGLLDAHEVGRLLTSIDGIGPAARIIAIVGDPARFRSAGAFAAYVGVVPALRQSGKRTGIRAATGFGNARLRSALWMTTLAAVRLNDWLRPFYERLRAAGKPPKLALIAAMRKLLHAVYSVAKNRKPFVPITEQARAA

SEQ ID NO: 340793 - protein, 361 aa, unidentified
MNGIIKQSVGIDISKDTFTACVCRSDFSGNEYLSETVDFKNLKTGYNQLVKWSRKITDPSKDVVYVMEATGVYYENLAHHLHKLNLPVSVLLANKVKHFAKSLNIKTKTDQVDARIIARLGAERKLLLWEPPPEIFKLLKDLTREYRELIRERTAFKNRLHAMSSGYKPHPAIIKSNKAIIKKLTEHSEQIKEEIKKLIYSEEWLASRVDKVLTIKGVGLMTVATILAETQGFEFVKNIRQLCSYAGYDVVQRESGTSVMGKTRISKKGNGRIRAALHFPALQSSRHSPKMKSTYDKINQNKPSKMVGATALQRKILVLIYTLWKKDEVFVEDYEKKAGRGLSNLPAQDELPTKSQEFSFV

SEQ ID NO: 340794 - protein, 359 aa, unidentified
MLYSTSIGLDVHARSVNAAAFIPETGEVIETSLPYDSDAIIKWIKKLPSPARCVYESGPTGYDLLRKLRAADIWCVIGAVSKMLRPSGDRIKNDKRDAVFLARMLAVGNVVEVYVPNEEDEAARDLVRAREDIRQELTRAKQLLSNLLLRKGIVYDEGKTSWTKTHRKWLRKIKLSTSIENLVLSEYLMSIEEIERKRDRLDTAIMRLSSSERWKNTVSAICLLRGVSVLTAFAIAVEIGDFGRFKNASAFYSFLGLVPSLKESGDSSVKGSITKTGNIHVRKLLVEAAWHHKRKYYPSVQSPSCDIAPEVLQVAKKANIRLHDRAVYLSKRRIHPCKVNVAVARETAGFIWALANLVQ

SEQ ID NO: 340795 - protein, 324 aa, unidentified
MTTRVSLGLDMAKRTFDAALLQEGRTRHRQFANTPVGFQQLEAWLRQQATAPIHAGLEATSCYGEALALFLHQHHVPVSVINPARTHAFAKSELARTKTDKADAALIARFVATQQPPLWTPPPPEQRQLQGLVRRLEALQAMRQQERNRLDLEEATSLLREFITTHLTQIEDQIRQVQQRLRVHLRAHPVLQQREALLQSIPGIGECTALKLLAELPSPLQCRNARQAAAYAGLCPRHRESGSSVRGKTHLSKTGNARLRKALYLPAVVAMRYNPILREFAQRLLERGKPKMAVVGAVMRKLLHQAFGVLKHGQPFNPNYALTP

SEQ ID NO: 340796 - protein, 400 aa, unidentified
MVSVGIDIAKDKSTVCILRPYGEILKSPFDILHDDAEVNTLIVELMKIGDEVRIVMEATGTYHLPLLQQLKAAGLFVSVINPLAMKRYASSAIRKAKTDKLDAIRIANYGIDYWYRLEEYQPPEIIYEELRLLGRQYYQYNRMNTQCKIRLNNILDRVMPGIRPLFGASYAQVRGKDKLCDFISAYWHCDCIKKLSEAKFVQSYNAWSKKKGYRANDEKAKTIYTLASSGIPTLPSNLASTKMLVQEAVNTIQLMNSILFKILSQMQGLAKQLPEYSVVRGMSGVGEILAPCLIAEIGDIRRFNNNKSLVAYAGIDAPPFQSGTFNGTRRNISKRGSPILRKAGFEAMQCLKRNKPTEDNAVYLYIIKKEAEGKPKKVAKIAGLNKFLRIYYARVSAIYA

SEQ ID NO: 340797 - protein, 417 aa, unidentified
MRNDHELAAYIGLDWGDQRHAVQMQAADGGPVELIELEQRPDALHAWVAQLRQRCGGRPVAIAIEQRKGAVMHALMQYEFLVRYPINPKSLARYREVFHPSGAKDDPTDAALLLDLVRTHRAPLRPWRPDTVTARRLQLLCEHRRKLVNLRGGLTNRLTSLLKQYFPQALDWVGALDSRQACDFLQRWPSLAAVQRARPTTLRRFYQQHNCRRAAVIAGRLEQIATAQPLTTDPAIVDTLALAVQSYAAQLRPMLEAIHAFETQIAAVFADHPDQALFASFPGAGPVCAPRLAAAFGTDRTRWETAADVQAYAGIAPVTERSGKSVWVHHRLACPKFLKQTFHEYADQSIRFSGWARRYYDQQRGRGNTHHAALRSLAFKWMRILFRCWQDRTPYDEATYLAALRRHGSPLVMQENA

SEQ ID NO: 340798 - protein, 344 aa, unidentified
MNIATIGIDLAKNVFQLHGVNSHGKVVLRRQIHRGQMRGLFVNLPPCLIGMEACASAHYWARTLQSYGHTVRLIAPHFVKPYVKTHKTDATDAEAICEAVNRPNMRFVPIKSIEQQSALSLHRVRQGFVRARTAQACQIRGLLAEFGLVMPQGIANIKQVPKLLQVAGKELPAPFCRLIERLLAHLKELDRQTRELEEQIVDWHERSEPSRRLAKIPGIGPITASALVASISDVRSFKNGRELAAWLGIVPRQHSSGGKPTLLGISKRGDRYLRTLLVHGARSVIVRARKRNDEKDGWLKRLLERRHVNVATVALAHKTVRTVWAILAHDREYCPNYKSLPVAA

SEQ ID NO: 340799 - protein, 317 aa, unidentified
MAKVPPTYIGIDVSKARFDMASSPCRTMKSFLNDRSGTDELVKYLCAVKPVLIVLEASGGIERALVRALVAAELPVAVANPRQVRDFAKATGKLAKTDALDAQTLARFAEAVRPALRLLPNEMTLELRALVGRRRQIIEILTAEKNRLSRASRRVQTRIQAHIDWLESELERSNEDLDEAINQSPLWREQQDLLKSVPGVGYVISRTILAELPELGCLNRKQIAALVGVAPLNWDSGLMRGRRVIWGGRAHVRTALYMAAVTASRCNPVIRDFYKRLRAAGKSANVALVASIRKLLVILNAILKHHVRWRPVVNQLD

SEQ ID NO: 340800 - protein, 343 aa, unidentified
MQTITTIGFDIAKSVFQVHCVDAEGKVILRRQLKRRYVLAFFQKLPPCLVGIEACASAHHWSRELQALGHTVRLMPPAYVKPYVKRYKNDATDAEAICEAVTRPNMRFVPTKTPEQQSCLTLHRTRHLFIRQQTMVINAIRAHLAEFGIVAPVGRNGVEQLLSVAADSNDKRLPEFARACVAALGAQLRMLKAQILQFDRMITAWHRSNEASRRLDDIPGVGPTLATALVASVADPKVFRSGRDFSAWIGLVPKQNSSAGKDRLGSISKRGDRYLRSLFTTGALAVIRYAKIHGTRHRPWLTALLARRPTKVAAIALANKIARMAWAMMAKGERYKEPAALAA

SEQ ID NO: 340801 - protein, 404 aa, unidentified
MYNAVGIDVSKGKSTVAVLQPGGTVIRKPFDVSHTSQNLNELADYLSSLDGTTKIVMECTGRYHEPMIKALSEAGLFISIVNPHLIKNFGNNSLRKVKSDPADARKIARYTLDNWTELRQYSGMDNTRTQLKTLNSQFSFFMKQKVAAKANLIALLDNTYPGVNKLFDSPTREDGSEKWVDYAYSFWHADCVRKIGLKAFTERYMSFCKKHHYIFQQDKPEKLFNASKELVAVFPKEKTYKLLIQQSIQQLNLASEHVERLRREMNELASTLPEYSTVMGIYGVGKTYGPQLIAEIGDVSRFTHREALTAFAGVDPGVDESDQHKSKSNRASKVGSARLRKTLFQIMTTLLQNAPEADPVYRFLDKKRSQGKPYYVYMTAGANKFLRIYYGKVKECLRNLEQTE

SEQ ID NO: 340802 - protein, 391 aa, unidentified
MIYVGIDVAKDKHDCIIKNSVGEVVFKTFTIKNNLDGFNDLYQKIGSVMEDVSKVKVGLEATGHYSYNLLGYLIDKGLPTFVINPLHTNLYRKSLSLRQTKTDKVDASTIASMLMSDVNLKSYSDTSYHNEELKSLTRYRFDKVKERAKLKTSISRLVCILFPELEKLVPTLHMNSVYSLLYEFPGAKQVASAHLTRLSNLLAEASNGHYDKDVAITFREAARASIGSTMPAKSLELKHTIKLIRELDSEINEIEEEIKAIMNTINSPILSIPGISYRMGAMIIAEIGDFDRFDSADKILAYAGLSPSTYQSGQLDNCHPRMEKRGSRYLRYALFNATIFVCHWDPTFNAYLARKRAEGKHYYVAVSHATKKLVRLIYQLEKTRQTYNKAV

SEQ ID NO: 340803 - protein, 345 aa, unidentified
MELHTIGIDLGKTVFHLVGLNLRGEVVVRKKFSRTQLLRFTANIHVELIGMEACGGAHFLGRALREQGHEVRLIPAQYVRPYVKTNKSDYIDAEAIAEAVARPTMRFVPIKTDDQLDMQSLHRVRERWVMRRTAVINQIRGLLLERGITLRKGRHHVDAALPLILEDAEAKLSGAVRMLLAQLKMDLDQLAVRIDEADAVIHKTAHENEACQRLLAIPGIGPVTATALIAAVGNGGAFHKGREFAAWLGIVPREHSTGGQQKLLGISKRGNSYLRRLFVQGARAVLQQRTKQSSGLSAWLAQLTSRTHRNVVAVALANKLARIAWAVLAKNEQYRPPVLADGAAA

SEQ ID NO: 340804 - protein, 429 aa, unidentified
MNFRPIAGIDVGKFFSEMAILSPSNEVIARMKIHHDSISNVERAIELLKKTEKDFASRPFVVMESTGHYHKILFHSLCKAGFEVSIINPIQTDSIKNIGIRKVKNDKVDARKIALLYRFQELKTTNIPDEDIECLRNLCRQYYKLNDELTAYKNRLIGIVDQLMLNFKDVFSNIFSKAAIAVLEEYPTPTHIVKANRKKLISLIQKKSRKSLEWSTAKYELLISKAKEFAPLSVQNASNIAMLGVYISMIKTLEENLEKVLKAIRLLVAENMAKDVPMLALTLELLQSIPGIGFITAATILAEIGDFSAFSKPGKLVAYFGIDPSVMQSGEFTGTRNKMSKRGSRLLRRVLFTIALANIRTKRDKTACNPVLLEYYKNKCQSKPKKVALGAVMRKLVYIIFAVLRDRKHYELRYPQEHAHMLASKHSVA

SEQ ID NO: 340805 - protein, 350 aa, unidentified
MVIIGGDSHKRTHTFVAVDEVGRRLGQKTVPATTEGHLVALRWAQQWEERQWAFEDCRHLTRRLESDMLRAGESIVRVPPKMMAAERRGTRSPGKSDPIDAEAVARAALRVPDLPVARLEGESRRVKLLVDHREDLVAERTRMQARVRWHLHELMPELELAPKALGKFKHLDRVAALLANIDGTVAEIARELIVRIRELTIRCNELEREITRIIRTLAPTLLALPGCGPLTAAKVVGETAGADRFKSRAAFARWNGTAPIPAWSGSERFRLSRSGNRQVNAALHRIAVTQWRGVGPGQAFIEQRMAEGKTKTAAIRLLRRRLSDEVLRRLRSDQAARAQTDPHQEFASAA

SEQ ID NO: 340806 - protein, 404 aa, unidentified
MAVMIGIDPHKGSHTAAALNEAEAVLGELRVRSGPAQLEQLVTWAARWPDRTWAIEGAGGLGYLLAQQLVATGEHVLDVQPKLAARVRLLATSSTNKNDPNDARSVAIAAFRSPEATKVQEEDHAAIMKMWAKRRHDLVSARTQVVCRLHAVLCELVPGGISGQLYASKAAKMLDQLEPENAVAAARHELGLELLEDLRRVDEQMCETKKRIAQAVAASKTTLTEIFGVGPIVAATVIGYVGDVTRFASSDRFAAYNGTAPIEVSSGPRKIYRLSRRSNRRLNHAIHMAAVTQIRSLQSEGRAYYDRKLAEGKTGKEALRALKRRISDALFRQLQIDSQRARKSIMGPGGQTGNDSVACVTDSHPDGRLFGEAIPEPKTTLRPAATAFRSRRSKTPTRSARRAS

SEQ ID NO: 340807 - protein, 344 aa, unidentified
MNPFSYYVGLDIHRKSTSYCVLLPDGKLVREGKVASTREDLEAWARTVPGPWCGGLEATICSHWIYWRLKPYAAEMKMGQPAKLKAISEAKRKNDTLDARTLANLLRCDLFPACYVLSPEHEMLRRHLRYRSFLVRMEVMLKNKAAGMLIESGVLYDTRRLHGKKYFHALLDELDTTQLLDRELKQLIEFGRAELERLKAVDRGILGRLLSDPLLSERVARLRSIGGVGEVTALLWALETGDPARFPNEKHAISYCGLCAAQRESAGKQQRGPLSKQRNAALQTGLLEAAHLAIQHNPELKLIYEAQCAKGPKNRAILEVARRLVRRLLAIDWRHAAGLATTAA

SEQ ID NO: 340808 - protein, 391 aa, unidentified
MICVGIDVAKDKHDCYITNTDGEVLADVFTIRNNAEGFDLLLSKIKSVAHDLDKVKVGLEATGHYSYNLLGFLLEKGLTTFVINPLHTNLFRKSLTLRKTKTDKVDARTIAAMMLSGVVLKSYTDISYHNEELKSLSRYRFDKVRERAKLKQSVSRLVTILFPELEKLVPTLHMASVYALLGEAPGARQIAQMHLTHLTSLLQNASKGHYGKEKAIEIRDAARQSIGSAMPAKSMELSHTIHLIEEFDREIGEIEDAIDSIMDEMNPPLLTIPGIGKQMGAMILAEIGDFDCFDSPDKVLAFAGLSPSTYQSGQLTGAYAHMEKRGSKYLRYALFNAAKFVCNWDSTFAAYLAKKRAEGKHYYVAISHAAKKLIRLIFALQRSGKVYQPAT

SEQ ID NO: 340809 - protein, 312 aa, unidentified
MIEIVCGVDVSKDWLDAHIRPAGRAARFANDAAGVEALAAFCHEHGVELVVMEASGGCERRVFAWLSAQGQACAIVNAKRVRQFAEAMGYLEKTDRIDAAVIAHYGQVKRPSHTPLPSPAAQRLKALVARLSQVTGDLTVNKQRRGAVSDPEARASLDEVIALLKRQSRQLEGEIASLIDDDPLWARLAETFRQVKGVAGRTVARLMAELPEIGTVSGKAIAKLAGLAPIADDSGKRSGRRAIRGGRAGPRSILFLVAAIAARYDPHLSAFHHRLKQAGKKKMVIRIALARKLLVILNAKARDAREEFAHAA

SEQ ID NO: 340810 - protein, 330 aa, unidentified
MSVCSQEPVFVGVDVSKARLDVFIHPAGEPLGILNTPHGRSPLVRRLKRLAVDRVVVESSGGYERDLLMDLLQAGVAVAHVNPRVVRDFAKSYNLLAKTDSIDAEVLARFGRERKPRTLGPADTIRLMLQELIAARRQLVEQCTRLRNQMEQARQKIVVASIRRSMRHVREELETIEIEIQRLIDENPSLSSRQKNLLEVEGVGPTVSRILVSELPELGQLDRRKLAALVGIAPFNDDSGTHHGRRGIRGGRGTVRTALYMATLTAVRRNAVLKAHYQQLLARGKPKKVALTACMRKLLTYLNVRLMHLQPPPCENPSSADSAGRGGGAK

SEQ ID NO: 340811 - protein, 391 aa, unidentified
MVCVGIDVAKDKHDCCILDSDGMVRADCFTIPNNMDGFKQLLQTIRNCTKKSDKIKVGLEATGHYSYNILGFLLDNDLAVYVMNPLHTNLYRKSLSLRKTKTDRVDARTIATMLLSDVDLKSYTDIAYHNEELKSLTRYRFDKVQERAKLKQSVSRLATILFPELEGLVSSIHGTSIYALLSEYPGAKQISEVHLTKLTNLLTTASKGRYGKEKAIQIREAARASIGSVMPAKSLELKHTIKLIQELASEIDEIEDSIQKIIDELNPPILSIPGMGVNSAAVILAEIGDFSNFSSPDKILAYAGCSPSTYQSGKLTNCYAHMEKRGSRYLRHALYNATKYVCYWNPVFAEYLAKKRAEGKHYNVALSHAMKKLVRLIYALQKSGKAYLAAA

SEQ ID NO: 340812 - protein, 409 aa, unidentified
MTTDIDLSASPVAGVDTHTDTHTVAAVTPTGRHLATETFPTTRPGYTHLAEFLSKHGVCAVGVEGTNSFGAGLTRHLIDRGYTVVEVLRPARSIRRRDGKSDPVDALAAARQVLTGEGLSTPKDSTGPVESLRALQITRKQLVSTTAKLITTMKSLLVTAPDDIRTRYATMTNHALVNALVYCRPSSDVTDPRNGVLTSLKILATTYRALRVQCDELETRIAALVSVINPHVSNIVGCGALVSADLLISIGDNPERIHSEAALAHLCGVAPLPASSGRTNRHRLNRGGDRRANSALYRIAMVRMKCDQRTREYVARRTEEGLSKREIIRCLKRAIVREIYRVICTRRSTSQPRDLRRDELKELRIAKHLTQVVVAKHLGCAPARISDIETGKRPLTELASAYEKFLKSA

SEQ ID NO: 340813 - protein, 373 aa, unidentified
MPKYSTAFGMDVHLRSTTVCALDADTGEAVTRRFPGNPWGEIAGWMGGFPGPSLAAYESGYPGFAPQRELAGLGVECVVAAVSKIPRSAADSASKNDRNDAARMAKAILAHDISPVWVPSPEVEGIRDLAGAYDGATARLATAKQRLLAFLAKRGFAYGGTTPAGNPRKYWTYDFLRWLDKVRPEDDGGVRTLAALRSEVEAAAEARADLLSEYRAAVDASPIAAEVAALQSIKGCAFALAAAFSAEVGDFTRFRSGRQVTAYFGLAPSQRSSGDSVRLGGISGAGNALVRKLAVEGSWRYAAARHQPKLMPRDTGVPLEIRMHGRKGSERLLRRREEMLARGMPQAKANAATAAELVRWLWALGMMCREGAE

SEQ ID NO: 340814 - protein, 320 aa, unidentified
MTTFDSQVVVGVDVAKDEIVVHRRDLEKTQIIANETPALKKWLRSLPSDSAIAIEATNIYHVETVELAYSMGHRVFVVDPGKLSKYRDSLGKRAKTDASDAALLARYLAHEGAALRLWSPPPEVYTELKNLLHRRAKLVSIQVTLKQSWGNHADLPKEFGAVIDSLKALDQAIQDLMKDILNKAGLMPQIKRCEGIEGVGFLTATAFLTAYMRGDFASSDAYIAYLGLDLCVRDSGKKTGRRRLTKKGDPEIRRLGHNASMAACRSETWKPFYQRHLDSGKARTQALVILTRKLARVAFALMKNQTDYRPNSIFGASPQT

SEQ ID NO: 340815 - protein, 428 aa, unidentified
MNNTLTATLFIGIDVSSKSNYVYGMDFFGNKLLSFQTSNNNPGAEVIGHEILQCLKKNSLTHLNIAMESTSFYSWHIANFLSCHEELLWFKPKVYCLNPKVIANYKKTFIDIDKTDPKDAMVISDFARVGKITTEPWKGSQYIALQRLTRCRLHIMENITREKSYILSNIFLKFSELAVLDKSDRPFSNKFGAASSAVLTEFMSTEEIANTDINQLVNFLIDKSKNRFKDPMATAKILKRAARDSYRLDKSLYNPLNAAIAASFNCIKALEKEVRTLDKAIERAVKVLQTHEFECLCSIYGIGPVFAAGITAEIGDITKFNNQASLAKYSGLTWRKKQSGNFTAEDTYLTKTGNKYLRYYILEAAGSILRFNKEYNDYYHKKYNEALIHKHKRALALTGRKLIRLIFALLSKNQLYTMNNNADKAINS

SEQ ID NO: 340816 - protein, 340 aa, unidentified
MERRYIGIDLHRNRFTCCIRLENERTYVTEWRLEDLGRFVKKLRPSDEVAVEITSNTRLFHDAVAPQVARLVVVDTNQFRVISQSVKKTDPNDARLLSLYLSKGLLPEVRMKDKEHGQLASLTQTRDTLVKLRTALKNKVNNILSARGLNLAKEALSSEKKLAEVLELPFDEIVRIELRVIVEQIRSLNRSIAELEKTIGEEGSKLEGHKGLSSIKGIGKITSAILLSVIGDVNDFPDEGHLASYFGIVPRVSNSNETVRSGRIHKRGTKLGRTALVQSALIAANYSPYLKRFYEQVKARRGAGKAIIALARKFLGIIYRTLKNQWVFEDFPNFVLAAES

SEQ ID NO: 340817 - protein, 384 aa, unidentified
MKNDNIVFIGLDTHKEHTQVSYTLDHRTADINDLGRIQTTKSAFVKLARQLQSKYPKATLHFVYEAGPCGYWIYRLLTSIGHCCFLVAPSLIPKKPGDRVKTDKRDAQNLARLLKNNDIAPIYVPEPEDEAVRDLSRAREVAMRDLNDAKHQLKSMFLRNNIRYSGSDSWSLKHLRWLTEIVLPHPCQQIVLQEMIQIISERMARLERLDNELTHQVKLWRYYPVVKAIQAMRGVRMLIATGLAAELGDLSRFDSPRKLMKYVGLTPSEHSSGNTRKLGSITKCGNGRARRLLVEGAHSYRHAAKISKEMQLRQEGLPKEIIDKAWEAQMRLCRRYQRLIMRGKPRNVVITAIAREMIAFIWSISREVVLPRVDPKTRLSRVPA

SEQ ID NO: 340818 - protein, 351 aa, unidentified
MIVIGVDYHPSDQYIAFADTETGECGERRLNHDDGEAEKFYRALQQRAVSVRVGMEATGYSRWFERLLAELGIEVWIGDAAKIKSKRVRKQKTDRNDAQLLLGLLIENRFPRVWAASPENRDLRQLLWHRHRLVQMRTRIMNQLQALAMNEGQRRKKKLWSAQGRAQLEKLPLARWASLRRQDLLELLDRMTPAIAELTAAVEQEARKRPEVLRLMTHPGVGPITALAFVLIIGTPERFPCGKQIGSYIGLIPAKDSSAGRQRLGHISKQGNALLRYLLGEAAQAAVRCDADWRRRYVHLAMRREKSIAKVAMARRIAVRLYWMWRNGWEYGQSVAFGSHAGQLVTGKGAH

SEQ ID NO: 340819 - protein, 387 aa, unidentified
MFDTTEVGVFLGLDVGKIAHHAQGLTPAGKKVFDKLAAKFGTVLVIVDQPASIGAQPLAVARDAGCRVAYLPGLAMRRIADLYPGEAKTDARDAAVIADAARTLPHTLRSLELADEITAELTVLTGFDQDLAAEATRTSHQIRGLLTQFHPSLERVLGPRLDHQAVTWLLELHGSPAALRKAGRRRLVELIRPKAPRMAARLIDDVFDALDEQTVIVPGTGTLDIVVPSLARSLGAVHEQRRALEAQISTLLEAHPLSQVLTSMPGVRTAAVLLTTVGDGTSFPTAAHLASYAGLAPTTRQSGTSIHGEHAPRGGNRQLKRAMFLSAFACMNADPASRTYYDKQRSRGKTHTQALLRLARQRINVLFAMLRDGTFHEPRTPTVTLAA

SEQ ID NO: 340820 - protein, 345 aa, unidentified
MTIVEDARVITGGVDTHADMHVAAALDPIGGLLGVEEFPVTPAGYAHLLGWLGGFGTVGLVGIEGTGSYGAGLARHVAAAGIRVVEVDRSDRQDRRRQGKSDPLDAVSAARAAQSGRARGAPKGRDGAVEAIRALMVARRSAAGERTRTNGQARALLLTGPDDLRARFAKHAPAALVTGIASLRPRPGDVAGYPTRVALRELGRRAVFLDGQLERPGELIVPLVTGRAPGPLALYGIGPNTAALLLIAAGDHPGRLRSEAAWAHLCAVVPIPASSGKVTRHRLNPGGDRQANHALWRIVLTRMSAHPPTLIYVERRTKEGLSKKEIIRCLKRYVAREVYRHLRAG

SEQ ID NO: 340821 - protein, 318 aa, unidentified
MDEAEKPVLRRQLRRGEVAKFFKKLAPTRVALEACGAAHHWARVLRGLGHEVVLIPPQYVKPYVSRGKNDAIDAAAICEAMSRPKTRYVPIKSTEQQAALMLLKVRDLLVKQRTMLINAIRGHAAEFGVTAAKGPERVAALLECVAAAEAGVPALAREMLNLLADQLAVLEAKLKAVERRLMAWHRQDQASQCLATIPGVGPISGVSFTLKVPDPKAFRSGRHFAAWIGITPRENSTGGRARPGKISRQGDETLRRLLVLGATAVIKQAKPGRTAPWLLGLLARKPKKLAAVALANKMARIIWAVMVSGEVYRQPQEA

SEQ ID NO: 340822 - protein, 368 aa, unidentified
MKDYTGKTIFVGMDVHKKTYSVTAICDGVIVKRDTLKAEPQGLISYLKKRFGSGKIRTAYEAGFCGFHLHRTLEAAGIENIVVHAAGIETSNNRVKTDKRDSLKIAAHLAECKLRSVYVPTVEQEDNRTVTRLRDTFTKERSRLGNQIKSLLFLHGLIPADNKKKVSLKWIKGLSQFEMTPGVRFSIEAFAKMWLEFDAKIKEIDKEIQKQAVKDRATNMMFQAASGVGPISTRVLANELGDLQQFKNERQLFSYIGFTPSEHSSGEHTRQGHITKQGKPIVRKILVQAAWVAIRHDKELQVIYERIAARSGAKRAIVAVARRLIGRIRACFRTGEFYEAQKVERPTLKFKKEKQAKKQNTQNIKLVA

SEQ ID NO: 340823 - protein, 370 aa, unidentified
MKSIVYIGMDVHKNSYSLCGYNGITGEIIGETKCGADSKNILKFMNSIKKKYSDYLEFKAGYEAGCLGYTLYHQLRKEGIECDILAPTTMYRSSKNKVNKNDKLDARNIATNLAYGTYKAVYVPNSDDIEVKEYIRMMDDFKTEQKKVKQHINALTLRHGFKYDGKSRWTEAHIKWLKTIDLSKFLREILNEYLAEYTSLSDKIDRFKEKLIEVSHNESYEKPISQLRCFKGIDTVSAMSIHVEVSDFRRFQTAKMFSSYIGLTPGENSSGESVNFTSITKQGNTTVRKILIECSQALVKGTIGVKSKNVKARQKGQGVETISYADKAVERLQRKYHKMIYRGVNRNKAITAVARELACFIWGMETGNIE

SEQ ID NO: 340824 - protein, 317 aa, unidentified
MVDKVTEAAVVGGVDTHKDLHVAAVVDQNNKVLGTQYFSTTRQGYRQMLAWMTSFGTLKRIGVECTGTYGSGLLRYFQNAGLEVLEVTAPDRMERRKRGKSDTIDAECAAHAAFSGIRTVTPKTRDGMIESLRVLKTCRKTAISARRVALQIIHSNIISAPDELREQLRNMTRMQLIRTLGSWRPDASEYRNVTNVYRISLKSLARRYLELHDEIADLDVMIAAIVDELAPELIKRNAIGYESASQLLITAGDNPQRLRSESGFAALCGVSPVPVSSGKTNRYRLNRGGDRAANSALHIIAIGRLRTDDKTKEYVAK

SEQ ID NO: 340825 - protein, 350 aa, unidentified
MKQDIVIGVDLAKASFQVHIGTSTGRKVSFSKMSRDKFTEFLTNSQTGVLFMEACGSSNFWARKARSHGFEVRMIAPQYVKPFVKRHKTDAADAEAIVEAGLRENMNFVPIKTTEQQDLQSIRRMRDLEVTTRVAMMNQVRGLLAEYGVAIPQGQKALRLALIECGLGESGKYKASDLTPVMRGLVLRAQENLKSIDERIERFDRELAEAAKNDDRCRRIMTVPGIGPITAGAIIANIGDARDFKNARQLAAYFGLTPRQHSTGGKVRIMGISKAGNKDIRTLLIHGGRAVMMNPGKKKDKRSQWAVNLKERIGMNKAAVAMAHKNIRTVYALLRNGGEYRDNYAPRLAA

SEQ ID NO: 340826 - protein, 466 aa, unidentified
MERKGGKGALAEAAGRRQRKGRGKRAGKAGFELAHPDCAGIDVGSGSHFVAVPADRENPSVREFGSFSDDLHRLADWLSACGVRTVVMESTGVYWIALYELLEGRGFAVYLVNARHVKNVSGRKSDVLDCQWIRDLMSFGLLRGAFRPSQEVCALRAVMRQRDMLLAGQARHVQHMQKALAQMNIQLANVISDVVGETGQRIVRAIVAGERDRSRLAALRGPRIHASQEEVGRALEGTWRAEHLFALKQALALFDTYAQMLMECDGELERMLERLARYDGDPGKPKRRGRQKNAPRFDVRVHLFRACGVDLTRIDGIDTTTALKVLSETGPDLSRFPTPKHFTSWLNLCPNTRITGGKRLKGRERNRCNRAGQALRQAAVGLSTSKSALGAYFRRMAGRLSKAVAVKAVAHKLARLVYAALTKGMVYVDRGMAAEEERYRVRAFKHLAKRAAALGYSLAPTLQAAK

SEQ ID NO: 340827 - protein, 342 aa, unidentified
MMKLYGGIDLHSNNCVVHLIDEDGQLAFKKRIRNDLSTILLLLGPYSADIEGLVVESTFNWYWLVDGLMEAGYKVHLANTTAIQQYSGLKHCDDDSDANWLATMLRLGILPEGYIYPKEERTLRDLSRKRLQLVQQSTLHLLSIQGLYQRHLNIRLNNNRLKQLSEEKLAHDFSNLNVRLAVSGNLVVQQCLTQQIKVIERSLKQQLKLKAEFINLTSIDGIGLILALTIMLETGDMSRFEKVGNYASYCRCVSGARYSNGKKKGSTNKKNGNKYLAWAFVEAANFAIRYNDTVKRYYQHKLAKTQVVVARKAVAHKLARACFYVLRDQVEFDVDRSFGYSR

SEQ ID NO: 340828 - protein, 446 aa, unidentified
MQIVYARCAGLDVHKKTVVVCARLVSTDGTLTTHIRTFGSTTAELLKLVTWLLALEVTHIAMESTGEFWKPVYNLLEGSFTVLVVNAADIKYVPGRKTDVKDAEWIAELLAHGLLRPSFIPPAPLPALRDLTRQRTHLREERASVVNRMQKVLEWANIKLTSVVTDITGVSARAMLQALVDGQTDVSALAQLAKGRLRRKLAELEQALRGTLEPHHAFMISQHLALLDVFDEQISAFDTRIQTAIDGTRSDPPPADGADESAQRLSVRATDATTPSAPDGAWAAQAILDAIPGIGLRVAETILAELGTDMSRFPDAEHASSWAGLAPGQHESASKRKSTRIRDGNKYLRSALIQAAWAAVKQPDTFLAAFYRRLAARRGKKKAIVALAHKLLVIIYTLLKTGEVYHERGAAALDERQKDRIVHRLERRIAQLGYNVHLEPITAAAS

SEQ ID NO: 340829 - protein, 482 aa, unidentified
MTLSGDAAPNATRTETPITRNAPEVSHSRSESAARPVQLNGGIYDCTELADLAARPRPMRRLTTRSDSAGRMWIALLTLLLRFRPCFRGFGLVGASFSGTHRRCRSDLPGLGKRPGFTGPGGQRVRAIPQPQKGMTVTIVETRAITGGVDTHADAHVAAALDPIGGLLGVQEFPATAAGYAQLLDWLGAFGTVCLVGIEGTGSYGAGLARHVTTAGVRVVEADRADRQDRRRAGKSGPLDAVSAARAAQSGRARGAPKGRDGAVEAIRVLMVAKRSARAERTQTINQARALILTGPDDLRARFSQHDTADLVAELAALRPRPGDVVGYATRVAVRELGRRAEFLDGQLGRLDELIVPLVTARAPGLLALYGVGPDTAALLLVAAGDHPERLRSEAAWAHLCAVAPIPASSGKVTRHRLNPGGDRQAGHALWRIVITRMSSHPPTRAYVARRTEEGLSKKEIIRCLKRYAAREIYPHLRAAAR

SEQ ID NO: 340830 - protein, 400 aa, unidentified
MRTVFGIDVSKASSEVAILVNGERVHGYTMPNDIIGFSRLLEDLKTVSNTEIIFEATGVYSRRLQAFLEENSYDYTRLNPLEAKKQLDGLRVRKTDKIDAEKLASSQFVLNRKPTYVQEIVYQNLHDLSRFYQNLTEDIVRTKNRLHKVLQVALPEIENLLSTPTGEQYWNLVSIFPTKHWVLELSDVELKEAIRNSTSKRISENRVGNLAEKLVGLAKQSYSAISKTSPMIEEVRYNAQELIRLTNRREQVLEQLIELAKPLPEYEILLSIPGITETTATSIIGELGDIRRFHSANQINAFIGIDLRHYESGNFLAKEHITKRGNPYARKILFKCIHNIASAGYTNPCHIADFYEKRKRQSQVTSTKPHTIASIHRLIRTMYYLITHNKLYDYTSIQNR

SEQ ID NO: 340831 - protein, 470 aa, unidentified
MAPGYNSLGVPTDALITNIGGATKMKNSTARKLRQIPAGYLIVGIDAHKKKHAAVVKTQDAFTRAKFKVSNSRDGFIELLERTKAQMVKTDSRGTIFAIEAGGRYWRTLAYFLEERGIPFRLISPFTLKRRREGEDIDRRKNDYRDADMAAELLRTGKFTETKLPQGIYADLRAAYHTYYSLGRERSRATNLLNALLDSLFPEFHSVFKDVSTKTALAVLAAYPSPHVIAEMSMEKFMDTMMTKYKGQYLIRKKVSAIYQAAHSSVGIHAGEGVISLEISLLVERIRLLTGQRQKVEDLLVVLVEWIPESKYLLSIPGLGHITIAGILGELGPLNHYRSGKQLVKMAGINPMQSESANKQASKTPMSKKGRPLLRYCLWEASLNILNHNQEFKAWAKRLQERPLHQNPLKKREARGAVCKRLLYLVFALFNKHSFYEVNYEINIERETISKFTYQAGGVTSPLFLGALRE

SEQ ID NO: 340832 - protein, 462 aa, unidentified
MKRKRSKKASREQQDWSLNLDVVHPNAAGIDIGNESHYVAVPPDRDAKPVRQFACFTEDLRRMTEWLKSCGVDTVAMQSTGVYWLPVYEILAEAGLRVFLVNARHTKNLPGRKTDVQECQWLLQLHTFGLLNNSFRPPEEICVLRAYWRQRAQHVASASACIQRIQKVLTEMNVQLANVITDISGVSGMAILQAILKGERDRYKLAALADVRIQATREEIARSLEGNWRQELLFILQQELDLYHIYQQQIAECDTALQAHLQTFEDKIEPTSHLPRPKANKRAGDNAPTTFDLRGELYRISGADLTQIDGINVMNAQTIIAEVGVDMSRFPSEAHFASFLGLCPDNQITGGKVLRRGTKRVQNRAATALRMAATSLWRSKTYLGAKFRRLRARLGAPKAITAMAHMLARLVYRMLRYGEQYVDKGMQFYEEKYRQHQIHSIEKKAKDLGLAVTLKPLAVSSF

SEQ ID NO: 340833 - protein, 339 aa, unidentified
MNIVTVGIDLAKNIFALHGIDQSGKAVLIKPKVARGQLLELIASLPPCLIGMEACTGAHHWARQFRQHGHTVKLMAPKFVAPYRMSGKRGKNDANDAAAIVEAVTRPNMRFVPIKEEQQQSTLCLHRTRQGFIEERTALYNRLRGLIAEFGIVLPQKVERLRREIGPHLEHLPGWANRCIGDMLQHADTLDTRIDDYDRAMSEAAKQDARSRRLMQLPGIGPTTASALVASIGQGHDFSHGRQLAAWIGLVPGQYSSGGKARLGRITKAGDAYLRSLLVMGARSVLAGLGDKQDSFSRWARKLVERRGYWKAVVAIAAKNARLAWAVLHYGEDFKRQLV

SEQ ID NO: 340834 - protein, 343 aa, unidentified
MQIRSVGIDLGKTTFHLVALSAAGKVLLRKKFTQKQLITFTANMQISLIGMEACSGAHFLGRALREQGHDVKLIPAQFVKPFVKSNKNDFLDAEAIAEAVDRQNMRFVPIKTDDQLDLQALHRVRDRLIARRTSVINQLRAFLLERGMTFAKTPAKLKLAMSEIFENADANLTPRMRNLVSLLWNEWKDLEQQIVSMNEEVEQIASSDPACQRLRKIPGIGPLVATAIVAAIGNGAAFDKGREFASWLGLVPRQHSTGGKARLLGISKRGNSYLRKILVHGARSAVLRVKRERSPFSGWLDALEQRAPINVVITAAANKLARIAWAVLSSGQEYRPTVSPTAA

SEQ ID NO: 340835 - protein, 416 aa, unidentified
MNAAGIDVSSRKSTVAVLRPFGEVVKLPFDVRHSAEDLTALAAQLKSIDGETRVVMEHTRRYYESVAKVLHEAGLYVSAVNPLLIKEYGNNSLRKVKTDKADAMKIAKYALDNWTELRDYTPMDTIRYDLKTLNRQFQLASKQKIATANNLIALQEQSFPGIRKLFDSPVRSDGTQKWVDFTHDFWHVDCVRSGSQNAFTKRYRKWCKRNRYQFSMEKAAEVYALAKSAVVLVQKTSVTKTLVQEAANQLTAISRSVETYRSEMNKLASQLPEYPVVMEMYGVGESLGPQLMAEIGDVRRFERKQSLVAFAGIDPAPSESGDYCSRSNKTTKRGSPYLRKTLFNIMKVHLKRAPADEPEFQFLEKKRVEGKPYYVYMTAAGNKFLRRYYGKVMAYFSTLEGLPPVDMDSTVLHRTE

SEQ ID NO: 340836 - protein, 341 aa, unidentified
MWIIGCDYHPSFQQIDFVNQETGECGSRRLDHKSGEAEQYYRGLAGQQVRVGMEATGSMGWFERLLGELGIELWVGDPARIRAAAARKPKTDKLDAKRILRLLLKDDFPIIWRPSLEVRDARQLVSHRHRLVQTRTRAKNQLQAIARNEGLFTKRRVWSQAGQSELMALPLSRWGTVRRQDWLELLGELDQRIEPLDQALQRQAEERAEVKLLMTHPGVGPVVATAYVLIIGDPTRFATSRKLAAYLGLVPLEESSGKGRQRLGHITKQGNSMLRGLLTEAAHIACRYDARWKRKYVRLSMKKNRSIATVAIARNLAVRLWWMWKLGLDYGQIQESRSHAE

SEQ ID NO: 340837 - protein, 384 aa, unidentified
MSNKRSTTRALVAVDEVGNVFGADPHKRTVTASVLDERGGVLGTETFRVSGDGHRAMEAWALRFGPITRWGIEGAGGLGRHTAMYLIGQGHDVRDVCPTRTAEQSRRRRDGKTDALDSVRVARETQADPALPTAFKRAAGDAGPDETHELMSLWHKARRSILKSRQHLLNEAEHLLGELPEAIGAALPDTAEVRPRLRALANRDTCDWDPATALRLRLLDTHREAVAQLDAQDREAAKALEKLARQAGSTLNELCGIAERIEAELLVEVGDPRRFTGTGGFARFNGSAPLPASSAEGDRAPVRHRLNRGGNRRVNASLHRIAVTQLRCEPRARKVYDDARRRGHTKKEAMRILKRHLSDVVYRRMMSDLRAQPAHPSTPHPRIG

SEQ ID NO: 340838 - protein, 362 aa, unidentified
MTKSTTIIAFDQHAATTVAAVLLPGQRTPALHPLTSDSPTIIRFVERLRRTNPVQCCYEAGPCGFDLQRALTTHRIPCDVIAPSLIPRRPGDRIKTDRRDAGQLAILYRAGALTAIHIPTEQEEAARDLLRCREDIQVDLLRARHRLSKFLLRHGRRFTTTRTAWTVRHRQWLQDQHWPLPALAQTHRAYVRTVDEALARLATVDAELRELLTGEPLRARVIRLRCFRGIDDLTALTIAAELGDARRFPSASRVMAFTGLVPSEHSSGAKQARGPITKTGNAHVRRVLVESAWHYRHHPFLGRALRMRQRGAPSDAITRAWDAQQRLYRRYRRLAARGKPKQHIVTAIARELSGFLWATLIQ

SEQ ID NO: 340839 - protein, 348 aa, unidentified
MRNRPIGAVIYGVDLGKNRFDVVACDAMGKPMQRLKLTRHTLLPFFGQVGQALIGMEACPGAQWLARKLSEMGHSVRIIPAQFVKPFVKSNKNDARDAEAIVEALIRPTMRFVEVKSTAQLDLQALHRIRDRIVANRTQLICQIRAFCLEYGVAIRQGTGMFKIEIASIIADETNDLTPMMRALLKELWNEFQAVDTRLAVVTRNVEALAARNDTARRLMTIPGVGPIAATALLAAIGNGRQFRKARDLAAWLGLVPRQSSTGGKTTLLGISKRGNPYVRRLIIHGARSCVAHLNRQRDKLGGWIDRLEARMHRNKVIVAMANKIARIAWAVLTRPGTLYERIDPAHA

SEQ ID NO: 340840 - protein, 376 aa, unidentified
MESQVSFNQVVSRGCGIDVHKKMLVATISGEGLNTETREFGTVTRSLTELKDWLLENRVTHVVMESTGVYWKPVYHVLEPSGLTVWIVNARHVKNVPGHKTDKQDSRWLCKLLLAGLLKPSYIPPREQRELRDLTRYRSKLVQDISSNKNRIIRILEDCNVKLSSVLSDTSGVTATRLIDKLCQGKEVTMGDIEEVYHKKIEATKEELFEACNGYITDHHIYLLGTIRGDNHHLESLIRDLDEKIKHALAPYENALERLREIPGLNRKSVEDLIAEIGLDMDVFPNENHLSSWVGVSPGNNESAGKKKRTHHPREQAGQIHPEPIGMGGVADKRHVLPRPVPSPGSPPRQEKGHSGRGPLHPQVGVSCLKRRSPLQ

SEQ ID NO: 340841 - protein, 349 aa, unidentified
MAMLADTADAVVGVDTHTDAHTACLLDRLGRQLAVITIPADDGGCRMLLVWAPQNAPGPRLAWSVEGTRSHGLGLTRYLHAHGQLVAEAGRPARASRRPGGKSDPADAARAARDALSAQRLAQPRSDGSREALRILLTARAQATTARTAAVNTLKALILGAPDDLRRQLRGLSTPRQASRCRSLRVHASQPIAERVLRAELRRLATHIGGWDKELRANKAQLRQLVAQAMPVLLEQPGVGPMSAAQLLVSWSHKGRCRSEAAFAALAGVSPLEASSGRITRHRLNRFGDRQLNRALHVIINWRMLHHTKTQDYTTQRRAGQKTDPEIRRCLKRYAARQLFRLMETAATT

SEQ ID NO: 340842 - protein, 351 aa, unidentified
MDHIGIDVHKRESQIYILAQGGAVLERRIRTEPERFGAVLGTRCHARIVIEASTDSEWVARCLEALGHEVIVADPNFAPMYATRTRKVKTDRRDARALAEACLLGAYRPAHRLSDPQRHVRGRLVVRDALVRTRTRYISVIRALLRQHGYRVPSGSAENFVHRVRALPLPGRLLSVVAPLPALLRPLNGQLTYSDATIEHLAVQDPRVLRLRSVPSIGPVTAAAFIAAIDDAHRFRHAHQLEAYLGLVPRESSSGETQRRGAITKAGHARTRWLLTQAALSILRRRPPQAEELRTWALRIAARGGKQVAVVALARRLAGILYALLRDGSVFEPQRLRHPRRPAAAAAPVSM

SEQ ID NO: 340843 - protein, 421 aa, unidentified
MPNIEIGVDSMVKENFIYVGIDLHKETHTAVMIDCYNQKLGEITFPNRPAAFPKLVTKVKKCNTDGKEVVYGLENAYGYGRALAVWLIDKGYLVKDVNTAISHRQAKHRGAMYRKSDSDDAKAIALATLNMLDKLPDACPNDAYWSLGQLVHRRDNIMKQRTRLVNQLHEQLCIAYPSYKQFFNDISRPTALYFWEHYPSRKYLKGKSVEDLRAELVPVSHNRCSTKNCEKILDAVASDKVKNNAYQDARDMVTLSIVSDLQHYDSQLAEVDKMLEQMYKMLGCTLTTIPGVNVITAVKILAEIGDIKRFSNANKLAQFAGIAPLHLSSSGKGKDVATKQGNRRLQTTIYFLAIQMVQLSSKGTPRNPVVRAYYEKRKAEGKTSQQALICISRRLISIIYGMLKNGTEYRMPVVENAGENR

SEQ ID NO: 340844 - protein, 358 aa, unidentified
MYLGIDQHRKQLTVCVRNEEGDVTLRRQVSTEWPRVRAFFAGISEEAGGEGFVVILEVCGFNHWLVQLLDEHDCRELIVVQPEKRSKKKTDRRDAGALCEILWVNRQRLIAGKPVQGVRRIHLPNEEDADARQVTELRKRLGQLRTRTVNRIKHVLRKHNLEQECPTKGLDTIRGRKWLAKVTLGPMDRLEMDLLLKQWAMWDEQIERLAAEIRKRQAKHADAAIVATIPGCAAYSSLALASRIGQIKRFPHPGSLANYWGLTPGCRNSGEATGRLGSITKQGSATARFILGQLVLHVLQRDPAMKAWYGRIKRRRGSKVARVAVMRRLATIVWHMVKYRQPYVIGGPPSGRLRSASR

SEQ ID NO: 340845 - protein, 467 aa, unidentified
MGTCHGKKGLARGQARERVFEVINPHAAGIDVGASEMWVCVAGEGEPDRVREFGTDTVELEAIAAWLLERGVRTVAMESTSVYWIPLFQILENHGLEACLVNARHVKNVPGRRKTDRLDCGWLQKLHACGLLSSSFRPSADICRLRTCLRHRANLVREQSAQIQRMQKALREMNVLLDAAVSDVTGVSGTRIMEAILAGERDPAVLAGLAEPGVRKSREQIARCLQGDYRTEHLFVLQQALDAYRFFHGQMRDCDREVERYSEELEKTAGRADTALPAAAAGEKRKPKSKNVPQYDVRTHLYRLTGVDLTRIPGIAEATAQGLISETGLDMGRWPTVKHFASWLDLCSSPKVSGGRVIGHSYRHAANRAAQMFRQAASSLSTSPSWLGSFYRRLRVRIGAGPAVKATAHKLAMIYYHVLSTHTEYRQIDPEQYDQRLRERAIGNLQRRARQLGMELVPAKAAASAAT

SEQ ID NO: 340846 - protein, 355 aa, unidentified
MKYYTSTTEFNCGIDLHAHQMYVCLLDRQGKKLVHTNIQNNDFDYFLRLVAPYRHDLTVCCECMFGWYWLADACQAAGLKFVLAHALYLQAIHGGKNKNDRLDSEKLAHLLRTHLIPPAYVYPAEKRPLRALLRQRAYYVWSRADLLARIQSHQLAHNRPPLRQTRPNRDPWEKQLLAHEDHPLRQLALHNDLTLIGHYDKQIAALEKALHRLTKRTAARDYALLQTVPGIGEHLGMTILYEIGDIARFPTVKDFLSYCRLVKGTVASAGKIKGLRGAKLGNPYLRWAFGEAAIIAKRDPQGIGPLAQRLTARFNGNKFKANTVLAIKLARAVYYMLRQQTVFDPERLVAALARN

SEQ ID NO: 340847 - protein, 416 aa, unidentified
MKKNSKSAMKKEQRANRAKAQRPVPRDTKEVLAELVEKLQGKVAVKATSASPAEAGPRAELSPNVDRLTVGVDLGDQWSHFCILGLQGETLSEGQLRTSEAEVAEFFQALPSARVVMEVGTHSAWMQEIIAGEGHEVVVANPRLMEGSKRRKRKNDRIDAKKLARLGRVDPQSLHPIRHRSREVREDLVVLRAREALVAARTELINATRGLVKSMGTRLPKCSSPSFGQKVKDAIPEKVRAALLPLVQFADALSDSIQSYDQKIEELSSEKYRHTKLLRQVKGVGPITALAYVLTLENPEHFAKSRDVGPYLGLVPKQEDSGESQPQLGISKAGDTMVRKLLVGSAQYILGPFGPDSELRRYGLRLCERGGKNAKKRAAVAVARKLAVLLHRLWVSGEVYEPLGYASSRVMAQQAA

SEQ ID NO: 340848 - protein, 443 aa, unidentified
MENENATVFETKNFNSAGIDIGAEKIFVSPDGKEVVNFGTYTADYYKCAEYLQEKGCTSVAMEATGVYWIALYSMLESCGLKVCLVNPKETKQIKGRKTDVMDCQHIQKLYAAGLLRESYVPKTQYMEIRQLVRARQSVIEMGSSYILRMQKNLELMNIKLKQVISQIHGVSGIKMIKAILKGERNKEYLLSLCDSRIKDNKSEEILKALEGNYNETYLFLLQENLKMWELHEEEICVIDEKIEELLKGLIKDKNPIEVTGKPKRIRHHKPEIKDFHNLMVQIYGVDMSSVSGFSDYTLLRLIGETGINIKEHFPTEKQFVSWSGLSPRHHQSGRMRKQVKGVSCNQTGQIFKEIAQGLINSKNIAIGAFIRRIKMKRDSGIAIKAGARKLASAYYNCLTKGIAYVEQGNEKYKEQLRQREIKTMKRLALKYNVEFATNNVIT

SEQ ID NO: 340849 - protein, 333 aa, unidentified
MNFDHYIAVDWSMATMAIARLTGVAERMSIVEQPTSMTELKMYLKSLKGSKILTIEESNHAQWFYVEISAHVDKLIICDPHRNHLLSDGPKNDKVDASKLVQLLKAGLLKEVFHSTDDIIYLRKLSSHYQDFVRAGVMAKNQRSALFRSYGLCHKQAKFNGNHAIEDFVLSRLDEQIALFEKSKEDYETKFKEVGKKIPSIKLLKSIPGVGDIHAVELLAQIVDVKRFSSIGHLYSYAGLIRHEKMSGGRHYGNRKPRYSRELKRVVKMIAYIAVVRGAENKLAEYYRHLLEKGMAEHDARHACSRKVIAYVYGILKTERKLDQSKFKSLKVV

SEQ ID NO: 340850 - protein, 428 aa, unidentified
MPDFEVVIGIDRSDAKIDICRRERDGSKSASQISTAPEQLHKWMSALIEEHPESGAIAVAFEQPSRSMLAFLGAYHGQITIYALNPATPAKFREAFRTSRCKDDVTDAETIADLVAHHSTLLRPWHPQGELSRRLEQLTRARRQAVDERTRLTNQLTDTLKSHFPQALQILGDDLWRPIVTAFLTKWPTLQDAQKSREQTLRNFYYANRCRRMDTVEKRLAVIKDGVALSDDPAILECARIKVRMLAKQIEGYTRAVANFDAAIAEAFAEHPDAEIFSSLPMAAAVLAPRLLAAFGDRRDQIGDAKELQCISGVAPVTKQSGKSKIIHRRYRCSKFLRQSFVEWAGLSIQLSRWALAYYESQIAKGKKHHTAVRALAYKWQRILFRCWQSGETYDEERYIKALKRAGSPLIARMKPIENEETPAPATG

SEQ ID NO: 340851 - protein, 351 aa, unidentified
MNEITTVGVDLAKELIVVCAGDAVGRTLFFRQFGCAGFAGWMANLPPCTVGMEACSSAHHWARVLAGHGHRPKLMAAEFVKPFRKSQGAKNDRNDAQAILSAVREPNMRFVSVKSLEQQSILACHRMREGWHAERTALLNRTRGLLAEFGIWLARSSAALYRALPRLSQEEAVPARVRALLGQAHEHLRQIDAQISHCEAQIRLHAKQSECAQRLTAIIGIGPITASAVVATVANARDFRNGRQMAAWTGLVPRQSSSGGKERLGSITRRGDTYLRALLTQGARAALQAALMRAPEKRSRLEHWMVELRQRVGYHKTLVAIANKHARICWAILAKGEEYDPQAWQRHALAA

SEQ ID NO: 340852 - protein, 338 aa, unidentified
MIHVGVDLHQRFCYMTALEARGKILQAGTVTNEKLALRRYFRQFRGKEVQVAVEACGFWPAFREVVEPEVKRLVLVHPQRVKAIASAKLKNDRVDSATLAHLLRCDLLPESWKADRGTQARRQQVRLRATLVRHRTRLKNQVHAVLHQQGLRSPVTDLFGKRGRLWLAEVKLPVQARESVNVCLRLLDGYSEEIQKQNLQLSEKAKQDKRAEWLMTIPGIGECSAMMLLAEIGDIGRFQDKEALCSYAGLVPRVRESAGKAARGGITRQGSPWMRWILVEAAQVATRCSPAAKRYYERLARKKHKHVARVALAHKLLIAVYALLRDGVVFDEQKFATV

SEQ ID NO: 340853 - protein, 514 aa, unidentified
MSEGTAFPPFSRLCPRLLRKHSAWLIRHIPLTQNFHPQPLAPAKKADWVHAHCARLRSPYAAQDKPFTSGSTNPDRKGCDILLKINYMSTLFVGIDVSSKSNAVYAMDFEENKYISSSFGNNQPGADELADMIAKCMQKHKNLDTIIVALESTSVYSVHIANFLSTCETLMPYKPYVFCVNPKATSNYRKSYIGMEKTDPIDAFLIADFARVGRTKKLEPWRGGQFIALKRLTRHRMHLSECITREKTYMVSNLYLKFSELQLLEGDNKPFSNIYGATSSAILTEFLSPQEIIDLSEEELLSFLAEKSRNRISDISRTSELLRKAARDSYRLDQCMYEPLNISLASSFNCIQAYQKEIKLIEQAIEKCINGMNPNAFLILKSIPGIGPVWASGMLSEIGDITAFHSSDALAKYAGLYWLKNDSGDFISEDNQVSKVGNPYLRYYLGEAANSVRKHVPEYTEYYAKKYAEVTKHQHKRALALTSRKLVRLVFGLLVKNQLYTGEKLDTQSNINKN

SEQ ID NO: 340854 - protein, 398 aa, unidentified
MDVHRSFAQLAIVEDGLCRDEGRIGVKPEDLRAWALTLSPDDEIVLEATTNSDAIAVMLRPIVARVVVSNPRKTRAIAEAKVKTDKVDARILAQLLAADFMPETWVADDRTRMRRRLVARRTHLVRQRTRLKNQVHAVLARNLVATCPHADLFGGVGRRWLGAQSVPADERRSIDALMRQLDFHGEELTEVDRDIAIDAIDDPVVARLMTVPGIDVAVAVSVVAAVGDFSRFDSPDRLVSYLGLNPKVRQSGDSPAVHGRITKAGRAQARGMLVEAAFSASRAPGPLRAFYKRVNDRRGFQVATVATARKLTVLCWHLVTKGEDYAFARPSLNAHKRRKLEIAAGAGAPSHRGPTAGPSRDYHIKQLRDLEKAAVEQQERAYEVTVAHWQPQKPARRG

SEQ ID NO: 340855 - protein, 350 aa, unidentified
MPMLAEVVDAVVGGDTHRDTHALELTAPSGATIATLMIGNDERGFAEAIAWVAEHAPGPRVVVGLEGTRSYGIGLARVLQAAGLTVVEIERPRRGERRRGKSDPIDAHLAALHALRLDADRLPTPRADGDREALRILLGARRELTTAKTRTINRLRALLLTGSDADRALSRGALSSDRLAAITRRRGGQHETREYAVRRAEARRLALAISGIDRELADNKCHLAELVTHLAPQLLAKRGVGPVSAAQAIVSWSHPGRCRNDAAYAALAGASPIPASSGRIVRHRLNRGGDRHLNRTLHDILLTRWRTCPRTRAYIARRRAEGKTDPEIRRCLKRYIARELYRSLNTAMAA

SEQ ID NO: 340856 - protein, 345 aa, unidentified
MPIVGGLDIHRKQITFDYLDTVTGQVQRGQISPADRAHLRAWLARFADCEDVMFAVEGCTGWRYVAEELAAAGVTAHLAEPADTAATRGRKRHAKTDKTDCRHLRMLLAEGRLPECWIPPGHILEGRALLETYHDLRAEHTAWVQRIHAVLFHHGAPALGEGTLRTEQGLAALRAAAADCLSPAGQLQVATALEVIEALEARMHAVRHQLLDAARQLTGAKVLAARLYGVGPVTALALTCWLAGAGRFSSSRQAVRFAGLDVTVSSSDRKGLPGRLSRQGPPVLRWAVYEAGKTHARASAPDHGYYAQVKDRKNSKRAALSEARKILRQACHILAELGDDALATA

SEQ ID NO: 340857 - protein, 348 aa, unidentified
MNIKRIGLDLAKQVFQLHGVDSHEQPALKKKLKREQMLSYFRDIPPCLIGMEACSSAHYWARELQKLGHTVKLIAPQFVKPYVKANKNDANDAEAICEAVSRPSMRFVPIKSLAQQDLQATHRVRSQLVSQRTEKVNQIRGLLAEYGMVVGQRIECLRKALPDLLEDAENHLSSDFRVLLAGLRQDLQTLDERVRALDKRIQQQADTDPGAKRLLQIPGIGPITATALVSGVGDAKQFKRGRDMAAWLGLTPGQHSSGGKERLLGISKRGDAYLRTLLIHGARAVLKVASQKDDPRSRWLQSLSERRNKNIATVALANKNARIAWALLTKSLDYQPTENGLASESACA

SEQ ID NO: 340858 - protein, 387 aa, unidentified
MIYIGIDIAKLNHFAFAMNSDGEILLEPFAFTNDHIGFQKLLTKLSKFPKEDLLIGMESTAHYAENLTYFLFSMDFKLCIINPIQTSGIRKGGIRKTKTDSIDTFIIIKSMIMNNHRIFSQRDMYTLQLKSLCRFRRKLMKSRTKVKIQLVTYVDLLFPELQYFFKSGIHGKACYALLKEEPNPDKIAKMHLTRLSNLLNKTSNGHFGKQTAIALKELASQSVGTKNDTLSLQIFQSIIQIELFTSQLKEVDKDISVIMDSIDSVIKTIPGIGNLNGAMILGEIGDINRFDKPCQLLAYAGFDPSVYQSGNFNASGTRMSKRGSKLLRYALINAAWQLTLNNDTFKTYYNLKRSQGHRHYCALGSTSHKLVRVIYKILTDELVFNLN

SEQ ID NO: 340859 - protein, 312 aa, unidentified
MEKLSYGGIDVSKDRLDVVVLPEGWFFSVSNDTAGWTELVARLRPLAVCAIGLEPSGGYERGIIRALLAARLSVRRINPNKLRQFARARGVLAKNDRLDARLMAEYVAIMPTRAVQRDDAVDRLAEVVTMRRQLCDEHVAVENQAAHLQDAMLRRLSKRRLVRLEADIRLLDKRLAEMVATNAAFARLYELLTSMPGVGPVLAFTLIALLPELGKMGRKQIAALVGLAPYDFDSGKLRGHRSIYGGRMPIRNVLYMAALSASRYNPALKTFSNRLAHANKKSKVIIVAVMRKMITTLNAMLRDNAAWQPRSA

SEQ ID NO: 340860 - protein, 297 aa, unidentified
MSPSRTLFIGMDVHKETIAVAYVAQEHGAEVTSLGTIGTRQCDIDQLIRKRQSKATHLIFIYEAGPCGSWLYRYLRKKDDDCWVVAPSLIPAKAGDRVKTDCRDAMQLARLARSGDLTAVYVPQVQAEAMRDLTRAREDALSDCKDATFRLKAFLLRHDIRYTGRANWGPAHLRWLSEVVCPTPTQQIVFQEDVRAVQEHTERLQRLEHELHEHVQAWRLSPVVEALQALRGVQCTVAVTVVAEMGDLTRFDTPRELMQFLGLGPAEYSSGEQRRQGTMTKAGNTHARRVLVEGAWA

SEQ ID NO: 340861 - protein, 338 aa, unidentified
MIVIGVDVHKHSLTAVAVDEAGRMLDERTVTGANDGLVAWASSIGDERLWALEDCRQLTRTLERELLAAGEELVRVPPKLMAPERRAGRARGKSDPIDALAVARAALREPRLDHPRPAEQPLRELKLLVDHRDDLIDERRRAQQRLRWHLHDLDPTLAVPLGALDRAVWLDRLGRRLARLEQTAQARIARELVARCRSLTRTILELDRELQAAATQTAPALLALPGCGAVSAAKLLGEIGPIERFQTDAQLARHAGVAPLEASSGKHRRHRLDRGGNRQLNCALHRIAVTQGRVHPPARAYLERKQAEGKSRREAIRCLKRQLARTVYTTLKTESALT

SEQ ID NO: 340862 - protein, 418 aa, unidentified
MKVVFPTCCGVDVHKTFLVATIITTPADSLQPNYKKKRFSTFNSDLNRFADWLLEHNCLDVCMESTGKYWVPVFNILEKRGIRVVIANPKWVKAVKGNKDDTKDSKWIGDLFRIGLVKSSFIPDLDIRILREFTRYRYKLVSMKSSEKNRFQNAFTVCNVALDSVVSDMFGKSATAITDYLTSDEAFDPEHCVSLLQRTLKKKAEQVLESIEGFSIADEQKARIKIIREHYNFVEKMIAKVDACVNEMVMKYDGEINLLCTIPGIDRNSAITIISEIGTNMSQFGSSKRLCCWAGLSPGSNQSAGKKKSVRISRAGVYLKPALVQVAHAAVKDKSNPYYKLKYERIAKRRGKKRAIIAIARMILTAIHSMFCTGEVWNPVDLFKIDMPEHLKEQQLAQAIKQATRFLEKHGLAVLSAA

SEQ ID NO: 340863 - protein, 399 aa, unidentified
MRIIGMDIHRSFAQVAVLEDGQITHERRVDLVYHRLVAFAGTLTRQDEVVIEATGNSAAVERLIRPYVRRVLVANSRMVKAIAYARVKTDKIDATILAKLHASGFLPEVWVADDETQRRRRQISERMAVLDQLVRLKGRVQAILHANLIPKYEGHLFGKAGQKWLQTLPLPEDERAILGRLLPEVARVSGELAELDKTLAQQALDNPQAVRLMTIPGISSVVASTVLASIGDISRFPTPDKLSSYFGLTPKIRQSGDRPARHGRISKQGNAAARKMLVEAAWSARAAPGPLRAFFKRVQLKHGAPAAAVATARKLAVMIWHILTGEKEYAFARPAFTAMKLRKVALKAGAPREYGKAGPGRDYWIKEIRHKEMEYVERAEQAYERMVAAWRQQPSAVDR

SEQ ID NO: 340864 - protein, 330 aa, unidentified
MNYVGLDIHTENIVYTVLSNDGNVKMGGKIVNDIEYIIEFLRNFEYGDLFVMESTGFYEPIYDTIESKGFKVKLANPLKVKLIAESRIKNDKIDSEILARLLKNNWVPESYVADKKIKEIRRIVRTRINLKRVPTGFKNRIYMELKRSKIDYDGNLFTLEGRHFLRSLNNLRINIYLNSLEDIEKEIKIIENEIQKYSDIEEVKLLMTIPGIGLFSALIIYSEIGDINRFSNSRKLISYAGLNPTTRQSSDVIYHGHITRQGSPYLRWILTECIHIHLIKDSHSNLSNYYRRMVKRIGKKKAIVASASKLLKIIYWVLKEKREYIKNYAQ

SEQ ID NO: 340865 - protein, 362 aa, unidentified
MKEYIGVDLGKRKAVVVKKDRHGKITGKATLAVTEAALTKYFSKQDSQSEVVVEASGNWMFLYETIEQYTPQVVLAHPLKTRAIAEARIKTDTIDATTLAELLRLDGIPQAYIPPREVRDVRELLRYRAALVSLRMGLKNKVHAVLTKNAMECSWSNVLGKKSQQWLKTLPLRPCYRQELDGYVRVAEVLTVLIAEITTTIKQLVAASPQAQLLMTIPGVSYYSALLILSEIGEVGRFPSAKHLCSYAGLVPSVYSSGSKSFHGRITKQGSRWLRWICVEISIHAANGDARFQSLYRRVLRRRGLATAKVAVARKILTVIYAMLKNNEPFRRRRPRQQILAKAWSKKSQESSGHPAGVMIQA

SEQ ID NO: 340866 - protein, 369 aa, unidentified
MEQVTTIGLDLAKAVFQVHGVDAAGAVMVRRSLRRKQVLAFFAKLPRCLVGMEACATAHYWARELAKLGHDVRLIPPAYAKAYVRRNKNDAADAAAICEAVSRPSMRFVAIKTEAQQASAGIHKVREMLVKQRTMLINTLRGLMAEFGIVVAEGPRHVGELVAILADPADARIPAPLHDGLMAIVESLRGLEQRIARVEKQIVGGGRDNATCRHLITIPGYGPILSSAMAAMIVNPAAFTSARHFAASLGLVPRQDGTGGKVKLGPISKRGNGYLRRLLVNGAMSVLCSKRAKDDPWLVKLLETKQRKVVACALANKMARIGWAVMIRQEGFRRRPQDQPRPDRPQSGAVLAAVKTATRAPSAVACGQS

SEQ ID NO: 340867 - protein, 390 aa, unidentified
MILVGIDVAKDKHDCCIINSDGNFPEEVFSILNNREGYETLYKRICSLAVDFTKVKVGLESTGHYSSNLLAFLLDKHLTAYVINPLRVNLFHKGQSLRRTKTDKIDSRNIAHLLMTDSSLKPYSLSSYHMEELKSLTRYRGTKVRERTKLKTSIARLVTILFPELEQLVSSIHIHSIYAMLEKFPGSAYIAATHLTRLTALLLKASRGRFGRETAIRIRDTARQSIGAVSPAKSMELQHTIAHLRVYDQEIGEIESEIEKIMNDVNSPITSVPGIGMQMGAVILAEIGSFRRFDSPDKILAYAGMSPSMYQSGKLTGSYSRMEKRGSRYLRYALFNVTRYVCHYDPGFTAYLSKKRKEGKHYYVAISHAVKRLVRVLYAMEISGNRYKTA

SEQ ID NO: 340868 - protein, 353 aa, unidentified
MNTQIHNEIILGVDTHLDKHVGVIIDGLGKYLGSLSIETNPAGYQQLLKWTQSFGSVQRAGIEGTGTYGAGLARFLSKQGIQILEINRPDRSMRRFRGKSDPTDAESAARTVLSGNPCAIPKLQSGPAEAMRIVSVARRSAVKARTQTINQLRGLLVSAPDDIRLKLWSSKPAECVKNCAYLRTLGESSWLITLATTLHVLAKRWLYLTEEIKELDKTLERLTSGAAKRMREQFGIGPQTAATLLAVAGDNPERLRSEAALASLCGVNPLEASSGKTVRHRLNRGGNREANNALWTIAMVRMRSDPRTRAYVERRTLEGKSLKEIHRCLKRYIIRELYPLILADLKDATFKLT

SEQ ID NO: 340869 - protein, 352 aa, unidentified
MFISGCDLHPRYQQIAMLDMTTGEVVTRRLEHENGEARAFYASLQGPVRVGIEATGYTQWFERMLKELEQELWFGDAARIRARALRRQKTDRRDAEHILDLLRTDLFPRLWVPSPEERDLRQRLKHRQKLVGMRPSVKNQLHYLAMSQGVCRKGKRWTKRGGQELERLELGQWASRRGKELLEWLDRLEPEIAELDQVVESEGQSRPDVVELRKQHKGVGAVVGLAFVLTIGPVERFKRSGPVVSYLGLNPREDSSGGHQRLGHISKQGNEMMRWLLVEAGQSAVQYDPELRRKYQRLKFRRGAKVAKVASARQLAVRMFWTLRQLQAATSPVGMSGSPARTLVEEAIPSLP

SEQ ID NO: 340870 - protein, 325 aa, unidentified
MFVGLDLHKNYLQAAVVDDEGRLLKQQRIPNTEEDIETFSTHLNNNSEIVIESSSTWYHAYELLTKHHHVILSNPVKTKAIASAKVKTDKVDAVTLAQLLRGGYIPECYIPPRRIMDLREIVRYRASLVRMRVDAKNKIHAILLMRGIRIEPKPFTKDFVEELRKIGDYRIDGYLAVIASLNEQINSVSRKIKQEATEDENTKLLTTIPGVGYYSALLITGEIGDVNRFPDSHHLCSYAGLTPSTHSSGGVTYHGAITRTGSKYLRWILTECTKAYIRTEKESDLAEFYRRLAKKRGASKASVASASKLLRIVYWVLKEKRPYHG

SEQ ID NO: 340871 - protein, 335 aa, unidentified
MNYIGLDVHYRTSSICILDKNGKKIKQQTIRGGWSKLIEQLQHAPRPFAICFEASCGYGHLYDRLSKVARRVVMAHPGKLRLIFRSARKNDRVDAEKLAKLLYLDEVPAAHVPSMNVREWRELIEFRRRRVDKQTACKNQIRSLIRSHGMKAPRGLWTKNGLAWLAEQQWPSISSQVRCEMLLDDYETNVARIKKVTRLLDAIGDKHPGVLLLRTIPGVGARTAETVMAYIDDPQRFARSSQAACYFGLIPRQDASAGINRLGRITKQGPSTARKYLVEAAWQAVRRSPTIRARYDRILKDQPRRRKIALVAVARWLVACMQAMLTTGEVWRESA

SEQ ID NO: 340872 - protein, 450 aa, unidentified
MKALPVLNPNAAALDVGSEKLHLSIAGDEPVVFGTFTNEIYRLRDYLKAQGVTSVAMEATGVYWMYVYVVLEQAGLEVVVVNARYVRNLPGRKTDMADCQWLATLHAHGLLRGGFVPPAAIRKLQDYQRLRADHITEAASQVQKMQQALERMNIKFHDVISDLTGVSGLKVVRAILEGQRDPKALLELCDVQIQNKKRHRVIESLQGAWAPEHLFALKQALSVWEFYQELLAQCDRQIEAVLKELAGPERPPPAQSPTALTTPLKPSGKNAPQIEQLHQLLVRICGGRDATALPGIADYLLMQLISETGVDLGAWPSEKHFTSWLGLASGSKQSGKRKGSVKRQRNRAGRLFCTGARSLVQSVDKALGGFYRRLAARKGGLVAMQALARKLAQLYYRVLKYGLEYAERGLRAYDHKYAESQRRLLAKLAAKQGFRLVSTQLDSTSPSTRM

SEQ ID NO: 340873 - protein, 373 aa, unidentified
MENTVTKVAMDTHKNQHTAGFVNLETGETEVFTVKNNAKDIKKMVRKIAKQSSGRLHFCYEAGVCGFTLKRQLEALGCECDVIAPSLVPTKKGDRIKTDRRDVKKLLGQFIAGELTVVYPPTVKQEADRELTRCRHAAQEDLKRIRHQLLKLLTRHGYIYRDGGHWTKKHFQWLGSLQFDESKLREVFDHYSFQLQHCMLRLETLDKEVKSLAESSDYSEIVGLLRCFRGIDTLTAITLITEIIDFGRFSSPRKLMHYLGLVPSEYSSADTHKRGGITKTGNKRVRRLLVESAWHYRHRAWVGKDLKRRRRDQPQWGITIADQAMSRLHKRFWRLQDRGKLPSKVVVALARELAGFIWAVLREYQLRQEGQAA

SEQ ID NO: 340874 - protein, 307 aa, unidentified
MTLNTKNYIAIDIAKDSLQVQAPNYACALNYDKDALEEWIRGVHKDTIIVFEATGGYERTLMQTLIERRIAYACVSPDRVRAFARSEGIKAKTDPIDAKMLLGFAEQKQLDPSTPPDPQRARLMALLDRRSHLSSIHAQEKNRRQNSDPKIHEWIDQSLDFIEGQIDLIDQQIRVLIDENTEMQTQSRLLLSITGIGEVTAWSIIAYLEGITSMKRNRLIALAGLAPFNKDSGKSQKKRTIQGGRAKVRRVLYMAATTAAIHNPHIKKYVEALRSRGKPYKCAIVAAMRKLLIHAQSLLKKPENALA

SEQ ID NO: 340875 - protein, 343 aa, unidentified
MEYYVGLDVSLKQTSICVVDQTGSVVRESVVDSDPEAISVYVRSKAPGAIRIGLETGPTSTWLWTELKQLGLPVICIDARHAKAVLKMQINKSDRNDAIGIARIMQTGWFKEVHVKDIDSHSVRALLASRALLVKIKRDLENHVRGLLKNLGLVIGRAKFNVFTVRAEELIEGRPELVAAVRPLLEARNAVEQQVSELDRKVMKLARHDAQVRRFMTVPGVGPITALAFKATIDDPARFARSRSVGAYVGLTSRRHASGEVDWSGRISKCGDAMLRSYLFEAAGVLLTRVPKWSAVKAWGVRLTKRNGLRKAKVAVARKLAVILHRMWIDGTEFNWSKKEIAA

SEQ ID NO: 340876 - protein, 360 aa, unidentified
MKIVGCDLHAKQQTIAMVDTETGEFTEKTLAHEGNKVREFYAALEGPVVVGIEATGAMQWFLQLLEELGIECQVGHPAKIRAKETRKQKHDRRDARLELELLLEDRFPTIWMPSSEQRDLRTLLRDRHQWVKVRTRVQNTLQAIALNHALRHGHALWSPAGQKALQALALSRYSRQRRDELLHLYVQLQKRIKELDRQVEEEAKRHPQASRLLTHPGVGPITALATDVFLGDAHRFATGNQVASYIGMIPCEYSSGKRQRLGKLSKQGNALLRYLWTEAVKHAAAKDPELKRFYRRKLIQKGMGQARIAAARKLGIRLWIMMRDQIDYEEFCRRGKLRQSGEAHAGMPDFNSGPASAVTG

SEQ ID NO: 340877 - protein, 322 aa, unidentified
MGIDVAKTKLDVVLRLGERAIHQVFAKTADGFAALDGWLSSFALSPAQVRVCLEATGSSSDAIALDLFARGSTLSVLNPAVLVDSRRSQQIRSKTDKLDAHLLARYAQENQPRAYQPLPAEILTLRALLHHRDDVQHMLRQERNRLEAGRMTDGIEQRVRKHIQDLQADFKATEGEIKAHLKAHPHLKAIWRRLQTIAGIGWLTATRLLAHLGEIGRFDKVGSLVSLAGLAVKEHRCGSSVRGKAQIDRHGRKDLRRSMSMSAVVALRVSPHMQQWAKRLQAAGKPKMIILVAIMRKLLHIVSGVWKTEQDSQPALAFPVAA

SEQ ID NO: 340878 - protein, 349 aa, unidentified
MLIIGCDYHPGFQQIAFVDKETGELGERRLLHREEAEQFYRGLREQSVPVRVGMEASGHAGWFERLLRDLQFELWLGDAAEVRTKRVRKQKTDRQDAQLLLRLMIEERFPRIWTADEANRDLRQLLWHRHRLVQMRTRVMNQLHVVALNEGLRRKKALWRPAGRKELESLKLAPWASRRRQDLLDVLDQLTPKIQELTCALEAEVEKRAVTRRLMTHPGVGPLTALAFELVIGTPERFACGKQVASYVGLVPSEESSGDRRRLGHISKQGSSLLRYLLVEAAQVTVRSQPQWRSKFFHLALRRGRKIAKVAMARKLAVHLYWMWRQGCDYGPWQKLGSHAGEPGHRHAV

SEQ ID NO: 340879 - protein, 386 aa, unidentified
MQASHESTPIAGHIGTIFVAIELSQKNWLVTLHSPDKDRMSHYNVGVGESAKLLALIERIRERAGRKLGALSEVKSCYEAGYDGYWLHRFLQANGIENYVFDPGSIAVEQRSRRAKTDRIDGEQLVRTLRSHCRGEPRVVRIVRVPSVEQEDARRATRERDRLVKERTGHTNRIKSLLRLLGMAVGNPLRRDWLTWLARQRDWQGRPVPPQILAEIEREHARLMLLREQLSKLEKSRTEVARTPELAETARREQVLCRLRSLGPAFAGTFTYEVFYKDFTNRRQVGSYVGLASSPWRSGGTDREQGISKAGNPRARHKAIELAWLWVRHQPDSALTLWFRERTHNASKRIKRIAIVALARKLMVALWRFVTTGLVPSGARLKPATA

SEQ ID NO: 340880 - protein, 317 aa, unidentified
MNEVITLTAGIDTSKAKLDVAVYGRTERWQVANALQGWRRLAAELAKVGVARIGIEATGGYERGVVGCLRAAGFKVLVLQPIQVRAFARVKLRRAKNDALDAVLIAACAAMIDPPSIEPDDRLTELAGQLTFVEQIEEDIARLKVRLEHIDEPRLRRLVLTDIARLKVRRTAELLRIARQLRLHEDLARRLDLVLSVPGIGERTALAIIVRMPELGRVDREKAAALAGLAPFDDDSGKHEGERHIGGGRARLRRSLFAAALPAAFRWNKALIALYSRLMARGKAHNAALVACARKLLIYANTVVQRGTPWVEKPAAT

SEQ ID NO: 340881 - protein, 343 aa, unidentified
MDHFAGLDVSVKETSICIVDDTGRIVREVKVASEPEALLQVLGNPIYRFKRIGLEAGPLSQWLFSALAEAGLPVICVETRHMRAVLQAQINKTDRNDARGMAQMMRAGLYRPVHVKTLRSQKLRMLLTHRKLLQSKAIAIDNDLRGTLRNFGLKVGVVGTVKFEARIKELVENLPDLAVLVEPLLMVRRVLREQFSVLHRRLLAIVRDDEVCRRLMTIPGVGPVVALTYRATVDVPARFRNSKAVGAVFGLTPSKYQSGEINRTGAISKCGDEMMRVMLYEAAQIMLVRLAKWSWLKAWAMKIARHRGMKKAIVALARRLAVIMHRIWVDGTEFRWTREVTAA

SEQ ID NO: 340882 - protein, 387 aa, unidentified
MYFIGIDISKFKHDCAIIDEAGDTVTASWSFANNCEGFSLLKQLLDALDGQKKIGFESTGHYGHNLKLFLEANNFSFMEFNPLLVSKFVRSKSLRNTKTDSLDAVSIAQYLMTVEYKPYPPSFYHMDQLKSLTRFRDSLVRQHSRQLVELTNILDKVFPEFKPFFDGKFSATALYILTHYQSPEKIANMNAKSYEALRKKSRGKFPMVKFAQLKTLAKNTVGRSDAFLLKQMEITIDIENQLDAKIDEIESQILECIHALNPPILTIPGIGELTAAIILSEYGNINKFENPAQLLSFAGLEPGYYQSGLAEHQGHMVKHGSSHLRYALMNACLPLITYEPVFAEYYAKKRAEGKPHRVALTHVAKKLLRVIFTLQTKNISYDPTLIR

SEQ ID NO: 340883 - protein, 341 aa, unidentified
MDKELYFGVDVSKKTLDLAYYDGETIDWKNAHIKVSNDDAGFKKIGSWVAKVGKDFDTFLFCLEYTGLYNQNFRLWLESKEYIYSMVEPRKMHRFEPDLDDDQRSLDRIKTDELDAFRIAIYCEQNHKKILRNPSKLPSPVYFKLKRLLAERKQNTKQSTLYKQQLHDICAYDTDLSVERKKLLLKNMKENQKAIDKEIDSYMNEDASISKNYDLLTSIPGIGRIIALETIVLTENFTAISNPRKYACYIGIAPFKKESGTSVRKKTGVSKKGFSEAKADLSIAVLSAIKNNPSIRDYWIRKRKEKCGGIVLNAIKFKLVLRMFAVIKRGTPYVETDAYKN

SEQ ID NO: 340884 - protein, 327 aa, unidentified
MKEYLGIYGIDVSKDTIDVVCQKEHRVFENNKKGFKQFKKIIKDESLCIMEVTGIYHLQLATFLYKNDIDVAVVNPLSIKRFSQMHLRRNKTDKADAKMIALYGEKQEVSLWHPCEKRIEESKDISQALEQMVNIRAGLKNKIQALRIKKASSFLIEEIQFQIDSLSSTVKTLEDKLQELVKSYDQKLYSNILSIKGIGVRTAPLLIITSNGFRDFESAKQLISYYGLAPTETSSGTSIKGKRKISKMGNPLVRKKLYMCSLQASKYNKACRDLYQRLLAKGKPKNVALIAVANKLLKITFAIAKSGLPYDNEYVSIKQHRQLQEAV

SEQ ID NO: 340885 - protein, 393 aa, unidentified
MRIRFCGIDISKDNFHAALIDDQGQPLWSRSFPMSSEGFRDFWRALRPRGSSVRSLRLGMESSGSYYLNLFSFLQAQGLDVRLINPLLVSNFAKLSLRKTKTDKRDAATIAEFLRANAQSLPQAHPAVDELRALARERENISAQIVALKNEIKRHLGIVFPEILGLLNPFTASSLRLLAAFPSKEAFLQASPQALLEILAGASRGRMSKLSPQLLIETARTSIGLASPDLEAILRSKIRILECLQAELKKMTDRLAQRCRDQVPVPLDILNSIPGLNTTTVSHFLAETHGRSFPTPQKLIAYAGLDPTIYESGQWKGRGHISKRGNSSLRRVLFLMAVAVIRVNPIFKEVYLKKRSEGKRYKQAVLVVAHKLLRVIHALLRHQTPFNPAFQSL

SEQ ID NO: 340886 - protein, 319 aa, unidentified
MFGIGIDVSGENLDVAVHEQAFRQFKNNKRGWASLIKWLQQWPARQVVLEASGGYEQKALDALHGAGLPMAWINPSRGRSFASATGKQAKTDRIDTMVLANMADALKPTRYVPPAAWQRRMSELCQRRRHLVQMRVSEHQRMRAFSEPSLISMLNQHLREIQMSIKQLDSINRIAPGRLSGKSISALVGVAPMSRERGTWKGRRSITGGRAVVREALYMAALTAKRHEPRLKEFFESLANQGKPGKAALVAVMRKLLVILNARKRDEGPDGLRLTRQLLPGAQPAVRASIASSPACGQPCCSIRSSMWERSPSKDSDTL

SEQ ID NO: 340887 - protein, 311 aa, unidentified
MTILTSQTVVGIDIAKAEIVVYRADLETIESVKNDRAALKRWLKTIPAQSAIAVEATNIYHLETVDLAHAMGHQVYVVDAYRVSHYRRGVGQRAKNDPCDARVLARYLTNEQRKLRLWNPPPKAYTVLKSLLHRRATLIQNHTGLMLSWADEPLLKKERTAQQKAFERSDQVIQKLLRKVSKEAGIEDNIDRCKAIEGVGELTATGLATTYMRGDFANSDAFIAFLGMDLTVDDSGKKNGPRFLTKKGDPEIRRLTYNAAMAASRSTKWKPFYESYLARGFSKTQALVALARKLCRVAFALMKDQGEYRLA

SEQ ID NO: 340888 - protein, 312 aa, unidentified
MPCFLGIDVAKAQLDIALRPSGERWAVPNDASGVTTLVDRLQALHPTLIVLEATGGLERAVTSALATAGLPVVVVNPRQVRDFARATGQLAKTDALDARALAHFADVIRPTPRPLPDAQTQELRALLGRRQQLITMRTAEQNRLAGTSERLQTDIAAHITWLNAGIATLDDDIETMLRASPLWRENDDLLQSAPGIGPVCARTLVLELPELGTLTRQQIAALVGVAPLNCDSGTLRGRRTIWGGRAHVRTVFYMGTLGATRYNPQIKVFYERLLAAGKVKKVALTACMHKLLTILNAMLKHRTPWQPQEVQN

SEQ ID NO: 340889 - protein, 370 aa, unidentified
MGNCSTLFVGLDVHKETIAVAYVGEDRSLEPIYFGPIGTRGCDIDAMVRKLQSKAKKLVFVYEAGPCGYGLHRRLTGMGHKCLVVAPALIPRKAGDRVKTDRRDATQLCRLLRSGDLTSIYVPLIEDEAIRDLSRAREDAVQDLKAAKFRLKSFLLRHDIRFNGKADWKSAHLRWFGEVKCAVSTQQIVFEESVRALGQCFERLERLDICLQGEVKSWRLAPVVEALQALRGVRFTVAVTMVAEVGDLTRFTKPRQLMAYLGLHPSEHSSGPTRRLGGIAKTGNRHARRALVEGAWAYRFPARVSKQIQIRQEKLSEAVRDIAWRAQMRLCKRFQKLVARGKNANLVVTAIARELAGFMWAIAKQVPITL

SEQ ID NO: 340890 - protein, 311 aa, unidentified
MTCWVGIDVAKDSLAVWLRPQGKSFSVSNNEQGYQQLLALFAEEKPGRIVLEATGGYERGILFSLSRAGHVVSRLNPTRVRAFATAMGKLAKTDPIDAALLAHLAQTLEEAPSTVPSPERERLRELVQRREQLVSQRDDERRRLPQARDPLVRQCLEDAIKALKGTIRSYDKQIAKAMKAVDAEQAQQLRQVKGVGPVTVAGLLAYLPELGQLNRRQIAALVGLAPYNSDSGQKSGQRRIRGGRGMIRRILYMATLSIIRYQKDFSLRYQGLRQNGRCAKVALVACMRVLIVRLNAMVRDGTCWKTDTVQQ

SEQ ID NO: 340891 - protein, 346 aa, unidentified
MEYIALDVHKNYTWARVKNGKGDRLYESRLAHVHGSIKNFVNRWTGGSPVAVETVGNWYWVVDEIEAGGGTPQLVNARLAKLMMGNVNKSDKLDCKGMNRLQRTGTLPTVWIPPSSVRDVRELPRTRMVLSRQRTQLKNRVHATLGKYGYTVQGASDAFGKKGRKIVEELLLKLPPHTQQALRLILNELDHVRDNLKEIEGQMIEVFSPCPQTHWLTSLPGVGNILAVVIWSEIGTIERFNRAEQLASYSGLVSRESSTGGKIRLGPVRRDVNVYLKWAFVEAANSSLLNAERCGYGHISRLYQRIKPRRGHGKAKVAVARHLSEASFWMLKKGEPYREPVSSTQR

SEQ ID NO: 340892 - protein, 458 aa, unidentified
MPLMKRKNSSKNKAKRIKKHLEQINLYAAGIDIGSREHFVSVPESLDDEPVRNFGCFTIDLENLADWLVRIGITTVAMESTGVYWIPVFEILEARGLEVILVNAHHVKNVSGRKTDVKDCQWLQQLHTYGLLAGAFRPEDEYCVLRAYMRQRGTLVSTLSTHIQHMQKALRQMNILLDNVVSDITSKTGMSILRAILLGERNAEKLASYRDRRCKNSVEVIAKSLMGNYRKEHLFSLKQSIELYDVYHEKLSDCDQEIEQQLTQFEKQPDLTEGQRPTKKRNKKHERNAIQFDVASYLYDLCGTDLTDIDGLDEGSVLKVLSETGTDMTKWKTASHFVSWMGLSPNNKISGGKVLSSKTVKTRNRAKQAFKLAAWGLSNSKSGLAAHYRRLRARIGAPKAINATARKIAVIFYNMLKNKTVYISQSQEEYDKAHQQRTLKLLQQKAVQFGFQLIPVSG

SEQ ID NO: 340893 - protein, 319 aa, unidentified
MGTVMNQTSSSVYIGIDVSGSTLDVAIHDTTEHFSVDNETTAIDQLVQRLIALNPTLIVMEATGKLELAVLKALCQAGLPAVAVNPRQVRNFAKATGKHAKTDRIDAFVIAHFGAVIQPVVRPLNDVQTEQLQALLLRRAQLIDMLVAEKARLERAHAAAKESLNDHIKWLKQQLTVADNDIDSFMRSSPAWRQKEDLLRSVPGIGPGAAATLIAFMPQLGSLNRREIAALTGVAPFNCDSGKHHGKRRIQGGRAIVRRALYMACIPALRFNPVIRAFYDRLRKAGKPFKVAITACIRKLIVTLNAMVHNSTPWRPSAD

SEQ ID NO: 340894 - protein, 347 aa, unidentified
MKCMAGIDLHSNNLFCAIMDLSGKRVFEKRLPCDLGSVLLALKPFQRRLEKIAVESTYNWYWLVDGLQDHGYPVVLANPAAMEQYHGLKHADDKSDGFFLAEMARLNILPTGHICDRTIRPVRDLLRRRMGLVHQRTSLMLSLKSLHTRMTGRDLSTGRIKALTPQEGEKLFAHPADQLITRLDLRLVEQLGRSIEEIEARILASVKHLPDYQVLQTMPGVGKILGLTITLETVDPQRFASPGDYASYCRCVDSRRMSNGKKKGENNGKCGNKYLAWAFVEAAQFARRHDPACRKFHDRKSAQVNGIVATKALACKLAKAAWHMMSGNKPYDGGRIFPKVKMNKLNK

SEQ ID NO: 340895 - protein, 356 aa, unidentified
MKKANQITFKEQRFFIGIDVHLKSWEVTIRNNNLALKTFSMNPSPGELAKHLKRNYPEGQYHSVYEAGFCGYWIHRQLVQLGIKNIVIHPADVPTSDKEKQTKTDRIDSRKLARELENKTLKSIYTPNEAHEQLRALRRLRYRQVQNLTRVKNRIKSHLYLNGIETPAHTECSHWSGNFIHWLESLEFSNPAGKDYLLICIEELKTCRSRIVKIVRLLRSYCRELGIAELIDFLRSVPGIGFVTAVTFYTEIMDIFRFRDLDKLCSYVGLVPTVHSSGEHQWHGRLTHRKNSYLRHMLVEAAWVAVRKDPAMLLAFNELAKRMSKQKAIIRIARKLLNRIRYVWLHQQLYITAVVE

SEQ ID NO: 340896 - protein, 348 aa, unidentified
MEHVAIDLGRPNSVLCELSPEGKKVLRRFRLDRPNLTGLFSGHPACRVLIESSTESEWVARHIESLGHEVVVADPNYAAMFGERNRRVKTDRRDADALFEANRLGVFRRAHRRSDPQRRVIAQHGVRGVLVRTRTRWINVARALLRREGCHVPSGTAESFRERVESLELTGELRNLVAPMLALMDPLNEKLTKLDREMAALGKEDPRVRLLQTLPMIGVQTSTAFVALIDDVARFPKAHKVESYIGLVPSEWSSSERRIKEGITKRGDSRVRWLLVEASWSILNRPRVDTAELRNWALQIAVRRGKKVAVVALARRLAGILYAMLRDNKPYDPTRLTAAPRRSRKAAA

SEQ ID NO: 340897 - protein, 349 aa, unidentified
MQYIALDAHKRYTLASVEHPSGGVVREARVVHQRGAIQQFLNQCDPGSPVAIEAVGNWYWIVDEIESAGMTPRLVHARKAKLMMGMLNKTDRLDVCGLNRLQRNGTLPTVWIPPAELRDQRDLPRTRMVLSQHRVRLKNRIHATLAKYALTAAANTDLFTHAGRDVLAELLERLPIHTRFATDTLLTQLDLVEAQIRAFEARMRQVFTTSAALMRLTTLPGVGEILGRVILLEVGDARRFPTAAHLASYAGTTPRVHASGGKVRLGRVRSDVNHYLKCAFVEAANVICLNRRHWPGRHVARLYDRVHQHKGHQKAVGAVARHLAEATYWILTKEEPYHAPQRRLASTKA

SEQ ID NO: 340898 - protein, 345 aa, unidentified
MEKIIRVGMDTSKSVFQLHGVNAVEAPVLRRKLRRKEMIKFFEQLAPTVVGIEACAGSHHWARVLGEMGHTVKLLAPQLVKPYVKRGKNDAADAEALCEAMSRPTMRFVAVKNAEQQAALMLIGLRDGLVRQRTQLCNALRGYGAEFGLVASKGLEKIEALLARLQQAVELPELARELFALQGRQYTRLQEQLQEIERRLLAWHRGNECSRRLAQAPGIGPIAASMLVMKTPDPRAFRSSRHFAAWIGLTAKDHSTAGKMRLGGITRAGDTALRSVLVVGAMSVIRQVKRGKGYRSPWLVGLLQRKPVKLAAVALANKMARIAWKMMMSGEAYQPGRAVRALKSA

SEQ ID NO: 340899 - protein, 416 aa, unidentified
MKIVRPICCGMDVHKNIIVATIGITNKKTRITEYIQETFSTLNPDLLNLKQWLINHKCFDACMESTGKYWIPIFNILEDEINIYLTHPKYVKAIKGKKTDKKDSKWICDLFKHDLIKFSFIPPKEIRALREISRYRYKLVGMRSSERNRYQNCMTVSNIGIGSVFSDPFGKSAQAIMKEVLESDIIEDEKILKCIHGSCKNKDKILDSIKHCNIETDQRFKMNESMTHMEELQVHIDNCEIEMMKRAAPMFDRFMHITQLPGISTLSAILIISEIGVDMKQFESDKQLTCWAGLAPANNESANKKKSVRISKAGQYLKPLLVQCALGAIKDKEGYFGIKYSRIKKRRGHKKAIIAIARMMLVSIYHMILTGETFNPSDYESFRNPNPPIKQQVLTEESAIEFLKKSGFDVSKLTKP

SEQ ID NO: 340900 - protein, 411 aa, unidentified
MELLYARCAGLDVHARTVVACARIASGGTVTYHQRTVATTTQGLLELAEWLTAQGCTHVALESTGVYWKPVWHMLDDQFELTLANAMHVRNVPGRKSDMKDARWLADLLAMGLIRSSFVPPAPIQDLRDLTRTRKQLVREIARHTQRIQKTLEDANVKLTEAISDILGTSGRAMLKALMTGETDPERLVDLTTGRLKASRAQLVEVLRGRVTAHHRFMITLHLTQIEALETAVTTIEARIGDALAPFRAAVNLLITMPGLSETAAAVILAEIGDNVSPFPTAGHLVSWAGLCPRLDESAGKRRSTRTRQGAPWLKTTLVQAAWAATRRKDGYFHAQFLRLKSRRGPKKAILAVAASMLTDVYHMLRDGAEFHDLGAQYFVQRDRDKERLTKRLLRRLRELGVDVEVKEKAA

SEQ ID NO: 340901 - protein, 313 aa, unidentified
MKKTICGVDVSKAKLDVCIEPGHKLASFNNDTAGIAELATFCREHAVDLVVMEASGGYERRAFIELWEQDISCALTNPRSVRRYAEAMGILEKTDRIDASVIARFADAKGLAPTPLPSQAQQRLKALVARLRQVTDDLTVQKQRRSSMFDNTEMQASVDEVIALLKRQSRSLEGEIASMIDDDPLWAKLADAWREMKGVAGRTVAWLHADLPEIGILSNKAIAKLAGLAPIANDSGKRKGKRSTRGGRAGVRSILFLVAAIAARYDHSLGEFRDRLLKAGKEKMVVRIALARKLLVRLNAKARQARAEYAIAT

SEQ ID NO: 340902 - protein, 407 aa, unidentified
MEVVYRCCCGIDVHKKVIVACLVNGGEQELREFGTTTSEIKTLANWLTESGCEMIAMESTGVFWKPLYNLFELMDLDAMIVNAAHMKALPGRKTDVKDAEWIADLLRHGLLKASYIPNREQRELREITRYRKSLTEERCREVNRLQKILEGANIKLDSVVKDITGKSARKLLQRIIDDDIPDSDEVSKLVHGRMRPKLEQIVASIEGITTPLQRKLLAQIIDHIDDLNRRIGELDKLVQEYMAEYEAAIEAIDEIPGIARRSAEVILAEIGLDMGRFPSAAHLCSWAGVCPGNYQSAGRREHGKTTKGNKALKTILTQCAKSAKTVKSSYFFAQYQRISARRGKNRATLAVAHSMLIAIYHLLKNKTAFHDLGSDYYDSFNRDRKINSYLKRLKALGWEPDAIPSSA

SEQ ID NO: 340903 - protein, 323 aa, unidentified
MDGSFVETPSIFVGIDVSQSAWDVHLLPEGRSFTIRVEDGAAQRLLDKLGAPKAAFVVLEATGGCERRLVAELIDAGWTVAVVNPRQVRDFAKALGRLAKTDRIDAETLALFAQRVQPRPTQKTPEKQQELDALVTRRRQLVEVRSMERMRKRQTTFKATGRSIEKLLKVLDQQIAAIEKAIAKLIESDDDWRAKRDVIESAPGLGPATSSTLVAELPELGRLNRQEISSLVGVAPMNHDSGSFRGQRHIRGGRSAVRTALYMATLTAMRFNPVLRSFAQRLHKAGKPFKVVITACMRKLLTILNTMVRNATPWNPQLSTEQR

SEQ ID NO: 340904 - protein, 407 aa, unidentified
MCRVAPNGWAFSGEPSERSERPERKRGRRVRCNDEMDSSFHVNGIMVPTWFEFIAALKEESVEHPTTIAVDLAKSVFEIAVSKEPGRVCQRKRLTRSQMASFFANRPPATVLMEACGTAHFWGRLLRGYGHRVLLLPAQHVCRYRLRDKTDAADALALLEAHRNEKIVPVPVKDLSQQAIASLHRIRSGWIATRTARLNTVRGLLRELGINIPLGAKLVLPRLSQALSDPEGLIPESLHPVLLQAASEIRTLEQNIKQVERQLETLSRSLPAALSLRSVPGIGLLTSTALIASVGDPSRFRSGRRLASSLGLVPREHSSGSSRHLGAITKRGDSYLRTLLTHGARAVLWAAKHDKNPDTLRRWALALQRRRGHNRAAIALANKLARIAWAVWSKNTVYQPRTAETVS

SEQ ID NO: 340905 - protein, 411 aa, unidentified
METLHSRVAGLDVHKNTVVACLRIAGSPAQTRTFGTMTDDLLALFDWLTDNRATHVGMESTGVLWKPVWNVLEGGSWKMLLVNPRDVKQVPGRKSDVNDAEWIAQLLACGLLNSSYVPQQGQRELRDLTRQRAQLASEHTRCVNRIHKVLQDANLKLSSVATDVMGVSGREILAALVAGQDNPEALAELAHGKLRAKIPQLKRALQGNVTRHHQFMLEQLLDHVAHLEQQLAAFCARIEEALRPFVDEATFQRLDAIPGVNRETIENVVAEIGVDMRQFRTAAHLSSWAGMCPGNEESAGRRKRNRTTKGNVWLRRALTQAAWAAARKKDSYFQAQYRRLAGRRGKKRAVIAVGHSLLEVFYHLLADPSSQYHDLGRNYFDTLDPKRLCRHLVKRLESLGYEVTLQPHTAA

SEQ ID NO: 340906 - protein, 340 aa, unidentified
MNALYGGCDLHGNDNLIGIIDGEGKRVFKKKLSNDLELVRDRLKPFQEKLVGIAVESTYNWYWMVDGLMEEGYQVHLANPSAIQQYSGLKHSDDKHDAFWLAEMLRLGILPEGYIYPKEERPVRDLLRKRGHLVRLRTSLIISLQNILSRNLGRRVNVNDVKALKEDRISHLLERNEDLALAGRVSKEAIDHLTGQIRKIEGVVEKKIKLKEEYRYLLTLHGVGKILSLTIMLETRPISRFEAVGDYVSYCRKVPSQWTSNGKRKGSGNSKNGNKYLAWAYSEASGLARQFYPEPRAYYNRKMQKTNAAVAHSALANKLSRAGYYVMRDQVPFQPEKLFG

SEQ ID NO: 340907 - protein, 325 aa, unidentified
MDYLGVDISKTKFDVCLLTDQKTRLRAFDNDLEGFQALLNWLASHAAAPVHVCMEGTGRLWEPLAEFLTGKVAVVSVVNPACVKGFADSELRRSKSDTIDAKIIARFCRAQTPRAWTPPEPAVKAIRDLQRYIDALKVDCVREGNRLKSGVLTDTVVESIERHLSFLTEEIESLQKRLHQMVASAETVAQDYELVTSIIGVGEVTAITVLGEIASVQKFETARELEVFVGIAPRVFQSGSSVRGRTRISKKGNSRVRKALYMAALAAMRHNPILRSFADRLRQSHKPGKVIVCAVMRKLLRVMFAILKSRQPFDLLHISLPPAQA

SEQ ID NO: 340908 - protein, 276 aa, unidentified
MTPAPWFVGIDVSKAQLDIALRPEGRFVVPNDEPGLAHVVERLRALPVALIVLEATGGLELPLSGALVAAGLPVVVANPRQVRDFAKATGKLAKTDPLDAQILAHFADVIRPVPRPLPNEQMQALAALLARRRQLIEMLTAEKNRLGSAPHLVHKRLHAHITWLEREVTQAERALAHAIHESPIWREKDDLLRTVPGVGPGLARTLIVDLPELGTLSRKQIAALVGVAPLNRDSGTLRGKRTVWGGRAHGPSSTVHGGPGGGPLQSRHPQFLPTPV

SEQ ID NO: 340909 - protein, 354 aa, unidentified
MGLKHQKEKRSMNHFAGLDVSVKETSLCIVDDAGRIVREVKVVSEPEALLGVLADPAWQFKRIGLEAGPLSQWLFNALAEAGLPVICVETRHMRAVLKAQINKTDRNDARGIAQMMRAGLYRPVHVKTLRSQKLRMLLTHRKLLQSKAIAIENDLRATLRNFGLKVGIVGTVKFEARIKELVESLPDLAVLVEPLLVVRRALREQIGVLHRRLLAIVREDDVCRRLMTVPGVGPVVALTYRATVDVPSRFKNSKAVGAVVGLTPCQHQSGESDRTGAISKCGDEMIRTVLYEAAQILLVRSTRWSWLKAWAMQIARRRGMKKAIVALARRLAVIMHRIWVDGTEFRWTREAVAP

SEQ ID NO: 340910 - protein, 341 aa, unidentified
MKPAMNVLGIDIAKHVFHAVGMDNTGEIVFRKRLSRHDLIPFMAKLPPVLIGMEACGGAHYWARRFREHGHNVKLMAPQFVKPYVKSNKNDSRDAEAIAEAVTRPTMRFVPIKDVDQQDIQALHRVRERLIGERTALVNEVHGLLHEYGIVIPKGVAKFRQAVIGKLESEKDKLTSLSQEMFWKLIEEFAGLEKQLAYYQEKLEALATTHPECQRLMTIPGIGPLTATALVAAVSDASAFKNGRQCAAWLGLVPRQHSTGGKDRLLGISKRGDSYLRKLLVHGARTTIRWVGRKTDRRSPWIRQLVERRGKNRTAVAVANKNARIVWALLTSHQDYQLATG

SEQ ID NO: 340911 - protein, 366 aa, unidentified
MKRLVLKEGGKQAQRAQPRAPAVGEVVILGVDLSRSKWVYACRWGGHEQRRFGSPGELTHLQAVVREYQQRGCDVHVVYEACGFGYQIAWWVEAHKARVIVVAPSCVEKAPGAQVKTDGLDAGSLALKYERGMLKGIYIPTREQHEYRQLSRTYGQALKDRSRQQVRLRLLLQEHGYTPPAAGSSWGALERWVSTQQFAPPLGLCVTELMGLRTSAGSSARRLANELRAVGRLPQYVELGKALAAQSGVGRFTAIRFMLEVGDIHRFATADSLPNYLGLAPKEYSSGDMVHRGRIRKCGPGSLRAWLVQCAWAAVRADKDGPLVECFKRLEPRVGRKRAIVAVARKLALRLRARWLAFEEEVQQAA

SEQ ID NO: 340912 - protein, 338 aa, unidentified
MSIVHVGVDLAKNVFAVHGVDESGKAALVRPSVSRAKLSELIAGLPPCTVAMEACSGAHHWARLFAAYGHTVRLIAPKFVTPYRMSGARGKTDAADAAAICEAVQRPAMRFVPLKSEQQQSQLMVHRARQGYVQARTACINRIRGLLAEFGHVLPLKADTVRRQAAGVLEELPGCGNTVVGDLLSELHRLDERIAQYDRHVAQIAREDERARRLMQLPGIGATTATAMVAMIGNGHEFKCGRQLAAWLGLTPGQYSSGGKTRLGRITKNGDGYLRSLLILGARSVLALAKGRSDAISSWALALQQRRGYWKAVVAIAAKNARMAWAVLRRGENFKMPA

SEQ ID NO: 340913 - protein, 351 aa, unidentified
MPRTSTVHAVTTIGMDMGKNTLHMIGLDSRGAIVLREKVSRGRIALRLANLPCCLIGIEAGLATHYVARELAALGHDVKQVPPTYAKPFRQGHKNDFRDAHSVAEAVQRPTTRFVPAKTNEQLDLQALHRVRSRLVSERTAVINQIRGFLLERGIIVRQGLRFLRQALPDILAKRTDVLSPRMVRIVADLASDWRQLDERIEPVTDEIETLAKSDDGCRRVMTVPGIGPIISSAMVAAIGNGAAFARGRDFSAWIGLVPKQMSTGDRTILGRITKRGNGYLRTLFVQAARVILLRPASWPKHSFGVWLARAAQRLHRNVLAAALANKLARIAWTVLAQGRGYEARITKPAV

SEQ ID NO: 340914 - protein, 483 aa, unidentified
MKPKRVKKDKKASCRPTPNNWHKMNRKQRREMTRKIQSEDLSLEVVHPDAAGIDIGNESHYVAVPPTRDSQPVRRFGCTTSELKEMAGWLKQCAIRTIALQSTGVYWIAVYDILEEAGFEVYLVNARETKNLPGRKSDVQESQWLMKLHTYGLLRNSFRPSQEVRTMRTYWRQRNDLVRAAGRHIQRMQKALTQMNIQLANVLSDVSGMTGQAIVKAILAGERDPYQLAALRNWRVKASEEEIARSLEGNWQEDLLFVLQQEQDGYEFCQKQMAECDQRLQQYLQQLEDRSQGAGLPEEKRKERLRKKKKGNAPQFDLRAELFRMTGTDLTQIDGIDVTTTMTILSEAGWDMSKWKTEHHFVSWLRLCPDNRISGDKIIGKGRLPTNNRVTNALRMAASTLRLSNTYLGAQFRRLRTKLGAPVAIKAMAAKLARLVYRMLRYGMPFIDRGAEFYDAQHRKLQINYLKRKAANLGFQIIEAPAA

SEQ ID NO: 340915 - protein, 355 aa, unidentified
MNVYTGVHAYYCGIDLHARTMYVCVLDKDGKKVYHKNIPCRPDRFLQAIEPFRGDIVVGVECIFCWYWLADLCEEEGIDFVLGHALYMKAIHGVKTKNDRIDSLKIARLIRGGNFPVAYVYPPEMRATRDLMRRRNHFVRKRAELLSHIQNTTMQYNLEPLGTLSRPHHRRDKDIVGHFPDPVVQLIVETDLQLIDHYDPIIKNLDKQILKLAKGHDRKSLELLQSIHGVGEVLSLTMLYEIHTIDRFPSRGEFCSYARLVKGQKSSAGKNYGTTGGRIGNAHLRWAFSEAAVLFLRKNKEAERYYNRLINRHGKSKALSIVAKRLGIAVYYMLRRGNPFNINMFLQSHMAKEKA

SEQ ID NO: 340916 - protein, 309 aa, unidentified
MGVYVGIDVSKDRLDVYVLPQDEAFYVERNGKGLALLVERLKSFAPSLVAVEATGGFETTTAAAVAGAGLPLAVVNPAQVRHYAQALGKRAKTDPIDAKVIARFAADVKPEARELPDEMTRQLGDLVARRRQIVEMLQAERQREKRATVKRLKKSIVRLIAALEKELAELDKDIDDAVRGSPVWREKEDLLASVPGVGSIIARTLMAELPELGTLDRKKIASLAGLAPYTRQSGNWKGRSMIGGGRKTVRCALFMAAMVAARHNPVLKAFRDRLVAAGKPKLAAIIAVARKLLTILNAILRDKTPWQIA

SEQ ID NO: 340917 - protein, 358 aa, unidentified
MKIVGCDLHARQQSIALLDTETGEFIEKTLSHEGNSVREFYAALQGPVVVGIEATVSMQWFLELLEELKIECRVGHPAKIRAAETRKQKHDRRDAQLILDLLVMQDRFPQIWMPSIEQRDLRTLLRDRDQWVKMRARLQHRLQAIALNHGLRQGHGLWSGTGQNALQALPLPPYNHQRRNELLSLYRQLQRRIQELDKEVEAQARRRPQARRLLTHPGVGPVTALATEVFLGDPSRFATANQVASYIGMIPSEHTSGKRQRLGSMSKQGNALLRYLWTEATMHAVQKDPELRRFYRRKLIQKAMGKARIAAARKLGIRLWIMMRDQIEYEEFCRRGMLRQMGKAHAGMPDCDSGPAQQ

SEQ ID NO: 340918 - protein, 308 aa, unidentified
MLGVGIDVGKYWLDLARHGEPHIHHFTNDPAGIAQLIKSLIPGPDLFVVLEATGGFELPALRALVQAGHAVSRVNPRQSRSFARASGQLAKTDALDAIGLAHMAHCLHARLPRYVESEPWQSTLAAYVIRRAQLVIAVQQQEQQIAALTLPALRKSALRSLRALEKERSELDQHIATLTTPRLTPAWRSIKGLGPVAQATLLSLLPELGSLSRQQIAKLVGVAPLNRDSGTLRGHRGIFGGRARVRAILYMAALVAVRWQPEFKAFYRQLRARGKLAKVALVACMRKLLVVLNARIRDERRNGIEAAA

SEQ ID NO: 340919 - protein, 346 aa, unidentified
MNKRDDCGIEVSAQELLVALRREGQARPLKSFPNTPAGHRDLARYLARKGRVVRVCLESTGVYGLDLALLLQKRAGIEVMVANPRAVRHFAQALMQRSKTDPLDARVLLEFAARMPFQPWPPPSTTALHLCALARRLEAITELCAAEKNRLHAARAAQALPAVIRQDLEGSIAFHQRALGRLTRQALKLIASDALLSERYAQLDSIPGIACASAIRLLAELVMLSPDRDVRQWVAYAGLDPRAYTSGSSVHKPTRISKAGNRHVRAALYMPALVAVRHDPHLRAYYQHLLAQGKLKMPALVAVMRKILHAIYGMFKHHQLYDGTKVFPLSARGSAVERLKTLVAVA

SEQ ID NO: 340920 - protein, 347 aa, unidentified
MLALHPDLGVVIGVDTHNDTHTAAAVGATGAVLEHLTVAADAAGYRQLIGFGRRHGATLWAIEGTGSFGAGLTTVLLSRCERVVEVDRPQRPARRGGVKSDDIDAVRAARQALAGVGLSEPRRRGDREALRVLLATRGQAITFRTRAISALHALVTSAPDGLRQRLRTLPLGQLLQTCAGLRDSSRRSAEESATVLAMRSTARRALACEREAAELEVQLDRLVRRLAPELLDQLGIGPVVAGQVITSWSHHGRIRSEAAFAKLGGAAPIEASSGTVTRHRLNRSGDRQLNRALHTIVLVRMRQDRATKDYVQRRLAQGKTIRDIKRCLKRYIARQLFRQLEALSTTT

SEQ ID NO: 340921 - protein, 453 aa, unidentified
MVQRKQKISIKPGKSREPLTITHPNTAGIDIGSSSHYVSVPPDRDDEPVREFPSFTVDLNALADWLDACGVDTVAMESTGVYWIPLFELLESRGFKVFLVNARHVKNVSGRKSDVLDCQWLQQLMTYGLLRGAFRPTEDVCVLRALWRQRGMLLRGQGRQVQHMQKALAQMNVQLANVISDVVGETGQKILRAIVAGERDGQVLAAMKNARIRATAAEIAKSLQGNWRAEHLFALKQALDMFEFIGTQLAECDNKIEGQLQNLQVHDGEPAKGKKRGRTRNAPKFDLRSQLFKMCGVDLTRIDGIDVTTALAVISETGTDMSRFPTAGHFTSWLGLCPGTKITGGKVMSGKTKRVANRAAQALRLAAAALRSSQSALGAYFRRMCGRMDKPKAVTAAAHKLARMIYTMLTKGEEYTDQGQDYYEERYRERVLRQLVQRAEKMGMKLVAKEQPA

SEQ ID NO: 340922 - protein, 348 aa, unidentified
MTIVAETYDYVIGIDTHARTHTYAIINTRTGSREACQAFPTSPAGMNRTLAWITKRTTGTLLAAVEGTRSYGATITHALTMAGFPVVEVKPPRKQARARVGKTDEIDATAAAMGILYQDTERLLTPRAEGTRSALNVLVASRERIDAERTRNRNALTALAREIDLGVDARKALTDMQVKQISAWREHPTDSVAQRYARAEASRLATAVLDADKLLAANKTQMAELDEQMAPGLAAEFGYGPVTVAWILIAYSHTGRVHSEAAFASMAGVAPLQASSGNTVRHRLNRHGDRMLNQALDVIAKVRMQFDPQTKDYVEKRKAEGLSYREIKRVLKRYIVRKVFRRLRVLVP

SEQ ID NO: 340923 - protein, 340 aa, unidentified
MHATTYGLDVAKRVFQMYWVDGDTGEIVNRRFGRGDLIQYPSRRPPGRVALEACGSAHWWARKIKALGHEVVLLHAKFIRPFVQTNKTDAADARAIWTAVQQPGMRTVAAKTEEQQTMLSLHRIRSLLVKFRTMQVNQLRGLLYEFGASFRAGRVGGLAEVRARMVELEEALPGAMMCCLQDQLRRIDELQKEIDQLERRIGAWQKQDVACSAIAAVPGIGKLTATALVATMGDAATFKSGREFAAYLGLVPRQSGTGGKVRLGSISKRGDPYLRTLLIHGARSVLCHTKVPTPWQSAIQERRPTNVAAVAVASKMARTAWAILAHGEAYRRDHVSLRPA

SEQ ID NO: 340924 - protein, 360 aa, unidentified
MIVAHRYDHVVGVDTHARTHTYAIVATKTGEILGTRAFPVTAAAIDRAIAWVESVTSGSVLFAMEGTGSYGASLGRALQRDGIVFCEVRPPKKSSRVRGKSDEIDAVAAATSAMGIELDALIRPKVDGLRNALRVTLDARRDMEIRRTSARNQLNALVRTADFGLDTRRALTDRGVQQLAGLDVERPDVAERIIRAEAVRLASTVIELGHEMRKNRDSLAELVELLAPGLQQIYGVGPVTAAVAVAAFSHPGRVRSEAAFASLAGVSPIPASSGNTIRHRLNRGGDRQLNRALDVIARVRMVSDARTRAYVDRRTAEGRTTREIRRSLKRYIARELFKALQARMVGAVPGMQLSGLTAAI

SEQ ID NO: 340925 - protein, 324 aa, unidentified
MDAMLKKCAGLDVHQETIVACVLKGELDERPKSEIRTFGTYTKDLEELHEWLLQEEVEQVAMESTGVFWKCVWNIIEDEKYEIRLANAKEIKNMPGRKTDVKDAQWIAELLRCGLVKSSFVPDVEIRELRDLTRYRRKIIQQASSEKNRIHKILQDANIKITTDISDIFGDTGRKLIEKIIEGKEITEEELFEITSGRGKASLREKIPQIKEGLKGTTRDHHRKMIKLIYEHLKYLEKEQEEIDRMIDEACTEYKKEIELLDSIPGINEDSAKAIIAEIGVDMNQFPTVKHLTSWAGMSPGNNESAGVKKKENQQKEIEHFEQH

SEQ ID NO: 340926 - protein, 408 aa, unidentified
MKRYYLGVDWADEFHQVWVSDFDGKKVAEMKVVQSPEGMSEFGSWLHQRKAEEIELWAAIEKPHGRIVDFLLDHAVVVYPVNPKALDRVRDRFRMSQSKSDSFDAYVLAEFLRTDHAHLRALEPSSNEAQELKMLTRDHHRLVRQKSRLLNQLDRTLKEYYPRPLEVFSDLESKIALDFLARYPTPKALGDLNRRKWNRFAKREHHLGEQRCKELWEKLNKPQLNVPEHVVRAKAQLLEVLLIQLKALIESVQSYSEKVQRFFASMPAADLVKTLPGGKSGTIVPMLWAELGDAKSRWQSFRHLQAEAGAVPVTKASGKSRVVQFRFSCNKLMRYASYWFAFVSLNQSEWANRYYRDQRAKSHNHPQALRALGAKWLKIIFVMWRDHKPYDENYHLANITRQKMRQAA

SEQ ID NO: 340927 - protein, 426 aa, unidentified
MKKADLLSTLFVGIDVSSRENVVCAIDYEAQKLLRFSVQNNHPGAVEMSEKLHTFLSGNCDINKLMVALESTSFYGIHIANYLSSCKLLMPFHTHVYCLNPKMIANYKKSYIDLGKNDGIDAFVIADFARVGRITTAPWRGSQFLALQRLTRHRLHIAGSLTREKTYMLSNIFLKFSEFSMLDEDKQPFSNNYGATASSVLTDFLSTEDIATMPMEALIDHICKKGKNRFVDPNHTASLLQQAARNSYRLDKCLYEPLTISIASSFNLISAYESEMKAINKAIEKTLKGLDPNAYQSLLSIPGIGPVYAAGIIAEIGSIDAFNSHSALAKYAGLVWRENQSGNFNADDTMLSKAGNSYLRYYLIEAASHVKNHVPEYAAFYQKKYDEVKTHQHKRALALTARKFIQLIFGLLANHQLYSTCRVSQI

SEQ ID NO: 340928 - protein, 413 aa, unidentified
MGYRVAGIDIHKKVLMVVVVEVEADTVEWKTERRRFGTATPELGKLAAWLQEQGVQEAVMESTAQYWKPVWWELEGKIPALQLAQAFSNRARRGRKQDFRDAERLVRRLVADELVLSFVPGPEQRNLRTMTRMQVQLGRDRVRLHNQVECLLEEMRIKLSSVLSDLFGATGLRILGALAGGETEPKKLAALADDRLKCTPKQLVEALTGHGEAMHQQLLKLYLERLQVIDRQIEQLKGMVAKALEKNHEAVVRLAEAPGFGVDSAQQLIAEVGAEASTFPSGAHLTSWVGTCPGQNESAEENHSSRSAKGNKYARRLLTEAAQAAVKTKGCHFQVVFRRLLPRLGYKQALWAIAHRLCRLVWKILHEGVRYVEQGVHRDPKAAKRRAQVLVRTLRELGYKVELTPLTPAPAQG

SEQ ID NO: 340929 - protein, 337 aa, unidentified
MSDIAIIGIDLAKSVIQLHGSDKSGRCIYRKKLRRHQVLPFLAKSPQCLIGMEACSGSHYWAREIQKLGHNVKLIPPQFVKPYVKTNKTDAADAEAICEAVTRPNMRFVPIKSPDQQGILLVHRERDGLIKERTAVINRIRAVFSEFGIAIPAGPKKLKEWMLKSYGDHETELSKVMTRLIERMTERLSLIEAEIAILDKEIDNQNKVDTRCKRLLEIPGVGRLAASAIVASVGNAKEFKSGRQFSAWLGLVPRQYSSGGKQNLQGISKRGDAYIRKMLIHGARAVVRHVNKNNAPVEWIEQLSMRRHNNVVIVAVANKLARIVWALLSKEQRYAIS

SEQ ID NO: 340930 - protein, 433 aa, unidentified
MPTTHPYDLVIGLDRSDRKADLHLIDTRTGTVQKQTVATSPEALHDWLVQLRRDHPQARVAICLEQPAANLIVFLETYSWITLYPINPISLQKFREAFVTSRAKDDGKDAQYLAELLLSHPDKLKAWQPDDSQTRQLQQLVLHRRAVVDQRTGRTNRLKALLKQYFPQALDLCGEDLWRPLARAFLLKWPTLQSLKKARKESLKQFYYLQGSRSQTLIEQRLERIDKAVPLSDELALLQSYTLRVQLLCKELQLLLKTLQQFDQQIAKVFQQHTDRPIFEAFPGAGPVLAPRLLASMGSERERFAQPENLQSFSGVAPVTKQSGGTCSIHRRYLCPKFLKQSFHEYAKESILHSRWAAAYYGQQRNKGCGHHTAVRALAYKWQRIIWKCWQTRTIYKEAIYEAALKKNKSPLIGLLDQIELGKSPVKSRAKKS

SEQ ID NO: 340931 - protein, 429 aa, unidentified
MTEHDYAPLPPFAALVGIDWADRKHDVYLLDVDTGRREHLVLAHTPEAIDDWACQLRSRFGGRPVAVCLEQSKGALVYALLKYDFLVLFPLNPARLKSYRQAVSSSGAKDDPTDAQFLLEYLECHRAHLVAWRPDDARTRQLGLIGEERRKAVDLRTRLGNRLRTCLKNYFPQALDLVGEGLHTRMACDFLLKWPTLAVAQKATPKTLRRFYHSHNSRHEELIDRRIEALRAARPLTTDTALVQSYRLTATLLARQLLELAGAIEAYDKELARLMAEHPDAALFEGLPGAGAALAPRLLVAFGSDRQRFAGPGDVQTYSGIAPVTRRSGRSSSVHRRTACPRFLRQTFHEFAGHSVPRSAWAGAYYRQQRARGRGHHAAVRSLAFKWIRVIYRCWKERTPYDEETYLASLRRRGSPLLAYLPAPSPAKS

SEQ ID NO: 340932 - protein, 369 aa, unidentified
MENIIYIGMDVHKERLSLCALHGTTGEIVGEARCASNVSLVKKFVEKLKTKYREDINIKARYEAGCLGYSLHNLLEQNGIDCDILAPTTMYSSSKNKMVKNDKFDAKMIALNLANGTYKEVYVPEEEDVAVKEYIRMLGDFKTSLKKIKQQIKAFLLRHGYVYEGISSWTITYMKWVRNLDLQGLFKETLGEYLLQYEVLVDKIERFSLRLEELSHRERYEEPIAKLRCLKGIDTTAAMNVYVEIADFTHFPTAKAFMAYLGLTPIESSSGDKISRSSITKQGNSTVRSTLVECANALVKGTIGLKSKRVKARQKGQQSEVISYADRAVERLQRKYHRMMYQGKPRNVAITAIARELGCFIWGLETGKI

SEQ ID NO: 340933 - protein, 442 aa, unidentified
MDASLNANAKLSLRGFAICPYLAGINMGRQRDNACGADIHKNKIVATILSQSGTKIQADFGTTLPELLKFKAWLINNDCRIMAMESTGTYWIPIYSVLEGSIDIIVANPYMIKHIPGKKTDLVDSDWLAELCLKDLIVPSRIFPKEDRVLRSLTRSREGLVKIRTRLKNKIHRDLSSSHIKLSSVVTDIFGKSGTHILRGLLDNRSIDEIIETIPSRRVKKNADKIKESIENNLDSSQIFLIESSLDLMGSIQDNINRIDADLRKRTSSRLNDLKIAMSIPGIEFTSAVTILAEIGDYRDFRSPEQLASYFGIVPFVNQSADKLRTGCITKHGSKHLRWIVVQVAHAASKKIGSRLRKFYLRVKARRGANVAIVALARKILCILHHLLINQEMYEEPGVTKRTRPVKLDQPSSQSEFTAQEMIDILQRSGYEIRKIERGAFG

SEQ ID NO: 340934 - protein, 338 aa, unidentified
MNIVFLGIDLAKNVFQLCGLNQAGKPVYTKRTGRKELLQTLANIPACLIGIEASTGAFYWQREFEKLGHKVKVISPQYVKPFVRGQKNDGNDAQAIAVALMQPTMQFVPPKSPEQQDIQALHRARQRIVNHRTATVCQIRGLLLDRGIPIGSAVSRARRAIPLILEDAENGLSSRMRRTIAELYELFNDLGRRIHFFDKEIETVFRQSEACQRIARVKGIGPKTATAVVAAIGKGTEFKNGRHFAAWLGLVPRQHSSGDRQVLMNMTKKGDKHLRTLFIHGARAVVRVATNNNDGHMNQWVNQLKERRGFNKTTVAVANKNARIIWSMLRNETEYQVV

SEQ ID NO: 340935 - protein, 346 aa, unidentified
MEHYAGIDVSLELSSVCVVDAHGKIVKEAKIASEPEAFIAFFQELGFAVKQIGLEAGPLSQWLHAGLKQAGFETVLLETRHVKAALSAMTVKTDRKDARGLAQLIRMGWFRPVHAKSMGSQEVRALLVARKQLLGRLIDVELSIRGILRGFGLKVGPVTRKGFEARIRELVTGQATLERIAGAMLSARTALKAEYEKLHKAVLSIVRDDAVCRRLMTVPGVGPLVAVTYKSAMDDPSRITKSKAAGALFGLTPRKYQSGEKDITGGITRAGDEMVRTVLYEAANVLLSRITRFSKLKRWGMDVAKRRGSKRAKVALARKIAVILHRMWVDGTTYRWTEANPIAAQA

SEQ ID NO: 340936 - protein, 459 aa, unidentified
MNSRRRANNKREEGVPLPVIQPKVAGIDVGSREHWVCGPARRDGEPNVRVFGTTTDQLNALTDWLVEQGVESAAMESTSVYWIPLYELLESRKIQVVLVNARQLHHVPGRKTDFSDCQWLQLLHSCGLLRGSFRPGDAIVRLRALQRQLGNLVAERTRCVQWMQKALDQMNVQLHRAVSDLTGTTGMAIVRAIVAGERNPVTLAVHRDRRCHKSVDEIARYLTGNWREEHLFNLACALKLYDAVEQMIASYDARILQEMEALQAPQRRNQPVPRHPNPAKESALKSRGEQEARTQLWRFAGVDLTRIDGISATTAQIVLTEVGANLSAFPSENHFVSWLRLCPRTPISGGKPIKKRRNALGASRITASLRMAAVAMQRSKTALGAAFRRIARHKGAAVAVFAIARKLAQLIYRLLRFGQDYIDIGAAAYEERFRVRRLSSMAQAAKQLGYALVLAPATA

SEQ ID NO: 340937 - protein, 343 aa, unidentified
MDQYIGLDVSLKDTAISIRQDGRRIWRAKCPSDPKLLAQMIRKHAPHAKRVIFETGPLSTWFYHALTAEGVPAICIEARHAQKVLNETLNKTDANDADGLAQLAEAGFYKAVRVKAFDSMLTRTLVAGRNQLLGISTQLGNQIRGLMKTFGLIIPKGTGRVFDRNVRELLDGNDGLSTIILPLLEAWRHIRKRAADLERQLLAAARESQATKLLMTIPGIGAVTAVSYVAAIEDPENFRTSRSVGAWLGLTTRRYQSGEVDYDGHISRRGDNHLRGLLYEAATVILTRTGVRHECSLKNWGLKLRERLGFKRAAVAVARKLAVIMHSMLKSGEAFNALADTTR

SEQ ID NO: 340938 - protein, 428 aa, unidentified
MNAPLNNDNRQNDYAAFIAIDWADRQHVFSLQVAGQSTKETGTLEQKPEVIGPWVAKLRERFGGRLVAIAVEQSRGALIHALLSYDFIVIYPLHPSTVAKFREAFKSSGAKNDPLDTDQILQILTKHRDLLKALNPDTEETRLLARLVEDRRQAVDLRTGHIQALSAALKEYFPQLLELLNGNLASRLACDFLIKWPTFEAFQQAKPSTIKRFYYGHNIRSPRLIEKVLGLASTAQALTTDGAIVESGRRLSQMYAQLIQTLNPVIEAYDQRIEEVFHDHPEAHLFNQLPGAGAALAPRLLSFFGTDRSRYEAAGNVQSFCGIAPVTKSSGQTRVVYFRHACPKFARQTFHEFARLSVAKCQWARNYVDYYRGKGKKFHTIIRGLAFKWIRILFRRWKNQTPYNDTNYMEVLKKRGSIFATLHLEQNA

SEQ ID NO: 340939 - protein, 342 aa, unidentified
MKISKKVVRMGIDLGKNTFHVFGVDESGSTVVKKKLRRKQLLEYFANRPPCLVGMEACGGSHHWARELVKLGHEVRLISPQFVKPYIKGNKNDYNDAEGICEAVGRPNMRFVTVKSIEQQDLQGLHRIRQSVVKQRTALANQIRGLLGEYGIVVAQGISRVRARIPEILEDGENGLTDRFRGWLAELLAAFHALDERIKKYDQEIQREHAANEVCQRLSAIEGVGPQSATAIVATYGDGKQFRDGRQFSASIGLVPRQHTTGDKPILLGISKRGDKYVRTLLIHGARSVINRIERKDDRRSRWLQSLVARRGKNKAAVALANKNARIIWALLSRGECYRAAA

SEQ ID NO: 340940 - protein, 343 aa, unidentified
MEKIATIGLDLAKSVFQVHGVAEDGRVVIRRALRRSQLLEFFRGVEPCLVGLEACASAHHWANVIGQFGHTVRMMPPAYVKAYVKRNKTDAADAEAICEAVTRPTMRFVPIKSPEDQAAGMVLKTRELFVRQRTQMANAMRAHMSELGIIAATGMASIAKLVAILRDDDDARLPSAARFALLEMAEQIEELTARIEALDTKIMTAVKADETARRLTSIPGVGPIIAATVRATIQDPAAFRTGRDLAAWIGITPRAHSSGGKERLGGISKRGNKQLRTLLIVGATSILKLACRGVKLPAWVLSLIARRPYKVAAVALANKMARTIWALLVKGGTYQAPAIMGRA

SEQ ID NO: 340941 - protein, 353 aa, unidentified
MILDCWFEKLGEVTFENKPSAFPSLLEYVNGFLTEDITPVFGLEDVGGYGRGLALYLKEKGHIVKFVNSSLSNAERNSYAMTQKHDSWDAQCVANVLIRQLPYLPDAIPSDMYWMIAQLVGRRNALVKSQTALKNQLHLQLSFHYPSYKKFFSKVDGQTALAFWERYPSPAHLKGETVESLRTFLLKASHKSCSIRKAKQILSLIQADGEIKREYQTTSDFIIQSMVRDIRFKKQEIKKVDKELKALIKPLGMQLETMPGINTVTASAFIAEIGDIHRFSHSDKLARYAGIAPVRMGSGGKETIQKSKQGNRELYNIFYNLAVQQIHICKGSKTPRNPVFYEYYQKMYLLIEF

SEQ ID NO: 340942 - protein, 417 aa, unidentified
MTAYCGIDWAEAHHDVALVDQNGHRLGRCRIPDTAEGLAVLLALLAEHGDSPENPIPVAIETGRGLLVACLVATGRDVVVINPMAAARYRERTAVTRTKSDAADALMLANVLRTDRHAHRSLPNDSELVRAVAVLARAGQDATWQRQQAANQLRSLLREFFPAALTAFQIKHVGLASPEARAILAAAPTPAAAAQLTKTRLRTLLTKAGRRRNLDRWVDRLHATFHAGAMRHPVEVENAYGQAALAILKRLDAAVSAAQDLQHATTAVFEQHPHATIITSFPGLGPLTGARVLAELGDDPDRFDDARALKAYAGAAPVTRASGKSHLVMHRRVKNHRLASAGYNWTFAALSHSPGARQHYDRRRATGEGHAAALRNLYNRFLGQLYYCLSTGQHYDEQRAFGTPTGGPPKATMPQVT

SEQ ID NO: 340943 - protein, 392 aa, unidentified
MKQHSKKPSRTANRKPERIAGLDLGDRYSHYCVLTSDGELVEEGRLQSTEAGLRRQFGGDPRMRIALEAGTHSPWVSRLLEGCGHEVLVANPRKIRAITASESKNDRNDAEKLARFAACDPKLLSPIRHRSPQRQQDLNLIHARSSLVRARTGLVNALRGLVKSAGGRLGVCSTRSFPDKTRASIPPQLQPACAPLVEQIAQLNLAIAGMDRQVEALGNKYPEIPLLRTVPGVGPIVAACYVLTLDRPDIIQDNRQAGAFLGLRPRQSQSGDKNPQHGISKTGNTCLRSLLVQAAHYILGRFGPDSALRRWGLGLAARGGKRGKKRAVVAVARKLAVLLHSMGRNRKPFPPFPQKLGAGPSRNRSLNPPPKHTGKEGRRQRLCGRRSHLAFG

SEQ ID NO: 340944 - protein, 410 aa, unidentified
MEVLYLRCCGLDVHKETVVACLRVVSGGKVDTNVRTFETTTAGLIALSEWLAEKGCTHIAMEATGIYWKPVWHILADGEFELILANAAHVKNVPGRKTDVTDAAWLAELLAHGLIRASFVPDTQTQELRTLLRTRKQLVREKASHILRVQKTLEDANIKLDSVITDVMGMSGRAMMEALIAGESDPGKLARLANYRLKTSQEKLREALRGRVTKHHRFLLRLHLNQIDALDAAIATIDRQVEAGIAPFRAAVEQLSSVPGIRDIGAQVIVSEIGTDMSRFPSEGHLISWAGLCPRNDESAGKRRSNRLRKGAPWLKTTLVQCAWSAVRKKGSYLQAQFLRLKARRGPKKAIMAVAASILTAIYHMLKDGTLYQDLGSNHFQNRSKGQQTNRLIKRLADLGYDVVLTPRTS

SEQ ID NO: 340945 - protein, 306 aa, unidentified
MEEIIIKGCGLDLHQATVVACIQRQGYDKQIQTFGTTTEELECLKSWLKDEGITHIAMESTGVFWKPVFNVLEDEQWELLLVNARHIKNVPGRKTDVQDCEWICKLLRAGLLKGSFIPQEDIRHLRTITRHQKAIQHQIQNEKNRVHKLLQECNIKITQVLSDVFGVAGMKILNDLSKGITDANKLAKHMEGNKQLLHKKDQAIACLKGKFDHHYQVMLKVMLDTIAFYNKQIEALDIEVNNLLKPYQIEHELLQTIPGVKEKAANHIIAELSANMEAFPDEKHLSSWAGLCPGNNESAGKKKVHD

SEQ ID NO: 340946 - protein, 422 aa, unidentified
MVPGRRLYIGEALRSSPLDQNPQTASLGGRAQKGWGKEMTGKHEVESSEGSRRQLQGLPVVRRNVAGIDLGSERHWVCAPTVDGSGREITSFGATTPELIRLAEWLKQRQVESVAMESTGVYWIAPHEVLEAQGLQVLLVDTRQLARVPGRDKKTDPRDCEWIQRLHSCGLLRSSFRPEEAVCMLRTLVRDKANLVAECGDWLRRMQKSLDQMNVRVHRAVSDIDGVTGMAILRAITGGERDALKLAKLRDPRCSKTEQEIAEQLSGHWREDHLFSLQQALNMYDAVQERIAAYEKEILRKLGDMEREEQRGQTAPPLQNANKAKAIKKRGQEPIRQALYRMSGVDATHIDAIGVETLEVVLSEYGPDLSRFPTEKQFVSHVTLAPHVPTSGGKPLRKRKPGKRRWYSPRPIGSQARMPPPG

SEQ ID NO: 340947 - protein, 312 aa, unidentified
METKFVGIDVSKLTLDFDCLPVSAAQQFANDAAGIAALVALLQGSGVERIVIEATGGYETAVASALAVASLPVVVVNPKQVRDFAKAIGHFAKTDRLDAKVLALFGERIKPPLRTIPDETQRALADVLGRRSQLVVMRAQEKARLATVAAVARRNVEQHIAWLDKCIGKLDTDLGDRLRNSPVWCHKATLLDSVPGVGTVTTFSLLAKLPELGTLNRQKISALVGLAPFSDDSGKRQGARYIRGGRAEVRCVLYMATLSAIKHNPPIKAMYERLKKAGKPFKLAMTACMRKLLTILNAMLKTNQTWKIQPSS

SEQ ID NO: 340948 - protein, 345 aa, unidentified
MKLIRVGVDLAKNVFQVHGVDRNEKPVWRRRLMRDNWLRVVLGTLEPGCQIGMEACGGAHYWARKLQERGFTVKLIAPQFVKPYVQSNKNDANDAEAICEAMSRPKMRFVAVKTVEQQDIQAVHRIRSGLIEQRTAKGNQIRGLVSEYGLVAPRELVQLRRALPVWLEDAGNGLSERFRRLLDALWCDLRLLDERVAELDREIALIAHSDPAARRLQQLRGVGPIIATALVAAVGDGGQFANGRQMAAALGLTPKQHSSGGKDRQLGISKRGDAYLRTVLIHGARSAIRTCNGKSDRLSQWVMALAARRHPNVVATALANKTARIAWAMLRRGTDYQPELIAANG

SEQ ID NO: 340949 - protein, 365 aa, unidentified
MARIADTGPIHLGLDVHRNTISVATLLPDTAAAAVEQIPSDEAAVLAFLGRFAEPSRLRVCYEAGPTGYELARLLHGQGVACQVIAPSLIPRAAGDKVKTDRRDSRRLARLHRAGELVAIRIPTPREEAVRDLCRARADLVDDRSRARRRLQAFLLRHGRVYRSGACWTGKHQRWLGTQQFDDRQLQATFAHYRAVVTSRDAQVTAIEADLTDAAIQAPFADAVARLAAYRGVGQLGALSLAAEVGDWRRFAHAAAFMAFTGLVPSERSSGDSVWRGHITRTGSKHLRFQLVESAWSYHHRPLIAGALRERQQQVGPDTLARSWAAQLRLCRRFRQLERRKHITGVAVVAVARELAGFLWAEMQA

SEQ ID NO: 340950 - protein, 400 aa, unidentified
MISIDGVGVFLGLDVGKQTHHGHGLTPAGKTVFDKPLPNSEPKLRAVFDKLTAKFGTVLVVVDQPASIGALPLTVARDAGCQVAYLPGLAMRRIADLYPGEAKTDAKDAVVIADAARTMPHTLRTLDLADEITAELTMLVGFDQDLAGEANRTSNRIRGLLTQFHPSLERVLGPRLDHQAVTWLLERYGSPQALRKAGRRRLVEVVRPRAPRMAERLVDDIFTALDEQTVTVPGTGTLDVIVPSLAKSLAAVHEQRRALEARIEALLEAHPLSPVLTSMPGIGVRTAAVLLTTVGDGSSFPSAGHLASYAGLAPATKQSGTSIHGEHAPRGGNRQLKRAMFLSAFAALHDPASRTYYDRCRARGKTHTQALLRLARHRISVLFAMLRDGTFYEPRTPRLA

SEQ ID NO: 340951 - protein, 422 aa, unidentified
MVLKGVPMALKIVYQICCGIDVHKTFVVACIASTNKQGVTTYKRHRFSTFTQGLKELLQWLLDNHCKDVCMESTGKYWIPIYNVLEKDCNIVLAHPKYVKAIRGKKTDKKDAKWIADLFKHDLVAGSFMPPTDIRQLRDLMRYRFKLTCFMSSEKNRLQNCLTVSNIQLASVVSDTFGKSSQRILDKILENPDDTSFDIEPLIHGSMKKKLPELELAIDGFITPEQAGKLKVIKKHFEDLESRKAELEKLILALASPYQQELDLILTAPSFKNKFTAIGIISEIGVNMEAFPSAKHLCSWAGLTPTNNESAGKKKSVRVSKARCYIKPLLVQCANSVVKSEKHPEIRNRYLRLRKRRGHKKAIIAIARMLLTALYNMLKNKEPYNAELYRKSDALPVNREITIEQAILMAQFQGYKIKSAAE

SEQ ID NO: 340952 - protein, 333 aa, unidentified
MNSDGSIAEESIYNNTLDEAGMFAYSMVKKYGKCIAVCESTANLWLKTYEAFERHGIGVTLANPLKTKAIAEAKIKTDTLDARTLAHLLRADLVAECYIAPKEIREDRLLLRLRINLVQDRTRVMNRAHSLLDKYDVKFDCDNIFGLKGIRCLRNLRLSGNDQMLLHEYIMQIEFLNTEIKNVESKISYQASNNESVKILMSMTGIDYFSAILIASEIGDITRFNTPEKLVSWAGLCPSIHQSGNSLYMGRMKDGNKKIRWILIQAANTAARKDDRLKKFYQRIAKRHGHHIAITHVANKMITIMWHMLTNKKLYNERKQNLYNAKLKRIQRL

SEQ ID NO: 340953 - protein, 408 aa, unidentified
MNTLYVGIDVSSKSNVVYLMLPNGDKHSNFSVANSHEGSTQLVKRILSVLTSHSLDTVLIGLEATSVYGDNLVYFLREDATLAPFNRKIHVLNPKQVKKFHDAYNDLPKNDYVDSFVIADCLRFGRINKEVYMGDYRYKALQNLTRARFFAVQNLVKEKQRFMNVLFKKYSTMTQEKVFSDTFSTTALAVYDAFESAEALANMDLHELTDFIMEKGKNRFPDPDAVAKAIQKAARSSYRLPKTMNDSVNQVLSISITSMKALESQIKEFDKAIKAQMELLPNVLISIPGIGPVYSAGIMAEIGEIDRFNSQAALAKYAGLAWKQHQSGGFEAEVTRLIPSGNRFLKYYLCEAAFSLVRCDKEYSDFYHLKYKEVNRCQHKRALALTARKFVRLVFRLLKDNRLYCPAK

SEQ ID NO: 340954 - protein, 349 aa, unidentified
MKILSLDLGKNKTVGCDYERESGQHRFRTAFSTRSGLGQLVKELKPDRVVIEVCSTAGWVCDLMREMGIEVQVANTNDDAWRWRKVKKKNDRRDALKAAQLSAVNQLREVHVPRIEVRQWRALIAFRQKLVQRRTKMKNHIRDLLLREGQILPTGQKCWTQMGMARLESLARPLSELGLHEMWRGELDIELRQLQAVQEEIAVIEERLDAIGAADPRVRLLRTIPGVGPRLSEAIVALLDRPERFRKASEVSAYIGMVPKELDSGETQRRGRITRQGSRLVRSLLVEVAWTGLRHNGWVRETYQRIHGGKKSRKKIAIVAVGRRLLVRCWAMLRDGTSWQWSPSAAGIK

SEQ ID NO: 340955 - protein, 365 aa, unidentified
MKIIHWIGIDDHADKWTIAHLRGNDEKPAKEFEVIPNEAGYRKLLAFAKALGGTVRLVYEAGPCGYDLYRRLNKAGFRCDVAAPSLTPHKPGQRVKTNRRDALKMARYLRAGELTLIVVPDPERESLRDLVRARTAAQKDLLSIRHQISKLLLRYGHRYRDGRAWTKRFWSWLGKIRLEGEHSHLVLEEMVGAHGERAERVARFTEAIEVAARKPEYASYISALSVLRGIDTVSAMTILTELGDLRRFATAPQLMAAIGLVPAEHSTGDKTVRLPITKAGNAHVRRIAVEAAWHYQRRPTSGRTVVRRRRGQSTTLLDIARRCDQRLNRKFQRMTSRGKRSTVAAVAVARELIGFIWAVGQLVHP

SEQ ID NO: 340956 - protein, 352 aa, unidentified
MTVTNLARSITGGVDTHLDVHVAAALDERGTLLGVESFPTTESGYKKLLGWLSDFGPVEVIGVEGTGSYGAGLTRHLQAERIRVVEVDRPNRQRRRLKGKSDPQDAITAARAALSGDAAGEAKTRDGNVESMRVLRVARASARKGRTQALNQMRNLVSTAPESIRAELRGLSVFRLLERASAYRPGAKRDIVSLTKFSLRMLARRAITLEEEIAEIDAILKPLVKETAPELVGTLGIGTDAASALLVAAGDNPERLRNEAAFAHLCGASPLDASSGKQQRHRLNRSGDRQANSALWHIVLTRMVYDPRTTEYIDRRRTEGLTKKEAVRCLKRYVAREVFNLLPHERLGLDNP

SEQ ID NO: 340957 - protein, 348 aa, unidentified
MKVTRIGLDLAKQVFQVHGVDEKGRKVVSRQLKRGQVEEYFRGLEPCLVGMEACGGAHHWARVLGGLGHEVRLMAPQHVKPYVKGNKNDANDAEGICEAVGRPNMRFVALKTVEQQRLQSLHRVRRTLVRNRTAAVNEIRGLLAEYGIVVSVGVAKLRGRLAELLEEADNGLPMSFRPVLAGLREDLEYLDRRIGEMDAAMVRAAQEDERARALMRLRGVGPVTASALVAGLGDGKQFRRGRQASAWVGIVPGQHSSGGKERLLGISKRGDEYLRTLLIHGARSVVNSCKGKTDGLSRWVQEVCARRNKNVAAVALANKTMRMAWALLSRAEQYDPDYELKRRAAQAA

SEQ ID NO: 340958 - protein, 369 aa, unidentified
MADQLPVVGIDISKATFDPQWGSQKGKRQQAHFSNDAHGFAQLQAWILEHGVTQVHCCLEATGTYSDALAAFCYAAGHVVSIIAPHKMHAFRTSEGIVSKTDKIDARLLASYGEQKRPGPWHPVSASAQQLKCDLDRLDELKCMQQQEKNRLENHRLDAQARKRIQAHITWLDEEITSWAPLLEERFAQAFSQEHPQEPAQHKPTSGKKGKRPRKKTMQIPPIDAMMQVVGIGRLSALRMYAIFATLQEHASSEQMASYFGVVPHQHESGTSVKGKTRRRGGNRQARNWLYMCALTSKRCDPDMKEWAQELQARGLCKKAVIVAVMHKLARILFGLFKTHAPYDATKAFPTHYPKEKEEIATKKLAVAA

SEQ ID NO: 340959 - protein, 435 aa, unidentified
MKITQIRDHTAGIDIGSEHIFIGLDDESVYQFGTFTCEFRAAIELLTAHGVQSIAMESTGVYGVILHEMLQEAGFDVWLVNPAHLRYVPGRKSDVADCQWLQQLHSYGLLANSFLPDPAIKALRAYLRLRERYISESATAVLHMQKALTLMNIRLHQVISQIHGASGMRVLRAILAGERAPEVLVALCDKRIQDNKHDQVVASLEGHYRPEYLYELADAIDCYEFFQGKLNECDRKIDGELSQLAEQQPVPKAYGKAKPIRYHKPAIDQLHQKVVRAAGGVNANELPGLTDYSALRLMGEIGVDLAPFPKEGHFTSWLKLAPGKKQSGKQIRKHKYKSAPRAAEIFKQAAQSLLESKNHALGAFGRRIRARRGPGIAVKAVARKLAILYYRAMTQGMDYVEQGVEAYEKQYQERRLHMLHKQASSLGYALVELNE

SEQ ID NO: 340960 - protein, 347 aa, unidentified
MVVIGIDPHKRTHTAVAVDEVGRKLGQVTVASTPEGWLRLWAWAGGFGPDRRWAVEDGRGVAGRLVRTLIGHGASVVWVPPKLMAQSRASARTRGKSDPIDALAIARAALREPDLPAAHLDEVAADLRLLTDRREQLVKWRTQTINQLRWHLHDLDPGLDPGAGRLNSARQLDRLTAGLEALPASVRRDLALELVGEIRRLREQIRRLDKQLGELVVPLAPTLLAIVGVNVVTAAKIIGEVAGISRFRSAAAFAMHAGAAPIPVWSSNRPQVRLNRGGNRQLNACLHRIVIAQLSHKPEARAWRERWTQRRPNATGKAALRALKRHLADVVYHALLTDHRRQLPATA

SEQ ID NO: 340961 - protein, 340 aa, unidentified
MPLYGAFDLHAKTNHLGILDGSGKRVLMKKLPNEGSVILEVLKPLKRRIVGIVVESTYNWYWLVDLLMESGYKVHLANPSAIQKYSGLKHADDVHDAFWLAEQLRLGVLPVGYIYPKEERPIRDLLRKRGHLVKLRTSLITSLQNVITRNLGFHVDVNEVKRLREDRISPLLGMNEDLALVGSTSKESIDFLTRQIKRIEKVVETRAQLKESYRYLLTLPGVGRILGLTIMLETGGISRFPGVGNYASYCRKVNSKWTSNGKAKGKGNKKNGNKYLAWAFSEAAELARRYDEQARAYYNRKARKSNFMVAHSALAHKLARAAYYVMRDQVPFIPEKLFAV

SEQ ID NO: 340962 - protein, 405 aa, unidentified
MEVVYERCCGVDVHKKSIVACMLTGKQKETRTFGTMTADISQMSEWLSENRCEAIAMESTGVYWKPVYNVLEVYGWDLIVANAHHIKNVPGRKTDVKDAEWIASLLKHGLLSPSFVPDRDQRETREIARYRKSLVEERSREINRLEKVLEGANIKLSSVVSELTGLSSRNILHKLVDETLTKDSISGLLHGQLRGKTDELLKACDGVLSKTQKVLVKAILSHIDDMTRRIDDMDDFLNGKLEEYNEALKRLQVIPGIGERSAQVIIAELGVDMSRFPSSKHLAKWVGLCPGNNESAGRSKSSKTGKGNKTLKTTLIQSAQTASKNKDSFFKAQYDRLVVRRGAKRAKVAVAHSMLIAIYHMLKSGAPFVDLGVNYYTQFNPDKKISYHLKKLNQLGWVSPVGTFA

SEQ ID NO: 340963 - protein, 339 aa, unidentified
MEVTTIGLDLAKNVFQVHGITEGEEVVFNRPLRRAQLLPFFSKIEPCLIGMEACSSAHYWARELTALGHEVRLIPPMYVKPYVKRGKSDAIDAAAICEAVTRPTMRFVAIKTVEQQALLSLHRARDLLVRQRTQLINGLRGMVAEFGVYIARGLARVIGFAEDILAGEVLDLPEIANEVIHNLCEHLMALHARIRWYEDRLKVVAKEDTRVRLLRTIPGVGAVTASAIIASIGDGHQFRNGREFAAWLGLTPANKSSGGKEKLGRITKMGDQYIRSLLVVGMTSLVRQTKSHPERASKWLTGLLDRKPARVATVAMANKTARIVWAVLTRNETYSPHSA

SEQ ID NO: 340964 - protein, 351 aa, unidentified
MNINHYIGFDVHKKTISYCVKAADGKILEEGKLRATREVLRGWAQKRSHAWHGAMEATLFSAWIYDTLKPFAAELQMGNPSMMKAIGAAKKKNDQLDARKIADLVRCNLLPACYVASPEMRDLRRLLRYRNLVVGQAVQMKNRMSGLLMEVGADYSKQRLHGAKYFSELLDQLEEVPESVKELLRLSRGALETFEATQRQLLQHLQKEALLAKRVKLLRSIDGVGEVTALTWALEICDARRFPSIGDAVSYCGLTSALNASADKQKRGPISKQRNAHLQTVLIEAAKLAPRWNRQLAAVHEREINHSGNCNRATLTVARKLVAYLLAVDKSGQPFVVRTPAEKPVEVAAMA

SEQ ID NO: 340965 - protein, 354 aa, unidentified
MPKTASAEIAVVGIDIGKNSFHVVGHDSRGAIIVRQKWSRGQIEARLANLPPCLIGMEACVGAHHLARKLTALGHDARLMPAKYVRPYAKGQKNDFNDAEAIAEAVQRPTMKFVATKTADQLDLQALHRVRERLVSQRTGIINQIRAFMLERGIAVRQGVRFLRAELPIILASRTDVLSPRMLRVIEDLAGDWRRLDERIETLSREIETIARQDAGCDRLMSVPGIGPIISSAVVAAIGSGDVFSKGRDFAAWLGLVPKQISTGDRTILGKISKRGNRYLRVLFVQAAWVVLVKPQSWERHGLKSWIEAAKKRLHHNVLAIALANKLARIAWAVLARGRGFEVTRTIDDSTQPA

SEQ ID NO: 340966 - protein, 330 aa, unidentified
MTTGTVYVGVDIACASAQVAWLLEDGTTGQQSIQQSPEGQLALIRQLQQLAPAEQTRVVMEATGNYWLALALALHEAGVEVSVLNPSQAKHFAKVCLKRAKSDPVDAALLAQFAQRMQPARWNPPPAICAQLQQVLTRRQQVVDMHTAELNHLHALRHLPGALPSILTEVQDHLALLSARINTLNQQLEQLVSGQHEWHTAFRHLCSIPGVGTLGAATLLTATHCFARCETPEQAAAFAGLVPYVRQSGSSLRAQAHIGGGEPHLRHVLYMCALAAVRCNPGLRLFYQRLLAQGKAKKVALCAVARKLVHIAWALVVHDCDFDPAHRLPS

SEQ ID NO: 340967 - protein, 345 aa, unidentified
MIVIGIDVSKDSNKVCAKERREDGGSRILRTKTFPNSGIGHEDLYEWMKGHKMAEALVVMEATGVYHEDLLWYLYDCGARCAVVQPGRINAFSRTLDHKAKTDRLDASLIAEYGLAMYGQLKPWEPASESIRDIRALSRALERANQAAGVLKNHRHALMHSHRSSETAKFILEKSEKVLQTLEEEIDELEKAIEEVVRGDEKVSKTTEALSAIHGMTSFTAARVLAETNCFENFSGSRKLVSYAGLDVKVYQSGTIDRRSGISKRGNAHLRGMLFMNAMTVMMREKPFKEFRERLLGRGVNRKVIVVAVMRKLLVLMFAIVKHGTVFDPDYDWHKAHGVPRKGEA

SEQ ID NO: 340968 - protein, 351 aa, unidentified
MEKRNTVFIGCDLGDRFSEVCVLDAAGAVVVRSRVRTTQQGLEKYLARFERACVVIEVGVHSRWVAELVEGSGHQVVIANPRQVRLIWQRRTKTDRSDALLLARLGRVDVELLAPVQHRNRGKQIDLTALRSRDVLIGARTKLVNHVRGTLKPFGLRAEDCGTEAFPDRAEGVIPPELLPALAPVLAAIRTINEQIAHHDRQIEQTASTIYGETTRRLTQVNGVGTITALAFQLTLDDPARFRKSRFVGGFLGLVPAKDQSGDLDPQRHITKTGDAFVRKLLVQCAQYLLGPFGPDSDLRRWGLRLAERGGKNAKKRAVVAVARKLAVLLHRLWLSGERYQPLGYSSQQAA

SEQ ID NO: 340969 - protein, 372 aa, unidentified
MEKFCGLDAHKDSVFMCILNENNEKYEEVFGTLTPDLERLRDVLVEHGVGYVAMESTSIYWYPIWRVLENDFDVKLVNPLFIKQVPGRKSDVKDAQWIATVLMKGLVKGSFVPPSLVQQLRLYNRKIINLNKELRRAEQGMDLILQRCNVRLSNYISDIGSKSMRKVVQSIADGNFKPEHLLGLVHVRIVRKHSSKTILDALTGQFTPGDIDMLKLTVQDITFREQQIEFCKQKLLETCHKYFGLQMELLVTIPGIKEHSAACIISEIGTDMKSFTSASALVGWAGLRPRNDQSAGKIKGRKTLHGNKYLRIMLVQCAWGASRTKGSTFMARYQRLRKRMHHNKALIANARKLLVVTWNILAKKEPYFAQAS

SEQ ID NO: 340970 - protein, 468 aa, unidentified
MRNAIGIDPDSKGFICVAVKLSETKVTTRGYMTTDSDLKSFLRWVKGEGDVIVAIEGSNGLSRPIEKALREAGIIFYSFKPADTDKFRKAVLGQNKDNRKDAESVARYAMALEAQGKLDRYRRVWFADQELQLLTRSYERKSQEMTAEVNRLWKLIRLASPDLYLALGGNNPEVELSENILKTQGILTLLSEKPDFGEWKTLSDEELQEAMGRGNCKGRRELIQELRKVMGSFASVSPGVALMIRNSAQQIERFKEERIDITKMLDVLTRDTIAVQSLKETRGIATITSTTMIAEIIDIRRFAREDSLACYSGLGMKEHSTGDTVRMVPSQLFNHRLKDAFMTAARNFVIFNPDSHLAGYYRNLVKAGMPRMEATKRVARALVRVIYRKLSALNEKNADATEAEEPKEGESDMASGATRSDQSHTSDISLSSPLTSRARRSKRVKGGATRTLRSKASRGRKAVSEKTA

SEQ ID NO: 340971 - protein, 403 aa, unidentified
MVFVGIDWAEAHHDICVVDEQGQVLAKRRVPEGLEGVGKLHALVAEHAEDPASVVVGIETDRGLLVGSLVAAGYQVYAINPLASSRYRDRHATSGAKSDPGDARVLADLVRTDRHKHRPLAGDSNLAEAVQVLARAHQGLVWTRQRQANQLRNALREFYPGALAAFDDLDAADTVAILERAPTPVRGRALSQAKIISALRQGGRERNLEAKAAQIQAHLRLPQLEAPAPLVEAYGHSVAATVAVIKQLNLQIAVLEQELAASFELHPDAEIYLSLPGLGLVLGARAMAEFGDDRTRFLNPKARKSYAGTAPITKASGTRKVVLARVARNRRLADACYQWAFSALTRSEGARHRYDALRARGQTHHQALRALANRLVGVLHGCLTNRQAYSEHLAWPTQVEVAA

SEQ ID NO: 340972 - protein, 325 aa, unidentified
MSVDRSKAIFNWVGIDVSKDRLDVYLQVTQTRLSVNNDLEGIQQLKQHLNLVENLAVICEASGGYESLMALTLNEEGLRVSVVNPRQVRDFAKSLGKRAKTDALDAQVLARFGQATLPAATVFASEADRQLTAWVRRRQQLVEMLSAEKNRRAALKGHLRDNVDSHIDWLEERIKQVDQDIAELMETRAEWRDRKVILQSPKGIGSVIAAGLLSNLPELGQLNRKQIAALAGLAPFNQDSGRYRGKRRIAGGRSQVRSWLYMAILVAMRHNPPIQAYYQQLVKRGKPTKVAMVACMRKLLTCLNAMVRTHTPWDDDKVTAVFQTA

SEQ ID NO: 340973 - protein, 434 aa, unidentified
MTASDSTARSRNLVAIDIAKAKHDVLVELPNGKRRKMIVRNQLSDFRQLVAYLKRLDGALEIALEPTADYHRNLAYFLKAQGFAVKLVSSIAVARTREALHNSWDKNDPKDAQVILHLLRNGNTQYFYDPVIEQTNDLQELSKTHFQVSLRKTRVQHSLLNHYLPLYFPEAERFLSNSRSSWFARLLFEFPTPQAITQLTENEFLERASRLLKRKQSKAAILRALYAKAQESVALPVSLESQAIATFRLTLAQHLELCRIRTELEETAHELLQDQLDYQILRSVPGVGPIIALTVLAEAGDLRRFGHERQFLKFCGLDLATSQSGAYRGRTQLSKRGNSRLRSALWMAARRATHMQENTFRQKFSRYLRSDTTNTDLKRKAYTACTAKMARTIYGLIKHQQFYRAYREDAIPEPGGRTRSHGPLRQAASGGLTS

SEQ ID NO: 340974 - protein, 350 aa, unidentified
MIIGVDYHPSFQTMAFLLEETGECGEQELNHSDGQAEKFYRDLKQRGISVRVGMEATGYSRWFERLLAELGFEVWIGDPAEIKAKRVKTLKNDREDARLLRRLMLENNFPRIWVPDPENRDLRQLLWHRHRLVQMRTRIMNQLQALAMNEGYRWRKKLFSEQGRAQLEKLSLAPWASRRRQELLELLDRMNPTIAELTAAVEREARKRPAVQRLMTHPGVGPLTALAFVLILGTWERFPRGKQIGNYVGMIPSENSSAGKQRLGHITKQGNSLLRFLLVEAAQAAARVHPDWRRRYVHLAMRRHRSIAKVAMGRRLAVRLYWMWRNGCEYSQSLEFGSYAGQLGTGHGAK

SEQ ID NO: 340975 - protein, 401 aa, unidentified
MNYVLVLDVAKGKSMFMLSSDIGEVLLEPTEYIHNKSYFEKIDSYINKLNIKDNLTVVMEATSIYHKSPERFFKENNYHVIVFNPLIGKEITNTIRKTKTDKQDCIKLTNLFWKGSIPDRNYTEDEIYTKLNELSRQYYHLDEGLNRHKNRYKELIHLCFPEFELCFKDGKTYDLTALNFIKEFPHAYIIKDKRVDALSYNMANTNNRHLNYYKRKANIIKEYALTSYPGVNKNSKDVDNLKQLANIIINLTEQKDEVKNQMIELAKETKNFECINSLFGIGELSASLIIAELKDITRFNNIKQINASCGLDPTIVQSGKSINYHGPISKRGNRYARKILFNCSRNIITLSAKCDKENSIYVYYQKKKQEGKHFYACLTACSTKLIRIIYALCMNNSQQQN

SEQ ID NO: 340976 - protein, 341 aa, unidentified
MQVTTIGLDIAKNVFQVHGIDATEKVVVRKQLRRGQLIKFFEALAPCLIGMEACATAHYWARELTKLGHQVRLMPAKDVKAYVKRNKNDSADAEAICEAVRRPTMRFVAVKSAEQQGRLMQHRVRDLLMRQRTQLINALRAHLAELGIAAAQGREGIKELLAIVAQDGGSRLPVDAHAGLIVLAAQLQAVQTMIGSIEKRVVGQHRSNEESKRLETIPGIGVIGATAIAAVVPDPKVFRSGRDFAAWIGLVPREDSTGGKQKLGPISKQGDGYLRRILVVGACSVLRRARQQPEKYPWLIQLLARRPFKVVAVALANKMARVAWALLAKGGTYRAPRLTAA

SEQ ID NO: 340977 - protein, 430 aa, unidentified
MNRMLNLSLNETTSKLPVFIDISKDHLDYTVGLSGEGSRHEVGQISYRLQAVSEWIESLVVLFNLDGPDQLEFVCEPTGGLQHKLILLSKKHGISLRYVDSERMYNARMITYGNAEKTDLKDPGAMRSLYLLGKSRQTESVGVLRETVRALSREYEDLSQQAIACRNRIHQLIGYVFADYCKPTGFTFSRSGQAVAKEFGFCPQRIVAVEYEEFRRRLQTHVKRIRHHTTEELWQQAQRSVEVTDAEFANPHSGYLDYLYKQWIGLEERKEHLKAQLESYGEMFTQKGWLPRHLPPSVSAWMVVRVVAESGTFMNFDHIRQLWAFLGLKLASRQSGTYKGKIKITKKGSPLARKLLYQICLPLVKSNGCMHEIYRKQNPKKKTNGQGIRAINVVMRKVVKILFALHRSGQEFDPQRLGCCQSQYLCAQTG

SEQ ID NO: 340978 - protein, 347 aa, unidentified
MTLYIGVDFHPHQQTVSYCNNEEGEVHQALLVHNPEQVRRFYRQLPKAVVGIEASCTAAWFEQLLSELGHELKVGNPSAIRARARSRHKSDKRDADLILDLLLKDEFPELWRRPLPSQSVLEQLRFRHHLVKHRTQVCNRLQALAHAAGLPKRGIQTKRARVALVAANFTETQSFERDQMFELLDDLTQRIKQVEKWLEEKAAGDEKVELLLTHKGVGLLTALAVVHTLGDVSRFPSSKEAVAYTGLDPLEQSSAGKVRFGSISKAGSSVLRHLLGQAMHVAVRYDGELRSFYKRLASRRSKSIAKVAATRKLLIRLFIMLRDEIDYSEFKRRGSAVGMPVLSHGLQ

SEQ ID NO: 340979 - protein, 350 aa, unidentified
MKKVAYLGMDVHAKHCVLGHMDSNGNFLGNMTFPTSEQNIIEALKAIKAKEKYLAMEEGNLAYWVAQVSKPYVAEVISSDPKENALIFRSSRKADKVDTRKLCRLLRLGELKQVYQPENDDRAIFKAAVQHYMDLRDQQTALKHKIKAAFRHWGVVSIESKAVYRDKRSDYLQMVKHSTIRDQLITLYSLMDAAESKKAEAFKTVKKLGQKYPEIKEFQNIPGVGEVLAHTFDAFIQTPHRFADKHKLWRYCRLGITDRNSDGKPLGYKKLDRSGIAELKAVSYRAWLAAMRGDNEVKRFYLISYRNTLSRVHARLNTQRKIIAAMYGMWKRGEAYSAQQFLNSSEMGVV

SEQ ID NO: 340980 - protein, 384 aa, unidentified
MEVLYQSCAGIDVHQANIVVCILHGPLTSTRPKREMATFDTTTKGLRACHDFLSQFHVEAVGMESTGVYWRPVWHALCDDFELILAQPAHMKAIPGQKTDKKDAHWIAKLTRIGLLPRSFVPDETIQELRELTRQRKHYVESRNRETNRIHKILQSGGIKLTTYIEDIMGLSGRNLLQLLVDGTPITPRIVHQSVYTSLKKKVPQLLEALDDYFSDHHRFMLKQSLEIYDFYQKQIELLEERMNVYLSQYEKHVEILDSIPGIDVITASVIISEVGVDMSQFPTFGHLASWAGLCPGNNESAGKKRSTKIRHGNSYLKKCLCQAAFAVKRQKGSPLAERYYQIQSRRGSQKATIALAHQLLKIAYILLKEQMTYPEFLAQKKDY

SEQ ID NO: 340981 - protein, 326 aa, unidentified
MEHELHYIGIDTAKEKLDVDVLRPDGRHRTKKFANTTKGHDELVSWLKGHKIDHAHICIEATGTYMEPVAECLYDAGYIVSVINPALGKAFAQSEGLRNKTDTVDARMLAEFCRQKRPAAWEAPHPLERALRALVVRHQALTDMHTQELNRTETAREVQRPSIDAHLLWLEAELKRLEKQIKDLTDDDPDMKHRRKLLESIPGIGEKTSAVLLAYIGLKDRFAHARQFAAFAGLTPRRYESGSSVRGESRMSKAGHVSLRRALYMPAMVATSKTEWGRAFRDRLAANGKKGKVILGAMIRKLAQVAYGVLKSGVPFDASRHNPVAA

SEQ ID NO: 340982 - protein, 346 aa, unidentified
MAETGVAVTGGVDTHLDTNMAAALDGVGGQLGTKEFPTNIAGYRALHLWLESFGTVVRVGIEGTGAYGAGLARYLGAHDVQVIEVDRPNRQNRRRRGKSDPVDALSAARAALSGEASSLAKTRNGAVEAIRVLRVARSSARRDRTEALNQMRSLVSTAPDELREQLRDLSGLALIDQAAALRPGAGMSVISATKTALRELARRADYLGEQMDRLTALLGPLVADTAPALVASHGVGTDTAGALLVAAGDNPERLSHEAAFAHLCGASPIEASSGKVTRHRLNRGGDRQANHALWRIVMVRMVSDPDTRAYVERRTKDGKSKREIMRCLKRYVARELYPLLAAEKTA

SEQ ID NO: 340983 - protein, 319 aa, unidentified
MSFIGIDVAKDTLVLATEGVAGERSYSNTERAHEQLIKDLRALESPPEIIVLEATGGYERGVVAALGAASLPVVVVNPRQVRDFARATGKLAKTDAIDAHVLAQFALKVRPEIRPLESEEQEGLKELLVRREQVSQMLLAEKSRLLQAVGRGRHELRKRLKKHIHFLELELSLIESDTDDMLKKSPLWREADDVLQSTPGIGEVSAQTLLAFLPELGTVGPRAIARLAGLAPINRDSGMMRGKRRTGGGRRRVKTVLFMATLCAIRYNSTIRAYYLRLLSAGKPKMVAVTACMRKLLVILNAMMKTKTRWQAQIELTTA

SEQ ID NO: 340984 - protein, 385 aa, unidentified
MTNLDHTDTPASVDYAIVYVAFELSKAKWMLGVVLPGAKKLSRYTITGGDVSALAARLAEWRRKAALGGKPVRILSCYEAGFDGHWLHRWLTDQGVINHEIDPSSIEVNRRARRAKTDRIDLERMMRALLDLLRGEPQACRVVHVPSVEDEDRKRRSRARERLLKERTAHTNRIKGLLHGQGIRDAFPLKPGFVKSLESVRTGDGRLLPPGLKQEIVYEHERLSLVNKQLALLEASSKAERRAAEPGSAEAKIVQLATLKGIGPVGGQRLVHEVFYRDFDNRRQVGSYIGLTGTPYNSGNSVREQGIGKAGNRRARETAIEIAWLWLSHQPDSELSCWFRKRVGDIKGRIRRIAIVAMARKLMVALWRYLNTGVVPTGAVLHPTS

SEQ ID NO: 340985 - protein, 396 aa, unidentified
MSSSQEASEWVVVGMDPHKRTVTIEVMTPTEQIVGGGRFTTDEAGFEAMLEYVRRWPHRTWAVEGCEGIGRHVAQRLIPAGEDVVDVPAKLSARMRVYATGQGRKTDDTDAHSIALVGVRMAGLRTVAHDEQLEILRLLVDRRRRIGADHTRMICQLHALLLELIPGGAKRDLSAAQARKLLAAVRPKDAVGRTRKRVALELVVDLERVYARKKAANKELVALVRDSGTALLALHGIGPSGAARLLVEVGEITRFPDKGHFASWTGTAPIDASSGDNVRQRLSRGGNRHINQVLHIMATVQLRTRTTEGRAYYDRKVAAGKTPNEAMRCLKRRLSDVVYRTMIGDVVTAERTGPGGHRGASLTSSAAGSQPHTGTSDQSLPGPAITEPRTTFATPS

SEQ ID NO: 340986 - protein, 368 aa, unidentified
MRTNTLKAAPAASAKELKNEKPAKAKRMLVGVDTHLRGYQAARKIDSGVIGVVENFRSEEELELYVAKQTTLAEEVVVVYEAGPLGYTLYRKLSARGVLCYVCAPDSSEQRKKRRKNNKIDARSLTSKLFNYLNGDQNALQLARVPTEAQEQLRMASRQHDQLVEERKRLGATGNAMLLSQGFGSWSNWWRPKAWAALSSKLPPWLLERLEVWVDVLKVLDEKIAQAKAAFVRSCKGPRPKGVGALSQMQLQSEVLDWSLYSNRRKIACLAGMVPSEWSTGDKEWRGSITKVGVPALRRIIVEMVWRIIFFQPQYKPVQKWLEVLRGPNPARKKKAVIAIGRQLMVDLWRLQTGRVTAQELNLIMVTD

SEQ ID NO: 340987 - protein, 322 aa, unidentified
MAMLSFCGIDVAKDRLDVMVLPEQQCLSVRNDVDGWAELVEQLRSFAVAAIGLEATGGYERGIMRALLAAGMSVRQINPFRLRQFARASGVVAKNDPIDARMIASFVAVMPTRLAQRNAPAVERLTEMLAVRRRLSNEKVAAENAARLLEDAMLQRLSRRRIARLSTDIDTLDERLVEIVAADAALAHRYRLLISMRGVGPVLACTLIALLPELGRLNRKQVAALVGVAPYNFDSGLLKGVRRIWGGRAPVRHVLYMAAMSASQHNPVLKAFHDRLKAAGKEPKVAIVAVMRKMITTLNAMVRDDVAWADRSTGRHIVPTAR

SEQ ID NO: 340988 - protein, 349 aa, unidentified
MNEPYAGRQIVGFDLHRRRSVLVRMTEAGERLETVRISNDPEYLREVMTRAGEAPEVVLEACYGWYWAADTLAELGATVHLAHPLGVKMFSYRRLKNDERDAADLADLLRMGRLPEAWIAPPATRELRGWVRHRAKLVGLRSNLKCQVHGILANAGITVPMSDLFGASGQRLLATADLATESRSRIDSLQRMITALDFEVELFAKLVAGRLRTHPGYQAIQLIPGVGPVLAAVFVAEIGDITRFRRPEQLASWAGLTPKHHESDTTVHRGRITKQGSRLVRWAAIEAVQRLPGYTRIGQVRDRVAARRGRNIGVVAAARELTELVFYGLRDHRVHALAVHPPARTPLPA

SEQ ID NO: 340989 - protein, 317 aa, unidentified
MEQRQTSTKIAGIDVGKSKLDGAVHGLEDTTQIDNAPAGFSELIGWLKAREVGRVGLEATGGYERAVRQALEAAGFEVVVHQPIEVRRFAQMKRWRAKTDRLDAQLIAAATAQVDAVRAAQDPRLQALAERLTTYEQITDQAAQLKTFLEHVTLADLTKAVRAQIRAMTALKAKLAAEILKQIKAHDDLLARYRLLVSLPGFGPIVAATHVIRMPELGRMRRGQPASLIGVAPFARDSGQHKGQRFIGGGRDRPRRMLYIAALAAKRWDPTLRAFAEQLSARGKPPKLVIVAVMRKLVEAANLILSRGQPWLRQPPA

SEQ ID NO: 340990 - protein, 383 aa, unidentified
MKAVCGLDVHKDSIFLCILHSDGELFEQVFGVLTFQLEEMRKLLQKHHVFEVCMESTSIYWIPIWRVLSPHFTLRLVNPYFIKQLPGHKSDIKDAQWIAECTLKELVRGSFVPPEIIQQLRQYDRRIFDLNAEIVRKVSKVDGVLQRCNIRLSNYVSNIECKSYRDVVRRLSEGVTNPNELMKLVHGRIVNRHGAETILASLTGVVSQAEIDVLRQLHEEIDIAESHRNECQQRMLEICEKHFPEELERLQKIPGIKERAATSLIAEIGTDMSKFETANHLASWSGLRPRNDESNKKIKSRKITHGNVYLRNTIIQCAWAASRQKDCFFSRFSYHQTIVRRKNKMKVIVAVARKLLVAVWHVLHDKTDYVDFKPDREESANNG

SEQ ID NO: 340991 - protein, 317 aa, unidentified
MSATLFIGIDIAKESFQVASRPAQLHGNYLNTCQGHQDFLHALADLSVTQIILEATGGYEKPLAAELVQAGYAVVVANPRQVRDFARGLGRLAKTDPIDADTLAYFGAIVQPRPKPPQKPETEALAELVTRRRQLTGLLTQETNRAQMIHHVKVRKSIRKMIKTIEFQIRELNELIQDHIQANDDFQQKDHIMRSTPAIGPQTSAMLLSHLPELGRLNRHQIAALVGVAPFDRQSGKQTRGAHIAGGRGEIRSVLYMAALTARRCNPAIRQFSQRLEEQGKTFKVVITACMRKLLIILNALIRDQKLWTTEKFLKTA

SEQ ID NO: 340992 - protein, 359 aa, unidentified
MQTQRNKMDFKGQKIYVGFDVHLKNWLVTILTEEMTHKTFSQPGSPEALYNYLVKTFPGAEYYSAYEAGFCGYWIHDTLTQLGVHSIVVNPADIPTTGKEKVNKNDTRDSVKIARSLRNGDLKPIYVPSTTTLEDRGLVRTRAALVNDQTRCKNRIKSFLYFRGIKLPEAFSNPNTHWSNRFNQWLDNIVLRDFSSKATLNAYLDQHRHLRGAVLQITKIIRGLSKTEPYKERQELLRSIPGISYLTAMTLLTELESIDRFASFDDLCSYVGLVPSTNSSGENEVIGELTPRGHPVLRSAVIESAWVAARLDPALNKSFHEYCKRMDSNKAIIRIARKLLSRIRFVLKNKKPYIFSVVK

SEQ ID NO: 340993 - protein, 342 aa, unidentified
MKFYCGIDLHATNSFLCVIDDKENIFLKEKLKNNLGAILHALESFSPRPSIVVEATINWYWLIDGLQEAGFDVKLAHSMALYMITGAKVKTDRRDAFSLAKLLRLDAIPEAYIYPKAKRPIRDLLRKRKQVVRLRANAYGALRRVLLQHGIYGYSQATIKSLTEAQLDQHLEHFATQAGCHLEVQRIRFYSDQIKTLENIILSSVSDDHRFELLQTIPGVGKILALTILYESGDINRFQSAKHFCSYARVVPGIAQSSGVSKRGRGSKQGNPHLKWAFCQAAAISVRYNTGIRKFRQRHLARRRSKAKKLVTLCIVSHKLAIASYNILKNRVPFKQELMFGS

SEQ ID NO: 340994 - protein, 359 aa, unidentified
MRVSTKTERIAMLKRMGVDSSKHYLHVHGVDAHERVVLVKTLRREEFLVWAANVPKCVIGFEACSSSHYWARELSKLGHEVKVMAAEYVLPYRKSRKGKNDANDAEAICEAAGRPNMRFVTVKCEEQQSLLALHRLRSGLVDDRTALIGQIRGLLAEFGIWIGQTPDKLENWFSKQAEELAQLPLLARTGIELARTHWKTLDQRIEELDKQIKQVAKKNEATERLQKIVGVGMITASAITATIIDGRQFKNGREFAASIGLVPSQHSTGGKVKLGRITKRGDSYLRYLLVQGARSAFIAARRRKPEKLTRLERWMLALNARVGYYKTLVAIANKHARIIWAVLAKGEAFDPEYGESQPA

SEQ ID NO: 340995 - protein, 320 aa, unidentified
MTKKKSKSFIGIDVSKQHLEVAVHESDCQFRCANKVNAFGKLIVELIDWRPALVVLEATGGLEIPVVNALHAAGLPVVVVNPRQVRDFAKALGQLAKTDRLDARVLAHFAAAIKPPLRPLKSKEEQELAALTGRRDQLIEMLIDEKNRRAAAASDTVRDQIKAHIDWLEECIAELDEQLKALLQSSAPWQAKDDILQSVPGIGPVVSFSIIADLPELGTLNRQQISKLVGVAPLNRDSGQQRGTRHIYGGRAELRRVLYMAALSASRHNLVIKEFYERLCAKQKPFKVAITACMRKLLSIINVMVRDNSCWKSPQQTVSA

SEQ ID NO: 340996 - protein, 343 aa, unidentified
MKPCDWKELLQLIERIRKRVSEELKKPVEVISCYEAGYDGFWLHRLLEAQGVRNHVIDPASLQVDRRARRAKTDGIDVGKLLRSLMAYLRGEPRVWSVVRVPTIIEEDDRRLHRERSRLINERIQHVNRIKGLLAIHGIYDYEPMHPERIQRLERLRTADRHSLPLRLKAEILRELQRLELVLGMIQTIETERDAIVSVKSKSQQTTSTKKIKHLVKLKSIGPEFATVLVGEVFYRTFNNRKQIGSYVGLTPSPFQSGSTSRDQGISRAGNAKARTTMIELAWLWLRNQPDSPLSVWFRERVGNRKGRIKRIAIVAMARKLLIALWRYLETGVVPEGAVLKSK

SEQ ID NO: 340997 - protein, 466 aa, unidentified
MAARKKQKKRMSAQVVQDEDYQLRYERVAGIDVAKASGMVCLRLPPAEGKARRTSKTWEVTASVPDIAAVAAELAAAGVQKISMESTSDYWRVWFAVLEEAGLSVQLVNSSQAVNMPGRPKTDKTDAQWIARLTEMGLLAPSFVPPPEIRALRVYTRDLVHLTQDRTRYWQRLEKLLEDALCKLSSVVSKMAGSQSVRAMLKAMIAGQRDPRVLADLAMGPMRARRAELVKAFTGMRFGPQHAFAAAGHLRAIEFLDAEIRALETQVRAHIAAIPAAWGIDADGTTGPGAGFGADAVVLSVVARLAEIPGVSEILAIGLIAEIGLDMTRFPTPAHLVSWVGMAPVADQSGPRRGRGKKGHGNSYARRIAARAGAGAANTDTFLGERHRRLRQRPGGGGWKKADCAVGRSILVIVWHLLNDPAARYRDLGPDHYARHADTGRKVRGHIRQLQALGLDVTVTPRQEAA

SEQ ID NO: 340998 - protein, 427 aa, unidentified
MNGNEAIRYEKFCQFKAEIRSSGDYLIVGIDVAKDRHHAFFGTAAGRTLLRRLIFDNNQAGFKQLIARASQLQIEYGLGRVVYGLEPTGNYHKPLSNWLQEQDQMLVLVSSKSISDNRQTLDGRWDKNDTKDSANVADLIAQGKCQFFEKPDTRLVQLRNLLSLRRRLKKVEHSVRMQIRNGLVCKYFPELDRHWGSGLTENLAIVRWCLDPHKITAMGYEEFVKRVTRRDRGIRQHKRLKRIYEAAAVSIGCPMDEAANFEAHLLVERLEKIKERLGQTESEIKDLCDSFPAYRRLLSIPGFGPYVSSIVLARIGDPHRFIGRRQVIRLGGLDLNANRSGKRSNAAVPVISKRGNSELRYALYQAAQIATYHSDRFRALFTRSLEGRENERGIKTKMRVKIAAKMLVIAWTLMKNDTDFDPLLIKA

SEQ ID NO: 340999 - protein, 462 aa, unidentified
MDTLHRICAGLDVHKDTVVACVRWLDDRDRVHTEVRTFGTTTPDLLQLLDWLRAWPVPIVAMESTGVYWKPLFNLLEGALEVLLVNPEHIKKVPGRKTDVKDCAWIAQLLQHGLLKASFVPERPIRELRDLTRQRTQLTGEKSGVANRIQKVLEDANIKLGSVASDVLGASGRDMLRALIAGQADGAALANLARGRLRDKLPRLRQALTGRVTDHHRFLLRLHLEHLTNLEALIDQLDQRVHQEMEKDRPPEPPPAANRVLEATSPPLSAPAVAPPAVSEQPEGSHPAPSSSSGTRLPLWSALWLLTTIPGISRRTAEVVLAEIGSDMGRFATGEQLASWGGLCPGNNESAGRRRSGRTVHGSRWLRSALVQAAWAASRAQKTYLAAQYRRLARRRGKKKALVAVAHTMLVICYQVLKKGQPYQELGPDYLEQLEPQRRTRQLVRQLESLGHKVTLEPKAVA

SEQ ID NO: 341000 - protein, 354 aa, unidentified
MYIVGLDIAKRKSQVCVTKEDGTIIEERSLVQRPEELSAFFARYPGSRILLEASTSAEWVARHLESLGHEVVIADPRFRLMYAAGDKKIKTDRRDARALAVALRVNAYRPAHRKSDEARALALKVKLRAGLVRARTRLIQQVRATCEYEGVIIPQCNTRYFVDVARETRMRDDLATVLAPTLWQIESIHEAIEALDAEIEELGKSDATVARLKSVRGIGALTATAFRAELDVVERFRSAKEMTSYLGLVPSQNSSGDVKGRLGRITKTGDGLLRSYLVEAAHVIMSCRSPDSPLKRWALSVAARRGKKKAAVALARKLARILFAMWRDGSDFDTAKTNAPVAALDERQAEAPTS

SEQ ID NO: 341001 - protein, 352 aa, unidentified
MQHFIGCDVHTRNQVVAWIEAETGEIKKRRLEHEGKEVKEFYAQFPRGTVVGIEATFPAYWFERLMGELGHELWVGDAARIRASEVRYQKTDSRDAEHILDLLRTDRFPRIWVPSLGERDLRQLLVHRMKQVRARTQVKNQLHALAISQGVCRKSKLWSVKGRKELEGLALLPWAARRRKELLETLDRLDEQVRELDRAVEEAGREREEVALSRTHPGVGMVVGLAFVLTVGPIERFRNSRKLVSYWGLNPRENSSGGRQRLGSISKQGNTMMRWLLVEAAQTAARLDPQLRRIYLRLKKQKTSGVAKVAVARRLAVRLFWMLRTRHNYTQLVHMSGSPSSAVVPPQAGSNT

SEQ ID NO: 341002 - protein, 362 aa, unidentified
MTVNVGVDLHKTQFTVCMPKNGKQIFEAYPTNGTGYAAFLKNVKRWQSSGKDVRIGVESTGNTRYFKNVMENAGVGVTVINTLKFKVVNESVKKTDKHDAATIAEFLEKDMLPESRLCSETSEQLRRLLKVRTTLVRTIVVVKNQIHALLTAIGMEDAKGSLQSKKGRQKVLDALNERENGLVVQPLFETIERLEENVNRIEKELEVLGKNDPVVDLLLTIPGCGKIGAWTIRAYTDDIKRFSSAKKYAAYAGLVPWVQNSNEVVRHGKITKRGPVELRTALVQVVLGMRRSKKKTLHWRLMARYEAMKSAKGSGKSIIATARKVATIIWVMLHQNTEFDQTRMTDKKLIRKAASMRAASLN

SEQ ID NO: 341003 - protein, 346 aa, unidentified
MQITTVGLDLAKNVFQVHAINTANEVVVKKTLRRVQMRRFFEQLDPCLVGIEACGTSHYWAREITKLGHEVRLMPPAYVKPYVKRGKTDAGDAEAICEAVRRPTMRFVAIKAPEQQAALALHRTRDLFVKQRTQLVNMIRGLLAEFGIEIRRGIEQALMLAKRIAALEVPDIPPLAAKVIAGLAGQVLDLQARLGEIERELLAWHRSNAISKRLATIPGIGTVCATALAASVTDPHQFRSARQFAAWLGLTPLQHSSGGKERLGRISKMGDKYLRRLLVVGMTSLIRRAKYKPEAVDPWLADLLSRKPARLVTVALANKAARVVWAIMVRGGVYRMPAGARATTVA

SEQ ID NO: 341004 - protein, 353 aa, unidentified
MDSKKYIGMDVHKESISIAVRNDAGKIVMECVIETKANVILDFIHGLRGELQVTFEEGTWATWLYDLLKPHVTKLVVCDPRKNSRQGNKNDRIDARELSDRLYMNELSSVYHGGAGVRTPRELARSYLAISKDLARVMSRVKAIYRSWGIPCAGKQVYAPRHRAEWLAKITEVGVLRRAEFYYQQLDALRPLRQEVRRELLAESKKHPATKLLCQIPAIGPIRAALLIALIQTPHRFRSKRPLWKFSGFGIEMHSSADYRKVQGQLQRSRKQVSVRGLNRDCNHDLKNLFKSAATIASVKPGPFQEFYAALVAKGMRPEMARLTLARKIATIVLIVWKRGVSFDVQYLKPQTA

SEQ ID NO: 341005 - protein, 345 aa, unidentified
MELTTIGLDLAKNIFQVHGVGAAGAVMVRKALRRSQMLPFFSKLSPCLVGMEACATAHYWARELTRLGHQVRLMPPAYVKPYVKRGKSDAKDAEAICEAVTRPTMRFVAIKSPEQQAALSMHLTRDLLVKQRTQLVNAIRGQLAEFGVTIPKGLERALLVARGLAEGEAPEIPAEAIKAVLMLSQQALETHAKVSALERDMLHWHRGSELSQRLATIPGIGPIGASAFAASVPDPQQFRSGRQFAAWLGLTPLQKSSGGTERLGRITKMGDKYLRKLLIVGMTSLVKRAKYKPEAVDPRLVNLLARKPMRLATVAMANKTARVIWATMVRGETYRAGHIPALAAQ

SEQ ID NO: 341006 - protein, 328 aa, unidentified
MTHFSDSCASELYVGIDVAKQNLDLARSDAKAVERFDNDKTGIAKIIDRMIQAKPVMIVIESTGGLERPLLEALLDAQLPAALVHPGRVRSLARGLGILAKTDRIDARVLVLFGQKAGPRLSQRASKNRTELSDLIACRRQLSVTLVQQTNRRLSTFSSAACKSIDAIVAALEKQIEKLDRQIRDLIDADHDFRDLDRLLRTVPGVGPTLAATLLADVPELGKTQRQQVSAVVGVAPFPDDSGSIHGQRRISGGRSDVRGVLYMATLAAMRFNPVIKAFAQRLKALGKRNKVVIVAAMRKLLCLLNAMVRHRLAWHQLNIVQKFASAS

SEQ ID NO: 341007 - protein, 408 aa, unidentified
MNPLYVGIDVSSKNNVIYLMLPNGDKHSSFSLANSHDGSTQLVKRIFAAMTSNNIDSVLIGLEATSVYGDNLVYFLKEDATLASFDRKIHVLNPKQVNKFKESYNDLPKNDYIDAFVIADCLRFGRINKEVYMDDYRYKALQNLTRARYFAVTNLTKEKQRFINVLFKKYSTMTQEKIFSDTFSTTALAVYEKFESAETLAKMDLQELTAFIMEKGKNRFPDPDAVAKALQKAARSSYRLPKTVNDSVNQVLAISITSIRALESQIKAFDKAITKQMELLPNVLISIPGIGPVLSAGIMAEIGDINRFQNQAALAKYAGLAWQQHQSGDFEAQTTRMIHSGNRFLKYYLCEAAFSLVRCDKEYNRFYHIKYKEVNRFQHKRALALTARKFARLVFALLKDNRLYRPAE

SEQ ID NO: 341008 - protein, 411 aa, unidentified
MEVIHARCAGLDISKKDAKVCVRVAGAGRRKTVETVTTWGSMTSQILALREHLIAERITCAVMEATGDYWKPFYYLLEGAGFEVLLVNARHVKNLPGRKTDVADATWLAQLGAHGLVRGSLVPPEPIRQLRDLTRARTAITRERSREVQRLEKLLEDAGIKLSAVASDILGVSGRAMLESLIAGNRDPAALADLAKRRLRSKIPALTEALTGRFTDHHAFLARVHLNLIDQHTAAVADITARIEATIKPFHWFRDLICTIPGISTLTADVTIAETGADMTRFPTAGHLASWAGTTPGNNESAGKVKSSRTRPGNPYLQGALGAAAMACAQNPVTYLGARYRRIAARRGPQKANVAIQHSMLIATWHMATNGCLYHDPGADYFNQLHPERAAKRAISQLEAMGYHVTLTRAS

SEQ ID NO: 341009 - protein, 361 aa, unidentified
MRIIGCDLHARQQTLAMLDTETGEIVNLTLEHEDNCVREFYSKLPRPVLVGIEATGSMPWFLNLMEELGIECRVGHPATIRAAEPRKQKHDRRDAMLILKLLAENRFPAIWLPTKELLDLRALLLHRHQWVRMRTRIQNALQAIALANGLRRGPGLWSYDGQTKIAFLPLMPHTAYRRTALQAMYKTMESEVENLTEQVAEQAAHRSGARLLMTHPGVGPVTSLATEVFLGDPKRFVDGKALASYVGLIPGERSSGRRQRLGKVTKQGSPLLRFLWGEAGAHAVRRDPELKRFYRRKLVQKGLGKARVAVARKLGIRLWIMLRDEIDYQEFCRRGQKQQSGAACAGMPGTRNGANRHRPVD

SEQ ID NO: 341010 - protein, 349 aa, unidentified
MPIVGGLDIHRKQITFDYLDTGTGELRRGQVAPADREHLAAWLAGRFTGQDAHFAVEGCTGWRYVAEELAAAGAVAHVAEPADTAALRGRKRHAKTDKTDSRHLRVLLADGRLPECWVPPSHILECRALLELYHDLRTEHTAWVQRIHAVLFHQGARQLGEQRLRTGEGLAALRAAVAQLSPAGQLQVTVALDMLQVLEGHLDGLRRRLIEAARRLAGARELHARLYGVGPVTALALTCWLGGAGRFSSARKAVRFAGLDVTVWSSDRKGPPGRLSRQGPEVVRWCVYEAGKTHARRCAPDHAYYQQVKDRIDGKRAAISEARKIIRQAVHILAALGDDALIMDPSPSR

SEQ ID NO: 341011 - protein, 352 aa, unidentified
MVVVVGIDVHKDTHCAVAVDEAGRQLDRPLTVRATDAGHRQLLRWARRAFADDGVQFAVEDCRHVSGRLERALLDAAAAVVRVPPKLMALTRTSARTRGKSDPIDALAIARAALREPDLPRAEHTHASRELKQLVDHREDLVGIRTGMQSRLRWHLHELDPELDPPARALDRTTHLDRLQARLEVLPVSTTRRIALEELADIRTLTRRINALEQELAALVRAQAPQLLTLPGCGPLTAAKLLGETANPARFRSEACFAMHAGVAPIPASSGRTDRHRLARGGNRQLNAALHRIAVTQIRLDGLGQAYYQRRRAQGNTTMEALRALKRRLARVVFHLLQPTDTSAGTCLPAAA

SEQ ID NO: 341012 - protein, 331 aa, unidentified
MFPVGIDVSKNTLDLCMLYDGIKGRIKTRNIQNNRHSVENILRWLRLQHCSAKDVHVVMEATGVYHEQLATELHDAGFRVSLANPHRSREFARGMGIMTKTDKVDAYMLACYAFLKKPHRWEPPAPEIRYLGALLRRRDVLLGDALREENRLEKYLSTDTPADIISSCRRMAQLLREEISNIERQIKAHIKASPALRRDYTLLTSIKSVGPQLGMHMLIVLRSHNFVSAEQAAAFLGVVPIEKRSGTSVRRRPRMSKIGPPQLRAKLYMSALCGKIYNKRMRNIYDEMCLRGKPKMVAIGALMRKLVHWCYGVLKTGTVFNDEDLKPVLST

SEQ ID NO: 341013 - protein, 370 aa, unidentified
MNRLFVSMDMHKEKILGMGLPQEGNVPVLREAFAGDDFPRLVKRLVRLSKTYQIEVCYEAGPSGYGPARALQKAGIPCRVVAPSLIPRRPGDRVKTDARDALELALALRAGTLKFVRIPTKEEEEVRGLVRCREDIAKEVRRIKQVTAHWLLVHGHRVSKGIKSWTPAHRRWMRDLDLSSLDRTVLDHYLDVAHMLGERLKLIEDQVLALADTEAFRNRVGRLQAFKGFSKLSAMRVIAEVMEFARFPRATSFMKFTGLIPSEYSSSDRIRRGKITKAGNSHLRHVLVEAVQRAKSAARPGRSLSKRLAAVCGPFRQVALSALTRLHHTFWRLTRRGVSAGKVKVALARELAGFVWAMMTIPETPDATAA

SEQ ID NO: 341014 - protein, 342 aa, unidentified
MNIKLLAIDIAKNVFQLHGNDATGKCVFKKRVSRKKLVETMVNIKPCTIVLESCGGSSYWHRKFTAMGHTVKLIAPQYVKPFVKTNKNDANDAEAIAEAASRPSMRYVEPKTIEQQDIQAMHKIRSRLVKNKTQLANQIRGLLLEYGIAIKQSHYALREVLPTIIEDAENELTAITRELLNDLYEEFINLTEKVKNYDAKIKNLAKSQESCQRLMDIEGIGELTATAIISTMGNPSDFKNGRHFASYLGLVPRQHSSGQKTQLLGISKRGNTYLRTLLIHGARASIGKIEGKSDKKSQWIKEKLKRSGYCKTLIALANKNARTAWSLLANATKYDINFKQAA

SEQ ID NO: 341015 - protein, 343 aa, unidentified
MQAITTIGLDIAKSVFQVHGIDAEGKVIIRRQLKRRYLLAFFQKLPPCLVGIEACASSHHWSRQLKALGHNVRLMPPAYVKPYVKRQKNDATDAEAICEAVTRANMRFVETKTPEQQSCLMLHRTRQLFIRHQTSVINAIRAHLAEFGIVAPVGRKGVEQLLAIVTDTSDQRVPELARACLAALGVQLGKLKAQILEFDRMIMAWHRSNETSRRLDAIPGIGPALATALVASVADPRAFRSGRNFSAWIGLVPKQYSSGGKERLGSISKQGDRYLRSLFTAGALAVIRYAKIHGTQHRPWLTALLARRPTKVAAIALANKIARMAWAMMAKGECYKEPAALAA

SEQ ID NO: 341016 - protein, 349 aa, unidentified
MTTMTSTATAVIGGVDTHADVHVAAACDQIGTVLGTASFPTTATGYRQLLAWLRTFGDVNLVGIEGTGSYGVGLTRFLLEAGVELREVLRPNRQVRRRHGKTDIIDAIAAARAVINGDAKARPKSHDGAVEALRALKIVHRSANKSRTQALNQIRDLITTAPDELRAELRGLRRRERLAVCAAFRPGDRDDLLAITKLTLRALARRIAELDEEIALLDARRRRITKAVAPDLVAAHGIGPDTATGLLLSAGDNPDRLGSERSWAALLASNPIPASSGKTKRHRYNPGGDRQGNSALWRIVIVRMANDPRTKAYVERRTKEGLSKPEIIRCLKRYVARETYALLPKQLLV

SEQ ID NO: 341017 - protein, 346 aa, unidentified
MDIMHVGLDLSRRRLDVCVLDGSGTQREELRAFPDRDGLGRLAAKLNQSAVAVRAVIESMTGARFVHDQLELAGWDVQVADAQRVKGLAPLTCKTDRIDAWVLAELSRRDLVPAIWMPPPGVRAERERARWRLHLVKHRTALKNRVHATLLTHGVPCPVSDLFGTKGRELLDRLPLPEPWSTNVASALALIDHLDVQIDACVQALRADGADHPYVPLLITAPGIAWVLAYTIASEIGDINRFATPSKLCGYSGLCPRVEQSGERDRRGPLTKHGPPYLRWALMEATVHAARHPAYAAHHDRIKARLGRQRGPKVARIEVARRLSEAIWHMLTREQPFAPHTAPAAA

SEQ ID NO: 341018 - protein, 344 aa, unidentified
MSITMIGLDTAKSVFQIHGVDETGKTEIRRKLSRNDLISFFKKHELCTVVLEACGAAHHWARILTGLGHDVKLIAPEAVKPFVKKGKKNDAADAAALCTAASRPDMKFVPAKSLEQQGILALHSARSLLVKQQTMLANAMRGLATEFGLTVPKGIGRLEELTVLVDTDETFPVKARQAFAGLFDQCQALTESIVTLEAEIVAHARHDETARRLATIPGIGPITASLIAATVGDIGMFKTARHFAAWLGLVPRQHSTGGKTRLGRITKTGNREIRKLLVLGATSMVYRAPQWNSAAGLWIRGILERRPVRLATVALANKMARIAWALMTRNEVYQAKGRVAAAAA

SEQ ID NO: 341019 - protein, 462 aa, unidentified
MEATPAFAGIDWSWQHHAMCIVDAGGRRIAEATLTHSRTGLSKITALLSRHGVARVGIERSDGPVVEHLLREGFEVVVIPARQVRSLRARYGSAGNKDDRFDAFVLADALRTDAGRWAPVRPDTDDTIALRMLIRARRDLIDHRIAVHNQLLALLQHHFPGAVGLFSQLDLPISLAFLRRFPSEAKAAWFSPSRMAHWLKANSYSGRHSAADLNAHLREAVTGHTSGPAAEAGEVIVLTLVDLLSHLRTRQADLETRIKEALLAHPDGPIFQSLPRAGAIRAATLLAEIGDCRARFPDAQALAAAAGVAPSTRQSGKHRTVAYRRGCNTQLRAALVDWAQDTPRANPWAHDTYQRARQRGCRHPHAARIPAQAWTRILWRCRHDHQPYNPDLHGRLHTLHQQAARHRALSSAASRRRTKRSCPGSTASTATARPSGSGTCRPRRTSRARNRRCCTSSCPGRG

SEQ ID NO: 341020 - protein, 349 aa, unidentified
MDRTTYGLDIAKNVMQLHWVDGETGEIGRRKLGRAKLSEFFAQMQPARVAMEACGSAHHWARVLGALGHQVELLPARQVRAFVRSNKDDAADARAIWLAAQQSDIRRAPIKSVEQQAVMSLHRARSHWVSVRTATINMLRSLLYEFGVVLPGGKKAGLKTMSARRAEIDDQLPQLMRELVDLQLEALKGVERSIDQLEAGIAEQHRQIGTARTLREVPGIGVLGATALAATLGDASGWRSGREFAASLGLVPAHSGTGGKTRMGHLSKRGDPYLRTLLIHGARAVIAQAKVMPTWLEQLLRRRPLNVAVVALANKMARTAWALLAHGRAYRSEWKSTPPSGCGAQAQAA

SEQ ID NO: 341021 - protein, 393 aa, unidentified
MFYLGIDVGKFTHSLCLIDESNQHHIWQINNDKSGFKSLQEKLSSLDLLTESRLLVGMEATGHYFLNIYDCLLHMKLSADRIALLNPLQVKSFRNTNLRGAKSDNVDAERIAILLQFGNFDRCNVSTDHIMNIRELTRLKSDLTANLGSLKRKMIAVIDRIFPEFAKIFANKFGTTVVALLTEYQTPEEFATLSLVELTALVKSLSKRGINQDKVEKLHEAARNSIGISFGVEGFKIELTILLTQLKALEGQIDFLETKISEMISGFESPIFTIPGIGKTTGAAILAEIGDISHFDSAIKLIAFAGLDPKLKSSGTYQGRTPISKRGSKYLRNALWYSAMVLCRMNEKFHKQYRERRNLGKSHRYAVTAAANKLTKIVYHILKNNCVYDQNLA

SEQ ID NO: 341022 - protein, 348 aa, unidentified
MAVTIVDTSRPVTGGVDTHLEVHVAAALDGIGGLLGVEEFKTTAAGNKALLGWLKTFGMPVRVGVEGTGSYGAGLARYLRRAGVEVVEVDRPNRQERRRKGKTDTVDAIEAARAAQADRQLGHAKTRDGQVEAIRALVVAKRSARSSRIQTMNQIRHLGFTAPEEIRQSLHGLSRKMLPEKAAVMRARAGQDPVVFATKTALRTLGQRALALEAEMDRIDVLLGQLIREHWDDLLSVYGVGIDTAAALLVAAGDNPQRLHSEAAWAHLCGVAPIEASSGKVTRLRLNRGGDRQANSALWHIVTTRMSSDPRTRAYVERRTKEGKSKKEIIRVLKRYVAREIYYYLPRL

SEQ ID NO: 341023 - protein, 330 aa, unidentified
MKFNEFIGIDVSKDTLDIYNLSSGSYNRYSNTVGGFNRLQRWMKRTFGTFEEVLICIEYTGMYSNGIMVYLDEEGINFTMVSGLEVKRSMGIQRGKNDKIDARRLAEYIYLRRDQVKLYKLPSKKLMNLKALLSFRTRLVRQRAGYIASKKEYSRFMPIKDAQCLIKCQEELIDELSLKIKGIDKELKQIIKSDEVIGQQYKLATSVRGVGILIALTMIAYTNCFTSFKNWRKFASYAGTAPFENSSGTSIKGKTKVSHLANKRVKSLLHLAAMSAIRHNAELKSYYERRIAAGKNKMSTLNIIRNKLISRIFATVTRQTPYVDVFKFAA

SEQ ID NO: 341024 - protein, 336 aa, unidentified
MAEVTFPQLIQRACGIDVHLKVVVATIDGAGIQRETRSFKTFTSSLNELKEWLLSNGVTHVGMESTGVYWKPVYKVLEDSIPNVWIVNARHIKNVPGHKTDKMDSEWICKLLLAGILKPSYIPPKEQRQLRDLTRYRNKLIQQIASEKNRMMRILEDCNIKLSSVVSNTSGTTATSLIDMLCEGKVLTLDDINSVYHGKLSASPEELLEACTGFVEEHHIYLLQMIRKDIDQTQTLVDDLSERIKRLLSKYENVLELLREIPGFSTKVVEDLVSEIGLDMSHFPSEKHLSSWAGLSPGNNESAGKKKRTNHSRKQTGKGGNHRSRMGCDPYKEYVF

SEQ ID NO: 341025 - protein, 413 aa, unidentified
MLLVHVFCGIDWAEDHYDVAIVDQAGVVLTERRIDDDAIGYQLLLSLLAEHGDDQIEPIPVAIETPRGLVVACLRRTGRQVYAINPLSVARYRERHSVARTKSDRVDAQLLANILRTDRAAHRPLPADSELAQAIAVLARAQQDAVWNRQQVANQLRSLLHEYYPAFVEAFKDRRPGGLAHPDACAVLAIAPTPSQAARLTRPQLSAALRRAGRRRGIAAASVRLQAIFRRTSLRQLPMVEQAMGCQALALLKQLEAAAQAADDLAEATRLVFLQHPQMAIFTSFPGLGELPAARLLAEIGDDATRFADARGLKAYAGAAPVTRASGKKLLVLHRKVKNQRLAAVGYLWTFAALRLSTGARAHYDRRRVAGDRHTAAQRHLFNRFLGCLYYCLQTGQTYAEAQAFPMPHQIAA

SEQ ID NO: 341026 - protein, 331 aa, unidentified
MFPVGIDVSKNTLDLCMLYDGIKGRIKTRNIQNNRHSVENILRWLRLQHCGPEDVHVVMEATGVYHERLATELHDAGFRVSLANPHRSREFARGMGIMTKTDKVDAYMLACYAFLKKPHRWEPPAPEIRYLGALLRRRDVLLGDALREENRLEKYLSTDTPADIISSCRRMAQLLREEVSNIERQIKAHIKASPALRRDYTLLTSIKSVGPQLGMHMLVVLRSHNFVSAEQAAAFLGVVPIEKRSGTSVRSRPRMSKIGPPQLRAKLYMSALCGKIYNKRMRNIYDEMCLRGKPKMVAIGALMRKLVHWCYGVLKTGTVFNDEGLKQVLST

SEQ ID NO: 341027 - protein, 350 aa, unidentified
MTQRNKPRDAAVFGIDIGKNTFHVVGLDSTGAPIQRATFRRETLLQFFERAARTVVGMEACPGSQWLARKLKALGHTVRIVPAKFVKPYVKSNKNDIIDAEAIAEAVTRPTMRFVEIRSPEQVDLQALHRVRDRLVAQRTRVICQMRAFCLEYGIAIHQGAGKFKADLPRVVADEENDLSSAMRRLLTELFDDVKNLEARIKEVTGEIEAVAAADDTARRLMTVPGIGPLAATALLAAAGRGLQFRKARDMAAWLGLVPREYSTGGKTTLLGISKRGSSYLRRLLIHGARSCLLHLDRSRDRLGSWIDGLQSRMHNNKATVALAAKMARVAWVVITKPGATYERRGLAAA

SEQ ID NO: 341028 - protein, 345 aa, unidentified
MPIVGGLDIHRKQITFDYLDTVTGQVCRGQVCLADREHLRAWLARFAGCDDVAFAVEGCTGWRYVAEELAAAGIAVHLAEPADTAFARGRKRHAKTDKTDCRHLRMLLAEGRLPECWVPPGHILECRALLETYHDLRAEHTAWVQRIHAVLFHHGAPALGAGTLRTEQGVAALRAVTAEWLSPAGQLQVATALEILEALEARMHELRHQLTDAARHLAGAKVLAERLYGVGPVTALAITCWLAGKDRFSSSRQVVRFAGLDVTVYSSDRKGPPGRLSRQGPPVLRWAVYEAGKTHARASAPDHAYYAQVKDRCNGKRAALSEARKILRQACHILAELGDDALAAA

SEQ ID NO: 341029 - protein, 338 aa, unidentified
MSIYAGLDVSDKSTHVCVVDSEGAVLRREVLASDPDVIAKWLGRYCPDLVRVVLETGPLSAFLYHGMVARDVPVECICARHAKGVLSARVNKSDVHDAEGIAQMARTGWFKRIHMKASATHFDRAAIRIRAQLITARTAMINQLRGLLKLFGLRLGSARAPGKRTERLVVLYAQRPDLEALFAPLIASIEVIEAQLRASNRILEKRAASDPVCARLMTVPGVGPITALTYTMSIEDPRRFARGEDVGAYAGLVPRRSQSGERDTQGHISKAGDPMLRRSLYEAANIILSRVRQPFALQRWGRKLAEAKGPKRARVAVARKLAILLHSLWLNETEFRWV

SEQ ID NO: 341030 - protein, 430 aa, unidentified
MAAVSIPIVDWLDKPQSFHFAQGYEDRFLWNTVVANDTRSDAYMIYLGIDVAKNSHVAAAMSSEGEVLLMPFSFANSADGFTLLREKLNNLPKLPLLVGLESTAHYGENLICFLCGNGYHVAMINPLQTAAIRKSAIRKTKTDKVDAFVIAKALMMEGYTELQQSDIQILKLKGLCKTRQNLILMRTRCKIQLGSFVDQLFPELNRFFRSGLHINVSYTLLKAHPRPAEVGALHLTYLSNLLRKASRGKYKKEDAIRLRELARNSIGTDNPALALQIRQAVSQIELFSAQLKQVESEISTIMDSLDSPIMTVPGIGYLNGAMILSCIGNIQRFSSPAKLLAYAGLDPAVVQSGNFSAKTTRMSKRGNSMLRYALINASHNVVRNNETFAQYYNSKIAQGKSHYCALGHTAHKLIRVIFALLTNNIAFDLA

SEQ ID NO: 341031 - protein, 417 aa, unidentified
MNSLPETIPIKRYIGIDSHKHYVMVGGMNAQREWTLRPRKVQMPRFRAWAAQNLKAGDAVVLETTANVWDIYDIVSPMVTKTVVANAYKVRQIAEARVKTDKEDVKRLLTLLIADIVPEVWVPPMHVRELRSLISFRWRIGKQLTMSKNRLHSVVQRFNLKPPEGQLLADKNQTWWDEQEFPELTRFQVQLDLEIISHLEAQKAKIDQKLAELSNTAPWSDEMVYLMQIPGFGLLTSMILLAAVGDIARFSHSKKLVGYAGLGAGVHSSGQKHQEKSITKQGRKELRWVLVQAAWAAVRSDPYWKSQYQRLTKIKHPNKAIVAIARRLLVSAWHILTKHEPYRRADDETIAYKMMIWSQRMDEKALRGLTRQQFIKYGLLRLGIGQDLTRIERNGVPRRIAPTNEVLKLHPDLKPPG

SEQ ID NO: 341032 - protein, 375 aa, unidentified
MEHHSEAFVALDTAKLRNAVAIADAGRNGEIRYLGEIDNTEAETRKLVAKLASKHARLTFCYEAGPTGYGLYRLIKSIGHDCIVVAPSLIPSKPGDRVKTNRRDAVNLVKLLRAGELTAVWVPDERHEAMRDLVRARDAAVKDYRIKRQNVSSLLLRLGRHYPGKKTWGRTHINWLTGLKLEHREQRIAFEEMLLAVRQVRERIERLEQAMREAVADWTLAPVIEAVQAMRGIDMVGAIAFLAELGDLSRFENPRQLMAYLGLTPSERSTGESVKRGGITKAGNTRARRLLIEAAWSYRFPPRVSKDMQTRIGAAPRTAREIAWKAQMRLCGRFRTLTRTGTRPTIEVTAIARELSAFIWAINREVVGSHATANQ

SEQ ID NO: 341033 - protein, 338 aa, unidentified
MKTHIGVDLHQRFCYLTAVDASGKTRKQGQVANEGSALRAWLRGLERPRQVVVEASGFWPAFARAVRPEQERLVMVHPQRVKAIASAKLKNDRVDSETLAHLSRCDLLPQAWMADEATQQLRLRVRLRMALGRQRARAKNQLQAVLHQEGFKKPVTDVFGKRGRVWLGGLELSAAGRLAVDTWLRAVDHLDGELAEQTRELEGMAKADVRARFLQTVPGIGAYSAMVILAEVGDVERFGNKRALASYAGLTPVVRESAGKRKRGGITHQGSNTLRWIMLQVAQVAARSSPGARSYYAGLRLRKPAQVARVALARKLLTVVWALLHHGVCFDEEVFTRG

SEQ ID NO: 341034 - protein, 432 aa, unidentified
MSALSTINLCGDVFMLKIVFPICCGIDVHKNFVVATIGTTNKSGVTDYQTRQFSTFTESLLQLLDWLKARSCIHVCMESTGKYWQPVFNVLEEYCDVVVANPKYVKGIRGKKTDKKDSIWLCDLHKHGLVPSSFIPPFSIRQIRDLMRYRFKLINFKSSEKNRIQNSLTVSNIMISSVVSDTFGVSSMKIINHILDNPDDKDFDVSSMLHASMQNKAETITKSINGNLTKPQADKMRVCIHHFENIEKHISDIERVVLGLAQPYLPQIEIILSLPSIKDVFTAIAIIGEIGSDMAVFNSSKHLCSWAGLTPQNNESAGKKKSVRVSRAGVYIKPLLVQCANAAIKSKKCPYFKIRYAQIKKRRGHKKAIIAIAHTLLNCIYHMLDKNETFNYDLYKIDSKPKQTYASQITEEMAIRYLQTLGYQIPDMRNPT

SEQ ID NO: 341035 - protein, 368 aa, unidentified
MKKETITSDGISGESLVNDVNRVLNLGLDVHYRQVTVAMQEDGGRIKAAGKMGHADFLNWVPKKLEEGWEIYSCYEAGASGYWLHRELEKLGVKNLVVVPKAMGQGGKKQKTDQRDAGELCDSLDRYLRGQNKALSVVAVPTEEQEEKRALIRYHRQIMADRGRCEARGKGLLCAQGIQVRGRWWRGDSWLELTSDPRLKDWMKEQLVGWRNKILSTDEEQSALRERIAALAPAILPKGVGAYSAAVLHYELRGFEHFKNRRQVGSITGLCPGVHLSDGRGKEGSINRCGIGIVRWTLVEMVWRLMIWQPQYPPVRRLAAGLVKSKRARKRLVVQAARRLAIDLWRLSTGQTTPEKLGLVMQSNAQGN

SEQ ID NO: 341036 - protein, 317 aa, unidentified
MTFVGIDVSKLVLDVAVVSEAGEVQHCRFENCVTGHAELSAFLAGFEGCRIALEATGTYHRQLVQALEATQQHVSVVNPAQVSFFVKSQNRRNKTDKADALMLAMYARERQPAAGAPLNAALQSLAREVNAVQRDINRLKNRLEAARHGLAHGQVIASLERRLKALEEERAVLERELERETKASNSAELALLTSIPGVGIKSACYFIAEVGDIHRFSSASKLVAYAGLSPMQFQSGSSVNKKSRLSRLGSSELRRLAYMPGLVGIRHNPILKEFYQRLVAHGKSKKAALLACVAKLLRIMYGVLIYRQPFNPNHLGG

SEQ ID NO: 341037 - protein, 351 aa, unidentified
MSEFSKEPVVTVGIDLAKRSFHAYGMDAIGKAVFSKKLTRDRLSPFIANLPPCTVAMEACGSAHHWARRFRTFGHEIRLIAPQFVKPFVKSNKNDAADAEAICEAAQRPNMRLVAVKTVEQQDVQAIHRMRSLVVERRTAQVNQVRGLLLEYGIEIPQGRAALMRHLPEILEDGENGLSARFRAELNELAEELRHLDTRVAHYDEQIQAIAQSNQTAQRLMTIPGIGATVATALLAAVGEDPRVFGNGRGLAAWLGLVPRQHSTGGRERLLGISKRGDVYVRQLLIHGARSVMRWVERKEDATSRWAAALKTRRHRNVASVAMANKIARIAYAVMTTEKSYDPAIGAVVKG

SEQ ID NO: 341038 - protein, 370 aa, unidentified
MLSMTATSTTVEPDHMVLGVDTHRDTHHAAVVDHLGREVADAEFATTPDGYRRLVDWARGYGVIARPGVEGTHSYGTALTRHLRNAGVGVVEVDRPDRRTRRARGKSDPVDAYAAARTALSRPHAPKPKNADGLVEATRVIRITRRSAVKARTQTINQLKSLLVTGPAELREQLRDLKTPVLVKACTALEVTPRPTEPTEATATALHRLALRYQQLTTEIRTADRELRPLITAVAPAMLDRLGVALEVTGQLLTTIGDNPDRLRSEATFAHLRGIAPIPASSGRTHRHRLNRGGDRAANNAIYTVVLTRLRLDDRTRAYYRRRTAEGLSKRETIRCLQRYVARELYHLLISLPLSSAPLPHQRGARTAQP

SEQ ID NO: 341039 - protein, 348 aa, unidentified
MRIIGCDLHARQQTLAMLDTATGEMVNLTLMHEGNEVREFYSQLPRPVLVGIEATGSMQWFLNLMDELGIECQVGHPASIRAAEPRKQKHDRRDADLILKLLAEQRFPAIWLPSKELLDLRALLLHRHQWVRIRTRIQNALQAIALANGLRRGPGLWSYDGQAKIAFLPLLPHASYRRSALQVMYRKMEEEIENLTQKIAEQAGQRSGARLLMTHPGVGPVTALATEVFLGDPKRFADGKALASYVGIIPREYSSGERQRLGGVTKQGSPLLRFLWYEAGAHAVRRDLELKRFYLRKLIPKGLGKARVAVARKLGIRLWIMLRDEIDYQEFCRRGQMQQSGAACGGDA

SEQ ID NO: 341040 - protein, 317 aa, unidentified
MMEHSIKTAGIDTGKERLDVALDGGGELQVANGKAGHRQLAAWLRRQAVRRVGIEASGGYERGVVAHLRAEGFEVAVMQPRQVRAYAVFRLQRAKTDRIDAAMIAACAAAAREIRAAPDPHVEALTGPLTLIEQIEEDIARWKTRRESTRGAAEQRFVEHEVDRLKARRLLALKRLALAVRARTDLAARLDLLLSIAGIGERTAITLLLRMPELGTLTREEAAALAGLAPFPDDSGNRHGLRRIAGGRSRVRRSLYAAALPAAFRWNLALVALYRRLIAKGKPHKLALVACARKLLIFANVVLQRGTPWTAATTHGV

SEQ ID NO: 341041 - protein, 344 aa, unidentified
MHNHHPRRYPPSTFAGIDVSKDHLDVCLDRTDDKRKTRRFANDADGHQQLIHWLGTDDAVRVCLEASGLYSLDLALALHASGSADVMVANPRAMSRFRDALVERSKTDRSDAVVICAFARRMPFRAWTPPERAVLDLRAIARRIQALTVERTREKNRLHAAQQSRTSSAVVVNDIEVNVRHLDRRIAELTRQAMKVTAKSERLKVALDHLTSIRGIAEKSALLILAEIALLPDDMTVREWVAYAGLDPRRHQSGSSVDRPERISKVGNARLRHALYMPALVSIRWEPNVAAFYEKLTGRGKKPIVAVVAVMRKLLHAIYGMLKHGQDFQGEKFYRVPEKVLTAA

SEQ ID NO: 341042 - protein, 403 aa, unidentified
MNSVGIDISKGRSTVAVMRPFGEVVISPFEVRHTDSELSKLARRLKSLNGETRVVMEATGNYHAPVAKLLHDAGLYVSVVNAKLVHGYGNNDLRRVKTDRKDAVKLANYGLDRWLTLPRYVPEEDTRLLLKNCYRQYRQYSKVQTVLKNNLISLLDTAFPNANRLFSSPTRGDGSEKWVDFVAEFWHCRCVSEKSEKAFTNKYQRWCKTHGYNFSEAKAHTIHAEASGHIGIMPKSETTKLLVEQAVVQLRATSAALIALKREMLTLAAQLPEYPVVMGMFGVGPTLGPQLIAEIGDVRRFYSKKALVAYAGLDAPPNDSGDVTGRHKSMSKIGASSLRRTLFLVMGIYLQNAPLDEPVYQFMDKKRAEGKPYRVYMMASANKFLRIYYATVKAYLESLELTA

SEQ ID NO: 341043 - protein, 429 aa, unidentified
MNYNTQNAKIASITEKTLIVGIDVGSETHYARAFGWRNYEYSKKPFAFSNDEAGFSSFKDWMDDIAEKHGMEAVIPGMEPTGHYWLNLGAYLQEQGMKPVHVNPHHVKKSKELDDNNPSKNDRKDPKTIAGLVNEGRFSYPYIPTGIYAEIRNLSNLRIQTQEEITRIKNRIARWFSIYFPEIKDVYRNPDAVSGLMVIKQAPLPCDIKGLGVDGVNKIWRDARLKGAGIKRATTLVTAAEHSIGNTEAPRSARKEIRNLLNDYEIYKSRMDELMEEIEETLSEIAYIDKLMEINGIGIKTVSCFIAEVGDIGRFDNPKQVQKLAGYAIVADSSGKHNGESRISHRGRKRLRYALYEAAISVIGKNKEFKEIHCYYRTREKNPLKKMQSVIAVACKLIRIFYTILTKGIEYDGQKMLSDIVRPKMQPAA

SEQ ID NO: 341044 - protein, 376 aa, unidentified
MKNVRFVGLDVHAETIAVAVAESGGEVRSLGVIPNRTESVDRLIRKLGKAEQLRVCYEAGPTGYPLYWQLTQLGVKCEVVAPTLVPVKAGDRVKTDRRDAERLARCYRAGDLTAVWVPDAAHEALRDLVRAREAAKADQLRARHRLSKFLLRHGRRASDGVQAWTGKYWDWIKSAVHFEQPAQTATFIDYVHEVEHAVARIERLERAIDVAVETVPPKMRAVIEALQALRGVAQVSAVTVVAELGQISRFARARQLMGYSGAVSREHSSGARIRRGAISKTGNAHLRRVVIEAAWSYRHRPNIGKALAARQRGQSEAVKEMAWKAQHRLFHRYRKLLAAGKTKQQVVTAIGRELLGFIWAIGVHIERTPQPRLAAA

SEQ ID NO: 341045 - protein, 344 aa, unidentified
MQHYIGLDVSVKETSVCIVDKAGKVIREVKVATKPGAILAVLTEEALAIERIGLEAGPLSQWLYSALAEAGLPVICVETRHMKAALSAQINKSDRNDARGIAQMMRVGLYRPVHVKTLASQKRRMLLTSRQLLQAKALDIENDLRGTLRNFGLKVGMVGTVKFEARIRELVANHPDLAAIVEPLLIARRVLREQLGVLHRQLLEIVRHDEVCRRLITTPGVGPVVALTFRATVDVPSRFTSSKAVGAAFGLTPRRQQSGEIDRMGGISKCGDAMMREMLFEAALVLMTHSRKWSWLKAWGMKVARHRGMKRAIVAVARRLAVIMHRMWVDGSEFRWTRQEAAAA

SEQ ID NO: 341046 - protein, 380 aa, unidentified
MHSENIAAYIGLDVHKETLAVAIAAPERLGEVRYYGTINNEAQAVRRLFQKLQGLYGNILSCYEAGPCGFGLYHQLTAMNIKCQVIAPSRIPKSPTDRIKNDHRDAISLARLLRAGELTPVWIPDLTHEAMRDLIRARAAAKRDSRVARQRILSMLLRTDKRYAGKHWTGKHRTWLANQSFSQPSQQIAFQHYCQSLEQIEDRILQLDQKISRLLPEWSLCNLVCQLQALKGVGQLIAITLVAELGDFSRFSNPKQLMAFLGLVPGEYSSGNSIRPRGITKVGNSELRRLLYEAAWSYRTPAKVGAWLIYYRPDSVTQYSKDIAWKAQQRLCSRYRSLTAKGKKSQVAITAVARELTGFMWDIALAAQSSFSQQKQNYTL

SEQ ID NO: 341047 - protein, 350 aa, unidentified
MVSSVPVQGGTSTKVTTIGLDIAKQIFQVHGADAEGRAVLRRPLRRNQVAAFFANLPLCVVGLEACGGAHHWARVLSRFGHAVRLIAPQFVKPYVKSNKNDANDADAICEAVSRPQMRFVLAKSVEQQDIQSLHRVRSRLVSSRTQLANQIRGLLMEYEMVLPQHVGQLLRGLPGILEDASNELTAFSRRLFASLYDELLDLEDKIEAIERQVRTVHEASEPCQRVAAVEGIGPVTATALIAAMSDGKTFKNGRQFAAWLGLVPRQHSSGGKTRLFGISKRGDTYLRTLLIHGARSVVYRASHKTDSRSRWIADEQRRLGTSKACVALANKNARIVWSLIARGEVYRRAA

SEQ ID NO: 341048 - protein, 410 aa, unidentified
MTIEDDLLPVYVGLDWAAEVHAVCVLDHAGKKLASFTIEHSRDGITSLIARLADYGDPADVQIGIERPNGRLVDLLLEAGHPVIPVSPNAIKTWRESEVISGAKSDAGDAMVIAEYLRLRNHRLSPVQPYSSQTKALRTVVRSRDDLVALRVAATNQLDALLDAYWPGAKAIFADTESAISLAFLRRYPTALAAAHLGEKRLTTFTTKNGYSGRRPAAQLLTRLRNAPTGTTDPVLSVAVGDAVLAFVDVLEALNRATRSLGQSTTARLGEHPDAAVFTSLPRSGQINAAQMLAEWGDVRAAYDSPDSIAALAGVTPVTKASGKQHAVHFRWACNKRFRVALTTYADNSRHASPWAADIYARARTRNIDHPHAVRILARAWIRVIYRCWTDNSPYDPGQHRGAQRLTQAA

SEQ ID NO: 341049 - protein, 424 aa, unidentified
MKNTAAMKRKQVPEGYLVIGVDPHKKRHAAVAITQDFTTQAKFKVDNTGEGLDRMLDRARAEMVKSCCRGVIFAIETGGHYWRNIAYYLDERGIPFRFINQYTLKRRREGKDLNRRKNDYRDSEVAAQLLCTGEFVESVIPQGVYAELRTSHNTYQRLVKERTRITNLLKGLLDALFPEFTLVFKDPCGLTAMSVLCTCPIPRVIAGMTDDEFIAMIEAHHKGRRLMRKKLRALHYSAQTSIGIDAGARSVSAEIAFLVDKLEMIKRQIRVMEMTLITLVDETEEGKYLLSIRGLNYIAVAGLLAELGSFKLYRSAKQMIKMAGSNPTESESAGKKRSKTPMSKQGRPLLRYCAWTAVIPMLRLNEDFRAWAKQRRERPAHANPLSGREVVGAALNKLLRLAFAMVRNQTYYQDVRPALIPVAV

SEQ ID NO: 341050 - protein, 351 aa, unidentified
MIEPQKLIYVGVDLRKEHHTAVIIDCWNIKLREIKFDNKPSAFPQLIKEVKKHVKRKLTPVFGLEDVGGYGRALAVYLTENKFWTKEVNPKLSNTRRKSHVTVQKSDSWDAECVARVLKDELNNLPDTKPIDLFYAIGQLATQRKSMANLLSGMGKRLHQKLGYNYPSYKKFFSEIDGKTALAFWHRFPSPKHLEGIQADNLAQFLRLLSNNGLSIKKKAELILSLIAVDGDTSRDFQDEHDFIVISLVRSIRFHQHEIAKSEKKIAVLMQELGLQLETMTGIDLVTAAELVAEIGDIHRFSSADKLARFAGIAPVAVGSGNKHRNYKSKQGNRELHDIIKGLAIRQIAVT

SEQ ID NO: 341051 - protein, 350 aa, unidentified
MQYIAFDAHKRYTLASVERPEGGLVREARISHERGALRRFLRRCDRGSPVAVETVGNWYWMVDEIEAAGCVPKLVHARKAKLMLGMVNKTDTLDARGLNRLQRTGTLPTVWIPPGALRDQRDLPRTRMVLTRERTRLKNRIHATLAKYALTVEDVSDLFGVRGRELLAGELRHLPPHTRFATDQLLEQLTGTTQQIDRFEDRMQELFEETPALALLRTLPGVGFILGTVILLEVGDIGRFPSAAHLAAYAGTTPRVHASGGKIRYGQVRSDINRYLKWAFVEAANSISRNRRHWPWRHVSRLYERLTRHKGHQKAVGAVARHLAEATYWILTKQEAYREPRRAAGSSTGG

SEQ ID NO: 341052 - protein, 319 aa, unidentified
MSGSAVVGIDVSKAHVDVVVIGAKLEAERFANEVEGHSALAAALQPLGVQLVVMEATGGYEVALACALQAAGLAVAVLNPKQARDFAKSMGRLAKTDRIDARTLAELGMVLVDRADLARFVRPLPDAQQQALAALVTRRRQLLTMMVSERQRLQLAVAVVRPSIEAMIAAIRAQLDDVEAQMVRQVREHFAELDTLLRSTNGIGRIASATLIATLPELGELNRREIAALVGVAPMANESGTSRGRRRVQGGRFEIRRVLYMATLSAARRNPAIRAFYQRLRAAGKLPKVALVACMRKLLTILNAMARTHKPWDRTLHHA

SEQ ID NO: 341053 - protein, 349 aa, unidentified
MATACSVTLGVDTHKDLHVAVTLDQVGRRLGVATFGTDDAHHARLWAWASDFGQIVQAGVEGTGSFGYRLAQFLTESGVQVFEVNRPNRVTRRRRGKSDPVDAEAAARAVLAGDATATPKDRSGPAGQLRALLVARRSAVKARTQTEQQLRSLILELDDDQRARVDRRRVVELTTACAALAGTDGTSLALRALARRWQHLDQEVRDNDQDVTIIVRRVVPGLLARPGIGPVCAAQLLVTAGDNPDRLRSQGAFAALCGASPVEHSSGKTQRHRLNRGGDRAANSALWVIANNRLMHDPQTRAYAARRTATGASRKEILRLLKRYVARQVFAEIRHALSPPAALPDSPLT

SEQ ID NO: 341054 - protein, 342 aa, unidentified
MTNFNTKYQSVCGIDIAKNVIQIYQVNQDGECKNFQVKRKEFLQLFENREPSLIGMETCGGSQYWARELQKLGHTVNLMAPSAVKPYVSGFKSDRKDAIGIFNAMLAGVRKVAVKTEAVTDLATLLGIRARRVRARTAKVNMVRGYLMEYGIVMAKGLRQFKNSIADSLLQLERAQASNMVKEEFKFLVDEVNKETEAILRLDREINSLAKQCKNFDHFLTAPGVGPITAATMCVKLADPQVFKNGRQFAAYIGLVPQHYGSGGKNVNTAIPIKCNKELRALLVQCAQSIRRTKNKSSWVTQIEDRKPNSVATIAVANRLARRLWAIASKGEDWKRMDINFG

SEQ ID NO: 341055 - protein, 333 aa, unidentified
MNQKYFIGVDLSKEKIDCAVILSDYSIVLEKIVKNQDAKIKNFILAFAKRTKCSLSQLFICAENTGIYGQPLKRACSALGVDLWIESPLKIKRATSDVRGKSDRKDALRIAEYSVRYFDRRVLNTESSADIDELAAVAKARETILSQRIAIENQLNEAKSHDPQLYKTLLSVYKTMLKTMEKELQKIEKQLDTVLRKNSEMSNNAELLKSIPGVGKQVAVQFIIQTNNFKDFDSAKHLASYSGVVPFLNESGKLIKRPRVSKMANLKIKTILHMAALSAIRTKSELRVYYIRKVSEGKNKMSVINAIRNKLVHRIWAVIERQSPYLLETQNNY

SEQ ID NO: 341056 - protein, 315 aa, unidentified
MTNLKKSKTTINVGIDVGKAFLDVYIHEKKIHFQEENNSEGITRLLKRLSYYDIERLVMEATGRYEFNLAQAAYNKGIPVSIVKPLLVRRFAGAMNQLAKTDKIDAEIIALFAFMAKPQITPRKSKNLIAIKDLIARRRQLMGLRTQELNRIKIMGKAFEVSCKRIIKTLDKEIERMEKRLANHVEAQAEWTEKQIILKSVPGVGDTLVYTLLADLPELGDLNKNQVAALVGVAPINRDSGKLRGKRRVQGGRANVRTVLYMATLSATQCNPVIKSFYKRLVAQGKHKKVAITACMRKFITILNAMVRDQVEWGL

SEQ ID NO: 341057 - protein, 314 aa, unidentified
MDIVVLGIDLGKNSCSLAGLDASGRVILRRRMRRSSVESFVNGLGRCIVAMEACCGAHHLGRVFVAQGHSVRLMSPEYVRPYVKAQKNDELDAEAIAEAATRPTTRFVAVKSQYQSDVQALHRARERLVSERTALINHLRALLLERGIVAPQGRRKLQEELAVFADEDGIEALSPRIRLLIEDLRSEWRALDERIAAFDAEFVRMAREDEAVRRLTTIPGIGTINATALAAAVGNARAFRRGRDMAAWLGLTPRQMTTGGKPRLLGISKRGNRYLRKNLIHGARAVLPYLVERETPLGRWARGLLERQLENLEH

SEQ ID NO: 341058 - protein, 337 aa, unidentified
MTLYCGIDLHANNSVISVTDDHDCVQYEQRLPNDLTTITESLYPFRSELLACVVESTYNWYWLVDGLMDAGFDVRLAHTGAIPQYTGIKHSNDESDARHLAHLLRLGILPEGYIQPREHRAVRDLLRRRMLLVRQRTLHHLSLQSLIARHTGERLSANQIKALDNEAIANKLAEPIRLGGQITLAAKCWLDRAIGKLELELQKHLIPCQNYQLLNSIPGVGAILASTIALETGPIQRFSSPGHYASYARCVSTEKISNGKIKGRGNKKNGNKYLAWAFMEAAHYSAIWSPEIKRFYQKRKAKRHILVAKKTVANKLARACFHMLSKQVPFEVKRAFG

SEQ ID NO: 341059 - protein, 403 aa, unidentified
MGRVIIGMDPHKRSATIEVCDERENVLATGRFGTDRDGYRELLAAGRKWPQRLWAVEGCQGVGRHLAQRLVADGETVVDVPAKLSARARVFSTGQGRKTDATDAHSVAVVALRTPSLRVVVLDDATVALRLLVDRRDELGAARTLTVNRLHRLLVELIPGGAKKFLSATQAKALLATVRPRDVGGKTRRQLAAELIVELEGIDKKIKAAKKQLTELVEATGSTLRDLNGIGPSGAARLLGDIGDVSRFPSRGHFASWNGTAPIDASSGDQNRHRLSRAGNRRINRVLHIMAIVQLRNDTDGRAYYRRKLAAGKTPMEAIRALKRRLSDIVYRQLVADQKRQRGTTVADPGGHVGAATKSSAAGYNPDAGASDKSLPGPTEREATPPPATAKDLQPTPVQALSA

SEQ ID NO: 341060 - protein, 342 aa, unidentified
MNKKKVTKQIVATDIGMENFYACYKIQYDDKSTVIKGTKSFGNSLSGINEFYTWCKKRNKAPEVEPIFVMEATGVYYEELAYFLHHKKEKVSVQLAQKIKYFAKSCNLKTKTDKVDSKMIAEFGIEKNLTGTDLWTPPSEDFKIIRDLAREHTSLKKAQTVSKQQLHALKHAHSIYDNVIELKEQQIDFYEKQIESVNKEIKALVKSDKSLHSKIEKIETVKGLGFITIIKVLTETNGFLLFNSIRQLVSYAGLDVIEKESGKYKGKTKISKKGNARIRSALYMPAMSAAQHNRTLKVFYNRINEDRTIKKQGLIAVMRKLLILIYTLWKKEEEYIENYQMT

SEQ ID NO: 341061 - protein, 416 aa, unidentified
MKYTNVAYVGIDWASATHYAYALDASGQKLGHRSFPHSGEGLVELANWIRSVTNLEPGSVAIGIEVPHGPVVEHLMDAGFLVHAVNPKQLDRLRDRFTMAGAKDDRLDAFVLADSMRTDLRFYRFLEPVHPTIIELREWSRMVEDLSAERNRLANRFRHQLWRYFPQIVDLSEDWARDWILDLWELIPTPAKARGARTSTVARLLQRCRVRKWSAESLLVHLRAPPIAVAPGVTEACVAHCQIIIARLRLVMAQMKAGMKQLERLCSAVADLPSVEPAAPDTRCDPDILRSLPGVGPIVLAALLSESHDAIRRRDAAALRALSGVVPVTRRSGKQYTVVMRQSCPHRLRTAVYHWARVAVMHDFHSRNRYSAMRRRGHSHARALRSVGSRLIGVACAMLQTGELFDKDRVPQVQLE

SEQ ID NO: 341062 - protein, 351 aa, unidentified
MHRITIGMDLGDKKHQVCVLDEGGRITQSVQLTNKGPAIEKFFLEYKGATVAIEAGSHSPWISRLLESLGCTVFVGNPRKLRFIWKNDNKFDVRDAEMLARIARFDPHLLYPIRHRGKQSQVDLALLKGRDILVKSRSCLINHVRGSAKAIGVKLPGCSSAAFARKAAGVLPAILAKALEPIIEEIAGLTEKIKAYDREIETISSERYPETACLQQVAGVGPLTALAFVLTLEESNRFARSRQVGAFLGLTPRRDQSGETDKQLRITKAGNQYLRRLLVGCSHYILGPFGPDSNLRRFGLRIAERGGKNAKRRATVAVSRKLAVLLHRLWRTGEVYEPFFTARPNLTRKAA

SEQ ID NO: 341063 - protein, 403 aa, unidentified
MNGPEVEVFVGIDMAKAEHYAQAITATGVEVFGRPIDNDQADIETMLDVAGEHGSVAVVIDMTASGAQLLLAVAAERGVPVAYVTGLQMRRAAELYAGTAKTDPRDAWVLADFARRNADRLTWLEVSDELLVRLRVLNGRDTDLATDSNRTINRCRDALVAISPALERTIGHRLSQAGVRDALRKWPTPAALRAAGQTKVRNAIKKRSPRLAAKVSDEIFEALEAQTVTLPAEATWGEVITDLLDDLERIHTRRAALGKTIEEVFLSHPLGAVLVTLCGFGPRTGARTLAEIGDPNRFETGSRLAAYAGLAPTDWRSGRSINGAFQHRGGNHRLKNAMFIAAFVATQFDPTAKAYYQRKRAEGKRHNAAVICVARRRCDLILAMLKNQTPYDASRHHDITTAA

SEQ ID NO: 341064 - protein, 361 aa, unidentified
MKTKLNHALKASTTSTSETQVRIRQLKLGVDWHADHLRVARMCEGQTPQPAQRFSQPAFLEWIKKQKEVADEIFVVYEAGPGAFHLYRQLMERGVRCYLVHPEKLDPRSKGVVTDKTDCRELVLKLDRYVHGNTRAMSVVRVPAPAEEQRRALSRQREQLRRERQRLAAQGRSLCLTQGYRLRGEWWHAPLSLPDWLEQRLEVWRQLIRAVETQLEQLTQAVEALAPKDRPKGLGPLTFGTLLAELCDLTRFKNRKQIGSYTGLCGGVSSSGQSHCELSITKAGNARVRWALIELAWRMVRFQSKCQAVQRWKHILLNPRAAARQKKRALVALARQLAVDIWRWQTGKVTPEQLGWVMVQD

SEQ ID NO: 341065 - protein, 365 aa, unidentified
MEATTLFVGMDVHKDSISLSVLEGSHREARPTVTLRNQPTELKRLFGRLRKEGVVRACYEAGSCGYEVQRLLASMKIDCDVIAPSLIPVRAGDRVKTDRRDAEKLARLFRAGELTSIRVPSEAEEALRDLVRCREDVREDVLRERDRLLKFLLRHGHAFSGKKNWSRAHWSWLRAIRFDQPTAQTVFVEYLARLEGTLGRLKALDQEIVAAADREPYKAAVGRLRCLRGIDTLSAVILVAEICDFHRFEHPRELMAFVGLVPSEKSSGAKQRRGGITKTGNGHARRVLVEAAWHYRRPPRRSPTIQARWQGQPRLVVDHAWKAQERLHRRFFRLTGRGKSSQVAVVAVARELCGFVWAATTQSAA

SEQ ID NO: 341066 - protein, 398 aa, unidentified
MSRIWAGIDSGKGHHHGLALDAEGKTLLSRRVANDEPELLKLIGDVLTLADGDQVTWAIDMTGGEPALLLSLLIAHGQDVLYIPGRLVNRAADGYRGEGKTDARDAYVIADQARMRRDLQPIRPGDEAAIELKLLTGRRADLVEDRTRTVNRLRGTLLSMFPALERALDVTNVGPLKLLTGYRTPAAIRRAAVTRLSKWLANRKVRNARALAETAVEAAERQYTSIPGEKTIARLVHPLAEEVMTLNEQIAEMDKLIEGRFREHELAEIVESVPGIGTVLGAEFLAGVGGSLDGFASPDALAAFAGVAPAPRDSGKVSGDLHRPSVYHRRLQRVFYTSALVSIRCDPNSRTFYDRKRAEGKRHVQAVMALARRRVNVLWALIRDRRCYQVAPPVTEAA

SEQ ID NO: 341067 - protein, 350 aa, unidentified
MKKISIGIDFAKEKFDATVMNMETGTSVWQQFPNTRGGGRDLVRMVKRLANGIPTDQWLFCGEDTGNYSRLISDYLAEKGYFMWLQNPYCIKKSESIIRRGKDDRADSAVIAEYAIRYADKATRYERPPEVISQIKALLSARDSLVKTRMALANTVSEIPKADRQGEAVTLIKSSTKRLIKDVETEIERMEQKIDELLQKDEDISHNSEILHSFKGIGRINAAYLIAFTNNFRKFDLDPRKIATYWGVAPFARQSGTALNTKPHVSRFCNKKLKAAISNSANSAIMWNKPFREYYLRLIERGKCEGIAKNNVKNKIIQTLTAMIRKGEKYNPDFMLTTKASVKCVNSLGS

SEQ ID NO: 341068 - protein, 427 aa, unidentified
MSEQKALELRVSVDVGFRRHRVAMGLSSGEVLEEFEIDHRIEGFEEFFSRIETHRKRKNCGVAVAMEGYNGHARPLDSLVRQRGYRLYNLNNLKFARFKEIFPGAAKSDRIDARKGLELFQLSDHLPLAKEVLQAVGGTPPGNEILKRLTRRRRRLVNERVRVVNNLQADLQAVCPGLLEITNDASNQWFLNFLVSAGTLPQLARLRRSTLLKVPSVGVKSAAIIEGWQKRAHFSEEVEWVGDMIQEDARRCLDLDEKIKRLEAKIASIAKDSAIAKALRSIPGFGAVCTSELAGEIGTIERFGSEGSLSLYLGMSTLDNSSGKYQGTKAPKHVNTRAKAAMMTGVDRHRKYVPESQRYYEKKRSEGKKHNQAIRALGRHLCRIIYKMLKEERQYRVRPEKGNTKTKASPKSLIKTQIRRSKISTQA

SEQ ID NO: 341069 - protein, 372 aa, unidentified
MKGRTRTGSRRAGGNVAGADPHRKTVSVTVLDERGGVLGTKHFKVSGVGHRAMWEWVQSFGPVCRFGIENASGIGRHTAVFLIERGVDVRDVCPTRTAEQARRRRQGKSDALDATRIARETLADPKVPTAFKRAGVDRGPDSVHEQILLWHKARRSLVKTRTRLLNEADHLLIELPLELREQLPRTSDVRRLLHSLDVVDTDGHSDPVTRLRLRFLAEQTARIDALDREERLVARELAALVKVTGSTLAQLRGIATRSAAELLVEVGDPRRFTEGGFARFNGSAPLPCSSGEGAGEPVRHRFNPHGNRRVNCVLHHMALTQLRCEPRARELYDHARQRGHTKTEAMRILKRRLSDVIHRQMIRDLQTTPRAA

SEQ ID NO: 341070 - protein, 342 aa, unidentified
MDHFAGLDVSVKETSVCIVDDTGKIVREVKVASEPEALLQVLTNPAYRFKRIGLEAGPLSQWLFSALAEAGLPVICVETRHMQAVLKAQINKTDRNDARGIAQMMRVGLYRPVHVKTLRSQKLRMLLIHRKLLQSKAIAIENDLRATLRNFGLKVGMVGKVRFEARIKELVENLPELAVLVEPLLIVRRVLREQIVVLHRRLLAIVRDDEVCRRLMTTPGVGPVVALTYRATVDVPARFRKSKGVGAVFGLTCSKYQSGEIDRSGRISRCGDEMMRVMLYEAAQSMLRSKKWSWLKAWAMQIARRRGMKKAIVALARRLAVVMHRIWVDGTEFRWTREVVAA

SEQ ID NO: 341071 - protein, 384 aa, unidentified
MWRLGQSQQREDWSVTQCTKTQFVGLDVHKDSIVIAVAQLGREAARVIGTVPHEWNALRKVLDKLGPRCEVACCYEAGPTGYGLARALIAAGWACDVIAPSLIPKKRGERIKTDRRDAVKLAQNHRSGELVAVFIPDEQGEAIRDLERAREDAKKAERVVRHQLSKFLLRNNRRYPGRTTWNAAHQAWIAKQAFAEPAQQYVLSDGLAAVEAATLRVSQLTARLRELTVGWSQEPLVKALQAMRGVEFVTAVTLVAEVGDFRRLATARDFMGYVGLIPSEQTSGPHRRQGPITKTGNAHVRHVLVESAWHYRRQPRMSKALRERNVGVAPQVCAIAWKAQKRLHSRLNRLIGRGKNKGEAVTAVARELAGFVWAISREEKLLAS

SEQ ID NO: 341072 - protein, 433 aa, unidentified
MSPKKDHTSTVRMLHPICCGLDVHKKTISAYMLLSTKRGREKVKAADFGTFTDELVNLRQWLLAHDCPVVAMESTGPYWTPVHNVLEGFLNVMLVNPRHMKNVPGRKTDVSDSRWIAGLLRHGLLRPAFIPPKAQRQWRDLTRMRKNYVKSQGDFKRRVHKVLQSANLKIDSVLSDLFGVSGRNLMKLLINSNSHPTLKQVERCLVSSVKEKARELHRSIQGFFEEHHRDLLRLLLESIDHLEDQIRRLDEKIQRTMSQEQEIIDRLKAIPGISEVSAHAILAEIGPHLDAFESPAALASWCGLCPGNNQSAGKRRSGRSRVTKNHLKEIMIEVAWPAIKKRGSYFKAKYYALKARLGPKKAIVAIAHRILKGVYHVIKDGKSFKDLGEDFLVKLNKESKLKYLRKQAALLGFQLTPLAEPDHNTAKPIFVEG

SEQ ID NO: 341073 - protein, 410 aa, unidentified
MYYYGLDVHKNTIEICKLFREGTSRETSSFPTSKENIREFAKSLREDDKVVLEATFNSWSIYEILKKTKAKIVVANARQVKAIAHAKIKTDKVDAHTLAQLLRADFIPDVHMPDEDIWQLRQLMNHRRLLGKQRTSMKNTLHGILNKNLIKAPADPFTKKGRTWLKKLELTEFETLMRDNALTQLEAVEKSIDGVDFELKELVIEDPNKQLLLTIPGVDIVSACGLMAVIGDVSRFKTADELSAYFGLVPRISQSGEKAYYGRITKTGSSLGRWFAVECAQSMAMSSAPLAGTYHRVKNKKGHNVAVVALARKLIVLIWHMLTKKEPYRYAPSARTREKLRKLHPALPALTRDEVGKRDINEIYKECGLWAAREASTGEKRTAANNRRTITRLKKNKTSSETGRKIIEEN

SEQ ID NO: 341074 - protein, 429 aa, unidentified
MNEVDIIRLEQFRQLKKEIRGSSEYLIVGIDMAKHKNYAFYGTATGETLLKRMIFENSIEGFEKLRIHEDALKVIHGLKKVIYGLEPTANYHKPLAEHLIKCCRNVVLVAGTAVKNNRRMVDGRWDKHDTKDAAVIADLISQGKFLFYEYPSMPLRDLRNLLSLKRRLKKQEHSQKVRIRNHLLAQYFPELDKYYRNWGQEGLAIVRWCLDPSVIAGLEYEEFVHRVAPNGRGGIRQQERLRAVWKKAIDSIGCRAGKSLDVEAKLMVEGLKYIRESIRDIEDKIEEICLDFPEYSYVLSIPGFGPDISSKVVGAIGNPFRFNNGRQVLKMAGMDLSANRSGKNSDNAAPKLSKNGKADLRYALYQAALITSFKNIHFMRYYTNRIRGREKERGIKTKMRVKLAAKLLIIAWTLMKKEEPFSPDYLNIE

SEQ ID NO: 341075 - protein, 387 aa, unidentified
MSDVDDLSRSLTAFDQDSTLIAVIEMSLKTWLVAGMVPGVARAPLKKLQADEAGLVRQLHRWCNEATKAGRKIGRLVVAFEAGRDGFWLARWLRSRGIEAYVIHAASVAVSREHRRAKTDRLDTEMLKRAFLGWLRGEPKHCQMVAIPTLAEEDARRPTRERECLVRERTRIVNRVQATLARLGVRGFNPKLRKAAERLPVLVTPEGEPLPAHTMAELQRELARLTLLREQIKAIETARLQRLAQQTPSTGPQAMIRLLARIVGVGIETADMLVHEILTRKLRDRRALARYAGLTGSPDESGSRRREKGLARAGNGRVRRDMIQLAWRFLRFQGDSALAKWYETRTKAARNMRKTMIVALARKLLVALWRLTTTGIIPEGVVLHAAA

SEQ ID NO: 341076 - protein, 331 aa, unidentified
MTISVGLDVAARSVVMAAHDAGKPVVKGSFEQSPAGHARLAAQLLKLAPAYVVMEATGIYHLDLAIALDRAGLPVSVINPRSAKRFAQLKLKGSKTDSIDAGLLADYGDALRPPRWSAPSPEDLALRDLGRQINRLTSDRTRAKNRLHALNAKQGTYALLLDDEADAIATLERRIERLRAAMRALIDADPIRQSQLKHMIAAPGVAEVSAMALLAELVMLPTTMKAPQVSRHAGLDVCLNQSGTSVYGASRISKGGNAYLRAGTYMPALVAVRHDPLAKAFYDQLVRRGKKKRQALTAVMRKYLTGLWACIRNDESFDTSKLFSPEHLKNA

SEQ ID NO: 341077 - protein, 361 aa, unidentified
MNATTAAIDLAKNVFQVALADANARVLEQHRLTRAQFERFFDNRSIARVIMEACGSAHHWARVFTARGIEVMLLPAHYVRAYVRRSKTDAADALALLEAARCADIVAVRVKSVEQQSLQALHRTRSLWMGTRTSRINALRGFCRELGLHVPVGARTGLEAMGRAVADDQSPIPALLRPIMHQLLDEIRLLETRVGQLERQLAQVARESPPCKLLMSIPGVGLLTATGILAATSGSVAHFKSARHFASWFGLTPKESSSGGTRRLGRISKMGDCYLRMLLTHGARSVLHAARVARMRGQQLLGVRQWAIELQARSNHNKTACALANKMARICYAVLRDQTPFGQPATRLGKKMQRQSFELAH

SEQ ID NO: 341078 - protein, 408 aa, unidentified
METVTWVGMDVHARSTHAAAVIAAAGELRRARFGGGAEAVVAWLGGLPAPVRACYEAGSTGYGLARAAQSAGVAVGVIAPSKTPRAPGERIKTDRRDAELLVRLVMAGQLHPVAVPTPRVEALRDLTRARDRIRGDLLRARHRVSKLLLRYGRVWPSDRGTWTQEHHHWLRRQRFDDPNLELAYLDALAAVDALMRRRDLLDQRLLVAAQDADVAAAVARLRAFRGINTLTALALHAEIHDWHRFGRPGRLAAWIGLVPSLYQSGESAQSGAITKSGSRHARRLLVEAAWHYRRRPGRGVTLTRRQEGVDQHTIDIAWRCQHRLYRLHTRLRDRGKPANVATVAAARELACFLWDAMREYQPPTTTAARASAEPSRLAGTPAATMRRRLRPRAFLDPRRPATKQGHLG

SEQ ID NO: 341079 - protein, 357 aa, unidentified
MRIIGCDLHARQQTLAMLDTETGEVVNRTLLHEGNQVREFYSELPRPVLVGIEAIGPMQWFLDLLAQLGIECQVGDAAKIRAAEPRKQKHDRRDAELILKLLVEKRFPAIWMPSKELLDLRALLLHRHQWVRLRTQVQNALQAIALANGLRRGPGLWSYDGQAKIAFLPLPPHASLRRSALQAMYGHMEEEIEKLTVQVAEQVEQRSGAQLLMTHPGVGPVTALATDVFLGDAQRFDDGKSLASYVGLIPEERSSGRRRRLGRISKQGNPLLRFLWNEAGAHAARRDPELRRFYRRKLIQKGLGKARVAVARKLGIRLWIMLRDQIDYQEFCRRGSGTACAGMPEVGNGANRHRPVE

SEQ ID NO: 341080 - protein, 344 aa, unidentified
MTSIDYIGLDIHKKTISFCAKAQDGTILDQGTIVARRDTLLAWAKARPRPWIGAMEATLFTGWIYDLLKPLAQELKVAHPAMLKAITAAKKKNDKVDARTIADLLRCNLLPVCYMAPCAIRDLRRVLRYRNLVVRQATRMKNRIAGLLMETGTPYNKERLHGRAYFSELLASLREVPRSVVELLQLSRGQLEFFATIQRRLLKGLCQNPDLSERVARLQTIPGVGEIMALSWALEVGEVKRLPSIAQAASYCGLTSAQHNSAGKEQRGPISKQRNKHLQTILIEAAKLAPRHNPQLAVVHERELQRGDRNQATLAVARKLVAYLMAVDKSGKPFAMRASGEEAA

SEQ ID NO: 341081 - protein, 352 aa, unidentified
MIVLGADTHKRSHTIAAVEMATGQVLGDKTVGVGARGFAALLIWARALDTQRVWALEDCRHVSGALERFLIGRGERVVRVSTRLMAGTRRSSRERGKSDRIDAVAVARAALAAGIDTLPTAALAGPELDLRLLVDHRERLVRTRVALNSTLQWNLHDLWPELTLPGGALFSNKWSAKIARRLARAEQTMRVRIARDELRRLRELTAAIKALKDEITELVTELAPQLVTEPGCGPLTAAKLVGEIAGADRFATDAQLARAAGIAPIPASSGRTDRHRLDRGGNRQINAAIHRIAVTRARCDADTRDYIARKNAEGKTNRDAIRCLKRHIARRVWNLLRTPAPLRGEPLTPSIS

SEQ ID NO: 341082 - protein, 417 aa, unidentified
MKCFVGLDVSSTKLDVCIMLSDTSTPVTASLSNDLSGATEIKNHILDLNHTYHFERIVIGMEATSLYSFHPAMFFHEDSQLKKLHVEIMVEQPNKIKKYRDAFEENKNDTIDAFYIADYFRIERFSPSFLKEEKYMALQHLTRTRLQIIEQLTRTKQHFIENIYYKCNTLAYQFKKEELSTNLWSSTMMTLITDEMTLDELANMPLQELADWLQQLGKEHFKDSEKLAQTIQAAIRGSYRLSKLQQDSVNVILGLLAREIRNLEKMIKEIDKAIEDMVETIPEYQCLTSIPGVGKVYAAGIIAEIGQIERFKDHPQVAKFAGLNWREKQSGNSNSQHTSLVNRGNRYLRYYLVEAANSVRRYDDEYKDFYKKKYHEVPKHQHKRAIVLTARKFVRLVVVLLRNHQLYTPPRRLMEDN

SEQ ID NO: 341083 - protein, 412 aa, unidentified
MNVRVEKACGIDVHKSFLVATILNCEGIKETKEFNTGIEDLINLREWIMARHCQRVAMESTGIYWTPLYTCLEGKVETIVANPRHIKNIPGRKTDDLDSEWIAELCLNGQIKPSYIPSKGIRELRDLTRTRTKTIQTMTAFKNRVHKVLEKANIRISGVLSEIFGIAGLQILNGILNKKNIDDVLKDVKRIGKKKAAIKEAVRGELSQTDIWLIRECLETIDFLKRKINLLDSMINQHIEKEQKQNLIQILMTIPGISFTSASAILAEIGDVTVFTHPKNLVGWSGLAPSLNESAGKSSNGHITKKGSKYLRRMLVQCAHVIARCRPNKLRFFYQRILMKKGKKIAIVALARKLLSIIHHLLKNKENYIEDELKPKQVKQPKFLSISELSLDEMIEIISKAGFIVEEFSSNG

SEQ ID NO: 341084 - protein, 330 aa, unidentified
MSVFVGVDIAAKTFDLVVRMAGKSSKVEQFKQTPQGYAQAVKRLKALKPALIVMEATGIYYLDLAVALVVAGLPVSVINPKSFRHFAALKLTGSKTDGIDAALLAEYGERIGPRLWTPPDETHLALRDIGRQINRLTASRTQAKNRLHALQSKCSTLPLLIADEQEGIALLDQRIERLSKAALALIAESKTLSRHLANMCATKGIGEASAIVILAELSVLPQSLKAPQVSRFAGLDVRLTQSGTSVNRPARLSKGGNAYLRAGLYMPVMSAVRYDPRAKAFYEALVSRGKKKIQAQCAVMRKYLTGLWACIQTETAFDSTLLFSEEHMNA

SEQ ID NO: 341085 - protein, 419 aa, unidentified
MRFIALDVHRDFSEVAIAEGRQVRLAGRVETTPAGLELFAQSLGADDQVVLEATGNALAIARVIEPHVARVVLANPKAVKGATQTAKTDKLDARTLAQLLAGGFLPEVWTPDERTRALRRRISRRAQLVRQRTREKNQIHAILIRNLKARPPVTDLFGVQGRKWLSGQGLPDDEREMVEACLRGIDFLDREVLAIDRALAELVLASPEMRRLMTLPGVNFVTAAGLLAAIGDAKRFPTARHLVSYLGLDPRVRQSGSEPARHGRISKQGPGEARHVLVEAAWHAARTTGPLRAFAERVAARRGANVATVAVARKLAVIAWHMLTRGEDYAFVRPSLVREKIRRLELMVGAERRQGRRNPVRVFATSEQHRLEKELAAQAELAYRRLMVDWKAQRRKGTGAAPGRASSAARQGTAPRPAL

SEQ ID NO: 341086 - protein, 309 aa, unidentified
MDSITVGIDVSKDRLDVAVRPSGEMLVIERNAAGLELLASRLKELSPKVVALEATGGFETVAAAALAAAGLPVIVVNPAQVRHFAIAVGQRAKTDPIDAGVIAHFAEAAGPEPRALPDAATRLLADLVARRRQIIEMIGAERQREKRAPVRLRKSIARLLKALEKELTSVDGDIDDAVRGSPVWCEKEDLLASVPGIGPTIARTLIAELPELGRLNRKQIAALAGLAPFTRQSGKWRGRSFIGGGRTAVRTALFMGAMVAKKYNPVLKAFFDRLVAAGKPKMVALIAVARKLLTILNAILRDNRPWQNA

SEQ ID NO: 341087 - protein, 409 aa, unidentified
MGLYCGIDWAENHHDFAILNDLGDVVSRGRVDNDAAGFARLLEAFAEAGDTAEDPIPVGIETDHGLWVAGLRASGRVIYPINPLAASRYRSRHSVSGSKSDSADAVMLANIVRTDAVAHRPLPADTDSALAIRVLARAQQDAVWSRQRFGNEIRSLLKEYYPAALVAFQSLEDGLTRPDARSVLAAAPTPTAAAALTRPQLRAALKRAGRSRFIDRDVERLRGIMRAPELRQPPQIEAAMGISLMTLLRQFDAACAAAETLAEHVSILFAEHPDAKIITSFPGLGPLAGARVLAEIGDDRTRFATARGLKAYAGAAPITRASGKKTFVLHRHVKNRRLAAAGTIWAFSALQASPGARRHFDARRAGGDWNHQAQRHLFNRFLGQLHHCLTTRELFDELHAFPPPLPIAA

SEQ ID NO: 341088 - protein, 379 aa, unidentified
MGKSIRFVGLDVHGETIAGAVAEEDGSELDFGVIGNRPEVVRRLIKRLGSVEKLRVCYEAGPCGYVLYWQLTGLGVDCQVVAPGLIPQKPGDRVKTDRRDAKKLARMYRAGLLTAVWVPQADDEALRDLVRAREAAKKDELRARHRLGKFLLRRGCRAPQGVEAWTKRHWEWLRSLRLEYPAQEVVFIDYRHEVDHARERLVRLERAIDEAVERVPACKRAVIEGLQALRGVKKVTAVTVYSEVGELSRFARPRLMMGYTGMVSSEHSSASRIRRGAITKTGNAHLRRVLVQAAWAYCRRPNLSPALKKRQAGLSEEIKEISWKAQHRLYGRYRRLVSKGKTPQQAITAVARELVGFIWAIGVHVEGQIRQESQGHAAA

SEQ ID NO: 341089 - protein, 372 aa, unidentified
MNDNTKYVGLDVSKENIAVAIAYPGREKPWYRGEIPNTPEAIRKLMKTLGNPEDLKVCYEAGPTGYPIYRFLLTLGIECEVIAPGLIPQRPGDRVKTDKRDAIRLAQLFRAGELTSIYIPTKEDEALRDLVRAREDAKEDELRVKHRITKLLLRYNIRPPEGVGRNWSSKYREWIHTLKFEYSTLRIAFQEYLQNLQEVEQRLKRLEAEIEVQATEGVHAPMIQALQCLRGVATITATSLVAEIGSFKRFRSPKQLMAYTGLIPSESSSGGIRKQGSLTKTGNTHVRRLLVESAWSYRYQPAVRDRLKKRQDGQPGSVQSISWKAQQRLHKKFFRLLSRGKSSKTAIAAVARELAGFIWAIAQEIEGTPKIS

SEQ ID NO: 341090 - protein, 350 aa, unidentified
MDNTFPPLGIDVSKVTLDVRLLSQHRPGPPRRFATTTDGLTLLAQWLESQGTSRVHACLEATGTYSDAVATFLFEHAHQVSVINPARVTAFRLSEGMRTKTDRHDALVLARFCEQKRPALWRPTPVEIQRLQSLLGRLDDLQLTVHQERTRFENLRLDAQIRQEIGAHVSWLQQQRERTLQCAITHVQQYPHLQQACDRLDSIPGIACLTAMRLYSVYFDQHRFRGAPQLVAYAGLCPAQRLSGTSVHGKPSIAMAGNAQVRQWLYMSALSVLRYDPDFAQWAGELKARGKCGRVIVVAIMRKLLHVVHGVLTSDEDYDPRKAFPTHEHSTAVQAPMPTDQKHVASARKE

SEQ ID NO: 341091 - protein, 346 aa, unidentified
MRFYDQQHEFYCGVDLHTRKMYLCVLDRDGNKRLHRNMRAKPDEFLRAVKPFRDGLVVGVECMFTWYWLADLCLDESLDFILGHALYMKAIHGGKNKDDRIDSEKIARLMRGGTFPLSYVYPREMRATRDLLRRRTFLMRRRSELLTHVQLVNHQYNLDPFEKRLRYVANRDVLDRFTEESARHNVEADLEMIGHYDTLLQRLELEVLRKAKVHDPQARFLLRTIPGVGEILSHVLLYEIHTIDRFASVGHFLSYARLVTPQHTSAGKRTGGGGAKIGNAHLKWAFSEIVPLMMRECQGAKQFVQRKEKKHGKSRAMTMLARKIGRAVYQMLKRKEAFDAVKFFAN

SEQ ID NO: 341092 - protein, 373 aa, unidentified
MPRYSTAFGMDVHLRSTTVCALDAETGEAVTRRFRGNPWGEVAEWMSGFPGPSLAAYESGYLGFAPQRELSGLGVDCVVAAVSRVPRSAADFSSKNDRNDAARMAKAILSHDVTPVWVPSPEIEGLRDLAAAHDAATARLAAAKQRLLAFLARRGYAYGGTTPAGNPRRYWTYDFLRWLDKVRPADDGGIRALAALRSEVEAAAETRDDLLAEYRAAVAAGPLSAEVEALQSIKGCGFALAAAFASEVGDFSRFRSGRQVTSYFGLAPKQRSSADSVRLGGISGAGNALVRRLAVEGSWSYVQASHQPKLMPKGSGVPLEVRMHGRKGSERLLRRREEMLARGMPQAKANAATAAELVRWLWALGAMCREATE

SEQ ID NO: 341093 - protein, 378 aa, unidentified
MAQSTTIVAFDQHAATTVAAVLPPGHRTAALHPMTSEMATLGRFVERLRRQGPVQCCYEAGPCGFELQRYLDDRQIRCDVIAPALIPRRPGDRIKTDRRDAGQLAVLYRSGALTAIHIPTEQEEAARDLLRCREDIRADLLRARHRLSKFLLRHGRRFTTTRAWSKAHDAWLRAQTWPLPALEQTHQGYLRTVDEAVARLRTVEDDLRALLDLEPLRTRARHLRCFRGVDDLTALTIAAELGDPARFPTAPSLMAFVGLVPSEHSSGTKQSHGAITKTGNAHLRRVLVEAAWAYRHHPFVGQTLAHRQRGAPADVVAHAWTAQQRLHRRYARFTARGKPKPHVVTAIARELTGFLWAVLVPSADRPSLERRILGSSKR

SEQ ID NO: 341094 - protein, 465 aa, unidentified
MHDLIGAWPLPSDPARTMVACPVNVLSAPQAPGRHPNTWKGTTTMTPPNEVVWAGIDTHTDTHTIALLDERGRPLGAETFTADPDGYDRLIGMLPEPRVVAAVGVEGTNSFGAALARRLTAAGYEVREVLRPRRSVRRRDGKSDPLDAVAAARSVMAGDGTSLPKSSDGWVEALRHLNAQRSQLVSAMTAISNSTNGLLVTAPESVRERYRGLRGETRMNRLAECRPAGGLVEHSVLAALKSAAKAWKALKRQAGLLEERMRLILEEHARPLLDMYCAGTVIAATLAIVAGDNPERIRSEAAFAKLCGVCPIPASSGRTNRHRLNKGGNRQGNMALHRIAIVRLRYHKPTRDYMAKKTREGKGKLEIIRCVKRFIAREAYRALISIRNGEAGRGTPAERGAKLRELRVSRNITQQQIGEALCVPSSRISEIERGARDLPELEQRAIQWIHSTTNPKQHTQTLDNV

SEQ ID NO: 341095 - protein, 352 aa, unidentified
MTNPASRTIFVGVDTHADTHHVAIVNEHGKKLTDREFPTTSAGYEATEQWINDSGRVARVGIEGTGSYGVELARQLRRRGYDVAEVPRPNRRLRRAQGKSDAIDAYAAARRLLDGSEITAPKNRDGAIEAVRALRVARNNAVKAISTALNTLRALIGTSPEELRGQLRKMPRARLIATCAAFEPDLCQLTDPIEATKLALRSLAQRISNSQAHADQLKQQLGKILEQVAPNTMDVFALGPDTVAALVISIGDNPDRLISEAAFARLCGVAPIPASSGKTTRHRLHRGGDRQANQALHTAVIVRMRYHEDTKAYPARRKHDGKTTPEILRCLKSYLAREVFRALRTDYRAMTA

SEQ ID NO: 341096 - protein, 375 aa, unidentified
MQETIRFLGMDVHAETIAVAIAEPDGEVRSLGTIPNRAESIRKLVKKLGSVEQLRACYEAGPTGYVLYWQLTELGVECQVIAPTLVPVKSGDRVKTDRRDAERLARSHRAGDLTAVWVPDEGSEALRDLVRAREAAKQDQLRARHRLSKFLLRTGRRPERKIKAWTGVHMTWVRQLRFEQPAQESTRLDYLHEVEHMGERVLRLEQAITEAIQLASPGMQEVIQGLQALRGIAEISAVTIVAELGQLSRFESARQLMGYSGAVPSENSSGKRTQRGSITKAGNAHLRRIVVEAAWSYRLRPGIGPRLRKRQENVPEQIKEIAWKAQIRLTKRYARLAAAGKDQRKIVTAVGRELLGFIWAIGIKAETASKQRMAA

SEQ ID NO: 341097 - protein, 548 aa, unidentified
MSPGGASRSYSPAALEFPPNTILQVIHRRPKAAPKASHRAVVNNLAAAVASEPIPADTMAGRRFAAASIRSFPPHPARVKSRKPATLTARVQKSERTLPREGHRISSTMNRVIATNAAANTRKESNTMKAWNEVTHFAGFDWAKDHHDVLVLDNTGKIAAELRFEHTAAGWSLCQQKLAAFPHLAIAVESGHGAAIERLMVLGYRVYPVHPRSSKSYRARKLPSGTKTDHIDCWALADALRLEGESWHVLNTPEPLVQRLRLLCRDEVALIEQRTALINQLQQALYEYYPAALAAFDDWTSLSAWAFVARFPTPQALVKAGKRQWEKFLHTQKLYHPEWYQKRLAIFAKADEFCGPDAVTAAKSVLATALVKLLQTLEQQLAGYRSLITECFKQHPDYHVFASLPGAGPKLAPRLLAELVALQPLADQPQVLQCLAGMAPVSYQSGKVSVVYLRRQCNRFLRATLHLWVDLSRHYCDWARIYYEAHKKKGQSHACALRCLGMRWLKILAAMIRSHTPYDAALHARSQLQHGSWVLQLQPKLSITKDAS

SEQ ID NO: 341098 - protein, 398 aa, unidentified
MGKIRHCGADISYRWFDACARRIGSDGWETRRFENTPSGHEQLIGWLRRGKYQARVVLEATGNYGLELALALAEAEGIEVMVVNPRAARHFAEAKLQRARTDKVSAQVLCDYAERMPFEPWRPPSAERLGVRAIGRRMVALRQMCNDEKNRLHAQVVCGKSATGLVVEDLKAHIEHLQALIQALESQARVVMAQDRWLHGAYERLQTICGIGQRSALLIVAELCCLPDGLDARQWVAFAGLDPRTDTSGSSVRRPSRISRMGSVYLRSALFMPALVAMRHDPYVRRFADRLLTKGKVRIVVVVAVMRKLVHGIYGMIKNSTDFDSKKLFPDLISGQPTGESDTGRSDQAEADAITAPQRRAQDGSRARAPRKGRTRRSEPLSHPSTTLRSSNGVEAPT

SEQ ID NO: 341099 - protein, 343 aa, unidentified
MKLSRVGIDLAKNVYQLHGVDRHGKTMLKRRLKRHQWLKVLLDKTDPDCVIGMEACAGAHHWGRELQALGYTVKLIPPQFVKPYVKSNKSDAKDAEAICEAMSRPNMRFVTVKRVEQQDIQATHRIRAELITQRTAKANQIRGLVAEYGLVAPKHLSSLRAAIPCWLEDAENGLTGDFRALLQGVWRDLLLLDDRVGEMDKLIKRLADSNEDCVRLQQLRGIGPMIATALIASVGDARQYHKGRQMAAAIGITPKQHSSGDKHRLLGISKRGDVYLRTLMIHGARAVVARATHKDDRLSRWVTNIANKKHPNVAAVALANKTARMAWAMLRNKTDYDPDFAMS

SEQ ID NO: 341100 - protein, 434 aa, unidentified
MNNLLKLPETNHRSCLPVFVDISKDHLDYTIGWESSQAPAPANRIEYRVDAVQQWINELITEYQLRGGEQLEFVCEPTGGLQHKLLLVARRNAAKMRYVDSERMYNARMITYGNSEKTDEKDPGAMRNLYLIGRHRPAVPRDVLHQTVRSISQEYEDLSQQAIRARNKIHGLLGYVFVDYKKTASFTFSRSGRALAKEFSFCPQFILQTGYREFTRRLKAHVPRIRTLTLRQIWEMAESSVAITDADFPDPRLDYMVTLYEQWERLESRKSELKERLHGYGQLYQEQGLLPEHLPPKVSAWMLVRVIAETGSLDGFTHIRQLWAYLGLKLARRQSGKYKGHIKITKKGSTLARKLLFQICLPLVKKGDWLHSAYKKQNPKGERGGRGIRAMTSMMRKFVKIILAMHQSGDRFRIPRMSCCESQFCQEVTQQECL

SEQ ID NO: 341101 - protein, 428 aa, unidentified
MNTPTSNPPVVAWVGLDWADQRHEIRLQAAGSPRLESFSVEQKPEAFQAWVAELRARFPQGRIALALEQSRGAVIYALMNYDFFLLYPLPPKTLARYREAFASSGAKSDRSDADLLLELVRTHGDRLRAWQPDDAMTRQLRLLVEYRRKTVADRTRLTNRLTDLLKTYFPQALDWLGDLRSLAACEFLGAWPTLEAVQGANRPALRRFFHDHRRLSAEEREKLLDQIRHARPLTQDRAVLEASELMTQTLVEQLRAVISTLARLDQALEELFGQHPDQQLFDRLPGAGEALGPRLAAAFGTDRDRYQSAEEIQQFSGIAPVTAASGKMRWVHWRWACPKFLRQTFHEFADASRKKSLWARAYYQQQRQHGVSHHAAVRALAYKWIRILYRCWKTRTPYDEALYLRALQRRHSPLWLAAASLSTQEAHP

SEQ ID NO: 341102 - protein, 344 aa, unidentified
MDHFGGLDVSVKETSICIVDDTGKIVKEVKVASEPAALLKVLGNPSYRFKRIGLEAGPLSQWLFSALAEAELPVVCVETRHMQAVLKAQINKTDRNDARGIAQMMRVGLYRPVHVKTLRSQKLRMLLTHRKLLQSKAIAIDNDLRGTLRNFGLKVGMVGAVRFEARIRALVENQSDLAALIEPLLIVRRTLREQVVILHRRLLAIVRDDEVCRRLMTIPGVGPVVSLTYRATVDVPARFRKSKSVGAVFGLTSSKYQSGEVDWSGKISRCGDEMMRVMLYEAAQSMMHSKKWSWLKAWAMQIARRRGMKKATVALARRLAVIMHRIWVDGTEFRWTREQAVAAA

SEQ ID NO: 341103 - protein, 438 aa, unidentified
MNAYGKMSLRGFLASARIRPGNSMKEQRNKVCGVDIHKKFLIATILSRDGTKIQKRYSTDIDDLLNFRDWILENNCDCVAIESTGVYWYPVNAVLENKVELILANAHQIKHTPGRKTDSIDSEWIAEVALNNLIDPSRIFPKEERDLRRLTRTRESLVKIRSQFKNQVHQGLESCSIKLSSVLSDNFGKSGRHILDGLIKGKDVDHIIDEIPSKRVKKNQDQIRSAIKTGLDETQIFLIQSHLNTIDSLTKKLDEIDSEIKHRISGRKNDMQIAMSVPGIGFKAAATILAEIGNYRDFSSPDKLASWCGIVPNVYQSADKLVTGSITKQGSKHIRWMLVQVAQAAFKKRGSKLRKFFLRIKARKGHNVAVVALARKILCILYHLLMNQEMYHEEGVTKSRQSKIDWSSARTDKMSLQTMIEIIVKAGYEVKKNEGFGG

SEQ ID NO: 341104 - protein, 364 aa, unidentified
MTGTMTWAGLDVHARSTHAAAVGVLTGEVRRARFGSGVDEVVGWLAGLPGPVRAVYEAGPTGFGLYRAARSAGIEIAVVAPSKKPRASGDRVKTDRKDALRLARLAMAGELSAVLVPDEFLEAARHLTRTREHVRADLLRCRHRVSKLLLVHGRVYDGTAWTQAHRRWLAGQSFEHAPTELAFVDRLAAVDGLLARKDALDERLSRLAEDERIWPTVARLRAFRGIDTLTALAIHLELGGDWQRFSSPHRLFAWLGLTPSLEQSGQSSRQGAITKTGSVYARRLLVEAAWHYARPPRIGATLRNRQTGQPDHVLQIAWRAQHRLHRLHHRLAERRKPHNVTTVAVARELSGFLWAAATAPITQP

SEQ ID NO: 341105 - protein, 406 aa, unidentified
MRVMIGVDPHKGSHTAVAIGPAEEPLGRQRVRACPEQARQLLAWAAAWPERTWAVEGATGLGRLLAQQLAATGEQVLDIQPKLAARVRLLEAGDVNKNDPNDARSVAVAALRSSAPRQVAADGHAAVVKILAKRHRDLARSRNQAACRLHAVLCELVPGGFAGEITAGLATRLLDQVTPAGAVAAARCDLAAELLADVRRLDHQRRECAKKLAAAVRASGTSLTGLFGVGPVIAGLVIGDVADVTRFPGRSHFAAYNGTAPVEVSSGGRKVYRLSLRGNRRLNHAIHMAAITQIRHKHSDGRAYYERKIAAGKTHKKALRCLKRRISDAIYVRLRADARQDAAAASKDPGGQPGNDSDSRAAGSHPEHRLFGQATPGPKASLRSAATLTPPMPQSKSPVIKTARAT

SEQ ID NO: 341106 - protein, 371 aa, unidentified
MSQIDVEVSSLLSTQLNLTIMLKYAIGIDVSMDFLYVCFKVCKGDFSSKVIASRKFKNSKAGIKHFMKWIVSKRKDKNLSLQVGMEATGVYHELVAYSLHSGGYDISILLPGKVKAYFKSLGIVSKNDKSDASGLAQMMLERKWDSWSPPSKQIRVLRSLYRFRDSIQDQLIVLKNMLHAHSHMFDSNKFVIRNLKSQIAYFEKELKKVDLEIKKQLDMQSEFSKKVKLIADSVSGLGELTVGHVAAELDGFALITSLSQLTSYAGYDVIENQSGKHQGKTRISKRGNRHIRRALFFPAITVVRFEGDVFEQLFLRVYDRTKIKMKGYVAVQRKLLCIIYTLWKNDASFIKNYNLNEQLTNDQFPKSKTAA

SEQ ID NO: 341107 - protein, 403 aa, unidentified
MSSYFAGLDWASRTHAVCVIDEHGSVLERLDVAHDAAGLAELKRRLERWHRPSVAIERPCGLVVDTLLEAGFVVVPIHPNAVKATRPRYRSHGAKSDACDAYLLADLLRTDGHRFKALTPQGDEIKALQALVRGRDDLVATRVQLANQLRSLLESFWPGAACVFADIDSPIALAFVERYPTPESAKSLGPKRIAAFCAQYAYSGRRSAQDLLARLHEAPAAVCAELQMEAKGELARCLARTLRSVVEQIRLLSSRIEHHVASLDDGKILMSFPRAGRICAAQILSELGSVRERFASDSQLAAEAGVAPVTYESGKSKAVTFRWACNHRLRAALTCLADNSRHASAWAAHLYAKAKERGCDHPHAIRILARAWLRVIWRAWTDHTTYDPSQHRAAQLLLKTNGG

SEQ ID NO: 341108 - protein, 373 aa, unidentified
MGPTPDKMNKCCLHTELSSHEGTRSEFNRGKTVIKLGIDMHQEFYVVVVQEGGANPKPARRFEKEAFVSWAAKLRRQSSGGEIHAVYEACGFGFGLQRQLAALGIGCHVVCPQKLDEQNKRVKTDGLDAKALCLKLDRFVEGNREALAQVRVPSEAEEQRRALHRQREQLVKARKQLEAQGRSLMVNHGIEPERNWWKKRTFAALVVPTWMKELLNNSQPIVLSLEEKIRALTVQLQAAASPRQPRGLGAMTSVVIDREIGNWDRFTNRRQVGSYTGLCPGEYSSGNTRFQSCVTKHGNPRLRAALVELAWRLVRFQPNYKPVLKWRRVLAKGALATGAARKKAIVALARQLAVDLWRIRTGRLSPEQLGLSI

SEQ ID NO: 341109 - protein, 355 aa, unidentified
MSSEKYIGLDVHQATISVAVTDSQGKVIMESILETKASIILEFFAGLRGSLFVTFEEGTWAAWLYDLLKPHVTEVLVCNPRKIPLHKQGNKSDKIDARKLAERLRLHDLKSVYHGENGIRMLRELARSYLTVVKDLSRVMNRLKALYRSWAIPCAGRDVYYRRHRSQWLEKIPEAGTRRRAEQLYQQLDMLQHLRQQARRELLAESRKHAITARLRKIPSLGPIRCALAVALIQTPHRFRSKRQLWTYSGLGLETRDSGEYHFVHGQPRRRKKQATIRGLNKDYNHDLKGLFKGAATRASVKPGPFQDFYQRSLAKGIKPTMARLTLARKIAAITLTLWKKGEDFDINKLNSQAA

SEQ ID NO: 341110 - protein, 313 aa, unidentified
MSESLFVGIDVAKGSLAVASSPAGLTLEIPNSPQGRSDLVKALKSHTIALVVLEATGGYERPVAAELLEAGFATVVVNPRQVRDFARGLGELAKTDPIDAKVLARFAQIVQPKPRPAASAEQVELAELVGRRRQLVTTLAQESNRAEMARLPRVRRSINAVRHMLDKQVEQLDEEIAKLIEADETLSRKDKILRSTPGVGPGTSAMLLSHLPEIGQLNRQEVAALVGVAPWDIKSGRWTGQSSIWGGRADVRGMLYMAALTARRVNPTIVAFAKRLEAQGKAFKIVITACMRKLLIILNSMLRSETLWRQKNS

SEQ ID NO: 341111 - protein, 398 aa, unidentified
MDQDRFDVFVGLDVGKEHHHATALNTAGKRVHDKALPQDESALREVFDKLAGYGSVLVIVDQPATIGALPVTVARALGIEVAYLPGLAMRRIADLHPGNAKTDARDAYIIAEAGRSMPHALRRVGGDDDLIADLAVIVGFDDDLAGEVTRVSNRIRGLLTQIHPALERAIGGDIGHPAVLALLTKFGGPTGLAAAGKRRLTTTAKPLAPRMHERLVQAIVKALTEQSVTVPGTRAAELVLPQLAAQLQGLLAQRAEAAKQVEEALDAHPLSQLLMSMPGVGIRTTARLLLDIGDGSAFPTAGHLAAYAGLAPVTRRSGSSIRGEHPSRGGNKHLKRALFLSAFAALHDPDSRAYYDRKRAAGKKHNAALICLARRRVDVLHAMLRNGTYYQAKPAAAA

SEQ ID NO: 341112 - protein, 422 aa, unidentified
MRILEPLQIFILEESVMLNAVGIDVSKERSTVAVLQPGGVIVHKPFDVPHKSRNLHNLAQYLGSLEGDTRVVMESTGHYHEPIRNALSKAGLFVCTVNPHLIKNYGNNTIRKLKTDSADAKKIARYTLDNWAELREYTSMDTTRTQLKTLNSQFSFFMKQKTAAKTNLIALLDTTYPGVNKLFDSPVRADGSEKWVDFAYSFWHVDCVRKAGITAFTDRYKRFCKHHGYEFQEAKANAIYKDSKELIATLPKEAVYKELIQESIRQLNLLSENVEHIRKTMNELASTLPEYNTVMSMYGVGPTFGPQLMAEIGDISKFQHREALTAYAGVDPGKNDSGQEVHNSSHASKCGPSRLRHTLFQIMTTMLQTGGKEDDAVSSFLFKKKAENKPYLVYMTAGANKFLRVYYGKVKECLRNQEQAEE

SEQ ID NO: 341113 - protein, 424 aa, unidentified
MDAKNQNNWEQHRYYMGLDWAKQEHAIAVVDGDGRIMVETKIEHTAEGWHRLREKLVDLAGPDLSFVAATIETNRGPAVERLLELGCVVYPINPNAAKCYRSRKSPSGSKTDRLDALSFADALRTDGHGWRPLNPEDPMTQELRLLCRDEMSLIEQRTTLVNQLQQALHEYYPAALEAFDDWTSPSSWVFVERFPTPEVLKKAGKRYWEKFLHTHRLYRPETYRKRIEIFASATEFCGSQAVTNAKSMLAVSLAKQLRLLEQQLKTYRERIDALFQDHCDYSIFASLPGIGQKLGPRLLGEFSDDRDRFPAYEGLQCYAGTAPVSFQSGQIHKVRFRYACNKNLRAAVHLWADLSRKKCTWAQVYYNQKRLEGKSHACALRCLGQRWLKILWKMWQTKMPYDEQMHTRNQIRHGSWVLALTESK

SEQ ID NO: 341114 - protein, 390 aa, unidentified
MELPLHKPNDLSRSLTPFEPDRTLVCVIELSLTSWLVAGIVPGVERQPLKKIGIDEGALLKLLHRWRGEAEKAGHRITRIAVAFEAGRDGFWLARWLRTRDVEVHVIHASSVAVSREHRRAKTDRLDTELLRRAFLGWLRGERDHCRMVAIPTVKDEDARRPSREHESLVREQGRIINRMKATLVRLGIRGFNPKLKKAAERLEDLRTPDGEPIPPNTLAELQRDMQRRRLVREQIRAIEDSRLDRLEKAPSDQPHAMVRLLGRVMGIGIETADMLVQEVLSRNLRDRRALARYAGLTGSPDESGERRREKGLARSGNARVRRGMIQLAWRFLLFQKDSALAQWFRGRTENARGTRKTMIVALARKLLIALWRFVREGIVPEGVVLRPAT

SEQ ID NO: 341115 - protein, 335 aa, unidentified
MKKIHVGIDISKEKCNLCYRSGLEIVCEEECANDVKTLKKAFKATMKALDASMDEVLVCAEYTGRYIYPLTVACQELGIFLWMDDPTRIKNSMGLTRGKNDAIDAARIAEYAFRYSDKAVRYAIPDAAMVSMKNLLADREFLLVDKKRYQSQLTDQKKYMAPGDFKHKNSRWKKVIKSIDEQIAAIDAEIESLIATDPVLARQKELLVSIDGIGDRIAINMIAITGGFTRFQNARQFCSFAGLTPYRYDSGTSVRSKAKISKRANQTMKALLHMSAVNVATRMKAGEYKDYYERKLKEGKHVMCILNVLRAKLVHRMFSVIKRDTEYTKEYKPAC

SEQ ID NO: 341116 - protein, 379 aa, unidentified
MNNIILAIDLGKYKSVDCVLDQNTGEFRFATFDTSRAELQKLIAKERPGVVVIEACLLAGWVHDLCGELGVRCLVANTASEAWKFKHLKRKTDKDDALRLVQLHMLGQLPTVTLPPTKVRQWRSLMTCRQTWVGRRVAVQNRIRALFVAQGLPAPRGAKAWSTIGLAGIAMQAKPLPECGPDELWRGLLELSLTEYRQVCELVAQAEAQLDALGKQNADVILLQTTPGLGPRTAEVVVAYLNDASRFKTTKQVSAYSGMVPRQHQSGEMDRRGRITKRGPALLRKLLVECAWCMLRYNGWARSFYLRLTGGGQRRKKQAIVALARKILVRCWAMLRDKKPWRDPQTAPKNPLPPSKQRRQKEAQERRQQKQAALAPVAT

SEQ ID NO: 341117 - protein, 364 aa, unidentified
MDVHLRSTTVCALDAETGEAVTRRFRGNPWGEVAEWMSGFPGPSLAAYESGYLGFAPQRELSGLGVDCVVAAVSKVPRSAADLSSKNDRNDAARMAKAILSHDVTPVWVPSPEIEGLRDLAAAHDAATARLAAAKQRLLAFLARRGYAYGGTTPAGNPRKYWTYGFLRWLDGIHPADDGGIRALAALRNEVEAADETREAVLAEYRAAVAAGPLSAEVEALQSIKGCGFALAAAFAAEVGDFSRFRSGRQVTAYFGLAPKQRSSANSARLGGISGAGNALVRKLAVEGSWCYAQAGHQPKLMPKGSGVPLEIRMHGRKGSERLLRRREEMLERGMPQAKANAATAAELVRWLWALGAMCREAGE

SEQ ID NO: 341118 - protein, 326 aa, unidentified
MTTIGGVDIAKDQVDVCLLLDDSQAQYETFPNSKGGLNKLHRWLKKQGAKTAPICLEATGIYGDLLAETLHQRGYTISVVNPARVKAYADSQLRRNKTDKLDAALIADFCRTQVPVAWTPPSPERKELRALLRHLDDLKQEYQRVKNRLEAQRISQAVIGLLKQQQRFIEEQMAQTEHLIRDHIDQFPDLKHQRDLLTTIPGLGDITACRLMAELGDVRRFDNVREIVAYVGLNPRQHQSGKKRATQGISRKGRASLRAALYMPALVAIRHNPVLNAFAARLQARALTAKQVIVAVMRKLLHLAYGILKSGQAFDPNYVQKLANAA

SEQ ID NO: 341119 - protein, 410 aa, unidentified
MKIFVPVAGVDVSKRFSDLCVLSPDNNVLLRQKIYHDMVSMKLAEKKLHEIELECGARPVVVMESTSHYHLILFQFFTDAGFEVVVVNPIQSGALKNINVRKVKNDRVDAYRIAMLYRLKVLRPSQIPTSSLRGLRLLTRQRSELKGDVARFKNRMTAYLDQIFPGYGEVFSDVGGSASRAVLHMCPTPEELLNTDGSLLAKVICEAGNKGPKFGAEKAAKLREAAGSAQVIGVRSASNASLIKNVLDIIEGLLSAVGRVEGELKALVKQETGFDEDVKLLCCIPGIGFNSAVVIVAEMGDISLFRKPKQLAAYFGLDPGERQSGTFKGRKNKLSKRGSPQVRAVLHMAAVSSISQNRDGTYRNPVLAEYYERKCAEKPCKVARVAVMRKLSNIIYAVLRDRRPFELRTP

SEQ ID NO: 341120 - protein, 501 aa, unidentified
MLANQKKPSISVCHPTRLRKKRQSSQDENDFTAFGIGMDVHKDSIVVCVSGRLPKGEIVVYREHSFRNNFQGVDELCRFLRAYITRATILMECTGVYHVSLYQTLQDRFRGRRDHLIAMNPLLVHNRIADLGTKTDRADARTLSNLAFYERILRPSYVGSPDFFTARDFMRSYHRTMSHCTMFKNRIHRHLHLANQKFPFDLGSEWGIQLLDRYINSSQPLGDIYTEYLADLKDQGKGKVLEKRAEDIVPNADVCLTESQQFLLQVDLIRLLQSQQAAALLLGKAERYVLAHPTLRVYYEQMCIIPGFNAVTILTVLTEIGDYSRFRTADAFSKFCGVVPTVEQSGNYRAKGHVNRFTNKHLRGALTQAAASIIGRPDRTTDIGAYAYKQFHLRKLPFKKCMLKVAYKFSRILYGMLTEIRQYDPHHESMRKKRARLQNRLKNQDTLIESNRTRALRRDISSLLVSHSELLNSTSKYHLVNGFNRLIRKARYYDQQDPSGK

SEQ ID NO: 341121 - protein, 449 aa, unidentified
MTNGSGVSRGDRNRNARLGRLRTAVPVTNAIVGIDLADRKQMVVVCDHDSRVLARRTFRCKAWDLGAALDWAGDRATRAGFDGVTVACEPTGHRWRVLGQLAADRGMSFVCVQPMLSSWARKTEDLTSDKTDDKDAVLIARLTAQLRCYLPEAVDETWGRLRHLGARRSQLIDTHTGCVQQVRDLLECVWPAALTSAQQPFKSVTWVAALAVLMGRDRGDFARTGRLGKDRFERLVRAEVVRRGRIKPCLRILNKLWTALADPAGVIAHRAGGFERIGWILDDWDAARANLVEVEHRMATALDQLGLTSLVTSIDGLSPVGAAAILAETGDLTRFTSARAIVKLAGLAPRERLSGTFTGKARLSGAGRPGLRTAAWRAVWGCLHANHVYAARYRHLTTRDQNKLKPTQAQTVIAAALLRQLWAVVTTGKAWDPARAANGLISLEEAIVA

SEQ ID NO: 341122 - protein, 461 aa, unidentified
MSRKRASGEKSGREKVDWKALEIVHPDAAGIDVGGSEHWVAVSPDRDPEPVRCFGCFTADLREMAVWLVEKGVRSVAMQSTGVYWMPVFEVLEEHGLEVCLVNAQHTKNVPGRKSDVQECQWLLKLHAFGLLRNSFQPSDEIRTARTLWRHRGNLVGEAASAIQRIQKVLVEMNVQLANVLTDLSGVSAMRILHAILKGQRDPRVLEALVEPGVKATRADIRKSLEGNWREELLFVLGQEVELYQVYQAKIAACDEQLRQHLKTIGSRVDLEAQPLGPRPKGKKGSRNAPEFDLRTELYRITGVDWAQVNGIDVLTAQTVVAEAGEDLHDFASEKRFTSWLGLTPTNEKSGGKILNRRTRKVVNRATVAFRNAASTLLRSQSYLGAQYRRLRTRLGAPKAITAMARKLACLFYRLIKHGQQYVDKGSQYYERRYRDQQIRSLLKRAQKLGLQVVIPELAAV

SEQ ID NO: 341123 - protein, 328 aa, unidentified
MNANEEVNVLGIDISKAKFDVALLKGKNKIKTKVFSNHPEGFAELQVWLNSQGVTNLQACMEATSIYGNALARFLFAAGYKVSIVNPSRPKAFGRSELSRTKTDRADAKVIARFCAALCPEPWTPPALEIEQLQALVHRLDSLMAMKQQEQNRLETVDSILVEAITAHIDFLKEQIATTKKLIGDHFDKHPQLKAQRDLLVSIPGIAEATATVILAEIRDVSTFDSADQLAAFAGLTPQEFSSGSSVRGKPRLSKIGNARLRQALFMPAIVARRYNPFIQALCARLLAKGKSKMSIVGAAMHKLLRQVFGVLKSQKPFDPNFLLTLSK

SEQ ID NO: 341124 - protein, 406 aa, unidentified
MSIYIGIDWSQDKHDVAFMNASGAIIARLTIPHQPDGFHKLETTRQQLAVTAAECLVGLETAHNLLLDYLWDHGYQEIYVIPPLVVKSSRGRYGHSGARDDTLDAQLLADLLRTDRPRLHPWRPDSQFTRQIRAHVGFVSYLTHAANRVHNRLRAALLRYYPQALELFSGLMVPTTLAFITAYNTPQALAALSYEAFATFAQQQGYWNRQGLLASYARLQHTPLQASPATVTVYQDEARLLAQQLRELILAKHQVQRNLNNLFAQHLDQAIFASLPGVGAFLAPALLAKLGDDRQRFPSVASLQALAGTCPVTMASGKRKRVAFRHACDHEFRQIVQQWARCSLHKSVWAVAYWQQVRPRCTSEHDAYRRLANRWLAVLWKLWQSRELYDEAYHLQQRRCRSQPLA

SEQ ID NO: 341125 - protein, 348 aa, unidentified
MKNITRVGVDIAKSVFHIHAVDGHDKQVWQAKLKRDQWLAALTERLAPGAEVGMEACASAHHWARELQRRGYRVKLIAAQFVKPYVKSNKNDLVDAEAICEAMSRPGMRFVAIKSVEQQDTQAAHRIREELVAQRTAKSNQIRGLVGEYGIVAPVGIHQLRRALPQWLEDAENGLTDGFRALLADLAADLRYLDDRITHLDQRIEASVKKDPVARRLLELRGIGPLTASALAGALGDGSAFPKGRDFAASLGLTPRQHSTGGKERLLGISKRGDSYLRKLLVHGARAVIHHSKHRDDGLSQWLQALSTRKHKNVVAVALANKTARVAWALVRNDIAYDPSLISGGQAI

SEQ ID NO: 341126 - protein, 368 aa, unidentified
MQELITGFVGLDAHAESTAIALAEIGRTAPRFVGTVGPRIAELTKALGKLGKPQGLSVVYEAGPCGYVLARELRSLGYRCEVVAPSKIPRRPGERIKTDRRDALNLAGLARAGELVSVTIPDERDEAIRDLSRARVDAVRARLKARQQLKALMLRHGRRYSGKTSWSAAHERYLATVSFAHRAQDIAFTEYRQAVSEGQARVQRLSQSLTQEVEHWRMHSLVSAVMTLRGLDLVAATTVVAELGDLRRFAHPRELMGYLGLVPSEHTSGSKRRLGAITKTGNSHVRRVLIEAAWNYRYPARISRALQVRQERQPTEIRAIAWRAQLRLNHRYRRLKARGLQHNKICVALARELAAFVWDIARHVTPSP

SEQ ID NO: 341127 - protein, 423 aa, unidentified
MNELTLCVGADVHLDEIVLRAVDKTDGHEVLERFHVTNNLPGAQSAATTLAHAAAQHGYTHLEIGWEATGLLWVPFHRFLSTSPLLQPFTPELVCFNPKLVANFKDGLVLRRPKNDERDAWDVAARVRFGEWPVSYVPADYWQGLRRLTRYRYQLARNLSREEMRFQSYAFLKASDWKRVKPFSSVFGATSVALLTEFTIAELTALSHDQLVDIITHRGHGRFEDPTATARAVQEVLRTSYPIDPHMDEMVTATLATGWEHIRYLKRLMKQLDQRIARYITPVPNPLITVKGLGAVITAGILAEVVDVTRFPEHKHVAQYIGLTWEKRSTGNFVSQNTRLTKVGNVYLRYYAILGAEQLRRHNLEYQAYYWRKYQEVAKYPHKRALVLTARKFVRLVHALLTKNQPYVMRHAAPESEEPLESA

SEQ ID NO: 341128 - protein, 330 aa, unidentified
MQYLGIDISKNKFDCCIFLNNQKKKTKVFDNNHSGFIKLNEWLQKLEIEILELVAVMEATSIYHENLAYFLYSNNIKVCVANPARVRKFAAGISVLTKTDEVDAEVLVKYGELAPYNIWQPDSDQLRLLKQLLLRRDAYTSELNRERNRLDQAYSNNTNSKLIEIIQLDIENINNRIQYLDKLIDETIDDDISLKQDLCLLESIPAIGKRTALTLLTLFKGKSFTNAGQAAAFCGLIPLQRQSGSSIRGVSKISRSGSSKIRSKLYMAAVVAIRHNPHIKIVYDRLLRNGKAKMAALCAAMRKLIHIAFGVLKHQKPYNENLIGFAKIPC

SEQ ID NO: 341129 - protein, 340 aa, unidentified
MSLVLQSLLPYPDSCMGTSPHQQGWDTKMEKLSYGGIDVSKDRLDVVVLPEERFFSVSNDAAGWAELVARIRPLAVSAIGIEPSGGYERGIIRALLAAGLSVRRINPNKLRQFARARGVLAKNDRLDARLIAEYVAIMPTRVVQRDEAVEKLAEVVTMRRQLRDEHVTVENQAAHIEDAMLRRLNKRRLARLEADTRLLDKRLAEMVATNAALAQRYELLTSMPGVGPVLAFTLIALLPELGQMSRKQIAALVGLAPYDFDSGKLRGHRSIYGGRMPVRNVLYMAALSGCRYNPALKAFHKRLAAADKKSKVVIVAVMRKMITTLNAMLRDNVEWQPKSA

SEQ ID NO: 341130 - protein, 433 aa, unidentified
MGLIVPTTIHPEREDQPLPYEWFVGIDWGSQQHQVCILDRDRRLVGERTVDHDGASLAQRAAWLWTVSAGHPQRVAVALEVPRGAIVEGLVERGFHVFAINPKQLDRFRDRHSVAGAKDDRRDAFVLADSVRTDRPSFRRLQLDAPHLLLLRELSRVEETLLEEFRRSANRLREQLHRFYPQMLQLCSAADEPWLWDLLHLAPTPAHAMLLSEAQVQRVLKAHRLRRLKAPAVLACLQAPALPVAPGTAEAAQAHCGFLLPCLRVLAEQLQTCSQQVSALLSTLAEEPGEGESPSDVAMVLSLPGVGRKITAWLFAEAAQPLAERDYQVLRTHGGVAPVTKQSGKRRQVVMRHGCNPRLRHALYHMARVAMQRDAHFSSVYAALRAKGQRHGQALRNIGDRLLRILMAMLRHRTCYDASRIRCAPVAQMGQKM

SEQ ID NO: 341131 - protein, 403 aa, unidentified
MNSVGIDISKGRSMIAVMRPFGEVVISPFEVRHTDSELSELARQLKSLDGETRVVMEATGNYHTPVAKLLHDAGLYVSVVNAKLVHGYGNNDLRRVKTDKKDSVKLANYGLDRWLTLPRYVPEEDTRLLLKNCYRQYRQYSKVQTVLKNNLISLLDTVFPNVNRLFSSPIRGDGSEKWVDFVAEFWHCRCVSEKSQKAFTNKYQRWCRKHGYNFSEAKAHTIHAEACGHIDVIPKSETTKLLVEQAVAQLRATSAALAALKHEMQSLASVLPEYPVVMDMFGVGSTLGPQLIAEIGDVRRFYSKKALVAYAGLDAPPNDSGDVTGRHKSMSKVGASSLRRTLFLVMSVYLQNAPLDEPVYQFMDKKRAEGKPYRVYMMASANKFLRIYYATVKAYLESLEHTA

SEQ ID NO: 341132 - protein, 346 aa, unidentified
MENDTLVAVDIAKEVFEIGVSDRPGRVAARRRLARCEFLEFFAQLQRATVVMEACGSAHYWARRIEEFGHVVILLPPQYVRPYVVRNKTDRTDVNGLLEAYRNEQIRPVPIKNVTQQVLGTLHRLRSGWLADRTRAINSLRGLLRELGFFIPEGRKHVLPDAWEIIQDPKRGLPDALKPSLSSLCQEILSHSTRIEEIEAQLEALAKQVPVVARLRSVPGIGLLTATALYAFIGDVSRFPSGRHMASFLGLTPREYSSGLRRRLGRISKRGDTYLRMLLIHGARSILWHAKRMKNRDRLRAWALRLERKLGHNKAAVALANKLVRITWAVWKHDRSFEPVPELQAA

SEQ ID NO: 341133 - protein, 333 aa, unidentified
MHYVGIDVSKRSLDVCLLAEGSKGSRKTKTLSNGQDSAQNLAKWLILQKCELSQTHVIMEATGIYHEYLACGLHQMGILTSVITPCRSREFAKAMGIFTKTDAVDAYVLAFYGCLKQPEAWTPPEEEIRKLRALLQHRDSLLNDKLRIDNRLNTLKSTEAVQEVMDSLSLVNQYLKSEVARIERLISSHIAQHPGLKRDLKLLMSIDGIGKQIGWNMLAVLRGNNFKSAEQLAAYLGVVPVERRSGTSVHGRARLSKIGSSNIRAKLYMGALTATSKNSHIKALYERLLAKGKMKMSALGAAMRKLVHLCYGVLHTQQPYDEKYKAKIINFSS

SEQ ID NO: 341134 - protein, 346 aa, unidentified
MTIVEGTRAVTGGVDTHLDVHVAAVLDDIGGLLGVESFEATAAGNDKLLCWLRSFGPVGRVGVEGTGSYGAGLARFVRAAGVEVVEVDRPNRQARRRTGKSDPADAVEAARAALSGRAQGAGKTRDGNVEAIRALVVVKRSARSTKIKTLNQIRHLGFTAPDELRERFRGVSRQRLGAVAAGLRPRAGSDPVAFATKTALSILGRRVLALDEEKERLDGLLAELVTNTAPALVELHGVGVDTAAALLVAAGDNPDRLRSEAAWAHLCGVAPIEASSGKVTRYRLNRGGDRKANSALWSIVITRLRSDPRTRAYMQRRLTEGRSKPEIIRVLKRYVAREVYRHLPRC

SEQ ID NO: 341135 - protein, 343 aa, unidentified
MQIARIGLDLAKYVFEIHGVDAHGTTVLRKTLRRHAVSTFFANLPPCLVGVEASNGVHFWAKTLLDLGHDVRLISPQFVTPYVKSNKNDRNDAEAICEAVGRPNMRFVPVKSAEQLAVQAVHRIRTRLVADRVRLVNQVRGLLGEHGIVVAKDIGNLRRALAGLGDNEDRALNPMVRALMGELREELTELDARIVGYDRKIRELYRNSEICQRLGKVEGIGPVTATALVAAVGDRSSFKNGRQFAAWLGLVPKQRSSGGRARLFGISKRGDRYLRTLLIHGARAALGRVRDKQDPRSLWLGKMRQRRHPNVVAVALANKNARIAWSLLTSDNVYDASLSVGAA

SEQ ID NO: 341136 - protein, 340 aa, unidentified
MNIKRIGLDLAKNIFQIHAVDHHEQAVLRKTLRRDRMMAFFSQLSPCLIGIEACAAAHYWARELTRMGHTVRIIPPQRVKPYLKGQKNDANDAEAICEAISRPGMRFVAVKTERQQTLQAEHRVRARLIRARTALSNEMRGLLGEFGLVLPVGIRQLRKALPEILSQQEQWDDRFIRLLGELAEELQILDERVARHDRRLEQSARDDIRIKRLLTIEGIGPVVASALVAAVGDGRQFKSGREMAAYLGLVPRQHSSGGKERLGHISKRGDSYLRTLIIHGARAVLNACQNKTDRRSQWLQALSERRNRNIATVALANKNARIAWAILSGEKEYHGQQGAG

SEQ ID NO: 341137 - protein, 330 aa, unidentified
MENCIGIDVSKSSINVHISKNAQDLQVDNSIKGFKTLYSKLKKIHKKEIDDIVFIFEPTGSYSEALRRYCSHQKIKCFIINPKQFSNYAKALGVEVKNDVEDARVLSRSLHIAKEGQVKVPVYDEDVERIKELMSYYKFTTRQTTQQKNHLEALESKDGDTFAIKELKKSIKSSKEKESRIIEQIQIIIDANEQYKNDYENIISIMGIGHIGAIALLHLFLKYPEANQRQITSLTGLNPIYKQSGSSIQSGYRIAKTGAKIYRGSLFMAAMSAIRYDANFKAFYERLKANGKHTTQAQIAVMRKLIITAHSLYKNNRKYNVDFHRNEAVL

SEQ ID NO: 341138 - protein, 353 aa, unidentified
MSEITRVGVDLAKNVIQIHVVDASGKLVTNRALPRGNFMAWCAKLPPGCLVAMEACSGAHHWSRKLVALGLDARIIAAHLVAPYRLQGKSGKNDANDAGAVCEAASRPSMRFVPIKTVAQQGMLCVHRLREGLKEDRTACINRIRGLLAEFGLVFAQSPEVLERALPDVIEDASNELAGMARLVIERAKEQWRELDEHIAWCDARIAAHIKLDAQAKAAMQLQGIGPITASALVATVGDFKQFKNGAQFGAWLGLTPSQNSSGGKNKLSGITKRGDMYVRSLLIQGAKSAVMTAQRRDDPISRWVYQLRLKSGWQKAVVALANKNARILWAVMVKDKPFDASHVSVKPLLAAA

SEQ ID NO: 341139 - protein, 388 aa, unidentified
MHTTGRSAQPTTIRTDLGAIVVSLELSRSIWLITSLSPGNGEKISKHSVSAGDLAALFARFSKLREKSRTKTGHNYPIVCIQEAGLDGFWVHRVLEKEGVESHVVDPASITTSRRRRRAKTDRIDGEALLRTLMAYKRGEPRVCAMVQAPSPEAEDHRRICRERKALIVERVAHVNRIKGLLFSQGIANYEPLGKDRRERLDVLRTGDGRALPAHMKAQICRELDRLELLLKHIKVVEDERDALITAEAAASKPSPVTMLLGIKGIGAEFAAILWSEGLFRHFDNRRQVAAYAGLAPTPWQSGSVDREQGVSKAGNPRLRTTLIQMSWLWLRHQPDSALARWFTERVQRNGGRMKKSTIVALARKLLVALWKFVAAGVVIEGVVMKNA

SEQ ID NO: 341140 - protein, 353 aa, unidentified
MERFCVGIDVSARKLDVAWRGNKGRVERQTFENESAGHGELVQELKKRASGRMIRVVLESTGVYGIDLALALDRARFEVMVANPRASANFAKATMQRSKTDRLDSAMLLEFAEQMTFRRWQAPSLANLQIRSISRRVYAVMMTIRDEKYRMHAANQVDGMEVVKKSIRATIKALEKQVRELRAAALALIQSDAVLARRNELLLSVKGIGQISAIAILAELAILPADMTDRQWVAHAGLDPREVESGTSLRIPPRISKRGNKYLRAALYLPARVACRFEPGVADYAARLRERGKKPLQIHVAVMRKLLHSIHAIFNRNEDFDGRLYYLKPAAGAVGTSGIAPSAISEVSTALSA

SEQ ID NO: 341141 - protein, 338 aa, unidentified
MCNSIIGLDIAKNVFHLFTLQSNGKTMKKKLKRAELLTFFATYPASVIGMEACGGAHHWARELTRLGHEVVLLNARYVKGFIVGNKNDFNDAEAIFTAVTQPNKRVVAPKTIEQQDIQMVHSVRSELIGRRTALVNQIRGLLSERGIVINQGIRHVRSHLPLILEDAENNLSALSRELFAEQYEKLKTLDREIKEQDQRIARLCSANQLSQRLLEVPGIGPLAATIIAADIGGNSKGYKSSRDYAASLGVVPKQHSSGGKQILLGISKRGNRYIRTLLVHGARSVLRHCTDKTDKLSLWLQALIGRRGFNKAAVALANKNARILWAMANSDKDYKAFA

SEQ ID NO: 341142 - protein, 345 aa, unidentified
MPIVGGLDIHRKQLTFDYLDTVTGEVKRGQIAPADRVHLRAWLARFAGRDDVAFAVEGCTGWRYVAGELAAAGIAAHVGEPADTAAARGRKRHAKTDKTDSAHLRRLLAEGRLPECWVPPAQILEYRALLETYHDVRAEHTAWVQRIHAVFFHQGAPALGEGALRTEQGLAALREAAAAHLSPAGQLQVATALDMLAAVEARMEVLRTQLRYAARHLTGAKVLAARLYGVGPITALALTCWLAGEGRFSSSRKAVRFTGLDITVWSSDRKGPPGRLSRQGPPVLRWAVYEAGKTHARSSAPDHAYYAAVKDRKNSKRAALSEARKIVRQACHILTELGDDALTAA

SEQ ID NO: 341143 - protein, 348 aa, unidentified
MKPKMEFDTASLAVIGVDIGKEVFHLVGLGVDGKIAFRKKIRRLGLKDAFEKLPPCIVGMEACLSAHFVSRALRALGHQPRIIPAIYVKPFVKGQKNDYNDAEAIAEAALRPNLRFVQEKSQDQLDLQACHRVRSRLVSRRTATINQIRAFLIEQGIAVRSGLRTLRKSLFAILENRKDEISPRTAKLILGLYGDWCGLDERIEAVTSDIEEISRIEATCQRLMSVPGIGPLISTGLVAAIGTGEAFERGRDFGAWLGLVPRQYSTGGRSILGRISKRGSKYLRTLLIQAAKVLLMRPHSWPRYKLRRVAEDGIGAIAQEQARRRLGQQTRPYRLERPAPRQGLRYPS

SEQ ID NO: 341144 - protein, 341 aa, unidentified
MKKFIRIGVDLAKNYFQVHALVSDVGPAVTRKLRRSKMHEFFSQIEPSLIGMEACGSAHYWARELKAMGHEVLLMPPAYTKPYVKRGKNDAVDADACCEAMSRPGMRFVPVKSAEQQATLMLHKTRELLVKQRTMSVNALRGHLSEFGIIAAKGIGRVDELLDLVESDTTLPNAARASAKVLAQALEGLDKAIDDLEDEITNAQAQNEMTRLLYKVPGIGKIIASVIEASVPDPSVFKSGRDFTAWLGLTPRQNSSGGKQALGAITKQGNRYIRKLLVLGATSLLNVVGKRKGALRDWIVGLLAKKPARLVTVALANKLARILWAMMKTGESFRAEIFAKA

SEQ ID NO: 341145 - protein, 313 aa, unidentified
MDHSVVVGCDVSKLWIDVCCVDTSGARMQRVANESAQLQRWAKLLPGGCRVGMESTGTYHLALASALVQAGHTVYVINPRWIHAYARSVGQRGKTDRSDAALIARYIESEARHLHAYIPPSPEQAQLRRLLLRRQELVKLRSATRQSLGQEAAEVLKQFNRLLRNLEKQICSLMDAQSAWRDLARRLRQIPGVGPLVAAHLVQVLTRFAFARADAFIAHTGTDPRPNDSGQKRGRRRITHHGDAALRQMLFMAAMGAIKRAEWRCLYDAYRSRGLPSTAALVALARKLARVAWHLFKCAEPYDPCKVHAAANA

SEQ ID NO: 341146 - protein, 475 aa, unidentified
MNIKGTKKKNQVVTANIFEQQELLKKSEVIKENLTASTWRELETNGKFDKNKKLSFISDDMLILGCDVGSETHYMRAIDTRGRELSKSAYSFNNNQEGFQSAKEWAVRIAAEHDKSQIVLGLEPTGHYWFCLATWMITNGISVVQVNPYAVKQTKEVEDNSQLKDDRKDPKLIANLVKDGNFGMPYLPEKIYAELRRLSMFRDQLNEDRIRTINRMHREMKIYFPEYKDALGKVDGAFSLELLKEAPFPEELTALGEEGIRQIWHAAKLRGRGYSRAREILQYAKASVGIKDGSIASKTAVKWFVQKIMELDVELAVIENQINQKCQEIPHTGNVLEISGIGENTLSGILAEMGDISRFDDVKEIQKLSGLGLVACSSGKHKGETKISHRGRKRLRYWLFQAAKSAVAHAEEFKELHMYYTTRADNPLKKMQSLIVIACKLLRIIYTILNTGTKYAPKKMLMDIRRPENKEAIVA

SEQ ID NO: 341147 - protein, 416 aa, unidentified
MEVIVSRCAGLDVHKNTVMACVRAPGPNGGRTSTVRQFRTFTAGLRQLRDWLVAEQVSQVVMEATGVYWKPVWHVLDATPGLELMLVNAHAVKNMPGRKTDVADAVWLAELGECGLLRPSFVPPPVIAQLRDLTRYRKKLIEERARETQRIQKLLEDAGIKLDSVVSDILGVSARQMLEALIAGVRDVAALAELARTRMRPKIPQLRQALEGRFGAHHALMLRMHLEHVDQLSVSIDRLDSEVDRVIRPFSSALQRLITIPGVGRRTAEVIIAETGADMRRFRTAGHLASWAGMCPGNHESGGKRRSGRARKGNAALRAALCEAAWAASHARSGYLPAQYRHLLRTFGKKGQTRAVFAVGHSILVIAWHLMAHDRDYADLGGDHFTRATDAEARERYLVRQLEALGHKVTLEPAAA

SEQ ID NO: 341148 - protein, 342 aa, unidentified
MKKASIIGLDLAKRSFQAHGALADGSVAFRKTLTREKVLGFFAERPRCIVAMEACGSAHHWGRAIRDAGHEVRLIPPAYVKPFVKRQKNDAADAEAIAEAASRPTMRFVAVKTAGQQARAMLFRTRDLLVRQRTQLINALRGQLSEHGVVAPQGPANVAILAQAIDDMTPSLPLLVVELARVYLDQIDGLSEKVAGLEKAIACEAKRGAMTRRLQTMPGVGPITAMAIETFAPPMEVFRRGRDFAAWLGLVPLQHSTGGKQVLGKTSKMGQRDIRRLLITGAMVIVRWACRKGAREGTWLHRLLGRKPRMLVAIALANKMARSIWAMLTKGEDYRGPVAATP

SEQ ID NO: 341149 - protein, 403 aa, unidentified
MPITKSPPKQSTAELPTLGPKGRAVGLDIHPDTFAAAILSGRDPLSARAVHSVTRQPLDALCAWAARHTTQDDVLVIEASANTFTVAERLAAIDRQVFILESHRAGQIGKSYLANDKVDAAKIARIYLSGLAIKVWQPDPETRQRRELLSTYQRCVKESTRAQQHLRSFLNEHALRLPKGFRLCRPEALPRLLTLKDWSTRQKLLLQEMHGSLIATRERRQRLRRMMALEIEEQPDFLRLYKLAGLNLITTYALVAIIGDIERFATSKKLVSYLGLNPSVEQSGEFEGSGALHGHGRGSLRALLIQASKRLLTTHNPLQKWGLSVALRRGLNKAAVAVARKLTVAVWHVLKGHWNQLLDETTTLLTKLTKLATELGVQTLKELGYASKIAFQEQKLHVLRTHP

SEQ ID NO: 341150 - protein, 345 aa, unidentified
MKHYAGLDVSVKETSVCIVDEAGDICREVKVASHPEDLVQVLKDPVWPLERIGLEAGPLSQWLFSGMVEAGLPAICIETRHTKAFLKAQVNKSDRNDARGIAQMMRVNLFRPVHVKTLASQKHRALLTARKLLQEKAHSIENDIRGLLRNFGLKVGAVGAVKFDERIRELVEDVPELADIMGPLLTSRKQLRGAFMTLHRKLLSIVRDHAVCRRLMTIPGVGPVVSLAFSSTIDVPARFKKSKAVGPALGLTPVLNQSGESHRVGRISLCGDDMMRHLLYEAAQVMLTRVLKWSWLKAWAMNVARRRGRQKAIVALARRLAVIMHRMWIDGTEFRWTREAAPAAV

SEQ ID NO: 341151 - protein, 348 aa, unidentified
MTLYIGVDFHPHQQTVCWCDLETGEIRTRTLFHNTDELTKFYQAMPPSTVGIEATSKWTWFENLLFDNHHKLIIGNPSVIRKRAPSRHKNDKRDARHLFDLLIKNEFPTLWQRPPESNEVLDLMRLRHNLVKQRTQTGNRLQALAHQAGLPKGKIGSAMFQALLKQVELGSNFALQRKMLFEMWDNFNRQIKELDSDLEEKAAQNELVKLLRTQAGVGCLTALCLVHTVGDISRFDKPTKQVTAFVGLDPLDQSSGSKIKFGSISRAGSALLRFLLGQATQSVSRFDTKLKAKYRQLSKKKHRSVAKTAIARKLLVKLVIMLRDSISAQEFDERGRTVGNARGAQGLK

SEQ ID NO: 341152 - protein, 452 aa, unidentified
MSNKTKVDWKALDIVHPHAAGIDIGGSEHWVAIAPERDQQPVRSFQCFTADLEQMADWLVDRGVRSVAMQSTGVYWIPVFEILPQHGLEVFRVNARHTKNLPGRKSDIAECQWLLKLHTFGLLNNRFQPSDEIRTARTLWRHRGGLVAQASSAIQRMQKAWTEMNIQLANVLSDLSGVSGRRILQAILKGERDPKVLATLADPNVKASRTVIAKSLQGNWRDELLFVLQQEVAMCRMYQERMAACDQKLQGQLQAIESKVDVAAQPLGPRPKGKRARGNAPQFDLRTELYRITGVDWTLVDGIDVPVAQSVIAEVGVDLSAFPSEKHFANWLGLCPTNQTSGGKVLNRRTPKVVNRAKIALRQAASTLIRSQSYLGAQYRRLRTRLGAPKAITAMARKLACLFYRLLTHGKPYTDKGAEFYEAKYREQQIRFVLHRARQLGLEAIQPTKKLA

SEQ ID NO: 341153 - protein, 440 aa, unidentified
MPFDAAPQSFPVAIELSASSWVVAARVPGRDKCRLFRCEAGDTGELARILDEVARLAGPAASPAVCFEAGRDGFWRHRWLTDRGVAAHVVEPTSILVRRQARRAKTDRLDAEGLVRVLAGWLAGGSGICRMVGVPTVGQEDAKRPHREREQLVQERTRIENRLLALLATRGIRRRPSLRNRTAAAAARRTGDGRPLPPHLHAEIERLRRRLGLILELPREVEADMAEAAAVTADPTADPTADPTAGKVAMPRRIRGVGANFAAVLAREVFYRRFAGRRRLAGYAGLTPMPFQSGSVDRDRRIRRAGNPRARTTMIQPAWPWLRYQPGSALAGWFRDRVGALAGRIRRIAIVALARKLLVALWSFVETGAVPDGIVVSPRPAHQAARRSRRTRPRPTRRGARPSSSMVTPKLPRGRLVAPTEEHASCTRHDGPGPRRPRRL

SEQ ID NO: 341154 - protein, 321 aa, unidentified
MQTVPVTVYAGVDVAKASLQLHLQGRQAEFTNQPAGLAQLCQKLKTIPHVHVVCEATGGYERLLVQAMHQAQIPVSVTNPAQVRAAAQAQGKRAKTDRIDAALLTDYGQRYQPKPTPPTTSSQDQLVALTQWLTQLVQAQALAKTQAEHHEAAFVRARHTKLMAHFKSQIAAVEKQIRALLAQDAQLKQRVDCLDEIKSVGPRTAWLVLAHMPELGQLNRQEVAALAGLAPWTRESGTMKGMRCIGGGRPEVRLALYMAALCAARCNPVLQPFYQRLRAKEKPAKVALTAVMRRLLVYMNYQIKALQAEQPAMQIDHAKIP

SEQ ID NO: 341155 - protein, 609 aa, unidentified
MLPQPTSAPPPRDAKIVRIGVGIDTSRYGHYAAFLREDLQPAAGELQFGESAAGYAQLRQRLEHIAAKHDQVHFAIRLDAAGQYADNLLHFLHGLATQLGTRQADAAPHAEVAISCGDPQRNKNYCAAVFGKKKSDPIEARAVARYAINERPAPVKVLPAELRAVRQVAGRLQAVVRQRTRLINQFHHLLALSFPELALFVKDISIGWVLELCSRYPTARRLAVASAEDIESIPYLPHAQAQPLLASARASIASLNDDTMAELVRDQVRQLRDVNARQKRLESTLIAAFRALPEPNHIDTIPGIGDVTAAILTAFILDIDRFETPGKLVNYFGAMPIEASSGIDRDGNPRGPKRYVMSRRGNDLVRRYLWMAALSAVRYNPAVRALFARLAAKHPDKKAMALGHAMRKLLHLVFAIWKTKKPFDKEHYPWHTPTHVNVKTLIDEYKNAPVPDAPDARCSGNAPATEQAAGLKLTAEPARKEVTAACTENVVQGGAAGEARYIDFAHVKKQLPMARVLEHLGLSARLRGPSAQRRGACPIHRADLRGRTFSVNLDDNVFHCFDPGCQKKGDVIDLWAALNQQSLREAALDLVQTFDLEPAPRKRTEKRNG

SEQ ID NO: 341156 - protein, 414 aa, unidentified
MSQKIYLGIDLAKGTSRVAAVDEDGNEVCNPFSITNSKEGIQKIISKLFSYTKGSIIAGMEVSSNYWENVYSYLRQKDISCVLLNPYQVKKYRQALGSRIKTDSVDAASIANLLRAKNYDSICISDDKVLELRELVRIKHSFERRVKDLKKSVLALLYLTFPEYTKVISYPFSKVSMQILSKYPTSCHMGQNASVSKLVKIFRRYQGCNFGTDKAKELIAAAKDSFYSGKAFHSRGMSISMQIEEIASLTGKIKDIEAEIKSILDPDDPKDGAKLGFDILNSIKGVGIGTIAAFIAAVGDVNRFPNSDKLVSFIGFYPKIFESGKYKKKNPSIVKAGPKDLRYMLYLTSVAAIKHNSHLAKYYHDRVSAGMPAKKAIIKVAVKISRMMYSMLKNKQYYDSNRVFLQQIPSTVAA

SEQ ID NO: 341157 - protein, 323 aa, unidentified
MSTKATKKRRSFIGIDVSKKLLEVGVHQSDYHFRCPNDPKNFPALITELISLRPARILLEATGGLERALLQALHAAGLPVVVVNPRQVRDFAKALGLLAKTDRLDARVLAHFAAAIQPAIRPVKAQQETELDALMGRRTQLSDMLVQEKNRRGSAATKDARDDIEEHIEWLEERIQELDEKLKEQLKCSAVWQQKDKILQSVKGIGFVTSLALLADCPELGQLNRHQIAKLVGVAPLNRDSGQQRGARHIWGGRAQVRSKLYMATLAAIRFNPVLKSFYQRLLAKNKLKKVAIVACMRKLLTIINVMIRENKLWNVKAQPVSA

SEQ ID NO: 341158 - protein, 312 aa, unidentified
MQSYNNFIGIDIGKFNFVVAIYGRKLFKEYENTPSGIEKFINEFAEELPTALCVLEPTGGYELGLLLALCERNYAVHRAHTRHVKNFIRSLGNGAKTDNLDAYYLSLYGYERSRTLTKFCFQSPESTRLYELVHRRRDLKQMLVAEKNRYQSPRSESVKDGIKMHIDFLENEITIITNEVEQLIERDLILKEKRKILKTIPGIGNIVSFELLISLPELGQLSRREIASLVGVAPISRDSGKYKGYRRTGHGREGVKPMLYLAAMAARNSNSHLKVYYESLVERGKCKMVALTALMRKIIVIANAKLKNLAMT

SEQ ID NO: 341159 - protein, 338 aa, unidentified
MHITTLGIDVAKSVFQLHGVDARGRAVLSRRVKRDQLLHTVANLPPCVIGMEACGSAQHWGRAFEPLGHTVKLMHPKYVKPYVKTNKNDGRDAEAICEAAGRPTMRFVSIKTQEQVDLQAVHRTRSLFVTQRTALINQIRGLLAEYGLVIGQSPEKVRPALVRFLDDAASGLTACARETFSELYAQLQELDSRIERVTHRVERVSRAHPVCQKLAAVPGIGPLTATALVATVGRPQAFHNGRHLAAWLGLVPRQYSSGGKERLGGISKRGSRYVRTLLIHGARAVVQRAERRTDTQGRWLCALKHRKGTNVAAVALANKNARVIWALLAHDEAYRPPA

SEQ ID NO: 341160 - protein, 344 aa, unidentified
MQNSNVIGIDLAKNVIQVCKIDKHGELISNRAISPSKLKELLAKSNPSIVAMEGCGACHYWARLAQKYGHDVRIISPRKVKAFLQGHKTDANDALAVAIAATQFGMVFSQIKAEEQQSLQTLETSRKFLDKELTALNNHLRAYLYEYGITMNRGQKSLRETIVIVLDDLDTRLPQCLKNTLKTLWERYQLTVFQLKETEKYRAALVKQLAPCKRLMELEGIGEVCAAMLYASIGDGREFKNGRQASVYIGLTPKQYSSGGKIIMLGIDKRGGNKPLRAALYQGALSVISRLPSEPRTAKEAWLLKLVERVGVKRACIALANKTVRTAWALLATGKSYEPVLLSR

SEQ ID NO: 341161 - protein, 355 aa, unidentified
MKNQAIQYLALDVHQATIVASVREESGAVRMRATVPTEARAVVGLIKGLGPRVHVVFEEGAQAQWLHDLLTPHAERVVVCNTRGKSETKIKNDRLDADDLSERLRLGTLKTVYHGSPGLATLKELVRCYTNLVDDSTRVMLRLKAIYRGRAISTSGEAVYRPSQRKLWLAKLNTAGARARAASLLTQLDVLLELRQKCRAAMIAEACRQPGWKILRTVPFFGPVRVAIILAVIATPFRFRGKRQLWPYVGLGVITRTSSEKEFVDGKLRRKKRAPLTRGLNRNHNRQLKNVFKGAATAAAAKPGPLKDIYDRCVAGGVPREMAKLTLARKLASVALRLWKKGELWDPEKLTMQAT

SEQ ID NO: 341162 - protein, 304 aa, unidentified
MSKDRLDGHVRPEGRKFSVPNAEEGIERLVADLKVMAPELVVLEATGGLEMAAVSAMAAAGLPVVMVNPRQARAFAKAIGRLAKTDGIDAEVLAQFGEATRPEVRPFKDEQTQELTALVVRRRQIIDMLTQEKNRHTRAPQSIRPDIRINIRWLEQRLAEIDRQLNKTVRNSPAWRHKDDLLQSVPGVGKVLSFTLLADLPELGTLNQRKISVLVGVAPLNRDSGDFTGTRRIWGGRAKVRHVLYMATVASLRHNPVIQAYHQRLIHAGKKPKVAIVAAMHKLLIILNAMVKNDNVWRGDPATV

SEQ ID NO: 341163 - protein, 423 aa, unidentified
MQNTAARKRKQVPEGYLVVGVDPHKKRHAAVAITQDFTIQAKFKFDNTREGLEAMLGRAKVEMVKSGCRGVMFAIETGGHYWRNVAYFLDEHGIPFRFINQFTLKRRREGKDLNRRKNDYRDSEVAAQLLCTGEFTESKLPQGVYAELRTAHNAYRRLVKERTRITNLVKGLLDALFPEFTQVFKAPCGLTALSILSTCSIPSVIARMTEDEFVATIEAQHQGRLMRRKLRALHYSARTSIGIDAGACSLSSEIAFLVEKLELIRGHICSIERTLVRLVDETEEGKYLLSIRGLNYIAVAGLLAELGCFKAYQSARQMIKMAGTNPTESESAGKKRARTPMSKQGRPVLRYCAWTSVIPMLRFNSDFRAWAKQRRERPVHANPLGGREVVGAALNRLLRLAFAMVKNKTYYQVSKAELTLVAV

SEQ ID NO: 341164 - protein, 309 aa, unidentified
MGTFVGIDVSKDRLDVHVLPQDEAFAVDRNGKGLAELVERLKPFAPSLVAVEATGGFEVTTAAAVAGAGLPLAVVNPAQIRHYAQALGKRAKTDPIDALVIARFAADVKPDPRPLPDEQTQLLAELVSRRRQIVEMIQSERQREKRITLKRLRKSIARVVATLEKELVEIDSEIDDNVRGSPVWREKEDLLASVPGVGNQTARTLLAELPELGTLDRKRIASLAGLAPYTRQSGQWKGKSMIGGGRASVRRAVFIAAMVAGQHNPVLKAFRDRLVAAGKPKIVALIAVARKLLTILNAILRDQRPWQIA

SEQ ID NO: 341165 - protein, 458 aa, unidentified
MTKKSSKKAKSQRSREQALLKKVHLNAAGIDIGADTHWVAVPEDRDPRPVRSFGVFTHDLRALCGWLKECQIQTVAMESTGVYWIPLFQLLEREGFEVQLVNARHVKNVPGRKSDVKDCQWLQQLHTFGMLRGSFRPQAQMCVVRSYLRLRDTLSKDSNSLVQRMQKALTEMNLQIHRVISDITGLTGMSILRAIVAGERDCVKLAQLKHPQIRSSAQQIAKALEGDYCPEHLFALQTALELYDSYQLKIMQCDKHVEEVLGAFEAKLQVAAPDLSRLRSAPKRLEALRRHHLEQIAGADLTKLPGLDVLAVQRILSEVGLDMSRWPSEKHFCAWLNVAPNNRISGGKILSTKPRKNANRAAAALRLAAQSAMQSKTAIGAFIRRIKIRLGAPTAINAGAHKLARLLYRMLKYGKAYLETGQETYESLFKERTIRNLQRKARELGFHLTPLTPSAVVS

SEQ ID NO: 341166 - protein, 353 aa, unidentified
MKPKTESDTALPMVIGVDIGKEVFHLIGFGGDGKIVFRRKIKRLGFAAVFEKVPPCIVGMEACLSAHFVSRTLRTLGHEPRIIPAIYVKPFVKGQKNDYNDAEAIAEAALRPNLRFVQEKSQDQLDLQACHRVRARLVSRRTATINQIRAFLIEQGIAVRSGPRALRTSLCAILENRKDEISPRMARLILDLYKDWCHLDERIDTVTGEIEELSRVEAKCQRLMTVPGIGPVISTGLVAAIGSGEAFERGRDFGAWLGLVPRQYSTGGRSVLGRISKRGSKYLRTLLIQAAKVLLMRPHNWPRYSFGAWLKTASERLHRNKLAVALANKLARIAWSVLRHDKAFDTHLETAAI

SEQ ID NO: 341167 - protein, 346 aa, unidentified
MGMDIAVLGVDLGKNVCCVVGLDPSGAVVMRRKMRRETLVALAAKLPTCVIGMEACCGAHHVGRVFSAHGHDVRLMSPEYVRPYVKAQKNDDRDAEGIAEAATRPTMRFVELKSQDQLDMQTLHRSRDRLVGERTALINQLRAILLERGMVAPQGKRKLEEFLRVLMDEQGGAGLSPRMSLLVADARAQWTELDRRIAAFDTEFVRWVKENEEARRLTTIPGVGAIVASALVAAIGHAESFERGRDLAAWLGLVPRQFTTGGKPKLLGISKRGNKYLRRQLIHGARAALPYVAERDTPLGRWAKGLMSRAHRNVAVVAFANKLARIAWAVLRRNERFAPTGRTMAA

SEQ ID NO: 341168 - protein, 343 aa, unidentified
MQTVTTIGLDIAKSVFQVHGIDGNGTVVIRQQLRRSRVLPFFKKLAPCTVGIEACASSHHWSRELQTIGHSVKLMPPAYVKPYVKRQKNDATDAEAICEAVQRPSMRFVPTKTLDQQACLMLHRTRHLLIRQQTAVINTIRSHLAEFGIVAPVGRNGVEELLDAVADPGDHRIPDVGRECLHALGMLLGRLKDQILRFDQQISAWHRSNETSRRLDDLPGVGPALATALVASIADPMAFRSGRDFSAWVGLVPKQNSSGGKERLGNITKQGDRYLRSLFTAGALSVIRYAKIHGAKHRPWLTKLLERRPTKVAAIALANKIARMAWAMMAKGEAYREPVALAR

SEQ ID NO: 341169 - protein, 355 aa, unidentified
MDSVKYIGMDVHKESISIAVRNGAGKIVMESLIETKASMILQFIDGLRGNVHVTFEEGTSAAWLYDLLKPHVTKLVVCDPRKNASMREGNQNDKIDARRLAELLRLNHLSPVYHGEHGLRSLKELVRSYLTITKDLVRVMTRVKAIYRSWAIPCTGKQVYAPRHRAEWLGKIGEPGVRRRAEFYYQQLDALRTVRQQVRRELLAEGKKHQAWKRLCQIPSIGPIRSAVLLGILQTPHRFRTKRQLWTYSGFGIETQTSADHRSVDGQLQRVKKQISIRGLNRNCNHDLKNLFKGAAIVASSKPGPFQEFYAALLTKGIRPEMARLTLARKIATIVLIVWKRGVSFDAQYLKPQTA

SEQ ID NO: 341170 - protein, 376 aa, unidentified
MITCFIGIDAHTTNYTLSTAIDAEDKPFNTCKYAPKLTYILKYANALCKKYNLKKEDILLGYEAGCLGFKLQRDLNENGFNCVVMAPSTIPGTAINRRKKTKNDIRDAEAIAKALRNDDYSSVDTPDEEDEAIREFIRAREDVRMELKRCKQHIMAFCNRHGQHYEETGWTQKHMKWLNNLAFSQPVLKETLNSLLLEYEYLTEKLEEKDRRIEEFAQMDKYRESVHKLTCFKGIKTLTALAVIVEIGDFARFMKAKNFVAYLGLSVGEQSSGNDHNQTGITKQGNRFIRKLLTEAAQCFSRATSKKSKELKKRQEGNVEEVIAYADKANERLRKRYHHLVIHNMKSPNKAKCAITRELACFIWGMMTDNIHTVLV

SEQ ID NO: 341171 - protein, 387 aa, unidentified
MPQPNDLSRSLVALDQNSTIIAVIEMSQSSWLVAGMLPGIERQPRKKLEPSPERLLGLLHRWQDEAVRAGRTITRIALAFEAGRDGFWLARWLEARGVEAHVIHASSVTVSREHRRAKTDRLDTELLKRGFLGWLRGERGHCSMARVPTIAEEDGKRPNRERDCLVGERTRIVNRIKSTLARLGIRNFKPTLRKAAERLATVHTPEGVPLPPNTLAELQRDMARLGFVVSQIREIEQARQKRLEQQPESGPHAMVRLLARIVGVGVETADLLVHELLSRPMRDRRAVARYAGLTGSPDESGARRREQGLARAGNARVRRGMIQLAWRFLMFQKESALALWYRARTADSRIGTRKTMIVALARKLIIALWRFVTTGEPLEGVVLRPAS

SEQ ID NO: 341172 - protein, 349 aa, unidentified
MEIIAFDSHKRYTVCSVENEKGEIVDERRIEHERGTIRAHLEKFTPGSPVAVETIGNWYRIVDEIEEAKMKPLLVHARKAKMMMCNGNKTDRLDVRGLNRLQRNGTLPTVWIPPMELRDKRDLFRTRMYLVSQRTGLKNRVHAALARYGVVVDASDIYGKKGREELAKGMEHFPKHTKFATEVQLAEIDGLEKVIDGLEERMREVFEETAEIKLLRTLPGIGFIFAAVIASEMGDVGRFATSHHFASYSGTVPRVKSSGGKTSFGRLRTDVDQYLKWAFIEAANMICMNRKKHPARHVSIMYERIRARKGHAKACGAVARHLAEAAFNVLKKGENYRDPALGRSFPTVA

SEQ ID NO: 341173 - protein, 390 aa, unidentified
MTYVGIDVAKDKHDCYIVNSDGEVLAEVFTIPNDQIGFNLLFQKLQSVASDLGKVKVGLEATGHYSYNLLGFLLDKGLHTYVINPLHTNLYRKADSLRRTKTDPIDAHTIAGMIMSNVDLTSYTAKSYHNEKLKSLTRYRFDKVQDRARLKTSVARLVNILFPELEKLVPTLHMNSVYALLSEFPGAKQIASCHLARLIHLLSGSSKGHYNRNKAIEIREAARSSIGSAMPAKSLELKHTIHLIEVLSEEIDEIETLIREIMDENPSPILSIPGISYRMGAMILAEIGDFTRFSSPDQILAYAGLSPSTYQSGKLANAYPHMEKRGSRYLRYALFNATKFVCNWDPTFAAYLAKKRAEGKHYNVAISHAAKKLVRLIFALQTSGRAFQPA

SEQ ID NO: 341174 - protein, 354 aa, unidentified
MKRTTKYVAFDVHQATTVASVREESGRVIARSVLPTDSGALTEFVRGMRGARHVTFEEGTQAQWLYELLAPLVDRVVVCDRRGALRQGNKGDQVDADQLSELLRRGALRAVYHGSADRATLKELTRTYRNLVEDATRVMLRLKALFRARGIPTAGTAVYHSRHRAQWLARLLEAGARFRAEALYAELDVLRKLRPKAKAAMVTEARRDPAWPVLRTIPFLGSVRVALLLATMQTPWRFRTKRHLWAYAGLAVVTRSSADYTIVAGQAVRRRRSPMTRGLNRNHNRVLKDVFKAAATAATARAGPLQAFYRSVVARGTREELARLTLTRKLAALTLRLWKKGERYDPTKLTTPAR

SEQ ID NO: 341175 - protein, 427 aa, unidentified
MTDQLKHKAYNSWVAIDIAKDFNVVMVELTDGKTRRFRMANSGKDHDRLTGVIRELPQPCHIGFEATGNYHRPLAYRLLTEGFDVSLISSLASARYREAIFNSWDKNDPKDAGILLELLKRGIVQTYVDPIRSGYHDIQELSKTYSNITLSRTRLQHSILTHYLPLYFPEMAKFWCSTRNAWWINYLLHFPTPASVIQYSEQAFCQIASPIIGRKMNKQAKLLELYEAAQHSIGLPIASDSLACQTFQLQLQRYQELTNQRQQLEQQAETTLSMNPDYCLLKTVPGIGPIVAMTILAEGGDLRRFNHHRQFLKYCGLDLAKNQSGNFRGQDKLSKRGNARLRLALYMASLHAIRQTENSFRNKFHRYTQATPKDADCKRKAMTAVMAKMARVIHALIKSGTPYQGYFEVSPSGSIPLCRAVGATRTP

SEQ ID NO: 341176 - protein, 406 aa, unidentified
MFIGWDWATETHDVTVMDDTGKRIDRWEPTHTEEGFAKTLARLRKHADPADLPVAIETTRGLAVDRLLAAGHPVVPVHPNAFHAMRARWGASKAKTDAGDSMKLADYLRTDGHLLPRLEPTEPATLDLQALTRQRADHIEARIAAVNQLAALLDEHWPGGKAVFGKLDSDIAQAFLERYPTPASAAKLTAGRLETWCKRRGYCGKKPGSVLIERLRSAPTAASRLSETVVEHLIRVQVQLVHGIRATIRALDKAITEATATHPYAPLFATLPRIGTISLGQVIGEIGPLLERAQTCEQLIAEAGVVPVTRASGKSRTVAFRFATNRRARVALTTFADNSRHGSQWAAKIYDDARARKKRHPHAVRILARSWLRVMWACWRTGTCYDPDIHQANNKINTTADAPLAA

SEQ ID NO: 341177 - protein, 350 aa, unidentified
MVVVGADVHKRTHTFVAVDEVGCKVGEKVVKATTAGHAEAVMWVRERFGAEVVWAIEDCRHLSARLERDLLGFGQSVVRVPPKLMAQTRASARTRGKSDPIDALAVARGFLREPDLPVACHDEVSRELKLLVDRREVLVAQRTATINRLLWRVHELDPERAPKSRSLDLAKHRRILGEWLDTVDGLVAELARDELADITRLTEAINALAKRIGQRVRDVAPVLLSLPGCGELTAAKLVGEAAGVTRFKSEAAFARHAGVAPVPVWSGNTAGRVRMTRSGNRQLNAALHRIAVTQIRLEGLGQAYYRHRIAAGDSTSEALRCLKRRLSRIAFGYLHTDHQNRTQPCQPAAA

SEQ ID NO: 341178 - protein, 351 aa, unidentified
MLIIGVDYHPSDQYIAFTDTETGECGERRLSHGDQEAEKFYRELALRGVSVRVGMEATGYSRWFERLLAELGIEIWIGNAAEIKTKRVRKQKTDPNDARLLLKLLLENNFPRIWVPSPENRDLRQLLWHRHRMVQMRTRIMNQLQALAMNEGQRRKKKLWSEAGRAQLKELPLAPWASRRRQDLLELLDRMNPTIEALTTAVEREAEKWPEVQRLMTHPGVGPLTALAFVLIIGTPERFQCGKQIGSYVGLIPSENSSAGKQRLGRISKQGSSLLRFLLGEAAQAAARGDADWRRRYVHLAMRRQKNIAKVAMARRLAVRLYWMWRNGWEYRQWAAFGSHAGQLVTGHGVN

SEQ ID NO: 341179 - protein, 342 aa, unidentified
MKDIRILGVDLGKNSCSVVGMDAEGRVLLRRRMRRESIIALAAKLPGCIVAMEACCGAHHLGRMLVAGGHEVRLMSPEYVRPYVKAQKNDDRDAEAIAEAATRPTMRFVALKSEAQLDVQVLHRVRDRLVGQRTSLMNQMRSILLERGISVAQGRRSLLDALEALSQEDSGIGARIRVLLDDMLCQWRALDERIMALDEEFTEMARNDPAARRLATIPGIGVMNATALVAAIGDGRTFSRGRDLSAWLGLVPRQATTGGKPKLLGITKRGSKYLRKLIIQEARAALPSLAKTATALGAWLRGLLARAHSNTVVVALASKLARIAWALLRNETGFVTGRLMTV

SEQ ID NO: 341180 - protein, 390 aa, unidentified
MPLDHHSEEPTAIRTNLGAIFVSLELSRSTWLITSLSPGGGEKMSKHSVSAGDIAALLSRFSELKQKAFARMGQSFPIIVIQEAGLDGFWIHRVLQSEGIESYVVDAASIATSRRRRRAKTDRIDGEALVRALLAYKRGEPRVCAMVRAPTPEDEDRRRLCRERKTLTVERVQHVNRIKGLLFSQGVSGYEPLRRNRRQRLDELKTGDGRPLPPHLKSQIGRELDRLELLLGQIKAVEAERDALLTPATETEGMPAPQAMLIDLRGIGAEFAAVVWSEGLCRSFANRRQVAAYGGLAPTPWQSGSVAREQGVSKAGNPRLRTTMIQLAWLWLRHQPNSALAQWFKERVKRNGGRLRKTTIVALARKLLVALWKYVTAGVVVEGAVMKAVS

SEQ ID NO: 341181 - protein, 382 aa, unidentified
MLATASEEGAAGGTSWSRRVFTTVPIWRPAGFFRVRSTNGRWGFTPGCNQVLGPDPPKMREVGMNGKSLRVIGVDVGKRAVDVAREGARAIERAVNDVVGIARLVRSLDREQDIVVFERSGGYERLLEAHLAAAGVRWALVHSKRVKAFRVAKGIKAKTDAIDCRLLRDFGRDQLNEGKLRLARLEDVTLAALVARLRQLNGVLHAERCRHETAAIDVVRASVTRTIAMLEAELAVIETAIDQHIAADPELRLKEEVMCERIGVGEATARGLLAVLPQLGRATNKEIVALGGIAPRVHQSGGTQKKRGVEPGRFAVKVILYYPARSAMRFDPEIKVFAQRLRGRGKLDRVVLVAVMRKMLVKLNAALRDALARAEPAAQAAV

SEQ ID NO: 341182 - protein, 427 aa, unidentified
MKYKQNEKILQVTGDTLIAGVDIAKESHYARAFDYRGVEYGKYLRFENNREGMTKFLNWAKDLMERHKKNKLIVGIEPTGQYWLCFAQYLKDNNIKVVLVNPFHVKMSKELDDNSPTKSDKKDPKTIAMLVKDGRYVEPIIPEGVYAELRVAMDIKERLNKQIGMTKNQITRWLDIYFPEFNTVFSDWEGKAALITLREFPTPEKIAKKSAEEIISIWKKEVQRGVGEKRAIKLIETAKESIGKKQGIKMAEYEIKTLIEQYEFLKKQIEEIEKKMEELIVEIPGVKELLEIKGIGVNTVAGFIAEVGDIEKYEHPKQIQKLGGLNLIENSSGKHKGETTISKRGRKRLRSVLFNAVMALVAKNEEFRELHKYYTTRAQNPLKKKQSLIVLCNKLIRIFYVILKKGVKYDPIKMMKDIKRPALQEAA

SEQ ID NO: 341183 - protein, 352 aa, unidentified
MQHFIGCDVHTRNQVVAWIEEETGEIKKRQLEHEGQEVKEFYAQFARGTVVGIEATFPVYWFERLMGELGHELWVGDAARIRAREVRYQKTDARDAELLLDLLRTGRFPRIWVPSLEERDLRQLLVHRMKQVRARTQVKNQRHALAISQGVCRKRKLWSVKGRKELESLALLPWAARRRKELLESLDRLDGQVRELDRAVEEAGRGRPEVALLRTHPGVGMVVSLAFVLTVGPVERFSNSRKLVSYCGLNPRENSSGGRQRLGSISKQGNTMMRWLLVEAAQTAARLDPQLRRIYQRLKKKKTSGVAKVAVARRLVVRLFWMLRTRHNYTQLVHMSGSPSSAVVPPAAEPSL

SEQ ID NO: 341184 - protein, 328 aa, unidentified
MEEAKLGMDVSKAVLDVELVVAEHQARAAQFENSLAGFKQLVRWLKHHWKGPVHVCLEATGLYGDEVALFLHEAGYTVSVVNPARIKAYAASQLQRNKTDQLDAALIADFCRTQQPPAWTPPDPAWRELRALARHLLEVKDMRQQERNRLQAGLSSSAVRQSLEAHIAFLEQQISDLERQMQDHIDQHPDLKHQHDLLDSIPGLGPLSAALLLAEAGDLQRFDHAGQVVAFAGLNPRQRRSGTSVHGPTHLSKCGSARLRHILYFPALAALRFNPRLAAWGDQLAARGKSKMQIVGAAMHKLLVLAYGVLKSGRPFDPAWGAVLLPAP

SEQ ID NO: 341185 - protein, 327 aa, unidentified
MNSICLSTDSLPVLGLDVAKKSVQAELRRAGGKTVRFGFENNAKGFAQLARVLKEHNVPKVWAGLEATGPYSHALALWLHGAGHRVSLLNPRRVKQYARSAGKRNKTDLLDAAIIADFVCAHRPAPWQPPTLEVAQLRALVRRREELSLMLQAEKNRLEGVALNVSCSLRRIIATLSAERARLEKLITQQIRSHQQLSCDHQLLCSIKGIGSLTAAILLAEMARPGQVERARQAAAHAGLVPRREESGTSVRRNRGLGKEGNRYLRKALYMPALVAIKYNAPLRHFASRLRAAGKPKMSIVCAVMRKLVHIAFGVLKHQKPFNPSLA

SEQ ID NO: 341186 - protein, 338 aa, unidentified
MYYTGIDLHKKTSFITTIDQNGKVIFRRNFPNVEELILDYFRNLDGPTKIVIESMCSWYWLYDLLSANNFTTVISNPLKTKAIASAKIKNDKVDSHMLAQLLRADMIATVHVCNIKTRKLKELIRHRRRLVQDSARMKNRIHMLLMKNNINIPVSDLFGKRGMKLLKEVSLPAYHQQQFNSYLALLRYVAEQIEPLTEQIRDLAKKDPMARLLMSIPGIGFLTAMTIIAEIEDIGRFPSYRNLASYAGLVPSLDASADKSRTGRITKQGSPYLRAALVEAAQAIPRTKQSRLNIFFRKRIVRAGYRKAIVATAHKILQYVYYVLKNQVFYSEEYLARA

SEQ ID NO: 341187 - protein, 359 aa, unidentified
MFTERTSVGLDVHARSVVAHGLYGATGEVFTSRLSPGVEVQDWIGGLPGPVAVLYEAGPTGFGLARELRAAGIRCEVAAPSKLQRPAGDRVKTDARDAEHLCRLLRLDEFTPVRVPDAVTEAARDLVRAREDCRTDLMRARHRLAKLLLRQQVSYPGKNAWTGAHMAWLARQRFDDANLQCCFDEYLDQVLATTARRDRLDVRIEQLAADSQWTPIVRRLGCLRGIATLTGFALAVEIGDWTRFDGNSIGAYLGLVPSEHSTGASKQRGGITRTGNSHVRRLLIEAALHHMQPYRKGVVLRARWDLASPAARARGDAGNRRLHARWVGFQARKKRHHVATVAIARELAGWCWSIANIED

SEQ ID NO: 341188 - protein, 336 aa, unidentified
MEITTIGLDLAKNFFQVHGVDDAGAAVLRRTLRRSQVIPFFTKLQPCLVGMEACGTSHYWAREITRLGHDVKLMPPRGKTDANDAEAICEAVTRPTMRFVAVKSPEQQAALSIHRARDLMVKQRTQMINMIRGLSSEFGLEAPRGLHQALTLARRLIDGEPMPMPALAVDVVASLSRQLLDCHEKVLNFERAIVRWHRGNDISRRLATIPGIGPIGASAFTASVTDPHQFKSGRQFAAWLGLTPLQNSSGGKERLGRISKMGDRYLRKLLIVGMTALVRNAKYKPEKTDPRLAHFMARKPTRVATVALANKTARIVWAIMTRGDVYRRQHIPVLAA

SEQ ID NO: 341189 - protein, 356 aa, unidentified
MQNENKNLDFNNQAFFIGIDVHQKSWNVTIISSEKIFKTISMNPSPKELYKYMTRNFPGGKYHSVYEAGFSGFWAHRELEALGFNNIVVSPTDIPTSGKEKLTKSDIVDSRKLARELSNGSLKGIYIPDQLLQELRSLVRARAQVVKNLVRIKLQIKSYLNFYGNKFPANYEITNWSGKFIKHLRSFSFSYDIGKEQLDIYLDLFEEQRSILLKIVQSIKKYCTDYGFYERILLLCSVPGIGFINAVVLITELVDMKRFTNFDSLASYVGLVPSKRSSSEKEYTLGLKVQCKRKLREILVEASWVAIRQDPALVASYGRYVRRMSKQEAIIRIAKKLLSRIRYVWFTQQKYEFSLK

SEQ ID NO: 341190 - protein, 325 aa, unidentified
MFYLGIDVAKAKLDCELLNTSTGKVKAKVVPNTIDGFRKLLEWLGKHDAASAHLIMEPTGVYHESAAFFFADAGLAISLVNPAQLRKFALGIGVKTKTDKADAKVLARYGETQKPQVWQPPPQSVRTLKALLARRDAVADDLLREKNRQEKMEATETPQLVTESVQSSIKFLEDELKRLQKCIDDLIDNDPDLRGKKELLTSIPGVGDRVSDHMTALLAGRDFESAEQLAAYLGLVPVQWESGTSVRGRPHMSKAGPAHLRKLLYMPAVVAIQRNAHVKALYERLLERGKSKMAAIGAAMRKIAHLCFGVVKTGRPYDEKFIIQP

SEQ ID NO: 341191 - protein, 365 aa, unidentified
MKKSSTAKAASNKNIQPKLTIGLDLGDRSSWYCMLDEAGEVVGEKKLGTTAKAMKEVFAAMPRSRVALETGMHSPWVSRLVSELGHEVIVAHARNVRLIGESRRKDDRLDAKMLARLARIDPQLLSPVKHRSAQAQADLTVIRARASLVRARTALVNAARGLTKSYGERIRGCNPRNMDAEKAQALSPELQSALGPLLQALESLSERITEYNQRIEAIAQQSYPQTALLKQIKGVGTLIALTYMLTLEDPHRFRKSRDAGCYLGLQPGRRNSGQSEPQMHISKEGDPYLRTLLVQGAHHILGPFGVDSDLRRWGLKLAERGGKNGKKRAIIATARKLAVLLHRLWVSGEVYEPLHNTKRTRFVAA

SEQ ID NO: 341192 - protein, 401 aa, unidentified
MLYVGIDWADTQHRVSVIDSQGCEKANFSIPHTREGLEHLKEKLLELAQSPQSIACIIETKHGLLIQFLLEAGFAVYPVNPKVVDRRRKPSGAKSDPLDARILAELGRTDINRLQQLKPDSELIQELKALTRDQDTLIRESTRLTNRLISCLKEYFPVALELFSKPTLPVALDFLKNYPTVEAAQKLSVSKLTAFLKSHKHPKPSEAAMEIYQKLHTPQLKASPVVARTKARFMLAILSQLEPLLEQIKEYDKEIERHFNLHSDSRLFASLPGAGLRLAPRLLSEWGDDRERFLNASVVQALAGTSPVLYQSGKYRFAKQRKSCVKPFRNAMHQFAYQTVRWVGWAREYYDKKRSEGKSHHEAIRALANIWVRIIFAMWKNFKPYDESIFLAAREKHRLAA

SEQ ID NO: 341193 - protein, 430 aa, unidentified
MRLTARSGRERISVVETFEWFLGIDWASEVHALCLTDARGRVRGTRSVAHTAVAVDEAVRWLGEQTGTGPEAIAVAIETPRGVLVDTLIERGFPVFAVNPKQLDRFRDRFSPAGAKDDAEDAHVLADALRTDRRAFRQVRPDHPLIIQLRDVTRLREDLPEEESRLTNRLRDQLYRVDAAWLTLSPAADEPWLWTMLAQAADPAAWAHLARRRIAAVLRAHRIRRLSADDVLHALRQPRLTVAPGVTDAVATRITTVVQQLQLVHDQRNTAEHHLDRLLARLASMERPEGEASEHRDVEILQSLPGVGRIVAATMLTDATGPLADRDYATLRAHAGAAPVTKRSGKRAVVHMRYACKGALRQALYHWARTSIQLDAAARAYYKALRARGHRHGRALRSVGDRWLRILIAMLKTRTLYDATRFAQAEALPA

SEQ ID NO: 341194 - protein, 550 aa, unidentified
MSKLSNRNPSLSQARPFASMSRVNPHAAGVDIGAHEIMVCVPGDDENTQLVRSFGNYTANLQAIAAWLKEHHIETVAMESTGVYWIPLFEMLEAAGFRCNLISAHSLRRIPGRKSDVLDCQWIQTLHSYGLLESSFRPEADLVALRTLLRHRAQLLEHRAPHILHMQKALLQMNVQLSQVLSDVTGQTGQAIIRAIVTGERDPYKLAALRNHRCQKSEEEIAKALTGSWREEHLFVLKQSLEMYDFYTRQVEACDAEIERVYHTIRPNEDSSEDDDRPAQKRKSCSKNAPKGGAIRQHLKRICGVDVTAIHGLGEVLAQEIVMGTGTDMSKFPDAKPFCSWLGLAPKNEISGGKVLRSATFKTRNRAGQAFRRAAASVMRSDCVFGVFYRRMKARIGPAQAAVATAHFMARVYYRMLKDKVEYQPLSAEEYETRYRQQQVRYLQKKELPDWVSTHTSVVAVSQDAGESPPSPSPARGGKKGGCHAERHPPACHLGYPAATWFAASLDSSPALRMTGRQDTGGPRALVPSILAPNHGGIHLIRTHVKRSKA

SEQ ID NO: 341195 - protein, 421 aa, unidentified
MPDYNIKSREVKYYERNMNAIGIDVSKGKSTVAVLRPYGEVVVSPFDVAHTGSDLRALADLIKKLPGETKVVMEATGNYFESIARYLHEQNIFVSVVNPVLISDFGGNTLRKPKTDKKDSVKIASYALTYWLDLKEYTSQEDLRKSLKLMNRQYQQSIKLKTMMNNNLISLLDLTFPGINKLFTSPSRESDGHEKWVDFVLEFSHCDMISKLTIKAFAKKYKKWSDKNSYHFTESSCEKIYAFAKDCVSSVSSDKAIVFSVVQAAKMLISATENCHAIQSEMNRVASKLPEYDTVMNMYGVGKAVGPQLMAEIGDPRRFHSRKAITAYFGYDSENNDSGQKTTRSNPMTKKGSGALRRTLFIIMQVLLQTKPQDNPVYDFLIKKKSEGKHYYSYINAAANKFLRIYYARVKEVLNVSEQMT

SEQ ID NO: 341196 - protein, 327 aa, unidentified
MTASVASHNQIFVGIDVGGLSVEAAWHRGGSTQYQNRPDAIAAFVARLSAEKQIIRIAVEPTGGHEKALVKALRGAGLPVEMVHTSRFAAYRKLIGAKAKSDTSDARLLAAYAAAPEEVRGRKAGHVVLPQDDVREQLAELAARRDQLKHMIHAETCRLSTVRSPSIRDEITAHLQAMRQADRQTHDAMMQLVRQRDELRNAKRLLQTIKGIGDKTALTSIAAVPELGLISNKAAAALVGVAPFARQSGTMKAPARIHGGRALVRNAFYMAAVTASRHNPVLAPFYARLIAAGKPVKVALVAVMRRLVVYANAVLRSGQPWKGAEIG

SEQ ID NO: 341197 - protein, 479 aa, unidentified
MKDNYRRCCGIDVHKNSVTVCVLAPLGQLPIETKKRTFRTFTRDLKQLRAWLKNCQVTEIAMESTGQYWRPLWNLLEGEFAKLVLVNPQHIKGLNGYKTDPKDAQWIADLLEGGKWKGSWVPERSIRELRDLTRQRVPVLEDLNRAKNRIEQLCQAGNIKVSSVATDLFGVSGRKMLQAIIEGKRDAGWMADYAQGKLRGKRGELELALEGTFTDEQRWLLAKELRQIEWLEGQACAREQEIERRVAVFEEPIQRLLTIPRIDRKTAWTLVAEIGVDLSAFADAKHLASWAGLCPGNRESGGKRFSGRTRKANRYVKRAMCQAAWAASPTKNTYLSAFYRRMSIRKGAPKAVIALAHHMITVVHQVLSRKEEYVELGGDYYDQRNKPKTAAGLMARLEKLGYQVEVKVIRDAAPAESALPAAHAEADSGGKPLRQEPEQPKRRKGRPCKCIERGIICKHGTSIGLTPLIQQALRGEKFS

SEQ ID NO: 341198 - protein, 427 aa, unidentified
MSYKIAGIDVHKKMLAVVVSDVEGDGEYQFERRLFGSNPEQLRLLAEWLLDQEVEETVMESTAQYWKPVWGALERFWKPVRQKRDGAGAMSGTLHLAQAQSNRGPQGRKKDFPDAERLVKRLVARELTLSFVPDVEQRLWRTVMRRKYQLTRNRVQLQNRLECLLEEAHIKLSSFVSNLLGVSARRMLKALAEGETNPASLAALADRRLRATPEQLCDALGACMDLNPVYRRLLKMTLEELRLIEEHIGKLDQEMADLLHPYQDQVKRLAEVPGLGVDSAQQILAEVGALAAAFPSAKQLSSWVGACPGDNQSAGVNYNHRSPKGNRAMRRILNQSANAAVKAKGTIFEVVYRRSVSRLGHKQTIGAIAHRQCRLIWKILHEGVRYEERGPAVSKGSKQRRALRMIRELRCLGYRVELENSQQANPA

SEQ ID NO: 341199 - protein, 351 aa, unidentified
MGGMDLHSNNLVIALVTKEGKRLISKKVECSLAEVLEFLKPYQKSIDTLAVESTFNWYWLVDGLRANGYHTVLANPAKMDQYGGIKHADDENDAYFIAELLRLKILPTGYIYDPKLRPVRDILRRRMSLVQHRTALMLSFKSLFTRTTGEQMSLGQLKGMEVEQARKLYDHPANQLIAGLQIKHVGQLTESILSIEKEVLKSAKGMACYEQLKSLPGVGIILGLVVTMETGEVKRFASDGDFASYCRLVDSKRMSNGKKKGDNNQKCGNKYLAWAFVEAANFSKRYDEDCRRWFDRKAAKTKNVIATKALACKLAKAAWFIMAEKADYDRKRMFPELASQPRTKASTEKKK

SEQ ID NO: 341200 - protein, 430 aa, unidentified
MKSNTQNAKIEAITEKTLVLGIDVGSETHYARAFDYRGIEYSKKPFKFSNTEAGFVTFKEWILDLKERHEKDKVVPGMEPTGHYWFNLGKFLQDNEMKPVLVNPHHVKKSKELDDNNPTKNDRKDPKVIAGLVREGRYMIPYLPDGVYADLRTASNIRFQLQAELTRIQNRISRWFNIYFPEYKTVYGKPDAKSGMLILKAAPLPEDILTLGIDGVNQIWRDAKLRAVGKARAKTLIEAAEHSVGSKEGAVSARMEIRMLLEDYESRNTRLQEVMVLIEELVRKIPMAEKLLEIKGVGIRTVSGFLAEVGDISRFNNPKELQKLAGLALVENSSGKHKGETTISRRGRKRLRYLLFEVAMSLVAKNPEFRELHNYYTTRRLNPLKKMQSLMAIAAKLIRVFFAMLTKGVDYDPKKMVSDIKRPAVYLQAA

SEQ ID NO: 341201 - protein, 341 aa, unidentified
MNAIYYIGLDIHKKTIAYCIKRIDGVLVQQGTVAAERKALSKWLTELPGPWFGAMEATIFTGWVYDFLKPHAVVLKVAHPAMLKAITAAKKKNDKADAEKIADLLRVNLLPECHMMPEELRELRRILRYRNMIVRTAVKMKNKMSGLLMEVGAQYNKKRLYGRKYFSALLERVEDVPDSVKGLLRLSRNGFKMFDDIQKKLIMVLRKNKLIQERVLRLMSIPGIGEVTALTWVLETGDSSRFSSSRHAISYCGLCSAQHESAGKEQRGPISKQRNKHLQTMLIEAAKLAPHWNEQLAMLHEKELARGNKNRATLAVARKLVEFMLAVDRRETNFESMKEAA

SEQ ID NO: 341202 - protein, 366 aa, unidentified
MRKNSTVVKNGNTIFRQPALTIGLDLGDRTSCYCILDESGNVILERSVPTTSSGIRQAFGKMPRSRIALETGRHSPWVSRQLARMDHEVIVAHARNVRLIGESSRKDDQLDARTLARLARIDPGLLGPVRHRSAQAQIQLTVIRARAALVSTRTALVKAARGLTKSYGERLKKCGTEQMNRNSSEGLSQELREALDPLLREIESLNERIKEYDQRIEQIAKEVHPEVARLKQVKGVGTLIALTYVLTLDDPRRFRHSRDVGCFLGLRPGRRNSGQSEPQLHISKEGDRYLRTLMVQGAHYILGPFGQDSDLRRWGLKLAERGGKNAKKRAVVAVARKLSVLLHKLWVSGEVYEPLRNNRKAERAVA

SEQ ID NO: 341203 - protein, 430 aa, unidentified
MKGCSPPEHWVCSGERKNPLVQFWETAMIIDSVAQVGLDSHRTFGKAIARDAEGRIVWRQRLEYDDRETLLRQLSDWPQGTPVVLESTFGWSWLSDELSACGLEPHLCHSRKVAAWREARGIAKSNRTDADLLSELWSQQPRWWEVWLPPVEVRDQREWLRYRMTLVQSQTGMKNRIHAVLHRHGIIHGLSDLFGKEGRGFLRDLLDPQDARLRDSAKDVLGGYLKLLEQLRRQIAQMTKLFRRQLAKSAAGCRLRSLPGINWILAYTIVAEIGRIERFRNERHLASYSLLVPRADDSGDEPEGTPTGRHIGHAGRRTLKWAWIEASHGAVRSGGRFRAIFDRITDGGKRNRQRGYIAVAHELCRIAFTLWKKNVDWSETPPPRPGSERHGRGRGTRQSRIAKRTMRSRTKHESRPGMGQPKPPMVDAVR

SEQ ID NO: 341204 - protein, 354 aa, unidentified
MSQKLNAAIAVIGIDIGKNSFHIVGHDHRGAIVLRQKWSRGQVEARLANLPPCLIGMEACVGAHHLSRKLQMLGHDARLMPAKYVRPYSKGQKNDFRDAEAIAEAVQRPTMKFVATKTADQLDLQALHRVRDRLVGQRTGVINQIRAFLLERGIAVRQGLRSLRSELPGILATRTDVLSPRMLRIIEDLAGDWRRLDERIEGLSSEIEALARQDKACERLMTVPGIGPIISSAMVAAIGTGDVFSKGRDFGAWLGLVPKQISTGDRTILGKISRRGNRYLRALFVQAAWVVLVRVNCWERYGLKSWIEAAKKRLHHNVLAIALANKLARIAWAVLNKGRAFECVKTEETASQPA

SEQ ID NO: 341205 - protein, 407 aa, unidentified
MFVGIDVAKDSLVACAMDDQGEDIFHSYSVENNRPGCLKLINLIADNANLLQPDIIKIGMEATNVFWEHCYRLIKNHEQLNSNFKLQLYTVNPKVVSNFKKAYTDLPKNDNVDAWVIADRIRFGRVENSSSPEALYRALRQITRHKFKLAQHIKAEKARALNLVFLKFSDFTQKSPFGTFTKASMALLENYTLREIVNTDIHELAEFLHQNSNNRLGGSTPIEKITTALKKAARNSYRLKPEIDQAITQTLSMTFDNIRFYQSQNKRLKKVLKRQLKAIPQTLITVDGIGPVLTAGIISEIGDINRFDKETNLASYAGLTWSQYQSGSFTAEETHLTKKGNKYLRYYLVEAANSLRVHNDRYKSYYYKKYNEVPKHKHKRALVLTARKFVRLVFALLSKGEIYQPRR

SEQ ID NO: 341206 - protein, 317 aa, unidentified
MQKIINFVGIDMAKNDFYACLGDVIEPQKFNNDTKGIKSFFNHLKRYDFQKENTLLGVESTASYHLKLCIESTENNYGIKVINPLIVKKQNQTNLRRVKNDKQDSRLIRFCLVSGAGYLFDNDPEAMILKSLVRQRDSLVFAKLKFNRQQTDIRHKEKCLRQNINPIYAEIINVLEDKINLLKTDLRLYRPKEQYLLQSIPGVGPITAASFISEVGDINRFKKPEQLVAYAGIDPRVHQSGTSINGKGYISKRGNKILRTRLFNAAAVAVLHDNMFKAFFQKKKSEGKPYRVALIATMRKMTHVIHAVWTRGTPFVK

SEQ ID NO: 341207 - protein, 318 aa, unidentified
MSGEIFVGLDVAKATLDVAVRPTGETWQVANDEAGIADLVARVRRLSPALLVCEATGGYERAMVAAVAAAGMPVVVANPRQVRDFAKSTGQLAKTDRLDAGILALFAERVRPTPRPLGDAASQLLDALLTRRRQLLEMLVAEKNRLGVAPRPLHRGIRQHIRWLERQLADVTGELARVIEASPVWRAQDDLLRSVPGIGPVVSATLLGELPELGRLTHKQIAALVGVAPLARDSGQLRGKRMVYGGRAPVRTALFLAALCGRRWNPQLKVFYERLIAAGKPKKVALIACARKLLTIVNAMMRDSATWTVPDLAVQDSC

SEQ ID NO: 341208 - protein, 403 aa, unidentified
MQHVIAFDVSMGKSYMVIYNNQKQCIFESEINHSKPDFEELRKRIDQLMNENKKSPHIVFEATGVYSRQLERFMQDNKFEYFLLNPLEAKLQCDSLRIHKTDRSDAHQLALTHFTASRREKTGTDNLFYQLKSLSRFYNELDDELSVIRSRMHKVVQLTFPELEQIFTTKSDLFLNFVQLFPHPDFVQNLSKTVMKNLIRKNTNKNISINIAEKKAIEVLEAARYSYPAVRQDDVLCEQLKSYAKRYQELLHQKEQCITKMVRLAESRTEYPIILSFPGIGPNTAIRLLAEIGDITRFENNKQLNAFAGIDIRRFQSGKTFFRDKINKRGNKHLRKLLFIIIQNMIKLRRYRKNHIVEYYDKLKTQPYNKCHKVASIACVNKLLKLLFYLITHNIHYDYRLTA

SEQ ID NO: 341209 - protein, 405 aa, unidentified
MAVYIGIDWSEKKHDVVCMNEKGAVITQFQIAHSADGFVQLDSKLRKLGVTPENILIGLETAHNLLIDFLWDKGYSQVYVIPPNMTRSCQGRYRQSGARNDASDARLIADLLRTDRHRLYPWHPDSCLTLELRAKVHWFMSLSRSKRRLASQLRAILLRYYPAALQVFGELDSQITLEFIQTYPTPQAAAQLTLAEFKSFVRQHRFPIGKIPGCFERLQAKQPEAARHTVLAYQQEAVQLATLLLQTVRTLAAVQRELTCLFEQHPDRSIFASLPGAGDLLAPGLLVKFGDDRRRFPQANALQALAGTCPVTDQSGQRRRIYFRQACDHEFRHITQQWAKSSIAQSDWASTYFSQALKRGFSTNHAYRCLANRWLAIAWKLWQEGKPYDETYHLQQRAARCRPLH

SEQ ID NO: 341210 - protein, 312 aa, unidentified
MKIICGVDVSKARLDACIEPGAIFASFDNDAAGIAELAAFCRQHHASLVVMEATGGYERRAFLLLWEAGIPCAMTNPRSVRRYAEAMGILEKTDKIDASVIARFAHAKNLQPTPAPTPAQQRLKALVARLRQVTDDLTVQKQRRASLLDNAEMLASIDEVIALLKRQSRTLEGEIASMIDDDPLWAQLAEAWRSVKGVAGRTVARLMADLPEIGTYSNKAIAKLAGLAPLADDSGKRKGKRSIRGGRASVRSILFLVARTAAKYDRSLAAFRERLLAAGKHKMAVRIALAHKLLVRLNAKARDARAQYANAT

SEQ ID NO: 341211 - protein, 356 aa, unidentified
MIIVGLDLHVRNSFLSAMDLETGELFDQRRIPNTREAIRGYFGEFADQEVKVTLEATTNTYPMVSLLRQMPKVQVTVVHPRKMRIIAESLCKTDKVDSEVLVELGRGPYRLPISYIPEAAVHELRCELRTRARLVAMRTELKNRVHGLLSGEGFFEHPPELFGKRGRAWLAEVELGELARGRLERFLRLLDQFEAELLEISQVLRERYAKAPLWAEDVELLTSMPGIGLLTALTILSELGDWRRFGRPEAVVNYAGLVPWLDESNQKSHYGHLTKQGPRFLRWILAEAAQVARRKVPRYGRFYDRVARKKGAAKATMAVARTMLEHAWLMLKRREKFHYEVTEKMVLGGEPVSRMA

SEQ ID NO: 341212 - protein, 474 aa, unidentified
MLRKQKIRSVEQIEAYKLSVCHPASAGIDLGSKENYVALNPAIAAEMDLPIVHTFGTTTSQHEACRDLLLACGVKDVCMESTGIYWINLHYVLTQAGIRVSLVNPKMFRMVPGRKTDVLDCQWLQTLHLYGLVRGSFIPDEQTRQLRTYMRLREKLIQDRGRYVQRMQKAMVEMNLMLVNVVDDVTGKTGMAIIEAILAGERDPKVLASKRDGHCKHSQLEIEEAMKGIYKEDQLVALSINHAVWKDLQKQIDRLDVEMGKLLQTFSSTPQMEEAPAQTEEQPDADKKQDDKKKRKTRPSKNDVKAGIDVEKELVRICGVDLTSLTGFQANAILQVIAEVGTDMSKFPTKKDFTSYLGFAPHNKITGGHIISSRTDRKKSHAAQAFKKVIPAISKGKSSLSAFYHRIAGKSGTAIAITATCRKLAQRFYDSITKGQQYIEYGEESYKQAIKERELKYLHKLAKKHHIELKVAGL

SEQ ID NO: 341213 - protein, 422 aa, unidentified
MVLKGVPMALKIVYKICCGIDVHKNFVVACIAKTDKQGVTTYERHHFSTYTKGLKQLLKWLLDRNCKDVCMESTGKYWIPVYNVLEHDCSIVLAHPKYVKAIRGKKTDKKDAKWIADLFKHDLVAGSFMPPADIRQLRDLMRYRFKLTCFKSSEKNRYQNCLTVSNIQLGNAVSDTFGKSSQKIIAKILENPDDTSFDIGSLIHGSMKDKLPELELAIDGYITPEQAAKLKIIKEHFDNLEARKAELEELILALANPYQQEISIILTAPGFKNTFTAIGIISEIGTNMEAFPSAKHLCSWAGLTPTNNESAGKKKSVRVSKAGCYIKPLLVQCANAAIKSKKHPEIRDRYLRIKKRRGHKKAIIAIARMLLTALYHMLKNGENYNSDLYQKSDILPTTREITVEQAILMAQFQGFRIKSATE

SEQ ID NO: 341214 - protein, 337 aa, unidentified
MKVTLIGIDLAKSIFQVCGVNQAGKRIFNRQVRRAKLMELLLQHPDATLAMEACSGSNYWGRELQQRGFQVMLIPPQHVKPFVKGNKNDRNDAFAITEAARRPNLRCVEPRTLAQTDMVQVHRVLDRMVRQRTALINQIRGLLNEYGIVVSRGKEKLLSALPELLEDADNGLTSSSRALYQALVDEWRQLNEAIDRVEKVLRSQARSDETAQRLMKMKGVAERIATATIAQVGNGHGYQTGRHFAANLGLVPKEHSSGGKQRMGGITKRGNCYLRRMLIQGAWSVIRNVDKNDDRMTRWARQLIERRGKHKAVVAVANKMARIMWSMLYHQTEFRAN

SEQ ID NO: 341215 - protein, 445 aa, unidentified
MSKPQVIDDVEHERVWDIVAAVDVAKKEGMVCLRRPGPEGRQAKVWPVPATVNAVAVLGAELADAGVQLVTLESTSDYWRIWYYVLEAAGLAVQLVAATQVKQVSGRPKTDKLDAMWLARLTEKGLLRPSFVPPAEIRALRQYTRARTHLVQDRTRCFQRMEKLLEDALIKVSSVASKLTTASAQDMIAALIEGERDPQVLAGLARGRMKAKHTALVQALTGMFADHHAAIAQILLDQIAFCDTAIARLTAAIEDAIDAIPAAWGADPGGNTGAGAGTGPDAPALPAIMRLEEIPGVSAELACSIIAETGLDMTRFPTAGHLVSWAGLCPRTLQSGPRTRHGKGQGNTYLRGYLGQAATGAAGTATFLGERHARIARRRGGGIAQVAVARSILVIIWHLLADRGARFADLGPGHYETKINHNRKARSHVRQLESLGYTVTLTQPA

SEQ ID NO: 341216 - protein, 349 aa, unidentified
MIIGCDVHSRYQVIAMLEPGTGEVVNRRLEHENGEAKGFYASLPKPSLIGIEATGYTQWFERMVAELGHELWVGDPAEIWARSVRRQVTDRRAAEHLLDLLLTQRFPRVWVPTPEERDLRQLLKHRDKLVGMRTSVRNQLHFLAMSQGVCRRKKLWSAVGRRELEALQLGEWSSRRRQELLELLDRLNPRIEELDEAVRAEAEHRPEAARLMQQKGVGPVTALAFVLTLGPVERFANSRKVVSYLGLNPSEHSSGGRQRLGHISKQGNEMLRWLLVEAGQSAAQFDPELRRKYQRLKFRRGAKVAKVAIARHLAVRLYWTLRQTKVAPSPVRTPESPAQAVVDASPSTL

SEQ ID NO: 341217 - protein, 402 aa, unidentified
MNAVGIDVSKGKSMVAIMRPFGEIVSAPFEIKHTASGINSLVELINSVEGESRIVMEHTGRYYEVLAHQLSEANLFVSAINPKLIKDFDNDSLRKVKSDKADAVKIARYALDKWHNLKQYSVMDELRNQLKTMNRQFSFYMKHKTAMKNNLIGILDQTYPGVNAYFDSPARSDGSQKWVDFASTYWHVDCVRKMSLNAFTCHYQNWCKRKKYNFSQSKAEEIYGKAKELVPVLSKDAITKLIIKQAVDQLNSASTTVESLRTLMNETASKLPEYPVVMAMKGVGTSLGPQLIAEIGDVSRFTHKSAITAFAGVDPGVNESGSYEQKSVPTSKRGSSILRKTLFQVMDVLIKTHPQDDPVYQFLDKKRVQGKPYYVYMTAGANKFLRIYYGRVKEYLSSLPES

SEQ ID NO: 341218 - protein, 352 aa, unidentified
MSEYIAFDSHKRYSLVEREDVASGKIVQQVRLTHAPGAVRRYLARCTPGTAVALEATGNWYWIVEEIEQAGLQPRLVHPRKAKLMMGLINKTDKLDVHGLNRLQRNGTLPTVWIPPRPLRDLRELTRTRLVLVEQRTRLKNRLTATLAKYGVPPSEYSDAYGKSARAELEARIEPLPEQTRWVCKQLLAQIDFLVRQIRQLEQRLEDLVEVTPEMERLMTLPGIAEILAATIALEIGDIGRFPDAPHLASYAGTTPRVHASGGRVRYGRLRADVNRYLKWAFVEAANSVAVNHRRCPERHVSQLYDRLRQRKGHHKAIGAVARHLAEAAFHVLRRQETYRDPVLERGCTGEV

SEQ ID NO: 341219 - protein, 354 aa, unidentified
MPEAAQPAQPVELPAEEVILGVDTHKDVHVAAVITVLGASLSHRDFPTTAAGYRQLLSWARSFGVLRRAGVECTGSYGAALARVLRREGVQVIEVNQPDRAGRRKHGKTDAVDADAAARAVLSGRATATPKTGEGPVTDMRVLRLAKESAVKARTQAMNQLKAVMLAADPELRESMARLTNSALISKCVDLPDGDDQVVFTLRLLATRVRQLTVEVKELTRRLTRSVRSCRPQLLELVGVGPDSAAALLIAAGDNPDRLADEACFAALCGVSPVEQSSGKTQRRRLNRGGDRQANAALYRIVQSRLRWDERTQAYLRRRTKQGLSRREIIRCLKRYVARELFRHIQPASAPSRT

SEQ ID NO: 341220 - protein, 418 aa, unidentified
MQTELSQFTAVIGIDWADKKHDICVQDMATGRRRASQVRHRAEDLEEWARSLHRRFGAPIAVAVELSKGPIINVLQKYDFFVIYPIDPSKLANHRKTFTTSGAKDDPTDAEFALKLLLSHAEHFKPLQPQSVEMRTLTTLVEQRRQLMNDRVRITNRLRNTLKQYYPQALEWFDHIDTPLFCDFVRRWPSLPQARRARRATLEKFFREHNMNRKALLERRIKSIKSAMPLTTDDAVIVPHRLRALTLVAQLEVTLECVKQYDAEIASLAPQHPDYELFDALPGAGPSLAPRLLVAFGEQRERFKNAAELQKYAGIAPVTKRSGQSTWIHWRWQCPTFLRQTFVEWAAQTINKSYWAGLYYYQQRAKGCSYQAAVRALAFKWIRILYRCWKTRTPYDEARYLKALQERGSSLLKMADAA

SEQ ID NO: 341221 - protein, 291 aa, unidentified
MELSVIGMDIAKNVFQLHCVDRQTGEIERIKLRRNEVLPYFARRTPALVAMEACGGAHWWARQLQQLGHTVRLLPAKAVRPFVLRNKTDAADARAIWTAVQQPEMKTVAIKTEYQQSILALHRMRAQLLKFRHMQTNAIRGLLLEFGHPLPESYLALRKAFPTVMATLDKQLPGILIETLREQWARVQSLDNEIALIEGRLKRALAETPTCQMISDIPGVGLMTATAAVATMGDPASFKTGREFAAWLGLVPRQTGTGGRIRQLGISKRGDAYLRTLLMHGARHHRSAHIL

SEQ ID NO: 341222 - protein, 340 aa, unidentified
MKSTTIAIDLAKSVFEVGISHQPGHVDSSHRLSREQIGTFMANQPATIVVMEACSSAHYWGRTFQGFGHEVKLLPPLYVRPYVQRSKTDRADVKGMLEAWRNSAIRAVPVKTESQQQLTSLHRVRSGWMAARTKQINMARGLLREFGFVFPLGASALPGRVRELIENADTTLPMPLRDWLHQLVLEIGELEKRVKTAEKQLGALAIQTPVVDLLRSIPGIGPLTSTALVGFVGEITRFPSGRHFASYLGLTPREYSSGSRRRLGRISKQGDAYLRTLLIHGARTILIRAKTSPKPDRFHTWGLELQNRCGHNKAAIAVANKLARIVWAVWKSGKPFESRS

SEQ ID NO: 341223 - protein, 347 aa, unidentified
MAFIGVDLHTNSFTICRLRDDGTEGFETFTLSASALQAFCQSLDANDEIPVKATGNTAWFCDEIRPCVGRVVVVNPRQFQVLRKSVNKTDKNDARALAFFLSKDMLPETRLKSTAESELGSLVATRDVFVKQRTMLLNKIHAMFVRRGTKLKKEGLASKKRLRELDVSQFTALEQVELNALRTQALGLTETLAGLDKAIETAGADLPGHEGISSIKGIGPRSAAVLLAGIGNINDFASADKLAAYVGIVPRVSQSNETDNRGRITRRGNKLMRTTLVQCTLVAIRYSGYLNAFYQRIKERRGSGKAIIATARKLLSIIYDTLKNGWVFEDFTEFKIKQNQCPAGQSS

SEQ ID NO: 341224 - protein, 322 aa, unidentified
MQTQNAVVYAGVDVAKATLQLHLQGRQSELANTPEGRRQLFNQLQNVPGVHVICEATGGYEQAMVKVLHQAKIPVSVTNPAQVRAAAQARGQRAKTDPIDAEQLTDYGQRYQPKATPPTSATQDQLVALTQWLKQLIHGQAMAKTQAEHHQQPFVRRQHAKLMAHLQSQIKSVEKQIEALLNQDAPLQQRVNCLDDIQGVGPRTAWMVLAHMPELGQLNRQQVAALAGLAPWTRDSGTMKGMRCIGGGRPEVRLALYMAALSAARSNPVLRTLYKRLRAKGKLGKVALTAVMRRLLTYMNHQLKDLLSKTATEKTEEQEAKA

SEQ ID NO: 341225 - protein, 342 aa, unidentified
MNKVAIAAIDLGKNSFHLHAQDDRGHELYRKKFTRTALVQHLVNLEPCTVVMEACGGAHFMAQQAVKFGHTAKLIAPHLVRPYVKSNKNDFADAEAICEAATRPTMRFVPVKTQAQQALAMLNSTRDSFIKDRTATVNRIHAALLEFGISLPAGFKSINELTALLEASSLSDPIRKLLTRMHDHFDYLHEQIKSLDKELESQVAEDDLAARLMTIPCVGPITSSALAAELGDGKQFKCGRGYSASIGLVPKQHSTGGKTVLLGISKRGDRNQRRLLIQCARVYLMHLDRQKGVLAQWVRHLIATHHHSNHVVCALANKLARIAWAIAAHHTEFDAGPSAMSA

SEQ ID NO: 341226 - protein, 341 aa, unidentified
MSSVTLIGIDIGKHTFHLHAQDKFGKEVMRKKCSRQQMMRFLANHPPCTVVMEACAGSHCLAREIKAMDHEAKLISPQFVKPFVKSNKNDFVDAQAICEAASRPSMRFVTPKSPEQQTLSVSHRMRESLIRDRTKTVNQMHGFLLEFGVSLPTGLAVVKRLASVLEEHDLPIRLVALLQCLHDHFVYLSEQIKVLDKELESQLADDDLGSRLLSMPCVGPITASLLAVEMGDARQYGSSRDFAASVGLVPRQYSTGGRPALLGISKRGDKNLRHLLVLCARVYMLRLKYQKGPLADWVRSLLARRHSNVVACALANKLARIAWAIATRHTQYKTEPDAINA

SEQ ID NO: 341227 - protein, 405 aa, unidentified
MNAVGIDVSKGKSTVTIRRPGDGVLMPPCDIPHTQSAINALIKLIKSLDGETKVCMEHTGRYYEPVANWLSDAGIFVSAVNPILIRDFGDDSLRTPKTDKADSQKIARYALDRWAKLKQYGSMDKTRSQLKTMNRQFGFYMDQKTAMKNNLIALLDQSYPGANDFFNSPARSDGSQKWVDFVYTYWHVDCVRSKSLQAFTEHYQKWCKRNGYNFSAAKAEKIYLGSSDLIAVFPKDDSTKMLIRQAVTMLNTASQTVESLRLKMDQTAATLPEYPVVMAMNGVGPSLGPQLMAEIGDVTRFTHREALTAFAGVDPGKNDSGKRNQKSVHTSKKGSPNLRKTLFQIMDGLIKRSPVDDPVYAFMDKKRSEGKPYYVYMTAGANKFLRVYYGRVREYLASLEETRES

SEQ ID NO: 341228 - protein, 347 aa, unidentified
MNHFAGLDVSLKRTAICIVDRDGNIVREGVTDTEPEALISWLRSAGFAFQRIGLEAGQCSSWLHKGLSQSGLPVICVETRHAKSVMQAQNVKTDRNDARALAQMMRTGWFKAVHIKTEDSQKLRALMGSRRCLLDKQRDLNNHIRAALRTFGFKVGLIGQSRFEERVRELIVADGDLQALVVPLLEARRTLGEQARVLTRLIGRLVRSDAICRRFMTVPGVGPLTALAFKTTIDNPGRFRKSRHVGVHLGLTPGKYASGEVDYNGRITRCGDAFAREHLFEAAHSLMVNTRRWCSLKAWGIRIAKRSSMKNALVAVARKLSVILHRMWCDGSDFRWEKSTLETAAAV

SEQ ID NO: 341229 - protein, 399 aa, unidentified
MFVGIDWAKEAHEVCAVDASGKVCHRATVPHSQDGLDQLVRCLGRWATEGELLVGIERPEGRLVDRILEAGYPILLVPTFAMKDFRRRYTIGGAKSDRGDCYVLADVTRTDGHRLRRLEPLSAQTRALRAVVRTRDDLVDQRRGLANQLRATLEAYWPGAAAIFADVDSEICLAFLERYPTPESAARLTEARLASFLTKAGYSGRRPATQLLARLTAAPAGVVGVEAEARADAVRAMVRVLRALLRSIKDLDRSVVAHLGEHPDAEVFTSLPRSGQINAAQMLAEWGDCREAYPQADSVAMLGGLCPVTHASGKHRDVSFRWACNKRLRQAMTTFANNSRRASPWAAEVYLQAIARGCDHPHAVRILARAWARVMWRCWQDRAPYNPALHRAARRLKAA

SEQ ID NO: 341230 - protein, 425 aa, unidentified
MDFKQNQKINQVTEKTLVVGIDIAKLTHYACFVDDRGRVLQKSFSVTQSGGGFELFYQRVLAAMKENGKTEVLIGIEPTGHYWLNIAYFLEERGIPLAMVNPMHVRRSKELDDNLPTKHDRKDALVIARLLKDGRFSYPRILKGMEAELRVGSTFRSKLTEELGAVKNMIIRWLDRYFPEFVQVFPTFGKMAMAVLECTPFPSDLHEKQLDEILTLYRKAEGLKSPQRPKALRLIEVAANSIGITEGREMARIEIATLVRRFHQLEKDIENITQHLVELVKTTVEYEWLSTVSGLGDTTIVELLAEIGSFSHYEDPRQLIKLAGLTLRENSSGLHKGQKRISKRGRRKLRALLFRVMMPMIRHNEAFKKLHEYYTNRQVNPLRKKQSIVVLCGKLLKVLHGISTKQKAFDAKRKMRDIPSLAEAA

SEQ ID NO: 341231 - protein, 341 aa, unidentified
MKHLYLGIDWGKNFSQLFGFDQDGEVVIEERLKTLDLSVWRKKLRSLKDYSIHAAFEIGAHYDWLYDLLTEYCGEVAVIDPAQFAVICKSQRKTDKIDAQKIAEGLRRGDLPLVHVPDKQTRADRRLVAFTHWHSQQAASVKGKIRSLLLAQRLECPYSNITGMAALEWLNEQAPQMSDDAQLFLRLLLAEVELLRQQRQELDARVAIRAKRYKQVAVLDSIPGFGQLTILAALSSIAGVARFSRPEQLSSYWGVCSSVYQSGATLRLGSLTRRGNVHVRWLLSQALQHLHRKDARARKRYLKLKRKKPRGVARAAQVRWLTQIIWHLLKKDEPYRIKAAA

SEQ ID NO: 341232 - protein, 363 aa, unidentified
MQTIYIGVDFHARQQTICYLTTETGELVTCELKHQDKEAVRAFYAAFRGQVIVGLEASGYSPWFERLLEELGYEVWLGHATEIRRRARWRQKNDRRDAELILDLMLHNEFPRLHRPALQSREVMRMLRYRHKLIKIRTMSKNSLQALALQAGVAKRSGLFTREGKQELEAALMSPAMQWQREHWLQLLQPLDQQVLEAMAWLKAQSKDDVCIARLRTHPGIGLLSALCLVHTLQPVARFRNTRKVAAYAGFDPVERSSAEHKRFLGISKAGSRLLRHLMVEAANIAVRKDEDLKCFYQRVAARRGRPKAKVAVARKLLIRAYIMLRDEIDYAEFRRRAVAARLARLRQRPNVPAVVIGQPAST

SEQ ID NO: 341233 - protein, 354 aa, unidentified
MSQTLNTAIAVIGIDIGKNSFHVVGLDRRGAIVLRQKWSRGQVEARFVNMPPCLIGMEACVGAHHLSRKLREFGHDARLMPAKYVRPFSKGQKNDFNDAEAIAEAVQRPTMKFVATKTAEQLDLQALHRVRERLVSQRTGIINQIRAFLLERGVAVRQGLRFLRAELPRLLATPPDVLSPRMVRIIEDLAGDWRRLDDRVEGLSSEIQSIARQDSGCERLMKVPGIVPIISSAMVAAIGTGDAFSKGRDFAAWLGLVPRQMSTGDRTILGKISKRGNRYLRVLFVQAAWVVLIKPKSWERHGLKSWIEAGKKRLHRNVLAIALANKLARIAWSVLARGQAFEVRKVDEADAQPA

SEQ ID NO: 341234 - protein, 355 aa, unidentified
MERYIGMDVHAASCTLAVISEKGRKLKDFPVETNGQALVEAIRMIPGHKHLVFEEGLQSAWLYETLRPHVDEIVVAGVTTSRGQKNDKRDAYGLAEKLRVGNLDKVIFKAPRQFTRLRELSRIHVTFVGDVVRVQSRIKSLYRSRGILVSGENVYALRHRAKWQKQLPSDIQTRATRLYDHFDFLIEQKKQAEADLVREAKKHPIVGILETAPGFGPIRAARIVPIVITPHRFRTRRQFWSYCGLGIVTRSSSDWVQTPDGQWIKANVAQTRGLSRQYNRGLKSIFKGAATTVITQRNKDPIYARYERLLDGGTKPTLAKLSLARMIAATVLRMWKDEEEYDAGRAGIPTQTREG

SEQ ID NO: 341235 - protein, 339 aa, unidentified
MQIHSVGIDLGKTTFHLVALGAAGKVIVRKKFNQKQLLAYTANVPASLIGLEACSGAHFLGRALRQQGHDVRLIPAQFVKPFVKSNKNDFVDAEAIAEAVERKNMRFVPIKTDDQLDLQAIHRVRDRLISRRTAVINQVRAFLLERGLVFAKTPAKLRAALPDILENADLDLTPQMRSLIDLLWREWKTVEDQIEGLSLELERISAADPGCTRIRQIPGIGPIVATAIVAAIGNGAAFRKGRDFAAWLGVVPRQYSTGGKARLLGISKRGNVYLRKILIHGARAAVLRIKRDRAPIGAWLDALDARAPKNVVVVAMANKLARIAWACYPAEKTTDRTAT

SEQ ID NO: 341236 - protein, 310 aa, unidentified
METKVFVGVDVSKDSLDVAIGTEKDIITFVNDHQGVDALVKKLNRIDAELTVFESTGGYELLAASSLSEAGLPVVIVNPRQVRNFAKATGILAKTDALDARVIAHFAQAVKPDVRPLKDAATSELTALVTRRRQIVEMIVAESNRLKLANKRNIKDIKDHIRWLKKRLAKIETDIGQTIQNSPIWRCKEDILRSVPGIGPITSAILICDLPELGVLSPKKIAMLAGLAPLNCDSGKFKGRRRIWGGRAAVRSSLYMATLAVTRCNPAIKGFYQRLTAAGKCHKVAITACMRKLLIIVNAMLRDQTLWQQN

SEQ ID NO: 341237 - protein, 403 aa, unidentified
MARKTDSPIVSIVHPVCCGLDVHKDAISACLVMADYNGVERSEIREFGTVTEDLLGLRNWLMEHDCPIVAMESTGVYWWPVHNVLEHYIEVILVNARHIKNVPGRKTDIADSKWLAGLLRHGLLKGSFIPPQYVRDWRDLTRLRKKIQENINDYKRRIHKVFESANIKLGSMISDVFGVTGNQLMDLLVSHDKELTLEEIEKCLQGRLKSTPTEIFRSIQGSFRDHHRYLLKKLRQIIQMLEEERGALTQRLQELMEPHNPLMKRLKAVPGISDVSAAIILSEIGPTLDKFSSSAALASWSGLCPGNNESAGKRKNGRNPVRQHRLRTVMVEVAWGAIRKKGSYYKDKFHRLKARRGPKKALVAIAHRLLKAIYHIVKTGEEFRDLGENYLLLRHQTHRLRYL

SEQ ID NO: 341238 - protein, 363 aa, unidentified
MSHNEFKKIREPIEPQEVSPMKQEMTVLGIDLAKHVFHAVGMDNTGKIVFRKRLSRHDLMPFIAKLPMVLIGLEACGGAHYWARRFRASGHEVKLMAPQFVKPYVKSHKNDSRDAEAIAEAVTRPTRRFVPAKDVDQQDMQALHRVRERLISERTALVNEVHGLMHEYGIVMPKGVSKFRQAVVGKLESEKDKLTPLSQEMFWKLVEEFAALEEQLAYYQKKLEALATTHPECQRLMTIPGIGPLSATALVAAVSDASAFKNGRQFAAWLGLVPRQHSTGGKERLLGISKRGDSYLRKLLVHGARTTIRWVGRKTDRRSQWMRQLVERRGKNRTAVAVANKNARIVWALLTSHQDYQLATGEG

SEQ ID NO: 341239 - protein, 343 aa, unidentified
MQSISTIGLDIAKSVFQVHGVDAAGQVVIRRQLKRRFVLSFFEKLPPCLVGIEACASSHYWSRELRALGHTVQLMPPAYVKPYVKRQKNDSTDAEAICEAVTRPNMRFVPIKTIEQQSCLMLHRVRHLFIRQQTAVINSIRAYLAEFGIVAPVGRRGVEQLLEVVADPAERRLPELARACLAALGSQLRALKAQILEFDRRIIAWHRSNATSKRLDAIPGVGPALATALVASVADAKAFRSGRDFSAWVGLVPKQNSSGGKDRLGSISKQGDRYLRSLFTAGALAVIRYAKIHGARHRPWLTALLARRPTKVAAIALANKLARMAWAMMARNECYREPAALTA

SEQ ID NO: 341240 - protein, 345 aa, unidentified
MEHYAGIDVSLESASLCVVDATGRIVREAKVASEPEVLIGWFRGLGITMVRIGLEAGPLSQWLYAGMREAGLPVELLETRHVRDAFKAMPVKTDRKDARGIAQLMRLGWFRPVHCKSLPAQEVRALLTARKLLQSKNHDVEMSLRGVLRGFGLKVGPTTPRTFVSRIRELVAGHPTLSTVAEALLAARGTLFEQWQKLEKRLRSLAREDRRVRLLMTAPGVGAIVGLTYASAIDDPGRFRSSRAVGAHFGLTPKRYQSGETDVTGRISKIGDGGVRTALYEAANVILTRPVKGSTLKSWGMRLAARAGMRKAKVALARKLAVVLHRMLADDTEFLADKAAATAVR

SEQ ID NO: 341241 - protein, 425 aa, unidentified
MATDSQTTDVPFHQQFTCFLGFDWAYDHHDVVALDGPGRILLDLRLEDTAEGWAHLRRQLLERVGPDLGRTAVAVETCNGPAVERLLGLGCAVFPINPKAAERYRERKAPMGAKSDRLDAWSFADALRTDGHGWRRLVSDDPLTQELRILCRDEIALIQQRTALVCQLKQALHEYYPAALEAFEDWVNDGAWAFVAAFPTPSALVQAGKRRWEKFLHAHKLYRPETYLRRLAVFARANAFTAGAGITAGKSRLALALVAQLQVLQKQLGLYRKAIEALFDRHPDRDIFGSLPGAAEKLAPRLLAELGDNRQRFDDAQGLQCYAGSAPVTKASGRRRVVFFRTGCNKVLRSTVHLWADQSRKKCLWAQVYYEHKREEGKSHACALRCLAQRWLKIVWKMWQTRSVYDPDLHMRNQVKHGSWVVQPA

SEQ ID NO: 341242 - protein, 415 aa, unidentified
MALKIVYKVCCGIDVHKTFVVACIASTNKQGVTTYKSHRFSTYTKGLKELLQWLLESNCKDVCMESTGKYWIPVYNVLEKDCSIVLAHPKYVKAIRGKKTDKKDAKWIADLFKHDLVAGSFMPPADIRQLRDLMRYRYKLTCFMSSEKNRLQNCLTVSNIQLGNVVSDTFGKSSKRILDKILENPLDTSFDIEPLIHGSMREKIPELELAIDGYITPEQASKLKIIKKHFEDLESRKTELEELILALAGPYQQELELILTAPSFNNIFSAITVISEIGVNMESFPSAKHLCSWAGLTPTNNESAGKKKSVRVSKAGCYIKPLLVQCANSVVKSEKHPEIRNRYLRLRKRRGHKKAIIAIARMLLTALYNMLSKKEPYNAELYRKSDVLPADREITVEQAILIAKFQGYRIKSAAE

SEQ ID NO: 341243 - protein, 343 aa, unidentified
MEQYVGLDVSLEQTSVCVVDGSGKTLWQGKCASTPEAIAATIRAKAPAVVRIGLESGPLSSWHWHELRKAGLPVVCLDARHAKAALALQLNKSDRNDARGLAQIVRTGWYREAAVKSVDSQLVRSMLTTRAQLVRMRVDLANQIRGVLKPFGLIAGKGGGQPFVERVRTLVAGGPLQEVAEALLSAWRAIGEQIAALGRRLVAMARRDEAVRRLMTAPGVGVLVALTYVSVVDAPERFARSSSVGAYVGLTPRRYQSGEEDHTGHISRCGDKLLRTYLFEAAGIILHRVSRWSTLKAWGTRLARGIGTRKATVAVARKLAVILHRMLRDGGEFRWSAKEVQAA

SEQ ID NO: 341244 - protein, 440 aa, unidentified
MQIPQNQIHTMKITTRISPINPNLLKVTVDVGMESLYAYTELPPQTNAAHCLEETIPNRNQPIIRALEQFSQLARQHGFEGLCVLCEPTGGYERRLLRLARQAGHFTAYLNAESVRKLRVVQSNDSTKSDLKDPKTMFLLAKLGKTLTHRNLSGPWLVLRETHAYYEEHDRHNVVLRCQIHRVLTQLFCEFTFKKDFLFESPALPHLVREFGLNPYRIVATGQAAFYRRMKKHGVRLRTLERLWQDAQRSVLQHLEPGYSDLLETNLRELFEDFWRCQQRLEAARQQMIGLLHQLQAQGEVKLTARHGLINEFLLARILAETGPLEDFKSWPQLLRYAGMNLCERQSGTMIGRRRISKKGRTLLRKVMGQVVLPRVRKTDLYGPYYHGKKANGMVGQKAMMAVARKFLKLLWGLNRSAQDYAPARVFCSATQFQPLAQAA

SEQ ID NO: 341245 - protein, 430 aa, unidentified
MKSNTQNAKIEAITEKTLVLGIDVGSETHYARAFDYRGIEYSKKPFKFSNTEAGFVTFKEWILDLKEKHEKDKVVPGMEPTGHYWFNLGKFLQDNEMKPVLVNPHHVKKSKELDDNNPTKNDSKDPKVIAGLVREGRYMIPYLPDGVYADLRTASNIRFQLQAELTRIQNRISRWFNIYFPEYKTVYGKSDAKSGMLILKQAPLPEDILTLGIDGVNQIWRDAKMRAVGKARAKTLIEAAEHSVGSKEGAISARMEIRMLLEDYESRNIRLQEIMTLIEELVNQIPMAEKLLEIKGVGIKTVSGFLAEVGDISRFNNPKELQKLAGLALVENSSGKHKGRTTISRRGRKRLRYLLFEVAMSLVAKNPEFRELHTYYTTRRLNPLKKMQSLMAVAAKLIRVFYVMLTKGVDYDPKKMVGDIKRPAVYLQAA

SEQ ID NO: 341246 - protein, 458 aa, unidentified
MSKQKKKKTKNSKSVKSLHLLQPDAAGIDVGATEIYVAVPDDRCPEPVQRFSAFTEDLHSAAKWLKACGIKSIAMESTGVYWIPVFQILEDYGFEVFLVNARHVKNVPGRKTDVQDCQWLQYLHSVGLLSGSFRPAREICAVRSLLRHRNNMVKTAARHVQHMQKALTQMNLQIHHVISDLTGVTGLAIMDAILIGERNPSKLAELRDRRIKADKKTITKSLVGDYRSEHLFTLKQALQSYRHYQEMIRDCDIEIEKHLNEFDSRIDTEQNPLPPSSSGKKKPGRNEPSFDLRTHMHRIFGTDLTEIDGINVITTHVLFTEVGPDLSKFPTASRFCSWLGLCPNNKISGGRILSSQTTPVANRAAQALRMAAQSLWNSQSYLGQYYRRMRARHGAPKAITATAHKLARLVYHLIKTQKPFDETVFAEQEKDHKRRLENKLRAQAKFLGFQLVPVNAQS

SEQ ID NO: 341247 - protein, 349 aa, unidentified
MNDTRVAVDLAKSVFQVAVSTTPGRIDQHHRLSRERFRRFFAQHESTEVLMEACGTAHHWGRELEALGHRVRLLPPSDVARYRDGNKTDRADAIALLEASRNEAIDPVPVKTIEQQALTSLHRLRSAYVADRTARINTVRGILREFGHTIPQGARTFVAHARVALDDELLPRHLRDELGRALDEIVAFRKTADGITRHIESLAEQLPDVVYLRTVPGIGVLTATALVAFIGEPHRFRSGRHFASFLGLTPRENSSGLRRRLGRISKKGDTYLRVLLVHGARSALLAAHRAKEPGPLQLWALRIQLRSGHNKATVALANRLARIAWRVWRDQRAYESHPVFGHPGQGGRH

SEQ ID NO: 341248 - protein, 338 aa, unidentified
MKDIIYDHYIAIDWAATNMAIARMTKKSNKITAIDVRSDITELQFYLKNLAGSKILAIEETTTSQWLYTELKDYVDKILICDPCRNSLLSEGPKTDKIDAAKLVQLLKAGLMKEVYHSTDKFIYLRRIVSGYEDLVKAGVRLKNQRYSLLRICGKDGYEKDIQLVSRDDQYVLECLDRQIKNYEEEKKGYEKEFERLARKYSEIRHQKSIPGIGLINAVKIVARVVTPHRFSDKGHYLSYAGLIKHEKISGGRSYGKKNPRYCRIMKCAYKSGVIAAIGNNNPINDYYEYLINEKGYPEYNARNKACRLLAIVSFGVFKSGEKYNPYKKDHIKKGKKV

SEQ ID NO: 341249 - protein, 346 aa, unidentified
MVVGVDVHKRSHAAALVDGNGVVLAALTIPNSVAGVERLLGWLTEHDARDAVIGIENAAGYGRLLCAALAAAGCEILNVPAWRTHRDRHEQGRGKSDPGDAVAIAHVVLRKREQLGPALEPELIRALALLEGLRRQSVYNRTQAIQRLRAIWTQVDPEGEARVIHCQRQRELRKLTRIAFGAGIAEQAAARCIRELAREIERLNARIATLEHELEQLLRECGNPFADLAGAGATVAVALIAHSGDVRRFKDKGAYARFCGVAPIRCGSGQTAGHHRFDRGGNRQLNAALHRIAVVQARVDPRAQAFLTRKRAEGKTTREARRALKRHLANVVYRRLHAWAENALPT

SEQ ID NO: 341250 - protein, 344 aa, unidentified
MEKRHIGIDLHRNQFTCCVRLANGRNYLSTWKLEALPEFVKKLRPSDEVAVEVTGNTRLFYDAVAPQVARVVAVDPNQFRVISHSVKKTDPNDARSLALYLAKGLLPEVRMKEKTQAQIASLTQTRDPLVKLRTALQNKVNNILSAHGINLEKEALSSEKKLGEVLAMPFDPMVQIELKVIVEQIRSLNQSIAELEKTITDEGRKLPGHKNLTSIKGIGPLSGSILLSVIGNIHDFPEEGKLAAYFGIVPRVSNSNATERSGRITKRGSKLGRTALVQCALIAQRYSPYRKRFYEKTTARRGTGKAIIALARKLLGIIYRTLKNNWVFEDFPHFVLAEPAEVTS

SEQ ID NO: 341251 - protein, 342 aa, unidentified
MQITTIGLDSAKNVFQVHGIDGNETVVVRKQLRRGKLIAFFESLAPCLVGIEACATAHHWARELTRLGHQVRLMPAKDVKAYVKRNKNDAADAAAICEAVRRPTMRFVRIKSTDQQCQLMQHRTRDLMMRQRTQLINALRAHLAELGIVAAMGDKGVTELLMIVADEDDGRLPVEARASLALLAAQLNALQMLIGSLEKQIKMQHRANPASQRLETIPGIGIIGATAIAATVADPTVFRSGRDFAAWIGLVPRQESSGGKHKLGSISKRGDRYLRRILVVGAHSVLRRAMEKPGKYPWLTQLMARRPFKVVAVALANKMARMAWALLTYGGTYRAPRLSIVP

SEQ ID NO: 341252 - protein, 347 aa, unidentified
MRFYNEQHKYYCGIDLHARKMYVCILDHKGKTKVHKNIATDPEQFFELIFPYINDVVVGVECVFCWYWVADLCADHHIPFILGHALYMKAIHGGKTKNDKIDSYKIASLLKGGNFPTAYPYPAKWRATRDLLRRRMYISRRCSELVAHIQNTNTQYNLPAFRKKLSRKYNHDGVAERFEDPQVRKSVEVDLAIIDTLNQILKKLEWHIEKTARSHDYHSLYLLRSIPGVGQILALVILYEVHDIKRFARVQDFSSYARLIKPAKESDGKWAGHANKKIGNHHLKWAIKEAAILMLRASAQAKNFVAKYSRKYNKGKALGIFTHKLGRAIYFMLKNKQAFDMKRFFAQ

SEQ ID NO: 341253 - protein, 355 aa, unidentified
MSQEKYIGMDVHPATISVAVMDAGGKLIMECLLETKAATIVEFIRGLHGALSLTFEEGTSAAWLHDLLKPHVSRLVVCDPRKNALLKDGNKSDRIDARKLAELLRGNQLHPVYHGEHGVRTLKELGRSYLTITQDVTRVMNRIKALYRSWAIPCAGATVYSPRHRAEWLAKIAEPGVRVRAERLYQQLDLLQPVRLEARRELLAESHKHSGVKLLRQIPSIGPIRSALLVALLQTPHRFRTKRQLWAYCGFAVETHDSGEYRSVRGKLQRNRERMTVRGLNDNHNRDLKNLFKSAAVSASTRPGPLRDFYAARVEKGMRPTMARLTLARKIAAISLTIWKKGVHFDAKQLDQQTA

SEQ ID NO: 341254 - protein, 343 aa, unidentified
MNITTVGIDLAKNVFQVHGVDERGKVLLRKAVKRADLVKLFASLPKCLIGMEACGSAHYWARQLMELGHAVKLMAPQFVKPYVKTNKNDASDAEAICEAVARPNMRFVPVKNIEQQTVLALHRARQGFVVERTAQGNQIRGLLYELGIVIPKGIRCIERQIPRILEDAENGLPQISRALFARLFEHFRELGAQVKELESQIKTWHRQNEASGRLEAIPGVGVLTASALVASIGDAKSFKNGRQLAAWLGLVPRQDSSGGKERLLGISKRGDTYLRTLLIHGARAVLFHRMEKSEHQQSWLMKLRARRNPNVAAVALANKNARVVWALLAHEREYCALSMASAA

SEQ ID NO: 341255 - protein, 343 aa, unidentified
MLEVSIIGLDIAKNVFHAHGADASGRALFSRKIGRGKLLEFFAGHQRCTVALEACGGAHHWGRELTRLGYKVKLIPPAYVKPFVKRNKNDAADAEAICEAAQRPSMRFVAIKSEEQQASGLVFRTRDLLVRQRTQLINAIRGHLTEYGWVAPKGPSHVAMLGDLLEDEMASSLPEAARSMFRTMLDLLEELNEKIGDLDKEIARRAREDAVARRLMTIPGVGPITATALAALAPPAESFTKGRDFAAWLGLAPRQMSTGGKQKLGSISKMGERTLRRLLIIGCSAVVLQASKRGAPQGSWLEQMMARKPRMLVTVALANKTARIIWAVLVKEEDYRAPVAVAA

SEQ ID NO: 341256 - protein, 413 aa, unidentified
MTEENFAWFAGIDWGSERHQACLVDAQGRIVGEREFPHGGKGLADLCDWLLSMCGAAETVAVGIEVPHGPVVDTLIDRGFVVHAINPKQLDRLRDRHSVAGAKDDRRDAYVVGDGVRTDRRLFRRVHVTDPRLVELRAWSRLAEELTEERVRLSNRVHHELWRYYPQMLKIADGDVAATWVLDLWDLAPTPARAHRLRAAPVEKLLKHHHIRRIDADTVLRNLQEPAIKVGKGVAEAASVHLRSLFTRLRVVNRELRQADAKLDALCAAIGETDADSGEGLQRQDVMILRSMPGIGRINLATLLCEGSGPLSRRDYPALRTLCGAAPVTKRSGKSHIVIMRYASHVRLRNVVYHWARVATQHDPKSRERYAALRRRGKSHGRALRGVADRLLGLACVLLQRQTPFDPNFAQAK

SEQ ID NO: 341257 - protein, 333 aa, unidentified
MPRARSNLLDWDFMKSATTNEKIFVGVDVSKAALDVYRPDTKEEFKIDNSDEAIALLCSQLKKMKRNVMVVMEGTGGYEYLLLKHLAAHKLEAAVINPRRVRDFAKGIGLDAKTDPIDARVISKYAEVVVPQPMVTKSDHELKHVALVARRNQLLELVNQENNRLKQSWDDDAKQSIRDVLEMLKKQLKSIDSQLAKMIQADTENQRAIEVLQSVMGVGPVMISTVLAELPELGKLNRGEIAKLVGVAPINRDSGKKSGKRFIGGGRGQVRRVLYMATIVAIRHNPAIKAFYAHLKSKGKESKVAIVACMRKFITILNLLIKTDQLWEDKMSV

SEQ ID NO: 341258 - protein, 434 aa, unidentified
MNDQTQPTPAPLTPDYAAFVGLDWGDEKHALSLAAAGSDLVERATLDQTPEALADWAHALRTRFPNRKIAVAVEQARGALLAGLAQYEHIVPHPVNPKSLARFREALYPSRSKDDPVDADLLLELLLKHRGHLRAWRPDTVQTRQLALLNEQRRHFVDLRTSLTNQLLSHLKAIFPQALVLLGEDLASRMATDFLKKWPTLQAVQEVKPAALRKFYFGHNSRSEQSIAQRLALVKSAVALTADPALLAVHSLAIRTLAGQLEALRPFLDQHDQQIAQLFAAHPDGPLFQSLPGAGAVLAPRLLAALGTDRSRFPDPVAVSCYSGIAPVTEKSGKTQYWVHVRWSCPKFLRQTWHEFANCSRKFSAWASLCYNNLIKRMKHHEAIRKLAYKWQRIVWRMWQDRQPYNEARYLASLQKRGHKLYADAPVQPIKSGE

SEQ ID NO: 341259 - protein, 414 aa, unidentified
MLYVGIDWAVESHTVTLLTCPGKVLESLVIANTRKGFLALLDAIHRQMGENKPAPTPGDVLFIIEDRNQRLVDFLLAQGFAGYLMEPSRMTGYRLRYRSSGNKTDPDDAFIMADVLCRDRDQLPTINPMNATVQTLKTLLLDREGFVRDQTRLINRLTACLRQYYPEALELFSDVAGKTALAFLAAHPDFAAAHRLSREQTQQFLTEHHCHRSECLERIVAVLAQEPIAVPAVVIETKRRLALHIIQQLQAVQTTVAEYDAEIQRIGDENEEVQRFRSLPGAGPQIAGGLYTLMGDDRTRFRCATALQSFVGTAPRTIQSGKMRAVCFRFGRNRFYQTLAQQMALSALRASAWAKQYYRGKRAEGKRHQHALRCLANLLMKIAFAIWRDRTTYDENRHLAQIMRHQMRQKSSMA

SEQ ID NO: 341260 - protein, 413 aa, unidentified
MRIVYQRCCGLDVHKRTITGCLLVLESDGEQHQEIRRFGTMTKDLLEMADWLQAADCTHVAKESTGVYWKPVYNILEAHSFHVIVVNAQHLKAVPGRKTDVIDAQWIAECFQIGLLKSSFVPPAPIRELRDLTRYRISLTQDRARTVNRLQKVLEDANVKLASVVTDIQGVSAWAMLRAMVGGVTDPQALAGLAKGRLRQKHEQLEEALSGFLKPHHRFLIAEQLSQIDYLDDAIERISSEIGERLRPFDDLVKLLDTIPGVGRQTAESLLAEIGWDMSRFPTHRHLAAWAGICPGNNESAGKRRNAKTRKGSRWLRHTLIEASHAASRSKRTYLCAHYHRIAAHRGKKKALVAVSHSILVIAFYIITRREPYTDLGPNYFDSRDREAVRRRYVRRLEQLGYKVTIEPLSQVA

SEQ ID NO: 341261 - protein, 458 aa, unidentified
MYRELQPFREALSRELKASLFPAVARVDPEKLLETYLDRLTMYTGVDVADQTFTTLALDAGREILGSLEGCPNGPDGFERFITWARDVRDQHGLRIIAVAGETTGIYYWALWDFLGEQADVARILYNPRTTEHMGEVLSKKVRNELVDALLLAEQLRLGSTPEVLLQEDADLLTARYYSRAARDLAQQINRKKNQLRALLRAYCAPLLQVFPGSKLHHPAVYALLQESVFPDEFVRVGDETLAATLVAHCRSAFGLAQAQQLVEASHRAITRPIGRGAIRSLVHAHIEDITTFQQRKARYLKAGYALIEDRLETKLLRTVKGAGVSNTLALVSEIGDVQRFSTGDQLASFLGLTTSKHISGATIFHSKRITKQGSPNGRYAAVNVAQHLSQRVPRYQAMYQRIKVRKPQRKGHFIALVAVARDFVSNVLYDMWRNQRPFFLEVGDYRAYRKKQSRSND

SEQ ID NO: 341262 - protein, 394 aa, unidentified
MAFKIFRKNCCGLDVHKTWIYACMGITDTNGRTEYKQARFSSFTKGLQKLADWLAKYDCNDVCMESTGKFWIPVFNILEKTCWVTLAYPKYTKPQKGNKTDHKDAKWICDLYMCDMVNPSFIPPPDIRQLRDLMRYRSKLTNIMTSEKNRALNCLTVSNLKLNDVFSDVFGKSSRSVIRYILEHPGETFQVAPFIDRRCKHPVEEIQAVIDGTISHQQAVKLRECLQHLDELEVHKTNVEKEILCLVQQYPYQLELLQTVPGFSGNIMTAIALISEIGADMSVFPSAKHLISWAGCCPRNDQSSKKVKSTRISRAGVYLKPLLVQVAIQPFTANADKLSAAGALEIRCQICDGRFLSMWAALFIFLGCPLPPCPKNLHVHNGRIVILASVAWIF

SEQ ID NO: 341263 - protein, 421 aa, unidentified
MSYTVAAIDIHKKVLMVVVATSAEEVQDVTGEALEFECRRFGAGSGERKHLVAWLQEQGVREVVMESTAQYWKPVWLDLEPHIAKLHLAQAYSNRAPKGRKNDFRDAKRLSRRLLAGELMLSFVPEPEQRTWRTLTRSKPQLVRDRVQLQNQLEALLEEMRIKLSGVISDLLGVSGRRILTALSEGESDPGKLADLGDDRLKCSREELTDALQGAPTPTHLAVLKLFLERLKLLDTQIQSLDKLVAQEMKKHEEAVIRVAEMPGFGVDSAQQVIAEVGVAAETFPSAGEFSSWVGVCPGSDISAEQNKSSHSAKGNRFVRKILTQAAQAAVRKKGCHFQSVFRRFLPRLGYNGAIWAIAHRLGRLLWKILHDGVCYIEQGTETNPRAKKRRAQKLAQALRRLGYAVTLTPITPDPVVEGQA

SEQ ID NO: 341264 - protein, 372 aa, unidentified
MNTIAYIGMDVHTTNYTLCAMTVESDMPFGRGTINPEMKELEKYLNKLHERRGFTHFICGYEAGCLGYSLFRAISSHKWKGFSVECLIIAPTTIPVPQGGRIKTDRRDAMLIAQTMRNGTCGYVYIPDQNDESVKEYIRMRNDTQTQLKSTKQQICAMCTRQGHHYPEKSRWTQAHLEWLKKLTFPNALFREILDEYLFTYTQQTERLARYDRRIEALAQTERYNNRVRALSCLKGIATHTALSLIVEVGDFNRFPEAKNFTSFLGLVPGENSSSTRINRLGITKSGNNHLRRLLVESANCFSKGSKIKSKALKARQEGNPKEIIAYADRANERLRRKYINIQLRSKGAIAKVAVARELACFVWGMMTGRIA

SEQ ID NO: 341265 - protein, 339 aa, unidentified
MSLYVGLDLHANNNFLAVIDDKGKRVDHKKLPNDAQLVLEALRSDQGEIEGVVVESTYNWYWLVDSLMEGGYSVHLANPSAVQQYSGLKHVDDKHDAFWLAEMLRLGILPEGYIYPKEERPIRDLLRKRRHLVKLRTSLILSLQNIISRNCGFLLKVNDVKCLKEDRVHPLLEENEDLALAGRVSKETIDFLTRKIQAIEAVIVKRIELREPYQYLLTLPGIGKVLALTIMLETGPLSRFAKVGNYVSYCRKVSSRWVSNEKTKGKGNKKNGNKYLAWAFSEAAEFARRYHAEPRAYYNRKMQKTNFMVAHSALAHKLARAAYYVMRDQVPYQPEKLFA

SEQ ID NO: 341266 - protein, 398 aa, unidentified
MVCVGIDVAKDKHDCCILDSDGTIRADCITIPNNMDGFKQLLQTIRDCTKKSDKIKVGLEATGHYSYNILGFLLDNGLPTYVINPLHTNLYRKSLSLRKTKTDRVDARTIATMLLSDVDLKSYTDTAYHNEELKSLTRYRFDKVRERAKLKQSVSRLVTILFPELEKLVPSLHIASVYSLLSEYPGAKQVSEVHLTKLTNLLATASKGRYGKDKAIQIRDAARTSIGSVMPAKFLELKHTIKLIRELTSEIDEIEVSIQKIMDELNPPILSIPGVGIQSAAMILAEIGDFSNFESPDKILAYAGCSPSTYQSGKLTNCYAHMEKRGSRYLRYALYNATKYVCHWNPVFAEYLAKKRAEGKHYNVALSHAMKKLVRLIYALQKSGKTYLTAACSCMIFS

SEQ ID NO: 341267 - protein, 332 aa, unidentified
MRYIGLDIHKKHTQACVRNEHGNILSSERFRTESEDIAEFFARQEVHGPLSVSMEATGFYFWIHDRIVARGHRVMVVHPARIKPLMKAKAKNDRNDASMLAELLRSGCLQGIYVPPPEIREMRDLTRHRESLVRKKGDLKREIVSSLDQHGVKTPSDYRVNFTKKYIEWLRSLNDFVVSEKLDMLEMTVGKIKNVERLIEERWGEDEDVQIIRSVPGVGLVTATVLKAEIGDVARFPSAENLAAYVGVSPTTFQSGEKEWSGPARHGNNRVKHVLIEAALVHTRSCPDSKISRYHLRKRDSIGRKKANVATGRKLVEAIYFMLVRRQTFHAH

SEQ ID NO: 341268 - protein, 287 aa, unidentified
MERQYIGIDLHKASFHACAISDDGTRRWEAQFPRTAEGVVAFAARGIDEAQLAVEATGRTWPFVDAVTAAGVHACVVDPRKTKLKAGFAAKTDRLDARRLADALRRDSVVSVYVPPPAIRELRELCRGRQQLVRTRTRVIQAIRALVLRQDAPEPPVTSVIGKRGLQGLATMHLTGASEQALRRLERVLRAVHGEAQAADAAVTVEAARDSIAIGLRRLPGVGPVLSLVLRAEIGTIDRLARGPALACYAGIVSRLDASAGHRRYGRITRTGSLGCGGLSWKSRCER

SEQ ID NO: 341269 - protein, 366 aa, unidentified
MKKISTMQAFSNEIFKEQKLTIGVDLGDRSSAYCVLNEAGEIILEHKLATTPEAMKQVFGSMPRCHMAMETGTHSPWVSRLLTALGHEVIVAHAQKVRLITKSRRKDDRMDARTLARLMRIDPQLLSPVKHRSAQAQLHLTEIRARAVLVSARTALVNAVRGLVKSYGERLRKCSTEQITRDATSGLSTGLREALDPLLREVDALNERIQEYDRRIEMMAKKTYPETALLKQIKGVGDLISTTYVLTLEDPHRFRKSRDAGCFVGLQPGRRNSGESEPQMRISKEGDEYLRTLLVQGAHYILGPFGEDSDLRRWGRKLSARGGKIAKKRAVVAVARKLAVLLHRLWVSGEVYKPLHNSQKAMTVAA

SEQ ID NO: 341270 - protein, 365 aa, unidentified
MNCVGIDVSHGKSIIVVMRPFGEVVVSPFEVLHTDSELSKLAGLLKSLDGETRVVMESTGYHHTPVAWLLHDAGLYVSVVNAMLVHDYGNNSLKRAKTDKKDAVKLANCGLDHWLTLPRYVPEEDTRLMLKTCYRKYQQYSKVQTMLKNNLISLLDIAFPDANRLFTSPPRADGSEKWVDFVAAFWHCECVCNLSEKAFTAKYHKWCRKHRYKFCEDKTLDIYSSACGHFGVIPKTDTAKLLVEQAISQLQATSAALAALKQEMQSLAASLPEYPVVLGMFGVGPTLGPQLLAEIGDVRRFHSKKALVAVAGIDAPPYQFGQMDVRSHSISKRGSASLRRTLFLVMSVILQHAPMNEPVYQFMNK

SEQ ID NO: 341271 - protein, 407 aa, unidentified
MTTETNQAREGLVHGLDAHPYGLTLAVMSSRDPRQAVASKRITFSLSQLANILHQHTHPDDTIVLEASGNSFHLARRIAAYGRRAIVLESQSVSLRTRGTPKTDCLDAEHIARAYLGGQAKVVWTPSLEAAEWREIYFAYRDAVRDSVRARNRIWAMLNANGKLGDRRRRECERHGGVKLDRPGALDALQKRLQGTPTQAIRLEDEFNNYRQAETRRHRLETEIARLVMSHPLALRLVRLCGIRHLVAFALLAFIDDIRRFQNPKSLVRYLGLDPSVSTSGIGGGTSGLHGAGRADLRALLVEGAKSVLRSNSGGDLKRWGVALKMRRGANIAACAVARKMAVAVWHLLMGNYTPLFENEVTQALRRKLATIATHVGSKFIRAKGYATNTAYIADILKTIVTPVNAT

SEQ ID NO: 341272 - protein, 315 aa, unidentified
MSDVPCFIGIDVAKAQLDIALRPSGERWAVPNDASGVAMLVERLQTLHPTLIVLEATGGLERAATSALAAAGLPVVVVNPRQARDFARATGQLAKTDALDARALAHFADVIRPTPRPLPDAQTQELRALLGRRQQLIGMRTAEQNRLAGASERLTKDITAHITWLNVAIATLDDDLETMLRASPLWRTNDDLLQSAKGIGPVSAHTFLLELPELGTLTRQQIAALVGVAPLNCDSGTLRGKRTIWGGRAHVRTVLYMSTLVATRFNPQIKVFYERLLAAGKVKKVALTACMHKFLTILNAMLKHRTPWQPQEVQS

SEQ ID NO: 341273 - protein, 403 aa, unidentified
MNAVGIDVSKGKSMVAIMRPFGEIVSTPFEIKHTSSDINSLIELINSVEGESRIVMEHTGHYYEALAHELSAANLFVSAVNPKLIKDFDNDSLRKVKSDKADAVKIARYALDKWQNLKQYSVMDELRIQLKTMNRQFGFYMKHKTAMKNNLIGILDQTYPGVNSYFDSPARSDGSQKWVDFASTYWHVDCVRKMSLNAFIDHYQKWCKRKKYNFSQSKAEEIYGKAKELVPVLPKDEITKLIIKQAVDQLNSASSTVEELRTLMNETASKLPEYSIVMNMKGVGPSLGPQLMAEIGDVSRFTHKGAITAFAGVDPGVNESGTYEQRSVPTSKRGSADLRKTLFQVMDVLIKTMPQDDPVYQFLDKKRAQGKPYYVYMTAGANKFLRIYYGRVKEYLATLPESN

SEQ ID NO: 341274 - protein, 429 aa, unidentified
MNSTQNKKIAQVKETTVVIGIDVGSEKHYFRAFNWRGIEVTRKPVSFMNSKEGFDSFYKYIVELMQKNNFKEALVGFEPTGHYWFDLGQYLGGKKIKFVLVNPHHVKKSKELDDNSPSKNDPKDPKTIAGLVREGRYFYSYMPTGVYAELRNAYTRRFAIVKEQTRAKNRIQRWISIYFPEYKGIYTLIDSKGGLMVLKKAATPGEIVRLGVDGIVSLWKKAKLRANGRSKAMKIVTAAMNSIGLRDGLESAVMEIRDLIEDYELHTKRLEQINDLIKKLCLQIKYAEKLLEIKGIGITTVAGFIAEVGDITRFDNAKELQKLAGLELVSDDSGKHRGRKRISKRGRCKLRYLLFQAAISVVGKNEEFSEIHHYYTTREKNPLKKMQSLIAVACKLIRVFYAVLTKGTSYNASKMLEDIRRPGSGLQAA

SEQ ID NO: 341275 - protein, 423 aa, unidentified
MDVIHDRVAGLDVHKDTVVACVRAMSGNRAMRECRTYATTTEGLSALLEWLNSEGCGLAAMEATGVYWLPVWKILSQGEFELILANAAHIKAVPGRKTDMNDAMWIADLAAHGLIKASFVPDQEMHDLRTLTRTRKQLVREQTRHVQRIQKTLTEANIRLDSVLSDIMGLSGRRMIEAMIEGVRDPRKLAALAGRGVKATPKELYDALHGRLTDHHRFLLKLHLGQWDALDASIRVVDREVDARVARMDTEARADKARFSDAISQLASIPGVKKVSALGILSEIGTDMSRFETDGRLLAWAGMCSGQNESAGKRKGARLRKGAPWLKTMLVQCAWAAKRAKNSYYRAQFYRLQARRGPQKAICAVAASLLRAIYHMLKNGTFHQDLGAAYFDRRSPESKVKRLARQIAKLGYHVTLQPAANAA

SEQ ID NO: 341276 - protein, 359 aa, unidentified
MDAQEGAVRRIIGGVDTHKDLHVAAVVDEQDRVLGTQSFASTRQGYRQMLAWMRSFGEVQRVGVESTGSYGAGLLRFLQQAGVTVLEVTTPDRQDRRRRGKNDDFDAQNAAHAAFAGIRTVTPKSRDGMIEALRVLSACRKTAVTARRIALQMIQNTIVCAPESLREMLRRMTRMQLVRTLAAWRPDLTAYRDVEAAYRISLKSLARRYLELHDEIADLDAMIAAIVDELAPNLVARNSIGHVGAAQLLLTVGDNPQRLRSEAGFAALCGVSPVPASSGKTARHRLNRGGDRAANSALHIIAIGRLRTEARTQAYVAKRIGEGHSKLEAIRCLKRYIAREVFTLIKQRQREINQTRIAA

SEQ ID NO: 341277 - protein, 401 aa, unidentified
MGVLVGVDWGGGAHAVCVLDAKGMVLDRFEVGHDRAGLAALVARLQQHGAPEVIPIAIERPSGLLVDALVAAGFVVTPIHPNVVKACRSRYRAVAAKSDPGDAFILADILRTDGHRLRPLAPQSDAIKALRGLVRGRDDLVGTRVALANQLTALLASFWPGAGVIFADVASPIALAFLERYPTPESAARLGPKRLARFLAQHRYCGRRSPEALLERLRNAPEGGAGEAEGEAKGEIVRALARTLQALVAEIAKLTSGIAHAVAELPDGRIVMSFPRAGQICAAQILAELGDVRERFPSEHQLAAEAGVAPVTYQSGKSRGVGWRWACNKRLRAALTCMADNSRHHSPWAADVYRRARARGCDHPHAVRILARAWARVLWRAWTDRVPYDPGRHKGAQTLAA

SEQ ID NO: 341278 - protein, 456 aa, unidentified
MRRTKRRSSKIRPALPMVHPNAAAIDVGARMHVAAVGADCSAEPVRSFGTFTTDLHRLADWFAECGVETVVMESTSVYWIPIFELLEARGFTVFLVNARDAKHVPGRKTDVSDAQWLQRLHSHGLLRASFRPKGEIIELRAYLRQRERLLEYAASHIQHMQKALSEMNLQLHHVVADITGTTGLRIIRAILAGERDPAVLALLRDTRCHASVGTITQALTGHYRAEHLFALEQALALYDAYQEKASACDARIEAVLKQLSFRRGRGVGPLPAPRRGMRRQPNGPAFDVRAALFALLGKDLTQINGLGPYLALKLIAECGADLSAWPSAKHFTSWLCLAPSNKISGGKVLSSRTRRSGSRAAALLRLAAVTIGRTDTALGAFYRRLSARIGKIKAITATARKIAVLFYNALRHGMDYIDPGASSYETRYRARVIENLHRRAKAFGFVLHPAAPQAVS

SEQ ID NO: 341279 - protein, 326 aa, unidentified
MGEDDIMSSELFIGIDVSKDHLDIAVRPTAQCLTFENTDTGVDELIRTLLEFSPTLIVMEATGRYHQLALGRLVAANLPAIAINPRQSRDFARALGRLAKTDRIDAALLAEFADKVRPVLRSIPNSDTQELEALSTRRRQLMTMLIAEQNRHHSAPRSLRPGIKKHIHWLEKELEHSDKELKNRIRSSPAWREKEDLLSSCKGIGPVTTHSMLAYLPELGTFNRRQIAALVGVAPFNKDSGKYRGRRSISGGRRQLRSVLYMAALVATRHNPTIRVFYQRLIAAGKLPKVAIVACMRKLLTMLNSMVRHNTPWRADYLLDRQDSLS

SEQ ID NO: 341280 - protein, 373 aa, unidentified
MKRILRIGMDVHSTNYTLCAIEPRFDGDDTIYANVKVTPDPDNIVQFIDRLKSKIKDDCDILCGYEAGCLGFSLYHELAKKGIRCVILAPTTMLTQQGKRIKTDKRDALMIAQCLAYGGYHAVHIPTDKDDDVKVYLRMRDDHKLDLKKTKQRISAFCLSQGSHYDGGKWTQAHFRWLKSLELSRLDRETLDEYLITYEYQTNRIESFDKRIEELASETEYVEKVKKLVCFLGVKTHTALSCLVETGDFQRFAKGNIYAAYLGLVPGEDSSSDQINRLSITKAGNSHLRKLLVEASTGICKGQIGHKSKDLKARQDGSPLEVIAYADKANERLRRKYYKMIRHGKKKNVAVTAVARELACFIWGMMTDNIGMA

SEQ ID NO: 341281 - protein, 355 aa, unidentified
MAEDYSSRVSQCSAKNAACSSSLTLLRLVHRWRDEAVKAGHRITRIIVTYEAGRDGFWLARWLSRHGIEVHVIHPTSVAVSREHRRAKSDRLDIGLLKRSSLGWLRGEEEHCTMVAIPTLEEEDAKRPYREREHLVGRCTSITNRVKATLVRLGIRGFNPTLRKGPERLGTLRTPEGELIPANTLAELQRDMAHLRFLKDHIKQIESAREEKLKQAPEKPANSKVLDLQRVRSIGVDTADMLVHEVFSRELRDQRAVARYAGLTGSPDESGARRREKGLSKAGNARVRRSMIQLAWRFLTHQKQSALTQWFEARVTAGKRRKTMIVALARKLLIALWRFVTAGEVPDGVVLRPAL

SEQ ID NO: 341282 - protein, 369 aa, unidentified
MDSPFADGIECAKLEESTTSNQHKGGVIMKGTTMGIDLAKNVFEVYVEAESGAVIERKRLSRKKLLSWFANRPPALVGMEACGGAHYWARELEKLGHTVRLMAPQYVKPWVQTNKSDQADARAICRAMQEPGMRFVALAGEAQQAVQAVHRVRSRYLGNRTALVNQIRGILLEYGVAIPQGVGAVRKALSLLLTEERWSPLVRQFLLEQQAELTDWDTKIEVVTARIKRENATQPICHRLEQARGIGPLGASALWVKAAGQPYQHGRHFAAALGLVPKHTGTGGKIRLGGISKRGDRYLRQLLIHGARAVVRQVGEKPDRLSEWIRRLVARRGMNKAIVALANKNARRLSHSYPKTRHMMSRKCARPCK

SEQ ID NO: 341283 - protein, 339 aa, unidentified
MNEVSTVGVDIAKRVFQVHGVDSAGAVSVRRTLRRGQMLAWFAKLPRCLVGMEACATAHHWARELAKLGHEVRLIPPAYAKAYVRRNKNDPADAAAICEAVSRPQMRFVAIKSERQQAAAGIHRVRDLLMKQHTMMRNQLRGLLAEFGIVAATGRRGLGELVAILTDAEDQRVPSPLRDGLVMIVETLRGIDRKLETLDRQLVAAGRADATYRHLITAPGYGPILSSAMAAMVVDPAAFRRGSDFAASLGLVPRQEGTGGKVWLGPISKRGNGYLRRLLVNGATSLINSKRAKQDPWLARLLATKPRKVVAVALANKMARIGWALMMRQEDFRSLPAAA

SEQ ID NO: 341284 - protein, 342 aa, unidentified
MYYIGLDVHKKTISYCVKDASGRVHQEGKLGATRRELDIWMRTLPQPWTVAMEATIFTGWIYDHLHPHATQIKVAHPLMLRAIAAAKKKNDRVDASKIADCLRCDFLPECYMAPTEIRDRRRTLRYRYLLVRQMVQTKNRISGLLMETGVTHNKQRLHKVGYFRELLASNEEVSESIRPLLRLSRDTIARLQKTERALVSSLQRDPLLTERIKHLRTVPGVGPITALTWALEMGEISRFRSIRQVISYCGLCGDERSSAEKSLRTPISKQRNKNIQFVLIEAAKLAPRQDHDLALLYEREKQKGNANRATLAVARKMVAYLLAVDRGQRDFVPAEDCRGAAA

SEQ ID NO: 341285 - protein, 447 aa, unidentified
MIGAILERCAGIDVGKKFCVVCVMTGAADEEPQTETRQYGTTPGQLEHLRQWLLEKGCTQVVMESTGSYWKPIFNVLEGSLEVVLANARQVKNMPGRKTDRSDAYWLAHLLRHGLIAASFIPPREIRDLRDLTRRRRKLMAAGAQERNRVQKELESANVKLGSVLSDLFGVSGQQMLEALLEDRLGAQEIAQFAQRRLKKKIPEIIAALEGHRMREHHRFMIRQSLEHMAFLEEQVQALDQQILEKVEPYAKEMELLQTAPGVKTVAAASILAETGADMRQFRDGHHLASWAGVCPGNNESAGKHKSSHIRRGNRFLLATLAEAAWAASRTKGSAFQARFNRLAPRRGKKRALVGVAHSLLLVVHAMLRNGVPYQELDSPYLSQKRRKAQVHYHMRCLRRLGVPIWMMEGSGGEDLAVLEDPAETPPTPFMPPPAAQVGEGDSAPHI

SEQ ID NO: 341286 - protein, 337 aa, unidentified
MDYFAGLDISMDETRICVVDREGAVVYEGKSASTAEAIADELAKAPSCRRIVFETGRMAPILFHSLSQLGLPVVCVESRQAYQALKSLATHKTDRNDARGLAHLARTGFFKPVHVKSLSAHAVRSLIIARKKLVGQRVTLENQIRGLAVVFGVRLPRALTTAFIDQALKASEGVAGLSAAMRGLIAARTAVMTAVAAIDADIRRMTGASEACRRLMTIPGVGQLTALAFVAAIDDPSRIRRSRDVGAYLGLVPKRYQSGEVDYVGGISKRGDRRVRTLLYEAANVMLTRTKGQLKLKDWAFAIARRSSMRKARVALARRLAIIMHAMLRDGTEFVAA

SEQ ID NO: 341287 - protein, 365 aa, unidentified
MIRLTRKDTPCHGIKVPNMVQFSEQSTLGVSNMNSNVFGVDIAKQVFQIHWVDQETGEIHSDKVKRKDFVQYFANQQPSMIGMEACGGAHHWGRLFKEMGHTVKLLPAKKVKPFVYGNKNDVVDARAIWTAMQQPDMKFIAVKTEEQQAILSIHRMRELLVKHRTAQINSIRGLLTEFGLVMPKGKQAFKEKLPDCLAKLEEDTPSAFMCALQVQVERLTQLDEDIKQLEKQIQSWFKHDEDCQRIAKVPGIGPLTATALIASMGDASAFKSSREFAAWVGMVPRQTGTGGRVHLHGISKRGDVYLRTLLIHGARAVMTHSKEKSEWLVSLQARRPKNVVTVALANKIARTVWALVANQTEYQPC

SEQ ID NO: 341288 - protein, 434 aa, unidentified
MKSDFAAFVAIDWADQKHAWMLQTASSTARQAGTIDHTPEAVAIWASELRLRFDGRSIAVAVEQSRGSLVFMLSKYEHLVIFPVHPTTLANYRKSFRPSGAKDDPNDAALLLDLLTLHYDKLRRLQPDTPETRTLQFLVEERRKFVHERTRCSNRITSHLKLYYPQVLEWFDEIGSNIAAEFLERWPSLDKLQRARPATIERFFVDHNSRNAESIARRLDQIRKAVPATTDSAVIASCAAAVIAWAALLKQLVLTIESYDKNIDALARQHPDYALIKSLPGAGPALTPRLIAALGSQRDRYQTAHELQCYSGIAPVVASSGKQRWVHWRWCCPRFLRQTFHEWALHSVAYSTWAREYYDRQREKGKRRNTVIRSLAFKWIRILFRCWKDRTPYNEATYQQAIAKRHPNKAKGAQAVDLRWKKIAGFSKIMAVSA

SEQ ID NO: 341289 - protein, 320 aa, unidentified
MSSSSVVVGIDVAKAHVDVSVLGAKLDAQRFDNLAEAHSALPAALKPLDVVLAVMEATGGYETELACALQTAGLPVAVVNPRQARDFAKSMGRLAKIDAVDARMLAEFAAVLLRRDDLARFLRPLVDEQQQWLAALVTRRRQLLSMLLSERQRLQITPKGLHPSIEAIIAAIKAQLDDIEAQMVAHVGKHFAELDALLQSASGIGPVASATLIAELPELGRLNRRQIAALVGIAPMANDSGSSKGRRRIRGGRFDVRRVLYMAALTASRRNPVVKAFYERLIAADKLPKVALVACMRKLLTTLNAMVRTNKPWDNSLHGA

SEQ ID NO: 341290 - protein, 355 aa, unidentified
MERYLGLDVHAASCTLAVVSQTGKRLKDLPVETNGQALVEAIRMIPGRKHLVFEEGLQSAWLYETLSPHVDEIVVAGITESRGPKSDKRDAYGLAEKLRVGGLKKHVFKAPRQFTRLRELSRIHITLVGDAVRAQARIKSLYRSRGILVSGMNVYGVRTREGWQKQLCSSAQTRATRLYDHLDFLLEQKEQAEADLLREAKKHRIVRILETAPGFGPIRAARLVPIVVTPHRFRTRRQFWSYCGLGIVTRSSSDWVQTADGGWIKARVPQTRGLSRQYNHVLKSIFKGAATTVITQRNKAPIHARYQRLLDGGTKPTLAKLSLARMIAATVLRMWKDEEEYDPGRAGPSMEIREG

SEQ ID NO: 341291 - protein, 467 aa, unidentified
MSHRRLVGIDLGIATAHTVRVLDGEGIVVAKRRAWPTADSLAAVEAAALAGCPEDTRLEVVIEPTGPAWPPIAVFFCARGHQVFRVSSQKAADLRRFLSRHAKSNGIDADTLARLPLFDPAGLRPLQLPGAERAALDRRVRAADRLTQAGADHKRRIKDLVRQLLPASPLTGELGMADLAVLERYADPHALIRLGMTRLTALITKASHHQQGAERALQWQQAAQASLALYDSHPAIDFAGLAAEVATEVRLLRATCAELAAHAAEREARYQAVDPAGLARSLPGIAEVGGPALAACMGDPARFATGKKFRSFTGLTPKASETGQTDRKGQPMSKAGSSLLRTTLVRAADTARKQDPQLARIYYLQMTERGKDHLGALCVVAAALAERAWTVMRRGTPYVICDTGGQPVTPQQASTIIARDWTVTPEVRARRRSKKTGKAPRKSSKDSANGAASPAAPLHLVTGGPSS

SEQ ID NO: 341292 - protein, 422 aa, unidentified
MNYKQNEKINQVKESTLVVGIDIGSTTQYARAFDWRGIELGKVFTFSNSREGFESFKAWMQHLQDKYRKSDVIVGIEPTGHYWFDLGAYLEDEGILLVMVNPYAVKQTKELDDNSQSKNDRKDPKVIAKLVTEGRYSAPYTPDGVYADLRIMVANRKRLIREMTQIKNRFARWFAIYFPEYTDVFGDYEAQSSMLLLKKVCTPEAIVELGAEKINQIWRDAKLRAVGMKRATTLCETAKRSIGLKKGSSAARYEMKLLLEDYEYKKAQLDAVMEEIEKLCRKIPESEQMLAIKGIGVITVAGFLAEVGDVRRFESPRQIQKLAGLSLRENSSGKHKGQTTISKRGRSKLRAVLFNAAIPLIAKNPEFKSLHEYYTTRANNPLKKKQSVIAISCKLIRVFYAILANGVTYDAQKMLSDIHRQP

SEQ ID NO: 341293 - protein, 346 aa, unidentified
MPIVGGLDIHRKQITFDYVDTITGEAQRGQIAPADRAHLAGWLARRFAGQDDVEFALEGCTGWRYVAEELSAAGVVAHVGEPTDTAALRGRKRHAKTDRTDAGHLRQLLADGRLPECWIPPSHILECRALLELYRDLRVEHTAWVQRIHAVLFHQGARQLGAGGLHTEQGLSELRAIAATQLSAAGQLQVATALDLLATLEEHLETLHRRLLHAARHLTGAKVLTAQLYGVGPITALALTCWLAGAGRFSSTRKAVRFTGLDVTVYSSDGKRSPGHLSRQGPAVLRWCVYEAGKTHARTTAPDHRYYAQVKQRIDGKRAAISEARKIVRQAGHILTELGDDALAAA

SEQ ID NO: 341294 - protein, 319 aa, unidentified
METPQVSFKQVVSRGCGLDVHKKVVVATIDGEGLKKQTREFGTVTSSLKELRDWLLENGITHVAMESTGVFWKPVYNILEPAGITVWVVNAAHVKYVPGHKTDKKDSAWLCKLLLAGLLKPSYIPAKEQRELRDLTRYRTKLVQSNASNKNRIIRILEDANIKLSSVLSSTSGAVGTKLIDKICDGEEITMQDVDEVYHKKLAATKEEIYEACQGFITDHHVYMLQIIRQEIANTQRTIKSMDQRIKEVLSPYENALELLKKVPGISSKSVEELVAEIGLDMGVFPTEKHLSSWAGMSPGNNESAGKKKADGQPGGTNK

SEQ ID NO: 341295 - protein, 352 aa, unidentified
MEFVGIDWAYRRAAWCAMGEAGEIRDEGFVPADEDGLAKLVLALGPRVSACVEMMSGAVWVRDRLQAAGWEVEVADARKVKAVAPLACKTDKVDARVLAELCRRDLVPAVWVPSLSDRELRERLNRRAHLIRLRTAAKNRVFGALSQWGLRIPLRVLRAGDAMALLERRGLPEVWRRSVAEALAVIDILDARIAPLEAELRPLVRADERVQLLTTVPGIGDHLALMIAAEIGDIARFATPRKLIGYAGLAPKVKQSGQSSRTGALSKAGSRSLRWAAIEAAQCAWRPTNPWNRLYLDVKGRTGKSNPAKSAVARKVLIAAWHVLARHEPFKPSRPRGGADPVPASSHFHLAA

SEQ ID NO: 341296 - protein, 338 aa, unidentified
MLHIGVDFHKRFSRVVTLDDAGLVVDRQTLQHRDREGMIEYFRSRAGDATVTVEATRGWYWLNELLANLGVDMKLAHPRKVRLIAESVIKTDTVDAGTLAQLERTGFLPEAYVPSREVRDSRELLRYRLTLVRIRTGLKNRVHTVVDKLGIDHPFSDLFGTAGRKFLQSLELRPVYQQQLTSYLELLDEVDRRLKAVTLQIKASVRPDPRAELLMTIPGVAHITAYLLLCEIGDIRRFPSAKKLCAYAGLVPVTRQSADHCWQGRITKEGNRYVRWAMVEAACMATRKDWGLSQYYRRVSGRRGSLKARVAVARKLLTAVWHILTDGQPYRLTKPDVT

SEQ ID NO: 341297 - protein, 393 aa, unidentified
MPQTSPTDRVVISVDPHKASWTAAAVDTALQPLEVIRVAVSAEGYRRLRRFAQRWNNHSWAIEGAAGLGAPLTQRLHADGIEVTDVPAKLAARVRVLSTGHGRKTDEADAISVGIAALTATRLNTASVNAAITALRALVEHRDDLVKTRTQTINRLHVLLTHLTHAGAPRGLTADRAADILRQLRPREPAAKTLRSLAVDLIAEIRALDRRITKAAVDINAAVESSGSTLTELSGIGTLNAAKILARVGTIQRFRSADAFASYTGTAPIAASSGDETRHRLSRAGDRQLNCCLHTMAISQISRDTPGRTYYRRKRAAGMSHREALRCLKRRLSDAVYRQLLRDAATLEGAGPAGHTGATPTSCAAGSHPITSTSDKSLTGPAKPHPTTSDRTA

SEQ ID NO: 341298 - protein, 320 aa, unidentified
MAKQVEECTIGVDVAKGWLDIYAADRDDLQRIDNSEDAIEKWLWGLGGPARIAIEATNRYHELFIERAFALGHRIFVIDAFKLSRYRDAVGHRAKTDRHDAELLARYLRQEQEHLQCWQPRDPRQARLWRLLKRRATLVQTKVRLQQSLADIGVLDDATKELIRHCQQLVRRIDRELQAQARQLGWQQDLQRSGGVPGLGPTTSLALVATFHRHNFRSADAFVAFIGLDVRVRGSGKFRGRRKLTKKGDPEIRRLLYNAAMSGCKDPHWKHYYQSLRDRGFSGTAALMALARKLVRVCYALLEKQVSFDSGIRSVPCNAT

SEQ ID NO: 341299 - protein, 424 aa, unidentified
MGKFTKTLCISERKEYHIMEGPIITVDVSKGSCHYQPFIENGHPMRKPKQLSATIDGFQKLGQTIKDLEAKTEREDIPVIFEATGVYHRPLQKYLEDHKIRYYIISPLLSATYRKTDLHSNKTDALDCAHIAKAYYCEKELRQYQAQPQEYKRLYQLSRIYESELVHLRKRKVSLRSMLDIIYPRIDKTFKGNQNLYDPIPMEILKRYPHPSLLLSHREDTIVKTVGHRTGHLKGYTERIVHKIYEKAKECYSGCEINDIEVLKLPNLIENVQEQKKKCDSLLKEMIEIARICPYFASVVSIVGIGENLAARIIAELGDVNRFDNRAAIVAYAGLNPKIQQSGDIDGLHLKISKKGNKHLRCLLYLGAQCNYRLRKEDPLYEFTKKKRQQTQCPLSSKAAYTASAHKLLVIIYSLCKNGTLYHS

SEQ ID NO: 341300 - protein, 369 aa, unidentified
MKKYITYVGLDVHKNSIDVACADSDKKGDVRPYGKIGGDLGSLDKVIRKMVSLGRELRFVYEAGPCGYEIYRHLTRQGFHCTVAAPALIPKKAGDRIKTDRRDAQMLARLHRAGELTPVYVPHPEDEAMRDLCRAREDARHAERKAKQQLGAFLLRSGFRYTGPSNWSLAHWRWLSDVRMPHPAQQVALQEYIDAVRLCTDRVQRIVAEIEKLVPEWRLAPVVKAIQALRGVSLIVAATVSAEIGDISRFDNPRQLMAYLGLVPSEHSSGEKHKKGSITKTGNGHARRVLVEASWAYRFPARVSRRLWDRQQSLPEAVRAISWKAQLRLCHRYRRLIARGKESKTAVIAVARELAAFIWAVARHVAAAA

SEQ ID NO: 341301 - protein, 317 aa, unidentified
MKTVPFEQVILRGCGIDVHKDMVVATISGEGLKTETRSYKTFSSSLTELKEWLLSSGITHVAMESTGVYWKPVYKILECPDMKVWIVNARHIKYVPGHKTDKKDSAWICKLLLAGLLKPSYIPEREQRELRDLTRYRNKLIQHVSSEKNRIVRILEDCNIKLSSVVCSLDGVVANKLIDMLIDKGHVTMDDITCIYHKKLEASPELLYQACEGFIEPHHIYMLQTIRKDMEQTKAIIADLTCRIKEVLSPYENVMELLQKIPGLSRKTVEDLIAEIGVDMEAFPTEKHLASWAGVCPGNNESAGKTKVVEPPMATNS

SEQ ID NO: 341302 - protein, 350 aa, unidentified
MIIIGVDFHPAYQEIAWVDTDSGEYQEKRLAHPKEAEEFYGCLSCVGQVVRVGMEASGHGRWFERLLEGLGVELWRGDAEVIRAKRGRKQKTDREDARHILKLLLKDDFPRIWVPNWENRDLRQLLWHRHRMVQARTRVMNQLQAVALNEGLRCKKRLFRADGRQQLESFQLAPWASRRRRELLELLDRLNPTIAELSQAVEREAEKCPEAQRLMTHPGVGALTALAFVLIIGETERFQCGKQIAAYLGLVPLEKSSGNRRRLGHITKQGSSIVRFLLVEAAQVTVRSLPEWRSKYIHLMMRRGRKTAKVAMARKLAVRLYWMWRKEWDYEQWKKFGSYVGQPVHRYGVQ

SEQ ID NO: 341303 - protein, 356 aa, unidentified
MKYVGIDVHKKYCQAAVLDDEGELLDQIRFLNKKEDIKEFALKLTTFRDDVKAVVESTGNLWIQIHDILEKFGFEVFLSNPGKTRLIAEVKNKTDKIDAKILARLLRADMLFTCYVPGEEIRNRREFLRARQTFVKNKTQVKNRIHSILDKHGLRFPGTPYSKKSIVWLREQDLGFMDNAVVKGQLALLETLDEQTQILEDKIAAMGMEDPQVKLLMTMPGIGYFTASMLVAEIGDINRFGNEKKLSSWAGLAPRIHQSGGTTRIGRVGRGNKRVSGLLVQCAHNARQHDPRFKRFYDRYSKRRGKGKALVAVAHEMIRIVYFMLRDNEPYRGMNVEMTTRKLKSMKYRASVGLRT

SEQ ID NO: 341304 - protein, 349 aa, unidentified
MLHVGLDLSRRRVDVCLISSEGELVEHFRAPADRDGLYGLSRRVAVYDEPVRGVVESMNGARFVHDELVRYGWEVLVADAQRVKGLAPMACKTDKIDARVLAELSFRDLVPAIWLPTPELRQERERSRWRLHLVKHRSILKNRVHAALIAFGHQVPMADLFGAGGRRLLAELDFPEPWLSHVRASLELIDDLDRRIGEIERWLQRSGADHRYIPLLMSAPGIGWVTGFTIAAEIGDISRFSSPVKLTGYTGLCPRVNQSGEVDRRGPISKHGPRYLRWGLMEAAIHASAHPLYKERYQRTKRRLGRQRGAKVAQIELARKLTEAIRYMLTRNQPFKPFAPAGAIYRLTA

SEQ ID NO: 341305 - protein, 316 aa, unidentified
MTDSPVFVGIDVSKARLDIAIRPAGPPMSVPYDETGIALVVNQLQPLHPTLVVLEATGGLEVVVSGALAAAGFPVAVVNPRQVRDFARATGRLAKTDALDAHILAQFAAAVRPPVRPLPEPNVQELGALMARRRQLLEMLTAEKNRLSSAPRRIRRDIQAHITWLEQQLARLGDDLTHLIRSSPLWREHDDLLQSMPGVGPVLATTLLASLPELGTLDRRQIAALVGVAPLNRDSGTLRGKRMIWGGRAAVRAVLYMGALVGARHNPVLRAFYQRLRQAGKAPKVALTACMRKLLTMLNAMLKHRTPWRPPCAQVA

SEQ ID NO: 341306 - protein, 391 aa, unidentified
MATDIFAKIGDIKDEMCWGTPSVQTLVAMASVMFQELEEVPMTMVGGLDVHRQQITFDYVDDDGLVHWGQIRPATRKTLRGWLAEHFRDGDADFALEGCTGWRYVSEELAAAGLGVHLGDPAETAALRGRKKRAKTDRADARLLRTLLVEGRFPESWIPPAHVVEVRTLGRLYCTLMDERRAWQQRIHAQVFHQGCPPIRALLTRAGREALAGAELSAAGRQYVDTALRRIDELSAEIDPLRTQLISFARRQPGCRALQRHYGVGWLCAVIIWAEIGDARRFSSSDQLVRFAGLDVTVYSSDAKRAPGHLSRQGSPELRWAAFEAAKSAARRGSPDHGYYQKLAAKKDGHNGKNPTLAVERKILRRCYHTLRELGDAALALPDIRPQEVAA

SEQ ID NO: 341307 - protein, 428 aa, unidentified
MNCDHVSRIERFRQFKRQVRGSARHLVVGIDIAKDKHHAFLGDANGKTVLRRLIITNDKEGFERLIAHVRQYMTRDGFDEAVFGVEPTSVYHKPLAEFLIDRGYLVVYVTNDAIKKNRSLIDGRWDKNDTKDSANVADLISQGKCHFYDLPQQGLRDVRNLLLLRKRLKKQEHGQRIRIRNNLVAQYFPELDRFWNKSEAENLAIVRWCLSPIKIRDLEFDAFVRMVTSKNRGLKQRNRLRGVWETAAHSVGCHLGTSAELEAEILVDDLEKIRARINQIERRIHEICLGFEHYQLLMTIPGFGPYISALALASIGDPNRFENASQVIRLAGLDLNAVRSGKKSQSAVAVISKRGKSDLRYGLYQAGLIASSKNTRFMTYFENLLRGREKEKGIRTKMRVKLSAKMLVIAWTMMKKAQEFNPDLLKIE

SEQ ID NO: 341308 - protein, 391 aa, unidentified
MIYVGIDVAKDKHDCFITNSDGEVLFKAFTITNNLDGFNELHQKIASVMNDVTKVKVGLEATGHYSYNLLGYLIDKGLPTYVINPLHTNLYRKSLSLRQTKTDKVDARTIASMLISDVNLKSYSDIFYHNEEIKSLTRYRFDKVKERAKLKTSVSRLVCILFPELEKLVPQLHMASIYAMLSEFPGAKQVANAHLTRLTNLLSESSKGRYDKETAITFRDAARASISSNMPAKSLELKHTIKLIQELDSEIDEIENEIKIIMDEINSPILNIPGISYRMGAMIIAEIGDFSRFDSPDKILAYAGFSPSTYQSGQLDGAYAHMEKRGSRYLRYALYNATKYVCHWDPTFAAYLAKKRAEGKHYNVAISHAVKKLVRVIYHLEKTKQQYIKAA

SEQ ID NO: 341309 - protein, 355 aa, unidentified
MTHIIYAPSDFDIFVGIDDAKNNLSFTVMDHNTLTLSKTIPSNPENVYNYIKRRFPGKRTLYAYEAGPTGFRLYDFLSAKGARCIVTSPLSLLKASNQKVKNNRIDSVKITEQLRSGSLQSIRVPEDSYRELRHLIHLRENYAQNQRIAKQRIKSLLLYTGLYTSLPDTDMRWSNQYIKLLNELLCQGAVRSKLNMLLMDLNYARNQTLSVLKQLRVFCRTHAEVNTYKECLQSIPGIGFITSLTILARIGNPVNLRDPRELSAFSGLVPVERSTGDSIKYGPITHLGNPILRSLLVESAWVAIRTDTELRQFYDRIKNRHHPSIGAKKAIVAVARKLTQRIYCVLKEKRHYTVH

SEQ ID NO: 341310 - protein, 444 aa, unidentified
MRIVYQRCCGMDVHKDSITACLLLIDEVGEFRTESRRFGTMTRHLKEMAAWLASEGVQAIAMEATGVYWKPIWNILEAEKKFELLLVNAQQVKQVPGRKTDQKDSEWIAELLQHGLLRASFVPPVEIRHLRDLTRMRARIRQTLASFANRIQKVLEDANIKLGSVASDVLGVSGRHMLKALMAGEQDPQRLANLAQGHLRKKIEPLQLALQGHFTDHHRLQLKLLLEFGGQQLSHLDSEIQLLLNKVHAEPDLPGPAEGTVAEAEASPPQPTSPLQTAVELWDSIPGIDQLAATTLVAEIGANMDQFPSAHDLASWAGLCPGNNESAGKRRSGKTRKGSVWLRRALCQAAWSASRTKNTYLAAQYRHLIVRKGKKRTIVAVAHSMLIIAYYLLKRQCTYQDLGPDYFNLRNEDAITHRLVKKLTGLGYHVTLEPARAEAGSETA

SEQ ID NO: 341311 - protein, 304 aa, unidentified
MNGIGIDVSKRQLDIGTTDGETLQVSNNRSGFSELDVWLKKRPTRQIVLEATGGYEQPVLDFLHKAGHPVARANASRARKLAQGLGQIAKTDRLDAYALAQMAALVKLPPYQPLQSWQQKMREFVRARRQAMDALTIARQQQEMVLDRELRRLLQGNITRLQTLVERLGKQIVEQVGQQPQLKMLKSMKGVGPVLQAVLASYLPELGRITGKRIASLVGVAPMSHDSGTMRGKRSIHGGRAEIRQVLYMAAMSAMRHEPRLRDFYQSLRARGKEGKVAIVAVMRKMLVILNARVRDAESGLVPA

SEQ ID NO: 341312 - protein, 325 aa, unidentified
MRQPQLQVKPQTQVGLDVSSQILDAHIRVDGKAFSVPNTDAGLDQLCEMLSVYDVSMILMESTGGYEDNAACYLQLQGYDVVVINPRHARRFAQSMGRLAKTDRIDAAVLAHMALMIDSGSDRGRYIKSVNDEQRKQLSRMSSRRRQVVDLITVEKQRLTHADDYSRESINTIILLLNAQLKRIESDISHYVKKNFSELADRLLSIPGVGSQAVTVLISDLAELGHVNRRRISALLGVAPFNHDSGNFKGQRRIRDGRQSVRNVLYMGVISATRFNPVIKAFYDRLVNRGKPKKVALIACMHKLVNIINAMMRTGKPFDISLHGV

SEQ ID NO: 341313 - protein, 348 aa, unidentified
MSTMTETARCVTAGVDTHRDVHVVAVLDERGTQVGCETFGADPAGYRQALAWVASFGSVDRIGIEGTGAYGAGLTRYVHDQGVTVVEVSCPNRQRRRSHGKSDPVDAVAAARAAQSGDAAAKPKSRNGNVEAIRALRVARRSAAHSRVDAINQMRALVVTGPEPLRTSFRDITIRQMVTAAARLRPGDPTTPTGAIKFALRQLARRVQSLEEEIETLDAILAPLVRATAPALIARHGLGPDTVGALLVSVGDNPERLHKESAFAHMCGSAPIDASSGLVTHKRLNRGGDRSANQALWRIVMVRMASDPRTRHYVERRTKEGKSKKDIVRCLKRYVAREVYPYLVETGS

SEQ ID NO: 341314 - protein, 344 aa, unidentified
MDHFAGLDVSVNETSICIVDGAGRIVRETKVASEPEALLAVLKNPAYHFKRVGLEAGPLSQWLFSALAEAGLPVICVETRHMKAVLKAQINKTDRNDARGIAQMMRVGLYRPVHVKTLRSQKLRMLLIHRKLLQSKAIAIENDLRGTLRNFGLKVGMVGKVKFEARIHELVENLPDLAVLVEPMLTVRRVLREQIVILHRRVLAIVRDDDVCRRLMTTPGVGPVVALTYRATVDVPARFRKSKSVGAVFGLTCAKYQSGEIDWSGRISRCGDEMMRVMLYEAAQSMLVRSKKWSWLKAWAMQVARRRGMKKAIVALARRLAVIMHRIWVDGTEFRWTRQEAAAV

SEQ ID NO: 341315 - protein, 488 aa, unidentified
MSAAGQQEGKKDPTLNARAPKRKARGSRCPQGKGHRRRSKLTITNPDAAGIDVGSRVHYVAVPEDRAPVSVRSFGAYTGQLDELVQWLKDCGIKTVAMESTGVYWIPLYQKLEEAGFEVLLVDAHQAKHVPGRKSDVQDCQWLQQLLTYGLLRAAFRPEDSVCRLRSLQRHRKNLVEAAAMWVQHMQKALNEMNLHLHHVLSDISGLSGLRILDGILAGERDPAKLASLAHHRVRKSQAQIEAALTGDYRPELLFVLGQSLQNYRQIQQQITQCDLSIEKQLAKMTDCATPRQTAEPMPSSPELGGGKSGKRKPPVALETSLAGHLKRILGVDLTTIPGLNVLAILTLISEIGTNMTKWRNEKAFVSWLGLSPNNKISGQRVLSSRTRKVVNRAATILRLAAMIVGKTDTPLGSFYRRKRAQLGGPKAVTATARKLGCLVYRLIKNGQGYNAPDLHTYELKYKDQILNSLRKRANTFGFDLVELPKAA

SEQ ID NO: 341316 - protein, 389 aa, unidentified
MLLEHPSDGLTAIRTHIAAIFVSLELSRSTWLVTCLSPGKGERMSKHSLTAGGVAGLLALFAGLKRKAEVRTGQSYPIITIQEAGLDGFWLHRVLQQEGIESHVVDPASIATPRRRRRAKTDRLDGEALLRALLAYKRGEPRVCAMVVVPSPEEEDRRRLCRERRTLIEERVTHGNRIKGLLFAQGIFDYAPIRRDRRARLEALRTGDGRELPSHLKAQIGRELDRIELLLGQIKAVEAAQEALLAAAKKPASQQAVPDPVTMLLALKGLGANFVAVLWSEAFYRQFANRRKIAAYSGLAATPWQSGGIRHEQGVSKAGNPRLRTTMIQLAWLWIRHQPQSALTRWFKERSPQGRKRAIVALARKLLVALWKYVTQGVEIEGAVMKPAA

SEQ ID NO: 341317 - protein, 482 aa, unidentified
MTKRTIFPYQSQELNTIFEEAGNNAKVMCIPIDYAKKEHVVMFCNGHGNILRKPFPIKNSPKGIEYLTQQVLSSCHHRGIDPKYAFFGGEDVGSYAENFINTLRSGGWIVAGVNAHDAKKQRANAQASTDALDLMGIASMLLNRRANCSPAQTGIYRNLRGLTRHRKKLVDMSTEEKNRIYTVVDQIFPGFLDEKNTGISPFSNSSLYLMADRFSPAQIRRRKRRKLVETLRKYGTVKPEVGADKLQLYAAHVLNTPTEYLSALQVSLAQHIKHVTCLQDSIEQLEKEMALWLAQTQGAFLTTLRGIGIVLAAGATAEIGDPTKQKPVANVVSYSGIIPRVKQTGGPEGQTRTGKVSKRCNRILKNYVVQSAHHIGLHGPEDLMADYKKRDANGQHADFGIGRRYIRTAMCLMRNSQIYMPKRLRSKGINPEERAGYFLMIWPSLRDKWAKLGALETAFTNDNPLGRWRNMVQELYEIKLKL

SEQ ID NO: 341318 - protein, 408 aa, unidentified
MEVLYPRCSGLDVHKDSVVACVRCVSPPGHQEVRSFQTTTTGLLALADWLTSHGCTHVAMEATGVYWKPVWHVLEGDFELVLANAQHIRNVPGRKTDVNDATWIADLLAHGLIRSSFVPPARIQELRDLTRTRKQLVREISQHSLRIQKVLEDANIKVASVLSDILGRSGRAMLAAIIAGENSPERLADLAQGTARKKTAELVEALRGRVTDHHREMLTLHLGLIEALESALQKVDAAVGKALAPIQARAQLLTTMPGVSDIVAQVVVAEIGVDMSRFPSARHAVSWAGLCPRNDESAGKRRSTRVRKSGTWLKTTLVTAAWAAVRVKDSYLRVQFLRIKSRRGPKKAILAVAASMLTAAYYMLRDGVEYRDLGPSHFDRHDRAKTIHRLVKRLKDLGYGVELQTGTA

SEQ ID NO: 341319 - protein, 407 aa, unidentified
MEVLYPRCAGLDVHKQVIVVCVRLIDGGRVVRKKERFGTTTADLIRMAAWLAEHSVTHAVMESTGVYWKPVWHVLERDFELVLANAQHVKAVPGRTSDMNDAEWLAELLAHGLIRGSCVPPEATQELRELTRTRKQLSRSLAQQALRIQKVLEDANIKLSSVVSDILGKASRAILDALIAGETAPDRLAQLKGQLKATPQELEAALRGRVTENHRFLLRLHLDQVDSLHRAIQSIDRRLEQRLEPFRDHVERLTHIPGVSTVIARVILAEVGLDMARFPTHHHLISWAGLCPRLDESAGKARSRHIRKGNPWLKVDLTQAALAARRAKKSYLRAQFNRVATRRGVKKAVVAVAASILTSAYFMLRDGVTYRDLGPHYLDQRDPGMMARRLAKRIEALGFSVDLRPAA

SEQ ID NO: 341320 - protein, 340 aa, unidentified
MTRYIGVDLHTNSFTACLLQAGAEEQIQTLPLQGGGLDQFIQSLKPDDEVAVEATGNSAWFCREVGKHVARVVVIAPWQFEVIRRSVKKTDKQDARAIAFFLSKDMLPEARQKDEDKVQLSSLIATRDQLVKLRVSLIGKVHGLFVRHGQKVGREALTSKKGFVRHVASVQWSALEQAELMVIEVQLQSLHSSIKQLEKDITAFAGTLPGYENLISIKGIGSLSAAVMLCHINDIADFKDPGKLAAYFGITPRVSQSNDSQRVGRITKRGNKLARTALVQCALIAKRFSPYLYDFFERIKAKRGSGKAIIATARKLLNTVFYTLKNNWVFEDFTKFELKT

SEQ ID NO: 341321 - protein, 400 aa, unidentified
MLSIGIDVSKGKSTVCGMKPGGEIVYTPFEVQHTREGMSELVSLLRSSGEEVRAVLESTGSYHCPVVAALLENGIFVSVVNSLRMKRFCSQSIRKVKTDRIDAMQIALYGLAYWQELQPARLPEDTYRELQLLARQYYQMTSLLIKAKVDFNAICDQVLPGMQELMNDHAGRHKLSDFVLRYHHTTHILEMGETRFRKDYCKWAEKKGYRNCERMAVLIFATAQNGIPVLPNAPSTQIVITEAIRVLHTVEASRDAILTQMQALAKTLPEYSLVREMPCIGDTLAPRLIAEIGDVRRFHSKRALIAYAGIDAPPYQSGKFCANNRHISKRGNRYLRKTGYEVMQSYVMHKPANDPIFTFIEKKRSEGKCGKLAMVAGLNKFLRVYYGKVTELYRSLPAIE

SEQ ID NO: 341322 - protein, 412 aa, unidentified
MEVLVDRCAGIDIGKSDMKVCVRIPSRRAGARHSEVRTFKTTTVGILAARDWLAEQQVTRVGMESTGVYWKPIYLLLEELTECWLLNAGHLKKVPGRKTDVTDAQWIAQLVECGLVQPSFVPPEPIRRLRDLTRYRTSVLRERTREVQRLHDVLTDAGVRLDTVASDIMGVSGRRMIGALIAGERDPETLAELAVGKLRSKRPALQEALVGRFNAHHGFMCQMMLTRIEDIDATLADLEQQIEAEMDSFRVIRELLQTIPGVGQTLAEVFIAETGADMTKFATPEQLCSWAGMCPGNNESAGRHGSTKTRKADVWLRSALGLAAASAARTHNTYLAARYQRLVRRRGKQRALVAVGHSILQAAWYIMANQVPYADLGADHYAHTGNTERRAHRLTSQLRAMGYRVTLEPEAA

SEQ ID NO: 341323 - protein, 415 aa, unidentified
MDSGCDSQMGGMQMNSVGIDISKGRSTVAVMRPFGEVVISPFEVRHTDSELSELARQLKSLDGETRVVMEATGNYHAPVAKLLHDAGLYVSVVNAKLVHGYGNNDLRRVKTDRKDAIKLANYGLDRWLTLPRYVPEEDTRLLLKNCYRQYRQYSKVQTVLKNNLISLLDTVFPNVNRLFSSPIREDGSEKWVDFVAEFWHCRCVSEKSQKAFTNKYQRWCRKHGYNFSEEKAHTIHAEASGHIGIMPKSETTKLLVEQAVAQLRATSAALTALKHEMQSLASMLPEYPVVMDMFGVGPTLGPQLIAEIGDVRRFYSKKALVAYAGLDAPPNDSGDVTGKHKSMSKIGASSLRRTLFLVMSVYLQNAPLDEPVYQFMDRKRAEGKPYRVYMMASANKFLRIYYATVKAYLELLERT

SEQ ID NO: 341324 - protein, 348 aa, unidentified
MRGAVHMQITTIGLDIAKNVFQVHGIDSSEKVVVRKQLRRSQILAFFKALSPCLVGIEACATAHYWARELTKLGHRVRLMPAKDVKAYIKRNKNDAADAEAICEAVRRPTMRFVQVKSAAQQGQLMQHRTRDLLMRQRTQVINALRAHMAELGIVAAQGRDGIKELLKIIASEQDARLPVDAHTSLVVLATQLQALQTMIGSIEKRIVVQHRSNEASKRLATIPGIGVIGATAIAATVPDPKVFRSGRDLAAWIGLVPREGSTGGKQKLGPISKQGDQYLRRILVVGAHAVLKRARQQPEKYPWLTGLLARKPFRVVAVALANKMARIAWALLAKGGTYRAPALTAAA

SEQ ID NO: 341325 - protein, 343 aa, unidentified
MKLMRVGVDLAKSVFQVHGVDRHEQVVWRRKLTRANWLRVFLETVEPGCEVGMEACGGAHHWARLLQARGYTVKLIAPQFVKPYVKSNKNDANDAEAICEAMSRPSMRFVAVKTVAQQDVQAVHRVRAEVSKQRKAKGNQIRGLVSEYGLVAPKELVHLRAAIATWLEDAENGLTGRFRRLLNALWHDLRALDQRMIELDHEIALIAAADPVAKRLQQLRGVGPVIATALVATVGDVKQFANGRQLAASLGLTPRQNSSGGKERLLGISKRGDAYLRTLLVHGARSALRTAKNKEDRLSRWVSRIAATRHHNVAAVALANKTTRIAWAMMKNGTEYEPDRAAA

SEQ ID NO: 341326 - protein, 361 aa, unidentified
MSSVQAIVADIYRFVVGVDTHAATHTFAVVAAPNGALVDQVTFPTSPAGLRRALAWIARRTGGDLDAVLVAAEGTGSYGAVLSAVLCQAGYRVVEAPTPKRERGRGKTDTLDAVLAARATMVLPVTMLRDRRAGQVQAALAVLTVARDQLNADRLRCINALTALVRSHDLGLDARRALTAPQVAAIAGWRRRDEDFGLATARAEAVRLAKRIVDLTAELGHNRDQITEIVAEQAPELLDLPGVGPVTAAVILTVWSHPGRVRTEAAFAQIAGTCPIPASSGNTVRHRLNRGGDRRLNRAFNTIVLTRMRIDPDTRVYIDRRRAEGKTTKEIRRCLKRYTTRQVYRALATAHPTPELITSAA

SEQ ID NO: 341327 - protein, 338 aa, unidentified
MQIRSVGIDLGKTTFHLVALGDNGKVLLKKKFTQKQLIAFTANMQTSLVGMEACSGAHFLGRALRVQGHDVKFVKPFVKSNKNDFIDAEAIAEAVDRQNMRFVPIKTDDQLDLQALHRVRDRLITRRTSVINQLRAFLLERGLVFAKSPARLRERMPEILENADENLTPRMRNLLALLWNEWKDLELQIEQMNDEVERIALSDAACTRLRQIPGIGPLVATAIVAAIGNGAAFHKGREFAAWMGLVPKQYSTGGKAKLAGISKRGNNYLRKILIHGARSLVLRCKRERIAMGAWLTALEARAPRNVLIVAAANKLARIAWAVLSSGEDYRAVQELVAA

SEQ ID NO: 341328 - protein, 395 aa, unidentified
MFIVGIDIAKRSHEAIIIAEDGQVVRKAFSFRNNCTGYNLLLEQVRKLTLVKSQIVFAMESTAHYWLALYARLLKDGYTVMVLNPIQSHSLRELYIRKAKTDARDSLIIADLVRFGRCKASNVPQDKILALRELCRSRAYLVDMAADLKRKLIALLDRIFPEYESLFDSVFSKASIAVLSKYSTPQKVKNANLRKLTDILMESSNGHFGEWKAHQLKEAACSSFGIDDSGGVYSTLLGMFLEQILSLTAQADSLEKQISVFFQEFNNPLTSIPGVGTVLAATILSEIGDITRFSSADKLLAYAGLDPSVKQSGEFKSNQNRMSKRGSPYLRRAIWLASTVAVHRDPMFQTYYEKKISEGLHYMNVIGHVSRKMTAVIFAVLRDGQPYQPILQSAG

SEQ ID NO: 341329 - protein, 388 aa, unidentified
MIYVGIDIAKTNHYASIVNYSTGEVLESPFLVTNNKQGFDLLYSKIKDFNKEKVLIGLESTAHYGNNLIFYFHEKQFKLGIINPIQTATLRKTRIRKVKNDKVDSTLICEALSLGYYNLLSDYDIKLLEIKSLCRFHKDLKDKASEAKIQLKTYVDQLFPELNSFFKDNLDIKTAHELLKLYQSPEDISRVNLTKLSNLLIKSSRGKYDKSRAIELKTLASNSVGINNYALSIQIKMTIELIELLESQIKDIEKQVSNFIKKSDNVITSIPGIGDMTAAIIISEIGDINRFNNPSQVLAFAGLDPSVKQSGNFNASSTRMSKRGSSILRYALILAANNVQLNTKTFNDYYNSKRLQGKLHYNALGHCAGKLVRNIFYMLKHNVKFNLD

SEQ ID NO: 341330 - protein, 370 aa, unidentified
MNDIIFVGLDVHKATVAVAVAEGTRGGEVRQLGAISNRADHIAKLVEKLSKSGRRLNFCYEAGPCGYGLHRQLTGLGHDCIVVAPSLIPMKAGDRVKTDRRDAVMLAKLHRAGELTAVWVPDGAHEAMRDLIRARATAVRVLGKARQHLQGFLLRHGRVYAGKKGWTLAYRRWLTTVRFDHPAQQVVLQDYINAVTDAEARVARLTKQIEDLVPSWSMAPVVEALQAMRGVAFIVAVTVAAEIGDFSRFDNPRQLMAYLGLVPSEHSSGATVRRGGITKAGNALARRALIEGAWTYRMQARISRKLHDRIENLPQAIRDIAWKAQVRLCARYRRLSAAGKAKVVVTSAIAREMVGFLWAIARQVEVKPTA

SEQ ID NO: 341331 - protein, 342 aa, unidentified
MKEVSIVGLDLAKRVFQVHAARSDGSVVLRRKLSRGQVVTFFTELPKCIVAMEACATAHYWAREIGKLGHDVRLIPPAYVKPFVKRQKNDAADAEAIVEAATRPSMRFVVPKSESQQACSMLFRTRDLFVRQRTQLINALRAHLAEHGVIAPQGIASLALLAEIVEDHDTGLDLIVVETARLYLEQIGVLSSRIASLEKALRSEAKRSQSTARLMSMPGMGPITAMAVEAFAPTMVTFRRGRDFAAWLGLVPKQHSSGGKQVLGRTSKMGQRDIRRLLIIGAMTVIRWACRKAPPEHSWLARMLARKPRMLVAIALANKMARSIWAMMTKNEDYKDSALAAA

SEQ ID NO: 341332 - protein, 342 aa, unidentified
MTLYIGVDIHARQQTLSYLDTSDGTTGVVALSHERDDIKGYYSQFEREVIIGIEACGYTNWFEELIERLGHKLLVGDAAEIRRLARRRQKNDRRDAQLILELLVHGEFPTLFRYTKESREVLRQLRYRHKLVKLRTMVVNSLHALVINAGLSLRAKLLTRDGRQQLRGLSLSAISQQQRDELVSLADELTRRIGTVEQWLKAQAKPDVRVQRLQTHPGVGLLTSLCLVHTLGDVSRFSSLRKVTAYAGFDPMEDSSAERKAYGGISKAGSKLLRYLLVEAAQTAVKDDDQLKQFYRRLLPRRGKARAKVAVARKLLIRCFIMDRSEIDYAEFLRRGKQKETE

SEQ ID NO: 341333 - protein, 329 aa, unidentified
MSALVCGLDVHKDSTYATILDSSGKIVSQMRMNNERVLSFLSRFNVGTVAMESSNQVASLYRKLEGRGYSVVVSHPKKTRYIAEAKIKSDRVDSKVIAELARLDALPLAYMPDKETSMLREQVRRRAFLVRERVKLRVKIKSILTYEGIRWPSDHGLFTVKGVEWLHGLRLEPVESYLRVLKPLDDEIRLVSKQLRGLAGKDEDVKLLMTIPGIGYYSALLVKSEIGDVNRFPFGDRLCSYAGLVPSTHASGASVRHGGITKEGSRWLRWVMVEAAQTHVHKYDTSITRLYSRIAERRGKRSAVVAAAHKLLLVCYSVLKNKRPYHDQA

SEQ ID NO: 341334 - protein, 353 aa, unidentified
MSSSLWAGLDVGVETTAICVIDDTGAILQQSSCRSDLQSVHCELRWLRRRRRARVGLEASGTVALARGLRSLGYSVDLYETRQLSKFLRVRRNKTDAGDAIGIAEAGRLGASLVSKVHLQSLECQSLQSRLTIRRYMIRQRVAAVNLLCRQIEHYGGRIARCPRSLRLAEAVEREIGRLFGKTSSPLIAELRRLARDCERLVAYQLELDCELRRMALDNEICRRFMEIPGVGPICALSFYAAVGDPHRFSRSTDIGCYFGLTPRLHQSGLTRRVGRISRMGNAAVRSLLVRASLTLIKSGGGAGALQQWASGVEQRRGRGQARVALARKLGVIMLTMWKKGEPYQPGPSAAEP

SEQ ID NO: 341335 - protein, 342 aa, unidentified
MQITTIGLDIAKNVFQVHGIDAAEKVVVRKQLRRSQVLGFFKALPPCLIGLEACATAHYWARELTKLGHQVRLMPAKDVKAYVKRNKNDAADAEAICEAVRRPTMRFVQIKSAEQQGRLMLHRTRDLLMRQRTQVINALRAHLAELGTTSAQGREGLKELLKIVASDGDERLPADAHASLVVLAAELQAMQTLIGLIEKRIVTQHRENKASKRLLTIPGIGIIGATAIADTVTDPKAFRSGRDFAAWIGLVPRQDSTGGKQKLGPISKQGDRYLRRILVVGAHSVLRRARLNPQKHPWLTQLLARRPFKVVAVALANKMARMAWALLAKGGAYRAPALAATA

SEQ ID NO: 341336 - protein, 338 aa, unidentified
MQTDQTGQTYALFVGVDIAAQTAMVATQRPGAKASRSFTIEQTPEGYTSLLRQLQATGFVPSQVLVVMEATGSYWISLATRLVHAGFAVSVINPAQAHHFAKALLKRAKTDAIDAQTLAQLAMILQPEPWTPPPQIYYALQQRLAQRDDLLNLRQQVRNQLHALVQHPEVIAEVRARMESLLATFESQLTEVESEITAALSQDSAWAAAATRLQSIKGVGWVTAAWTLVTTLNLTSCDTVDALTAYAGLAPMPRQSGSSVWHRPSIGHTGNGRLRTAFYMATLSAARHNPVIKAFYTRLRAVGKPEKVARCAAARKLLHIAWAVVKKDQQFDPHYARG

SEQ ID NO: 341337 - protein, 354 aa, unidentified
MIIIGADYHPGFQQIAFVDTETGELQERRLEHREDAEKFYRDVAAQDVKVRVGMEASGHARWLERLLAELQVELWIGDAAEIRTKRVRKQKTDGQDAQLILRLLLENRFPQVWVPNWENRDLRQLLWHRHRMVQARTRIMNQLQAVALNEGLRCRKKLWRDAGREQLASFRLAPGASRRRHDLLELLDRLTPTIAELTQAIEQEAEKCPAAQRLQTHPGVGALTALAFVLILGRADRFECGKQIASYLGLVPSEESSGQRRRLGHITKQGNSLLRFLLVEAAQVTVRSDQEWRGRYFHLALRRGRKIAKVAMARRLAVRLYWMWRKGWDYEQLKKFGSHAGEPGHPDGVHSSTE

SEQ ID NO: 341338 - protein, 347 aa, unidentified
MLADELDFVLGVDTHRDEHALAVVARPSGAVVAELCVRADRDGYAAALAFARERARGVRVWAIEGTGSYGKGLLRSLLAAGERVVEVERPRRHGRQAGQKTDALDARRAARSLLAEDKPALPRAAGAREALRVSSSVRAGAVMARTSALNQLRALLVTCPEPLRAELRGLTRARLLTRCQTLDREPGDDLELAATKRALQLLATRIEALAREQRELEQTLRTLSAELAPRLQAEQGVGPIGAAQALISWSHPGRVRSEAAFARLAGTAPIPASSGKTIRHRLDRGGDRKLNTALHQIVVTRRKHDPRTIAYVERRRSQGKTDREINRCLKRYLARHLYRLLEASTAT

SEQ ID NO: 341339 - protein, 367 aa, unidentified
MVKNSTAFVGIDLGDKRSNLYVLDPEGELIEETRIPTTEPAFRRKFASLPPCRVAMEAGTHSRWASRLLEQLGHEVLVANPRKLRLIYGNPRKADEADAEHLARLARLDPQLLSPIRHRGPEAQAHLTVIRSRDSLVRARTLLINHVRGSVKSSGARLLACSADSFHHRVEPSIPPELQPALLPIIETIASLTAQIHAYNRQVEQLCQEQYPETQGLRAVGGVGPITSLAYVLTLDDPDRFRKSREVAPALGLVPKQDQSGDRDPQLRITKTGDSYLRRLLVGSAQYILGPFGPDCDLRRWGLKLAQRGGKNAKKRAVVAVARKLAVLLHRLWVTGEVYDPFYHSHPDQTSLTQTNLLVRQPEAVCA

SEQ ID NO: 341340 - protein, 367 aa, unidentified
MMGWMAPLRHLSAKLLSDRISSEWEPSMGEVTTIGLDLAKHVFQVHGVDAEGATVLRKQLRRAQVLTFFSRLPPCLVGLEACATAHYWARELRGLGHEVRLMPAQYVKAYVKRNKNDAADAAAICEAVVRPTMRFVPVKTADQQAAVLLHRGRERLVRQRTGLVNALRGHLAEFGVIAPQGLRNVGKLIAIVRDEGDGRLPDLARQVLQVLAVQIEQLEAAVAAIEKQLMAWHKSNPVSQRLASVPGIGPIIATAIAATVVEPSGFRSGREFAAWLGLVPRQNSTGGKHRLGGISKRGNQYLRRLLINGASANLLRSKATNADPWVIGLRRRRPSLVVAVALANKTARIAWAVMHRQENYQRVAAAA

SEQ ID NO: 341341 - protein, 320 aa, unidentified
MKTSDNVSVTVGIDVSKLNLDLHVSSGLYDSFRNDGSGFSDIKKLLSKFTVSLILLESTGGYENGIVCYLQRLGYDVVVVNPRFARDFARSLGRLAKTDKVDADLLSQFATVINSRGDRARFVRPLTDETRRHLADMVSRRRQLVDLITVERQRKSVSSQYASESIDAVISYLRSQLERVDADISAHVSLYYSDLSDLLTSFKGVGSATVGVLLGEVPELGKLNRRQISALIGVAPFNRDSGQMRGRRQISGGRSLVRNSLYMPTLSAIRFNPVIREFYERLVKSGKSRKVAQVACMRRMVCILNAMLRDGSRFEVVYEV

SEQ ID NO: 341342 - protein, 350 aa, unidentified
MTSLTDIAEIVIGVDTHVDTHTAAIVETATGGVLAEITVPTTPAGYQELLEMAEEHPPLRVWAVEGTGGHGAGLTHLLERESEVVFELDRPQRAKRRNGAKSDPLDAVRAAREAMARPHQGTPRTGQERQALSVLLAARRSAVDAATVAQRQLFSLTIAAPERLRAKLRDRKLPEMVEIASRFRVHPAWDVETATTARVLRDLARRAKALQAEADEHKKKIRAIVRSWRPDLLAEKGVGPIVAATVLCAWSHPGRVRDEAAFAMLAGVAPLPANSGKTTTRYRLNRYGDRQLNRALHTIVLSRQRYDQRTKDYTNRRTTEGKTPREIKRCLKRYVARDLYRLLENPPLPA

SEQ ID NO: 341343 - protein, 421 aa, unidentified
MVIPSHPLWAGIDWGDKAHALSIVNAQGHVVARHRIEHSAEGLDRLVAILADAGPVAGVAIERNEHLAIDKLLEAAHTVYPVNPKVSKAWRDCLAVDPAKADPSDADALANGLRLFHDTLRPWRPDDPTTRELRLLARAECGFIADRTALANRLKDCLKQYYPQALGWFSDFTTLTATDFIIAFPTPEALRRATDAKLIKFLAAHHIGLGPCWKQRLASRASGARWPSDEATVAARSVQAVALAKQLRTLAHILRDYRQRIEALYADHEDAVLFSSLPGAGPKLAPRLLTHVGTDRSRYDGAGALQALSGSVPITKASGGSGGARFRWACQKDFRNTMFLFAFTSLRSSLWARAFYDRARARGKTHAQALRMLGAKWLKIIYRMWVDRRPYDERLYLASLIRHRSPLIAWMQEAQNTGNKP

SEQ ID NO: 341344 - protein, 409 aa, unidentified
MAAVMTGVDPHKGSRTAVVIDQAEMALGEVRVRASASQVRQLLEWAAARAERTWAVEGAGGLGHLLARQLVAAGERVLDVQPKLAARVRLLAAGDVNKNDPDDARSVAIAALRSAACPPVRADDHAAVLKVRAKRHRDLSRSRNQVVWRLHAVLCELVPGGVSKQIHAAAAARLLDQIQPAGAVQAVRRELAGQFLADLRRLDAQRRDTNKKLAAAIRASGTTVTEVFGAGPAVAAAVIGDVRGISRFPGPGCFAAYNGTAPVEVSSGGRVICRLSLRGNRRLNHAIHMAAVTQIRYRHTKGRACYDKKIAEGKTPKQALRALKRQVSDAIYQHLKADARRAAATAGPGGHPGNGSVASAAGSHPGHRLFGQATPGPEPTLRPRPGPAKTTRQGSSRRTRQLMPEHTST

SEQ ID NO: 341345 - protein, 341 aa, unidentified
MEKYLGLDVHRESTTVCVLDAGGQRLAREVLETRGPVLIDFLQRQSGRLHVCLEEGEWAQWLDEILRGHVAELVVCRGRKRQGSKNDGLDAYDVAERLRCGQARPIYKSAGPYRKLRELARADRYLRTDLARARNRFKSGFRRQGVTCGDEVYGEKGRAQRLAELPAVSRWAVEVLGREMDVLEQLRAETRSAMVEESHRHSISRILETLPGLGPVRVAQLQAIVVSPHRFRGKRRFWSYCGLSVVTHSSGDWVRIDGKWIRARVARTRGLTRNFRHELKEIFKGAALSALSSRSNPFRQHYDRLCAQGTKPNLARLTVARKLAATSLAMWKTKTEYDPSR

SEQ ID NO: 341346 - protein, 366 aa, unidentified
MTSTCGVVQAAAAVDPTVGSSVEVTGGVDTHLNTHTVAAVDGAGRMLGSAQFPADRAGYAGLLSWLRSFGTLVLVGIEGTGAYGAGLTAFLQAEQIELVEVDRPDRKARRWQGKSDPVDAEAAARAALGRVRTGTPKRRDGRVEALRALRVARRCAITHRADLQRRLKMLLVTAPEPLRAALRDLPTRQLLETCAALRPDPELVDDPTTAAKVALRSLARRHRHLTTEIDDLDTLIAPLVKRINPRLLATPGIGTDVAGQLLVTAGQNTNRLRSEAAFAMLCGAAPLPASSGKTIRHRLNRGGDRQANCALWRIVITRMATDPTTRAYVARRTAEGLSKTEIIRCLKRYVAREVHALLTANDLDEP

SEQ ID NO: 341347 - protein, 328 aa, unidentified
MQKNKEYVGVDVSKESLDMAVYSTGEIRSFGNDDASIAKATTWLKQVNPAIIVMEATGGMEISLYVALQEANLPLAVINPRQIRDFAKSMGILAKTDKVDAKVLARYAATIQPEARPLPDEEARQLNTLVRRRCQLVEMIIAESNRATITRDKAMKQRINAHIDWLKQELAGIDKDISQMMKENPVWHAKDKLLQSVPGVGPVLSATFIAELSELGILNRKKIAALVGVAPFNRDSGKHRGERSIWGGRCRVRQPLYMAALSAVRFNPTIRIFYERLLANGKEKKVALTACMHKLLIMLNVMLKHNSYWSCNYAIFNNTCIPDAKTVA

SEQ ID NO: 341348 - protein, 411 aa, unidentified
MTSQTLMAGVDVHRKTNTYCLMNEAGQEVMPRFILANNRPGTEVLVTKVRQAMEANAFDQLKVAAEATGWYWFHLFEALRAATYPTELFLLNPRLTANFKKSYVDMDKSDDLDAFVIADRLRWGRDMEHPFQYDEKLLALRFLTRYRYRVVHQLAGEKAYCLSILYLKASEYANADKLPFSNLFGAASRAVIQEFASMEEVAALPFDELVEWLDQRGKRHFADPQETARRLQAVARDSYPLALALQSPVNLVLNLSLKNISQLESLQKRLDCAIAEHMETIPNTLTTIPGIGPVFAAGIIAEIGGIERFHYDEAKVAQFAGLKWRKSGSAEFEAEETPLTRRGNSFLRYYFCEAAFSVQSQVSEYHAYYQRKYNEVTKHKHKRAIVLTARKLVRLVVRLLTNNQPFQVRKA

SEQ ID NO: 341349 - protein, 315 aa, unidentified
MIKYIGIDISKATLDCYDGENSFRVSNDTHGFQEIIGRSEKDTELCLIFEPTGIYAHALIDYCQKHRIKAFIVGSKEARDYARSIKQRSKTDKIDAQVLYRYRSQVDASRLSVPSLDHRILQITRRRNVYEKYSKIIQTLRNLIEATDKEDKGLIRSLNRQIRSLQKAAEILLDEIEELLSQSSENRRALKHLQTIPGIGRQSALALLLEFLRYPHARSNEMVALMGLDPVLRESGVFRGKSRISKQGGTHLRRKLFMSTVVATRYNDRIKVFYERLISKGKPKMSALLAAMRKLLRIAFAVFKNQVPYQAIGRQ

SEQ ID NO: 341350 - protein, 423 aa, unidentified
MPQLWAGIDAGKTEHHCVVIDGNGTKLLSQRFKNRETAILTLMGDVASLPGGTDVAWATDLNHGGTGLLQTLLHSHAQPLFYISGRVVHHASGAYRGEAKTDAKDAVIIADQARTRRDVTLMRQADEVTAELRLLSARREDLVHDRTRAVNRLRAILVHYFPSLEGAFNYATTRGPLVLLTRYATPGAIRRMGESRLAAWLKGQGCWKSAAVAKTAVEAAREQTSVVVGEGAAARLVSRSARDLLRIRDEVAELDGEIEAALQDSRSADLLVSIPGFGRRLAADFLAATGTDLAAFETPDRLASFAGLAPVPRDSGKISGNHHRPRRYDRRLLNACFQAAFIASRNCPVSRSFYDRKRQEGKSHKQALIALARRRMNVIWAIFRDQTTFNPTPPRPNDPVTPLLQHGPESPSRSRPTIALAAA

SEQ ID NO: 341351 - protein, 376 aa, unidentified
MEHDSEAFIGIDTSKLKNAVAIAEGGRDGEVRYLGEIDTTDGATRKLVAKLAAKYRKVTFCYEAGPTGYGLYRLIKSLGHECSVVAPSLVPKKPGDHVKTNRRDAVGLARNLRAGELTEVWVPDTRHEAMRDLSRAREAAVDDLKSKRQQILSLLLRLGLHYSGKKTWGKSHRNWLASLKLGQREQRIVLEELFGAERQAQERVDRLVDAIIEAVPEWSLAKIVTALMAVRGIDLVAAVTIMAELGDLSRFASPRELMGFLGLVPSESSTGDSVKRGGITKAGNRRARRILVESSWSYRYPPRIGRDKLAKVAAAPEPVRAIAWKAQTRLSSRFRALSKRGKRPTIVATAVARELCGFIWAIHRAVTGPGGQQLVF

SEQ ID NO: 341352 - protein, 340 aa, unidentified
MGHVVTIGLDIAKSVFQVHGVDAEGGVVIRQKLARARLLKFFEKLAPCLVGIEACGTAHHWARELIGLGHDVRLMPPSYVKPYVKRQKNDMADAEAICEAVTRPTMRFVPVKSPEQQSVMVLHRTRSILIRQRIQISNAIRSHMAEFGMAAAVGRQGLHSLIEVVLDPADERVPVEARGCLAMLAAQLQLVNEQVLETDRLIRTNARSTEVGCRLMEIPGVGPLLASALVGTIADPKAFKTGRNLAAWIGLVPKQNSSGGKERLGGITKQGDRYLRQMLVVGALAVVRYAVRNGTRRPWLVQLLARRTPKVAAVALANKTARMVWAIMTSGERYREPLAA

SEQ ID NO: 341353 - protein, 397 aa, unidentified
MIAVGIDISKAKSTVAVIDSDGTVLASPFTMAHTQPEMEAFVTYLKGLGEPTTILMEYTGHYHYPVLKKLQDEGFPVCIVNPYQMKKYGDVEIHKAKTDKKDALRIAAYALEKSYKLVPYSSMEQKYEDLKFLSRQYSQRITYVAKLKVQLIALLDQTMPGITRILPLNSRNPEKCALLLFIERFKSFDEIQRIGKARFLASYDVLAKKASERSASSKGLSIYELAVDSITTRGEDPYIWLSQNQCVDLLSATQNAADEIISQMRNIAETIPEYKVLRAMRGVGDRLGPIILAEIGDIRRFHSGKALNSYAGNDAPPYQSGQFESRNRHISKRGSSTLRKACYEVMQALKLTKPQDDPVYLFMLKKEQEGKPFNVAKMAGVNKFLRIYYARAMELYK

SEQ ID NO: 341354 - protein, 343 aa, unidentified
MQAVKTIGLDIAKSGFQVHGVDADGQVVFRRQLKRRNVLAFFQKVPSCLVGMEACATSHHWSRELQALGHTVRLMPPAYVKPYVKRQKNDATDAEAICEAVTRANMRFVATKTPEQQSGLMLHRTRHLFIRQQTAVINAIRAHLAEFGIVAPVGRNGLEQLLNVVADAGDKRLPEVARTCLMALGTQLRALKAKLLELDRMIMAWHRSNETSKRLDAIPGVGHVLATALVASIADPKVFRSGRDFSAWIGLVPKQHSSGGKDRLGSISKQGDRYLRSLFTAGALAVIRYAKIYGTKHRPWLTALLARRPTKVAAIALANKLARMAWAMMTKGARYKEPVALAA

SEQ ID NO: 341355 - protein, 350 aa, unidentified
MEIFTGKPEGVMKLTPVGIDIAKNVFQVHHIDEETGEIVNKPIKRAKFLEYFVNRAPCLIGMEACGGAHHWARQLTRMGHQVKLMPGEYVKAFNIRNKKDPADARAIWLAVQQPSKPVAIKTEMQQAMLALHRTREQLVKFRTMQINALRGLLTEYGEVMAKGRAALDRAMPDVLARVADRLPAALIDTLREQWNGLTGLDEQIATIERRMREWKKENKEVKAISEIPGVGLLTATAAVATIGDAKAFRSGREFAACIGLVPKQTGSGGKVKLHGISKRGDTYLRTLLIHGARSVITNAKQPDPWIEQMKKRRPPNVVVVALANKMARTIWAVLAHDRPYQRGYVSTKPA

SEQ ID NO: 341356 - protein, 319 aa, unidentified
MSQSTMVYAGIDTGKRTLDVAAHGAKARSQVDNDEAGHAKLVTWLRRQRVRRVGIEASGGYEKAVVAQLRQDGFEVVVFQPAQVRAYAQFRLQRAKNDRIDAALIAACTAACEDEDIHAPPDPRLAARAEHLTLIEQITKDIAQLETRRASCRDAAIRRRWDLEIRRYKLWLKQELADLVAVLRQHPDLAQRLDLIESVPGIGLRTAVAILIRMPEIGSLSREEAAALAGLAPYDDDSGERHGQRHIQGGRQRLRNSLFAAALPAAYRWNPQLVALYRRLTANGKAHKLALIACARKLLIYANAVVARGSPWVLKSAET

SEQ ID NO: 341357 - protein, 313 aa, unidentified
MTNEQSTQTFASIGIDIGKDVFHIVGFDASGKVVLRKKFKRLALEAELAKLQPSIVGLEACLSAHFVSRTLRRLGHTPRIIPAIYVKPFAKGQKNDYNDAEAIAEAALRPNLRVVREKTQDQLDLQALHRVRARLVSRRTATINQIRAFLIEHGIAVRTGANALRSSLFAILEKRADELSPRMIDVIVGLHEDWQRLDERIDTLTGEIEEISQTETNCRRLMSVPGIGPIISTAMVAAIGSGEAFERGRDFGAWLGLIPRQYSTGGRPILGRLSKRGSKYLRTLFIQAAAPESQGPKLNRSQFCGRIRMTFAA

SEQ ID NO: 341358 - protein, 336 aa, unidentified
MASIATFARILTLIIMAEVVTFEQIVQRGCGLDVHKQTVVATIDGAGIQHETREFGTTTRSLTELKEWLMQAGITHVVMESTGVYWKPVYHVLEPSGMTVWIVNARHVKYVPGHKTDKRDSKWLCKLLLAGLLKPSYIPPREQRELRDLTRYRRKLIEQIASEKNRIIRLLEDCNIKLSSVLSDTQGVVGTKLIDKLCVKGKVSMEDIEEVYHGKLQASKEAIYEACEGVVTEHHVFMLQAIKKDILSCESIIAQVTLRIKEMLSPYENVLELLKEVPGLSTKSIEDLIAEIGLDMNVFPTEKHLASWSGVSPGNNESAGKKKADVLPTGTSKSRL

SEQ ID NO: 341359 - protein, 346 aa, unidentified
MSYSTTVGVDLAKNVIQVSVVSGRGKELCNRSLTRKKFAEFLCKQKPSLVAFESCATSHYWARAAKRHGHEARIIPAKAVAPFRQGHKTDSNDALAVAEAARRPKIKEAPMKTVEQQGLQAIHRSRELLIQECTALSNHLRGLLMEFGIVIPKGFASLMKAVPEILEDGENELPDLYRPTLHRMYTRLLELREDIEAMTKEVERLARAHPICSKLMALEGIGPIGALLLYATMGSGAAFSSGREFAAYLGLAPKQYSSGGKTNIVGLSKKIGNSRLRSVLILGARAYTYKLKEPKSSKDKWLKAIIDRNGESRAAIALANKNVRTAWAMVTQGTEYQRREQLPMAA

SEQ ID NO: 341360 - protein, 361 aa, unidentified
MTDLIVSEINVWVGLDVGKGEHHACALNHDGKRLFDKPLPQDEAKLREVLTGLQKHGAVLLVVDQPNTIGALPVAVARDCGCQVAYLPGSAMLKAAQLLAGDAKTDARDAFVIATTALRMPDTLRSVDRDSEILANLKVLSGFDEDLTHETTRSINRLRSLFLQIHPALERVFGGSRLTTDLVLDLLARYGGPTGLKRSGIKRVSAWAAKTGHRSATKLIPDVFQALSEQTVTVAGTEAVEQIIPTIATAIKTLKTQRNELATKVEVLLDDFPLHHVLVSMPGVGAKTAAAILLAVGDASGFPTAGHLAAYAGIAPTTRRSGSSIRGEDPARGGNKQLKNALFHSAFVAAFCDPESHAYYE

SEQ ID NO: 341361 - protein, 353 aa, unidentified
MPMKTNTPLNPETQARIHQLKLSVDWHVEQFRVVRMCDGQSPQPAQRFTPASFLPFVQKQLALADQVFVIYEAGPGAFHLHRQLTALGVTVFVVHPVKLDPQHKGVVTDKTDARELALKLDRYLGGNRKAMSVVRVPTEAEEQRRALSRQREQLRRERQRLAAQGRSLALTQGIRLRGEWWSQPLALPEWLRPRLDVWRKLIAAVEEQLDALTQQVEALAPKVRPKGLGPLTLGMLIAELCDWSRFKNRKQIGSYTGLCGGVSSSGQSHCDLSITKAGNARVRWTLIELAWRMVLYQPQSKAVQRWKHILLNPKAAARQKKRALVALARQLAVDLWRWQTGKITPEQLGWVMV

SEQ ID NO: 341362 - protein, 313 aa, unidentified
MIITPRCVGIDVSKHHLDIFDEGIGVSERIANTPHAITELVARWRCDALVVFEATGVYDLELRAALRAADIRFARINPARARDFARASGQLAKTDPIDARMLAAFARAMRPATEQVSTPARNALARLAKRRDQLVLMRAQEKNRRSEAGDRAMVERICRLIEVLDHEIAEIEADISALITAEPEISDDAQLMRSLPGVGPVACMQLIAQMPELGHVGPKQAAALAGLAPFNVDSGAYRGKRKIGGGRKRVRNALYMAALNAVRRADRFKAFYAKLRQAGKPAKLALMAVARKLLTILNAIMRDRKAYIPAQQS

SEQ ID NO: 341363 - protein, 354 aa, unidentified
MSGLNSRIAGIGIDIGKNSFHIVGQDERGALVLRQKWSRGQVEARLANLPPCLIGMEACVGAHHLSRKLHALGHDARLMPAKYVRPYSKGQKNDFRDAEAIAEAVQRPTMKFVATKTADQLDLQALHRVRERLVGQRTGVINQIRAFLLERGIAVRQGLRFLQAELPTILATPIDALSPRILRLIEDLAGDWRRLDARVEAISCEIEELARKDQACERLMTVPGIGPIISSAIVAAIGTGDAFSKGRDFGAWLGLVPKQISTGDRTILGAISKRGNRYLRALFVQAAWVVLVKLGKKWERYGLRPWIEAAKKRLHHNVLAIALANKLARIAWAVLHKGRAFECAKIDALSVRPI

SEQ ID NO: 341364 - protein, 325 aa, unidentified
MNNEKLCCGIDVSQNTLDVAYQNNLGEIFHIKVGNNNKGFETILEHTGTGYHFVMEATGVYYVRLAFFLHAKQCAISVVNALSIKRYIQMQLERNKSDKKDAQWICRYAIDQKPALWEMPDKSYFESKQMYNTIRQYSEQIKRINNQLHSLRILPVQNKETIKSLEKMKVLFEKEIHLLEGKLEVLLIKWKPEQVKNISSIKAIGKRATAMLIIYTQGFKYTENHRQLISFAGLSPREYSSGTSINGRPKICRKGGKPIRDVLYMCAMSAIKTNTACKALYERLKSKGKSGKLALIAVCNKLLKQVFAVVKNNTLYQPNYCSARP

SEQ ID NO: 341365 - protein, 408 aa, unidentified
MNAVGIDVSKGKSMVAALRPMGEVALLPQEFLHTGVGLEQMAYAILALGEDTRVVMEATGRYHEPVAAALHEYGIYVCVLNPLYIKQSGGGSIRKVKTDKADAMKIAKYGLDNWVDLREYTPMDTVRQQLKLCSRQYNLYMKTVVSLQNNLISLTDKTFPGVNELFSSPERADGHQKWVDFVMTFWHCDCICRVSEKAFIERYQKWCKRKGYHFSEEKALDIYAESCGHFTTLPKNDNTKLLITTAAQQLLAGKTTLATLRAEMTRLASQLPEYETVRAIYGVGETTAVQLMAEIGDVRRFPRRSSIVGFAGVDPAVDQSGKHETQSTSTTKRGSPHLRKTLYQVICTYLRKAPADEPMYQFLDKKRAEGKPYFVYMTAAQNKFLRIYYARVKECLEAFDAQQGTSQG

SEQ ID NO: 341366 - protein, 325 aa, unidentified
MEQLYGAMDIHKETLRGIVRHGDGTIEREKTIPYTREAIGKFFEGIPSPSLTIAIEACGLWRGVYRILKEMGYEVALANPLKVRRIADVRSTDKVDARLLSELLSKNFLPRVYIPDEEILMMRDLTRHRARLVRQQTSLKSRIKAFLAMDGNIFRITWNKKDLEHLKTIDPKIANLVHILEAIEGEIKPVKKEIDMIARTNYRAGLLQTVPGIGSFGSLMILGEIGDIRRFKRPKSLVSYAGLCRGIKQSGNTSHSVRIKACNKWLKWIMYQCSGRAIMKDGRYTGHFSRVKRRNDYKTARRSIARKMLTDVWHMLTKEEPFRSS

SEQ ID NO: 341367 - protein, 421 aa, unidentified
MDKSMQTEIHFAAFVAVDWADQEHHFAYRGSDCKRIVSGKVQHKKEALEGWVLQLRSEFPEGKIALIVEQSRGGLLYALMKYDFFVFYLPNPRSVARYREVFHCSGSKSDPSDTLLLLDLLEKHRDKLRVWNPEDSQTRRLRMLTEYRRRLVNDRSKLVNRLTSILKCYFPEALGLTGDLTKQLAAEFLLKWNTLAAVKKAKPVTLRRFYRKHHCRNTKLIEQRIQEITNATALITDEAIISASAQMVRVIVLQLSKLLEGIKQFDQQIASLFEQHPDRAFYESLPGAGPALEPRIAVAFGSDRSRFDSAQEIQQFSGTAPVTRSSGNSKIVYRRWACSKFILQTFHEFAAHSIPQSRWANAYYHLQLQRGKSHHAAVRSLAYKWIRILFRCWKENMPYNESFYLNSLTKTGSHLALLIAQ

SEQ ID NO: 341368 - protein, 341 aa, unidentified
MQIAVLGIDLGKNSCSLVGLDQNGAVVMRRRMRPGSIVGFTRSLSACIVAMEACCGAHHLGRQLVAQGHAVRLMSPEYVRPYVKAQKNDDRDAEAIAEAATRPTMRFVTLKSEAQLDLQILHRARERLVGERTALINQLRAILLERGITVPQRRRKLEQYLAALPEPEDDTSVSPRVRRLIEDMRTEWQALDQRINALDAEFTTRAREDADARRLTSIPGIGVLNATALTAAIGTGETFTRGRDFAAWVGLVPRQVTTGGKPRLLGISKRGNKYLRKLLIHGARAALPALASSGTPLGHWLRALMQRVHKNVAVVALANKLARIAWAVLRRGVAFDAAAAA

SEQ ID NO: 341369 - protein, 425 aa, unidentified
MKVTYLTCCGVDVHKSFLVATIIKTTGGFEPSYQKKRFSTFNNSILEFKQWLLENDCSDVCMESTGKYWVPVFNLLEDQINVTIANPKWVKAVKGNKDDTKDSKWIGDLFRLGLVKGSYIPCKKIRILREYTRYRYKLISCRSSEKNRYQNALTVCNVALDSVVSDIFGKSSTSIIDYLLEQSDNSINHEEIASKLLRRLKSKEDAVVESIEGYQMTDPQKYRMRLVRAHMDYITAEINDVDSMIESMISSDPDYENAIQFLMTIPGVKRASAITIISEIGIDMSQFCTSKRLCCWAGLVPGSNESGGKKKSVRITRAGVYLKPALVQCAHAAVKSEKSPYYKKKYESLAKRRGKKRAIVAIARMILTAIYQILSTGEAWNPSDLYKIDMPEALVEKQKAKAIKQAMKLLEREGLYPPLKEPLAS

SEQ ID NO: 341370 - protein, 343 aa, unidentified
MQAVTTVGFDIAKSVFQVHGVDAHGNVVIRRQLKRRYVVAFFKKLSPYLIGIQACATSHHWSRELQALGHTVRLMPPAYVKPYLKRQKNDAADAEAICEAVLRPSMRFVETKTAEQQGCLMLHRTRHLFIRQQTAVINAIRAHLAEFGIVAPVGRNGVEELLDVVADPDDARVPEVARECLGALGAQLRMLKAQVLEFDRRILAWHRSNATSKRLDEIPGVGPALATALVASIANPKAFRSGRDFSAWVGLVPKQNSSGGKEKLGSITKRGDRYLRSLFTAGALAVIRYAKIHGTKHRPWLTALLARRPTKVAAIALANKIARMAWAMMARGERYKEPIALAV

SEQ ID NO: 341371 - protein, 316 aa, unidentified
MSAVSLFVGIDVAKDTLDVAVRPTAETWQVSNDDTGRATLVAQLTALAPTLVILEATGGFEGPLLAALAVATVPVVRANPRQVRAFAQAVGILAKTDRIDARVLAHCAEAVRPTPRPLPDAETRELRALLLRRRQVIEMLTAEHSRLGTAPRRIHEALQQPIAWLEHQLTGLDDDLTRAVQASAVWQVQEAVLRSIPGVGPVLSRTMLAQVPELGTLGHKQVAALVGVAPFNRDSGTLRGRRMIWGGRAEVRAVLYMGTLVATRHNPMIKAFYERLLAAGKVKKVALTACMHKLLTIMNAMIRDLKPWQLQEVPIA

SEQ ID NO: 341372 - protein, 403 aa, unidentified
MNGPIVSVDVSKGKSDYQAFKDLNVKFTDVRSIKHTKEGFDEIVNLVKDMERKLETEVCVVYEATGVYHRVLKKVLEDNNIKQFIINPLLSAKTRKNDSLRSPKTDKLDPKSIAKTYYNQSLHSSYKPQTTYHELRELSRYYEDILVHIRKDKVAFRAQLDIVFPGYDTLFDDLYGAVSLTVIEKYPHPELLQKKSINTVSKIIQKKTRHRQAVSNKMASKAIEYSKTIYSGCGKDDIDVLILERLIKKLNEDLNEAERTINEMIRLVQELPDFIIIKSIPGIGDNLAARIIAELGDMTRFKKKNELVAYAGLDPRIYESGQKDGAHMHITKKGNKRLRCLLYLAVTCSIRLKRDDNSIKDFYIKKMQQSNPMCSKAAKTACASKLVRIIYSMCKTGELYQYK

SEQ ID NO: 341373 - protein, 318 aa, unidentified
MHVGIDVSKSQLDVAVFGQSDGWQVSRDPAGLSELIRRLKELGSPVTLVVLEATGGLERDVAVTLALATVPVAVVNPRQVRDFAKATGRLAKTDAIDAAVLAHFAHAVHPTPEPLPDPIVLKLESAVSRRRQLVDMLTSEKNRRGMLMLQRSASKKILKSLQKHIEWLEAEVARLDEDIDDTIKQSPVWREKDDLLQSVPGVGPVVSRTLLSRMPELGSLSPKQIAALAGLAPMNRDSGIMRGRRTIWGGRADVRAVLYMAAVTAARCNPFLRAFYERLLAAGKKPLVALTAVMRKLLTTLNAMIRDGARWNPPALNP

SEQ ID NO: 341374 - protein, 346 aa, unidentified
MEIHAIGIDLGKTLFHLVGVDSRGTVVVRKRCSRAQLLAYTANIRVHRIGMEACSGSHFLGRALREQGHDVRLLPAQYVKPYVKTNKSDYIDAEAIAEAVERPNMRFVPIKTEEQLDLQAAHRVRERWVMRRTAVVNQMRGLLLERGLTLPKGRRHLEQAIPGIVKNADSKWSEAFLVLIRQLNQELEQLSGRIDEMDKVIERTAADHEGCQRLMTIPGIGPVTATALMAAIGNGAEFRRGRDLAAWVGMVPREYSTGGRQKLLGISKRGNGYLRRLFVQGARTVMQHRNRQANSLAHWLDGLTARAHQNVAIVALANKLVRVAWAVLHNNEPYRCPELVATGAAA

SEQ ID NO: 341375 - protein, 346 aa, unidentified
MLYAGLDLSRKRLDFHLLDRDGATVEVGAAPPDADGLLGLTRRLDRHREPIRAAIESMNGARFVHDRLELAGWQVEIADAQKVKGLAPLACKTDRIDAWVLAELTRRDLVPAIWLPDPMVRAERERARWRLHLVRHRSSLKQRVHAVLLTHGKPCPVSDLFGVRGRQLLARLGLPEPWQATIEASMRLIDELEREISDCERELRRLGADHRYVPLLLTVPGIGWVLAYTIAAEIGDIDRFASPRKLAGYTGLCPRVYQSGERDLRGPLAKQDPKYLRWALVEAATHACTAPVYRERYQQTKTRIGKQRGAKVAQIDLARRLSEAIWHMLTREQPFAPKGATDPLAA

SEQ ID NO: 341376 - protein, 353 aa, unidentified
MTPLVIGIDPHSRIHVAAAVDEHGRLVDTCEVGASPTQLGQLLTWIQALAVTKVAVEGSKGYGLPLARLLVAAGHTVVDVSSNLTADERKRSRRRGKDDEGDAVAIARIALRESDLPIMDPAHLDADLKLLVDARDQLVQEEARVRNRLHALLLNMAPGYHDTTGPLNSRPAFARARSLALRARKSDPTRAKLALAAIRRLNALRDEQTDLEKDIHGELEQRSTTHLQSIPGVGPLVAAKILGEVRDVRHYPSAAAFAAHAGVAPVPASSGNTQRHRLARGGNRQLNRALFTIAMVQARWHPPAREYLARKRAEGKTPAEARRCLKRHLANVVYRALQADLATVPSADLNPAA

SEQ ID NO: 341377 - protein, 316 aa, unidentified
MEAPVAGIDVSKDKLIMYFQGKLYEFTNDKRGYEEIRKILPKGCKVGIESTGVYHVNLAKYLNNEYDVRIINPFILKKFKDFRGKKSDKNDAKKLAELVVSMGSGFTTSDARELTSQWDFVTRSIARVKNRLRRDLVLLGYRDSLSKKNLEEVLRGGDSIVLAEVRFLLEELERLKTRKREIEKELENVVSKDSLIFTIPGIGKTLGCIILARVGDVRRFSDKKRFVAYCGLDPVVESSGKSVVSRGISKKGDAVLRRAFYLAALTAIKVNPVIKRFYEEHKGRLKGKKLIVACARKLAVITWAVLYYNKPFDASE

SEQ ID NO: 341378 - protein, 350 aa, unidentified
MSLELRSLLPYPNSCLGASPHQQTWGTKMAVLSFCGIDVSKDRLDVVILPEEQWSAVSNDPSGWVDLIEQLRSCSIAAIGIEASGGYERGVMRALLAADLPVRQVNPFKLRQFAKASGVLAKNDPLDARVIASFVAIMPTRAAQRQALAAERVTEMLAIRRQLTAEKVAADNASRLLEEPMLQRLSRRRIARLGADVDLLDKRLVEIVGSDAALAHRYRVLSSMPGVGPVLACTLIALLPELGSMNRRQVAALVGVAPYAFESGRLKGRRCIWGGRAHVRQVLYMAAMSASNWNPLLKAFNDRLRAAGKLPKVAIVAVMRKMITTLNAMIRDDVVWADRHRGRHGVPTAR

SEQ ID NO: 341379 - protein, 327 aa, unidentified
MTASVSSHNHIFIGIDVGGASFEAAWHRGGSTQYQNRPDAIAAFVARLSVEKQIIRIAVEPTGGYEKPLVKALRGAGLPVEMVHTSRFAAYRNLIGAKAKSDTSDARLLAAYAAAPEEVRGRKAGYVVLPQDAVREQLAELAARRDQLKHMIHAETCRLSTVRSQSVRDEITAHLQALRQADCKTHDAMMQLVRQRDELRNAKRLLKTIKGIGDKTALTSIAAVPELGLINNKAAAALIGVAPFVRRSGTMNAPARIHGGRASVRNAFYMAAVTASRHNRVLAPFYARLIAAGKPPKVALVAVMRRLVVHANAVLRSGQPWKGAEIN

SEQ ID NO: 341380 - protein, 403 aa, unidentified
MKHVIALDVSKGKSTMVIYDRYCRCEFEGELHHTRVDFDRLHERIEEIIKLDGQAPEIVFEATGVYSKPVEAFFKDYGYTYSRMNPLEANLQMAKMRRHKTDMSDAHELAKTHFKMERESTYIQEEYYEQMRALTRYYDEIDEEMILLKSRMHSILQMSFPELEKLLTPNSALFLNIVQLYPHPALVLAHSKTIIKNRLKANTQKNLSLDRAEKKAITLLETAENSYPAIKATDVRCDQVRDYAARISALKEKKEALIKLMAELSKERKEYLVLRSIPGIGDSTACRIIGEMGDIRRFKNAKQLNAYVGIDIMRYQSGNTQYRDRINKRGNKHLRKILYFTIQAMLMLKQKHNHFVDYYYKLKTQPQRKPHKVAIIACINKFLKVTFQLLTHGILYDYETATN

SEQ ID NO: 341381 - protein, 336 aa, unidentified
MRYIGVDLHTTQITVCYLKAEADFEIRKYQLVEMEKFVNSLELSDEIAVEATGNTRWFAEQVAEKVRRVVVVNPRQFEVVKNSVKKTDKHDALNLARFLRADLLPEVRAKREEATTVQSLVNTRTKLVRLKTSLINKIHALYVANGRKLKKASLASEKGLEKVLLQEWSAIERIELEIIIEQIRSLKVSIKKLDTAIAAESEKLKGYESLVSMSGIGSLSAGILLSVIGEIKDFATADKLASYFGIVPRVSNSNETVNHGRITKRGNKTGRRTPVQCSLSAIKKSEYLKKYYDGVKARRGHGKAKIALARKYLGIIYNTLSNNWVFADFNNFELAE

SEQ ID NO: 341382 - protein, 359 aa, unidentified
MDNNEDGTRHVVGGVDTHKDLHVAAVVDGQDRVLGTACFATTRQGYRQMLVWMRSFGDLRRIGIESTGSYGAGLLRFMQQAGIDVLEVTAPDKHDRRRRGKNDDLDAQNAAHAALAGRRIVTPRSRDGMVESLRVLTVCRKTAVAARRVAIQIIQTTIVSAPDGLRDTLRSMTRMQLVRTLAAWRPDLTAYREVEAAYRISLKSLARRYLELHDEIADLDAMISAIVDDLAPELIARNSIGYTSAAQLLLTAGDNPERLRSEASFAALCGVSPVPASSGKTIRHRLNRGGDRAANSALHIIAIGRIRTDSATKAYVARRTSGGHSKLDAIRALKRYIAREVFHIITRRHREINQTRIAA

SEQ ID NO: 341383 - protein, 344 aa, unidentified
MEVAIGVDPSKSSLAVAAVDPLGRVVGTAEFSNDPRGHRALLGWVGERGPDRVIGIECSLSYGATLSRVLLRSGEDVREVPTTLTHRQRRRRASQGKSDMVDSVAIARIVASGEVLPSAHRLQVLADLRALVEYRDQLVRARTQVANRTHADLVNVLPGYERQVPNLRAKVHRTTARSLLRGDRSVRGELVRKRLGELSRLEGEIAAMDRRIRATVQKTGTSLTSIPGVGPFIAAKILGEVGDPSRIRSKPAFAVLSGTAPLSASSGQVQRHRLNRGGNRQLNWALHYIALVQCRITPEAQAYMARQREAGKSHKEAMRCLKRQLSNVVYRHLVADARRAELAA

SEQ ID NO: 341384 - protein, 351 aa, unidentified
MTQPQPTQHCEVEEPIAEVWIGIDVAKATVEASLHGEGPIGPVCPFARTAEGMARLCEWARAQAPEGARLRAVLEATGRYSTEAIAWLLEADPTIAPACINPLHAKRFAQSLGRRNKTDHDDARMLARFGAERRPAAHQPPTPTHAELRALVRERREVIAELTRLKNRTTEGTESRFVGREREKMRKAIEGMVKRLDAEIGRVARGDMALWADVQRVLTIPGVGFVTAVTVLAELGDLRRFTSGRQLAAFAGLSPRRCESGSSVRGRTRMCKQGNPTARAVLYMSAVTTARLETGMKDTYDRLIANDKHAKAALGALMRRQLLLMRTLLVKNEDYQQPVKNHQPKGPKTLA

SEQ ID NO: 341385 - protein, 412 aa, unidentified
MIPIEKLFVGVDVAKNSLVAHAMDNNGDDVFHSFEVENNNPGCLKLIDFIAKHANDYEIDIIQLGMEATNVYWEHCYQLLQDSDKLNTNFKLVLYTLNPKVVKNFKKAYNDLPKTDSVDAWVIADRLRFGRVKNSSTPEEVYRPLRQITRFRFKLGESMRAEKNRALTLVFLKFSNYEDSPFGTFSDASMALLEEFTLEEIISTDIKELATFLFENSNNRLGGSCTIDDIIKTLKKAARNSYRLKPRMDQAISQTLAMTFDNIRFFERQLKRAKKVITRELKAIPQTLDTVDGIGPILTAGIISEIGDIDRFYNQASLASYAGLTWTRHQSGSFEAEETSLTKKGNKYLRYYLVEAANSLRVHNDDYRQYYYKKYNESKKHKHKRALVLTARKFVRLVFALLSKGEIYQPRR

SEQ ID NO: 341386 - protein, 348 aa, unidentified
MKELMAGIDLHSNNIMVGIVDGEGKRLAHQKLPCELKRILGFLAPFKKRLRRLAVESTYNWYWLVDGLQGAGYPVVLANPAKITQYSGLKHADDKSDAFFLAELLRLEILPTGYVYDAQRRPVRDLLRRRMSLVHQRTALMLSFKSLFTRTTGEQMSLSRLKTLAVAQAQALYEHPANQLIAGLQIHHIEQLDASIGRLEKAVLNVARELPYYPQLKTLPGVGIILGLTITMEIGDIQRFAGPGPFASYCRTVAAQCTSNGKPKGENNGKCGNKYLSWAFVEAANFAKRYDEPCRQWYDRKAAKAGTVVATKALACKLAKAAWHLVAEQTDYEPGRMFPQLAGAAMSK

SEQ ID NO: 341387 - protein, 425 aa, unidentified
MDFIQNHKINQVTEKTLVVGVDIAKRTHYACFVDDRGRVLQKSFSVSQSGDGFELFYQRILAAMKENGKTEVIIGIEPTGHYWLNLAYFLDERGIPLVMANPMHVKRSKELDDNLPTKHDRKDALVIARLVKDGRFSYPRILKGMEAELRVGSSLRSKLAEELGAVKNRMIRWLDRYFPEFVQVFPLFGKMAMAALECTPFPSDLHQKQPDEVLSLYRKVEGLKSPQRPKAVRLIEVAASSIGVTEGREMARIEIATLVRRYHQLEQDIESITQHLVELVKTSVEYEWLSTVPGLGDTTIVDLLAEIGSFSHYEDPRQLIKLAGLTLRENSSGLHKGQKRISKRGRRKLRALLFRVMMPMIRHNEAFRKLHEYYTNRKVNPLRKKRSIVVLCGKLLKVLHGISTKHKAFDAKRMMRDIPGLAEVA

SEQ ID NO: 341388 - protein, 401 aa, unidentified
MSKKNTRNALDTSLSYAVIGLDLAKADCAVAAVPCSDDELGLIDRMDYESLFEQAEKLEPTLFAMEPCCGYSQISLRLQNMGHEVKVISGHAVKNWIATHKSNQKTDLNDATALAKLALYDHDLQPIRVKNVEECRIASVQAIRIQLRTQATKSLVCFKSLCQCWGIVIRRGSSNTKKMAEAVAAVEKLLGVEVASSLMILRDAYKFTMKQINALDKLLDALVEANEQARTMKTVLGIGTQTAARLAVTTGDIKRFPMPRSYVAYFGLAPRNIITGHSGTPSPSKRGALKPVSSRGQGKVSRRGDRVARSFIIQGAATIYMLYCKDMLPECQLRRWLHEQIKRGKPYGKIIVSLAAKLLRIVWALLTYGEKFDSHKAGVPRSVLAAMEKPLKHDVAAESAA

SEQ ID NO: 341389 - protein, 428 aa, unidentified
MNCNTQNAKIASITEKTLIVGIDVGSETHYARAFDWRNYEYTKKPLEFSNTEAGFQTFKAWMEDMAEKHGKTAVIPGMEPTGHYWFALGKFLQDNGMKPVHVNPHHVKKSKELDDNNPNKNDRKDPKTIAALVNEGRFSYPYIPTGIYAEIRSLSNLRFQTQEELTRIKNRLARWFAIYFPEYKDVYGDLKAVSGRMVLKEAPLPEDIRKLGVEGVNRIWREAKLRGAGMKRAKTLVTAAEHSVGSKEAPEAARMELNNLLNDMDVYTARQEELLRNIEEKLKEIPYTDNLLAIKGIGMVTVSGFIAEVGDIGRFDNPKQLQKLAGYAIVSNESGKHNGESRISYRGRKRLRYVLYEAAISLVGKNAEFRKIHEYYRTRKENPLKKMQSVVAVACKILRIFYTILTKGVEYDPKKLLGDIRRPQVQAA

SEQ ID NO: 341390 - protein, 343 aa, unidentified
MQAITTIGLDIAKSVFQVHGVDAAGQVVVRRQLKRRYVLAFFEKLSPCLVGIEACASSHHWSRELQALGHTVRLMPPAYVKPYVKRQKNDMADAEAICEAVTRANMRFVPTKTPEQQSGLMLHRARHLFIRQQTAVINAIRAHLGEFGIVAPVGRNGVEELLEVVADPSDKRVPEIVRACLAALGAQLRRLKEQILEFDRMIRAWHRSSEMSLRLDDCPGIGPVLATALAATVADPKAFRSGRNFSAWIGLVPKQHSSGGKNRLGGISKQGDRYLRGLFVAGALAVIRYAKIHGTKHRPWLRALLARRPTKVAAIALANKIARMAWAMMVKGERYKEPVALAA

SEQ ID NO: 341391 - protein, 338 aa, unidentified
MGEVSTIGLDIAKSVFQVHGVGVDGAVVIRKRVSRAKVLEFFTALPPCLVGIEACPSAHHWSRKLQALGHTVRLMPPSYVKAYLKRSKNDANDAAAICEAVTRPSMRFVPTKSEQQQSGLMLHRSRQLLVRQRTMLSNAIRGHMAELGRNGTAALLEIIANADDDRIPATARFSLDVLARQYANITAEIGTIEKRIHTWHRSCEESRRLEEIPGIGPIVATALVAEVGDWKAFSSGRNLAAWIGLVPKQHSTGGKDRLGGISKQGNRYLRWLLVARAMAVIRYARQHGTKRLWLARIMERRPIKVAAVALANKIARMAWAMMVRGERFKEPRLLPAAA

SEQ ID NO: 341392 - protein, 443 aa, unidentified
MCGGSVTASLFHYGRRSSMCKTIPVCCGVDVHKKFLIATILTGDYLIPQCKQKHFGTSYRNLLAFRQWLLENGCKDVCMESTGKYWVPVWNVLEGFVRVVIANPKWVSAVKGNKDDKKDSKWIGNLFRMGLVPASYIPGKDIRILREFTRYRSKLVSMRSSEKCRFQNAFTVCNLTLDAVVSDMFGKSATDIENYLLTTDSVDPEHCVSLLQRSLKKKADAVVEAVEGFHMTLEQKERVRIIQGHFADIDKRIGQIDEIVSHLVAEYESQISLLCTVPGIDRRLAITIISEIGADMSEFGSSRKLCAWAGLAPGSNQSAGKKKSVKITRAGVYLKPALVEAAHAAVKSTEKQPYFRMKYERIMKRRGKKRAIIAIARMILTSIYAMLSSGEVFNPSDLQKYDMPDELKKKMTLASAKDAVKLLVSLGVVAEGSISLDSLALAG

SEQ ID NO: 341393 - protein, 388 aa, unidentified
MHVVADRSETLTAIRTDLGAIFVSLELSRSTWLITSLSPGGGEKLSKHSVPSGDLFALFRRFDSVREKARARTGRDFPVVTIQEAGLDGFWIHRVLSKAGIESYVVDPASIAVSRRSRRAKTDKIDGETLVRALLAFKRSEPRICAMVKEPTPEQEDRRRICRERKVLTTERICHVNRIKGLLFAQGITDYEPLNRDRRDRLEELLTGDGRSLPRHLKAQISRELDRLELLLAQVKEIEIERDNLLHTEEHVTRSAAKLLIDIKGIGPEFAAVLCHEGLFRHFDNRRQVAAYAGLAPTPWQSGQVNREQGVSKTGNPRLRTTMVQLAWLWIRHQPGSNLTLWFQARLQRNGGRFKKTTIVALARKLLVALWKYATSGVIIEGALMKAA

SEQ ID NO: 341394 - protein, 380 aa, unidentified
MRIMYERCCGLDIHKASIAACALISEKGKPQEETRRFGTMTADLRELAGWLQQKGIRHVAMESTGVYWKPVWNILEPAGFELLLANAQEVKVVPGRKTDQKDSQWIADLHKHGLLRNSFVPPRAIRDLRDLTRTRAILTQEHTSICNRIEKVLEDANIKLGSVASDVFGVSGRAILRALMKEENDAEALADLSKGLLRKKIPQLRRALEGQVTAHHRSLLTGQWSRMEFLEREIVDLETQIAERMKPTPEETALTLPNTAEDAPAPLSPREEAIQLWMEIPGVGWTAACSMVAELGVNMDQFPSAAHVASWAALCPGNNESAGKRLSGKTRKGNVWLRRTMCEVAWAASHRARTSSMRSTAIKFETAWCSVWPSSASMLH

SEQ ID NO: 341395 - protein, 344 aa, unidentified
MTTEASRNLYAGLDLHANNTFCAVINPAGQPVFQQRLRNQLPTICQALQPYQPLLQAVAVESTFNWYWLVDGLQAAGYPVQLANPAKIQQYSGLKRTGDPSDARWLAELLRLGILPTGYIYPKAERAVRDMARRRMLVVQQATRTLLSLQSMVTRHTGQTVRGRGLEDWTLVELREAFPEQASQQTATALLELLHEQRRIQRALEKNVLARVKWSGAWERLLTLPGVGHILGVTILLETGPIARFASAGDYASYCRAVDSRCDSNGLKKGENNRKNGNKYLAWAFVEAANYAARFNDRAAAWLARKTARTLRVVAVKALACKLAKAAYYVLRDDVVFNEQKLFG

SEQ ID NO: 341396 - protein, 405 aa, unidentified
MTETSDIRVSVDVGCHRHSVAIGLPSGQILDEFDMDHRPEGFNLFFQRIEDCQQRYGGEVSVAMEGYNGWARPLDTMVRSHGYRLFNINNLKLARFKEIFPAAAKSDRIDARKGLELFQLRDQLPMAKRAIQEVVATPHENDVLKRLTRRRRALVDEKSRVLSRMQGDLQAVCPGLLDITNDADNVWFLNFITHSDDLSKLACLQQKTVLSIRGIGRKYGAVIDTWQKTACFSHEIECVGPMIIEDARRIVDLRTQIKALEAQSEVLIGKSQIAQLIDSIPGYALVCSAELAGELGTIDRFATEASLAVYVGMANLDSSSGNYHGSKNPKHVNTRAKAAMMVGVDRHRKMIPESQRYYDKKRAQGKSHNQAIRALGRHLCRVIFRMLEQNRPYEIREPDPLKKVQ

SEQ ID NO: 341397 - protein, 343 aa, unidentified
MHFCGLDVSLRETAICIVDAEGRVLKEAKIVSDPEEIASWIMRSGYACEKIGLASGSTSAWLQAGLVVRGLPAICIDARHASAMLQAGLRNKSDRSDARGIAHLMRMNAYRPVWVKSERAQRLSALFTARNTLQDQLVRIENVIRGLLRCDGVSLPLGRRNFEREVRDRVGDHAEIMATIEPLLVARAELLRQHSALDRRVISAAQRDPICKLLMTMPGVGSHIALSFRAAVDDPTRFRRSRDVGAHFGLTPRRYSSGELDRPGRISKMGDRHVRHMLYVAAQITLRRDQGLWSSMKTWTMGISKTRGMAKARVALARRIAVTLHKMWVTGEPFRWQRAIAVT

SEQ ID NO: 341398 - protein, 339 aa, unidentified
MQEKKKMIWAGFDVGKETFSASLDQVTENGKAKITSLPCRDFKRTPEGLTKFFQWADGIISGMDLHIVMETTGCYSQQLTDWINLNYPEVKVTIENARNIHAFIESLNLPHKTDKLDAQAIARFGAERQPHPTKRPSKTILTIRELSRERTALIKNRVDLQNRRDTITSSVVRTINAQTIATLTMQIEKIEQEIKACIVEDEEILTEIHIMTTMPGVKFVSAYSILAEIGSLKQYSIKELSAISGLAPRIRQSGSSVHSSFMSRRSSGRLRQILYLDSLPGVPKIPVLQDFQQRLLAKGKTKMTVRCACMRKMLLMLRSMVVHNRAFDEKFLKNLSIRT

SEQ ID NO: 341399 - protein, 432 aa, unidentified
MSERKSLELRVSVDVGSRRHSVAIGLPDGQVLEEFEIAHRPEGFQEFFSRIEKHQNAQGCGVAVAMEGYNGYARPLDTLVRQRGYRLYNINNLKLARFKEIFPGAAKKDRIDARKGLELFQLRDHLPLAKGVLQEVTGTPKENEILKRLTRRRRRLVNERVRVVNNLQSDLQAVCPGLLEITTEASNQWFLNFLLSADSLPQLARLRKSTLLKIPAVGRKYASLIEQWQKRAHFSDEIEWVNEMVREDALRCLELDEKIRTLEAKIEEIAKSSKIAKILLSIPGFGPVCTSELAGEIGTVERFSKEGSLALYLGMSTLDNSSGDYHGSKQPKHVNTRAKAAMMIALDRHRKYVPESQRYYEKKRTEGKKHNQTIRSLGRHLCRIIFRMLRDQRNYEIRPQQRNTKTKVRSRSCVKTKIRRPKISATHLKQKV

SEQ ID NO: 341400 - protein, 386 aa, unidentified
MENEALGASIQYVGLDVHKDSIDIATADEGRSGEVRHVGQIGGDLAALDKALRRLISRGHRLHVVYEAGPCGFVIARHLAGQGIDCMVVAPSSIPKRAGDRVKTDRRDALMLARLARAGELAPVRVPDLRDEAVRDLVRAREDAVREQRNARHRLKALLLRNGIAYAGKASWTPAHLRWLAGLKMPEPAQQIGFQEYLHSITESGARIARLEQALRDQLPTWHLRAHVQALMALRGVQLIAAMTLVAELQDFMRFAHPRQLMAYVGLVPGEHSSGGKRRQGSLTKAGNSAARRMLVEVAWQYLHGPRVSPIIARRHDQVPAAITDIAWAAQLRLNAKFKRLLARKVMKTKAVVAVARELTGFVWAIGQHVSTSGWQGVALVEPKAA

SEQ ID NO: 341401 - protein, 476 aa, unidentified
MNVKSKEAKNQVNQANIFEREELVKKADAIMQDLKAHTWHELETKGKFDKNAKLSFINDEMLIIGCDIGSEMHYARAIDTRGRELSRKAFAFSNTAEGFASVKAWMLELAAANDKKQIVLGLEPTGHYWFCLTAWLVANGISVVQVNPYAVKQTKELEDNSQLKDDRKDPKLIANLVKDGNYGMPYLPEKVYADMRRLSMFRDQLTEDRIRCLNRLHRELTICFPEYKDALGKVDGAFAMELLKAAPFPEDLKEIGAEGIREIWKGAKLRGRGYSRAGEILRYAEQSVGLKDGAGISKEAVKWFAEKILELDRKLSDVEAELSDRCRAVPAAENLLEIPGIGRNILSGILSEIGDISRFDDAKEIQKLSGLGLVACSSGKHKGETKISHRGRKRLRYWLFQAAKSAVVHAEEFRRLHEYYTTRRDSPLKKMQSLIVIACKLLRIIFTILRDGTKYDAARMLNDIRRIDKQAVPAVA

SEQ ID NO: 341402 - protein, 407 aa, unidentified
MNAVGIDVSKGKSMLAALRLFGEVAITPREYPHTGEGLSRMVSDILALGEDTRVVMEATGRYHEVVASTLYEHGLFVCVLNPLLVKQSGGGSLRKAKTDKKDALKIAKYCLDNWNKLREYEPLDAVRQQLKLFSRQYNLYMKTIVSLQNNLISLADKVFPGVNELFKSPGKNDGHQKWVDFFYTFWHADCIANVSEKSFTDRYQKWCKRKGYHFSQEKAENLYIESAGLILTLPKNECTKLLVQTAAQEMIDAKVTLAAFRDEMIRLAAMLPEYETVLSMYGVGEITAAQLMAEIGDVTRFPRRSSLIAFAGIDPDVDQSGKHDASSVPTSKRGSPHLRKTLFQIVSTYLKHSPVDEPVYQFLDKKRSEGKPYYVYMTAAANKFLRIYYARVKEVLSTEEESANEPA

SEQ ID NO: 341403 - protein, 421 aa, unidentified
MATTVEIVYPICCGMDVHKSFIVACIAVTDEHSHTEHHIRRFSTFTGDLRRLVKWLTSFNCCDVCMESTGKYWIPVFNALEESGVNVCLTHPKYVKAIKGKKTDKKDAKWISELFKCDLVRSSFIPPPDIRQLRDLCRYYVKLTGFASGEKNRAQNCLTMCNFKLDDVFTDVFGKSATRVLNALIEHGNGNFELDGLIDGRCKASPEKIHDALDGELDPMQAEKLNLIRQHVNDIDGLKTALEALIYKLAARYQPQIDLLLTVPGISTPLTAIRILAEIGADMSVFETAKQLVSWAGLTPQNQESAGKKKTTRIGRAGAYLKPLLVQIALAVSKSDKHPELKNKYLVLKKRRGSKKAVIAIARKLLTAMWHILSKNESYNAELYRKADKPPVAREFTTAQAVAFLRNRGFVILDEETGEVA

SEQ ID NO: 341404 - protein, 341 aa, unidentified
MDYYAGIDVSLEWSSVCIVDATGKIVREGKVASEPEGLIGWFGSCGLDLARIGLEAGPLSQWLFAAMRDAGLAVELLETRHVRDAFKAMPVKSDRNDARNIAQLMRLGWFRPVHCKSLAAQETRAILTARKLVQSKLRDVENSLRGILRGFGLKVGKTTPRRFEGRIRELVAEHASLQAVAEALLAVRAVLLREFNGFEKRVRSMARSDARARLLMTTSGVGPIVSLTYAAAIDDPARFKSSKAAGAHFGMTPRKYQSGETDMTGRISKIGDKEVRTALYEAAHIILTKPVKGSKLKSWAARIAKRAGMQKAKVALARKLAVIMHRMLVDGTPFNPAAAAA

SEQ ID NO: 341405 - protein, 321 aa, unidentified
MGRVIIGMDPHKRSATIEIINDREQILARGRFSTDTDGYATMLELGRRHKDRVWAVEGCNGIGRHLAQRLVANGETVLDVPAKLSARARVFATGQGRKTDPVDAHSVAVVALRTNGLRQVVAGDATVALRLLVDRRDVLGRARTELLSRLHYLLLELVPGGAKKYLSAPQARALLNTVRPRDIVGRTRRQLASELITELAVIDKKIKTTNSQLTELVTTTGGNLLQLNGIGPSGAARLLGDIADIDRFASRGHFASWNGTAPLDASSGDQQRHRLSRAGNRRINRVLHVMTVVQLRHDTEGRAYFRRKLAAGKHRWKPCAA

SEQ ID NO: 341406 - protein, 343 aa, unidentified
MWYVGLDVHARRSSFCVLDGRGRKLFSRTVRGSYSKVVKEMESVKRPFSICFEATTGYGWLHERLSKLARRVVVAHPGQLRLIFRSKRKSDRIDAERLAKLLFLDEVPPAYVPDGRVRAWRSMIELRSKLVARRVAVKNRIRALLRSQAIEAPCPLWSKAGRRWLAQLSWPSDFEALTRDLLLEELRSVSEAIARTERALKAEAARRPAVGLLMNIPGVGIRTAEAVVAYMDDPYRFRRNSAVGAYFGLVPCLDSSAGKDRFGHITRQGPATVRRLLTEAAWQAVRRSATMRAFFDQVTHGDPSRKKIAIVACAHKLVRSMHAMLRDNRSWQEALQQVALCAA

SEQ ID NO: 341407 - protein, 357 aa, unidentified
MSNIMKNIMKRQAIFIGLEDSKKTWKVCARSNKVVVNEASMPADYDVLKQYLRNKFPECSITVMYEAGFRGFNLHDQLKSDGYECIVTPPHTVTEEKCQRKKNDRIDCRRLAKNLESGDYKRCHAPDRKLREDRQISRSHEQVQRDITRICNRFRRTLEFHGLDRQFPGGNWGHNQYRYAHEQLNNMNIAASIKFSFAVYFEELTHLWEIKKRLAQELRVLAKSEPYNHTVCLLKSAPGIGILTAIRLALEWGDLSRFNRKEQFASFLGLVPSEYSTGDQERRGHITKQGNRQVRGWLIECTWRAIKYDPVLLDKFNRVYRSTGSKKKAIVAVSRKLAIRLRTLLINDMPYAIGLIN

SEQ ID NO: 341408 - protein, 367 aa, unidentified
MKKGSTTAAQQSRNVSQQKLTIGLDLGDRASWYCVLDEGGEVLLEQRLSTTPKGMREVFGRMPRSRVALETGMHSPWVSRLLSELGHEVIVAHARNVRLIGESRKKDDRLDAQTLARLARIDPQLLCPVKHRSAQAQADLTVIRARAGLVRARTALVNTARGLAKSYGERLRGCNVRNMNPEKAEGLSPELQAALEPLLACIESVSEQIREYNQRIEGLAQHSYPQVALLQQVKGVGTLIALTFLLTLEDPHRFRKSRDVGCYLGLQPGRRNSGQSQPQMHISKEGDPYLRTLLVQGAQHILGPFGPDCDLRRWGLKLAERGGKSGKKRAIVATARKLAVLLHHLWVSGEVYEPLYNSQPSALATAA

SEQ ID NO: 341409 - protein, 398 aa, unidentified
MENIVIGVDPHKLSATIEVVDRHEQVLRVGRFSTDKAGFAAMRRHVEAWPERVWAVEGSNGAGRSVAQRLLAAGEQVVDVPAKLAARARMLDTGHGRKTDAHDAHSVAVAAVRAKRLRVLAHDPDLESLRMLVDRREELGRQRTQIANRLQRLLAELTPGKAKKDITTGQAKAILAGVRPRDLVGKTRRRLAAEQLAELVVVEKKMKALTKELKTLVKDSGSTLMDLRGVGPIVAARVLADVGDVTRFADRNRFASWTGTAPVEASSGEIVRHRLSRAGNRRMNHMIHIAAATQIRLDTPGRAYYRRKLAAGKTRAEAMRCLKRRISDAIYRQLIADAHAEAETTSADPGGHCGASLISSAVDLPPHIDTSDQPLPGPATPTLPAPRRPRKTPVLTGD

SEQ ID NO: 341410 - protein, 420 aa, unidentified
MKVVYQTCCGVDVHKSFLVATIIKTTSGVEPSYQKKRFSTFNNSILQFKNWLIENQCRDICMESTGKYWVPVFNLLEDDINVTIANPKWVKAVKGNKDDTKDSKWIGDLFRLGLVPGSYIPCKPIRILREFTRYRYKLISCRTSEKNRYQNALTVCNVALDSVVSDIFGKSATSVIDYLIERSDNSINHEEIASRLLRSLKKKSDSVIESIEGYQMTDSQKYRMRLVRAHLDYITSTINDIDTMLDSLIAPYENAVQLLCTIPGVDRNSAITVISEIGTDMTPFSNSKRLCCWAGLTPGNNESAGKKKSVRITRAGVYLKPALVQVAHAAVKSNKSPYYKQKYERIMKRRGKKRAIIAIARMILTAIYQMLSTGEAWNPTDLYKIDMPEPMKEKQKEKAIKQAKKLLIREGILSESQLVS

SEQ ID NO: 341411 - protein, 480 aa, unidentified
MLHRLNSAATLVQRATSEAPRDDMYYIGLDVHKRTISYCVKDAAGHVHQEGKIGSTRCELDASITTLFQPRMIAMEATIFSVWIYDHLLPHAEKVKVAHPLMLRAIAAAKKKNDRIDAAKIADCLRCDFLPECHIASTEIRDRRRTLRYRNLVVKQMVQMKNRVSGLLLETGVSYNKRRLHKVSYFADLMSTNEEVNESIRPLLRLSREHIVRAQKLNYALVSSLERDPMLSERLTRLRTVPGVGPITALSWALEIGDFTRFRSVKQAISYCGLCGDERSSADKVMRMPLSKQRNKHIQRVLIEAAKLVPRECHELAMVREKELQKGNPNRATLAVARKMICYMLAVERRNRNSCLQRSSKVQRQREKPFPLRKEQKHQDSSMRRLPDPAVSRLSEGDQTPEALSELFRDWPRTQTPSSVRTFRSLGQQMDVRFCMGRNHQPRGTVAQPFILIRSTARSPERAQETCAFRLTETWGAPLR

SEQ ID NO: 341412 - protein, 487 aa, unidentified
MHPRTTNIPTPTSDVRRFSFESAGVLALDNEYSGFAVLPAHYIAFAERKRARPWTSIYHFGRYDVKPLATQLFSAYVGIDWADTKHDVCLQAPGAEAREFDRIRHQMTDIDRWAQSLHQRFGGPIAVALELAKGPIVYALQKYDFFVLFPINPLTLAKYREAFAPSRAKDDPTDAELALDLLMRHPQRFTALRPQSVEMRTLLSLTEHRRELVGDKTRFTNRLTNTLKQYYPHALDWFEQHDTLLFCDFLTRWPTFSQVKRARRASLQAFFYAHNGRRPNVISARLDAIKAAIPLTEDMGVIAPCRLQVLVLIEQLSTTLQAIDRFDREIAELAPRLPDYSLFQDLPGAGPHLAPRLLVAFGEDRQRYQHVDELEQYAGIAPVTERSGKKSWVHWRWQCPTFVRQTFVEWAGQTINKSFWAGAYYRQQRAKGSSYQAAVRSLAFKWIRILYRCWQTRTPYDESTYLNALRKRGSPLLKNLELIAKNP

SEQ ID NO: 341413 - protein, 417 aa, unidentified
MKRISNARPILRYVALDIHREYIMVGGMNREQEWVLRPRRIEMERFRAWAAANLQEGDAVVLEATTNVWDIYDIVAPLVSRAVVAHAAAVRQIAEARVKTDKQDIERLLRLLIADIVPEVWVPAVPVRELRGLISYRWRLVKMSTMIQNRLHSLLHRHNIQAPEGGLDTEKNQAWWEQQEFSPVEALQVKQELATLAQIEQHKEEIEQELGRLSLTEPWASQSAYLMQLSGVGVVITMTVLAAIGDISRFESPKKLVGYSGLGAGVHDSGKEHRDKKITKSGRKELRWAMVEAAWRAVRSNPYWGKQFEVLKRRKHPNQAIVMIARKLLVTVWCVLSRQEAFRHASEEDLAYKMLIWSWSMNEDARQGMTPRQFAKYGLLRLGVGRDLTRIVKGGYPRRLASAEEVLALRPELRPPE

SEQ ID NO: 341414 - protein, 320 aa, unidentified
MTYIGIDVSKDSFVAAYPTKSGNTTKTFKNIANGVRQFIASLPEDCHCVMEATGNYSMLLLYLLQQANIAVSMENPQKIKHFARAMLSTTKTDEIDAKLIAMYGEKMEPAPYKIPSESIILLKQKRTVLRQLKKQLSAMINLQHALSVLPKQDPTAKVATEQTIKFLRKQISKLEDEITNLSNKEFKRQMELLTSIKGIGENIASALIMATGGFTYFSSAKQISRFLGLCPTYQQSGTSVNFKGHINRNGDAHLRSQLYVIAFASIRFNSACRETYERLRARGKSGKVAIIAVANKLIRLAFAVVTNNRPYIDGYVSTLA

SEQ ID NO: 341415 - protein, 359 aa, unidentified
MITLGVDAHKQLHVAVALDDVGHEIAQWRGTNSARGWEELHCWADGLGEPRRWGIEGAWGYGRGLAQHLVAAGESVYEINTRWTALGRRRARRPGKTDRLDARSVAAFVLQEAPDLPRVGLEDMTAVLDLLTSEREALRTETTRLWNQLHALLLQIDPEYKRHLPSLDSRAGLAALDAYNVAGMPEVQQQRAAAVRRLAQRLRLALEQAGELTRKIKTYTTAAGFDGLTQIYGVGLILAGTLAGILGPGCRFRTDAELAAYAGAAPLETSSAGLVRHRLNRGGNRRLNALIHMVALTQLRCWMPARAYVERRLAEGKTKREAMRALKRFLVRAIWNAWKRCLSRQEQLASQVTPISLAC

SEQ ID NO: 341416 - protein, 384 aa, unidentified
MNKHSMIFIGLDTHKEFHEVAYCEEQRGASAVHYGRIPSSKVSVKKLIRQFESKYPGATIHVVYEAGPCGYWIYRLITSLGHCCYVVAPSLIPKKPGERIKTDGRDALKLVKLLKSEDLTPIYVPEPEDEAVRDLSRARELAMKDLKEAKYQLKALLLRNNIRYEGTANWSKKHLRWLTELILPHPAQQIVLQEQLQTIEERIRRLERLDNELTHHVHQWRYYPVVKAIQAMRGVRLLVAVGVVAELGDLHRFDHPRKLMAYLGLVPSEHSSGGKRHLGAITKSGNGRARRLLIEGAHSYRYPANVSTNIQIRQEGLPKDIVDIVWKAQLRLCKRYQRMSKKGKHYNLIITAIAREMAAYIWAIAKEVVLTPVNPKLRLSSVPA

SEQ ID NO: 341417 - protein, 457 aa, unidentified
MPARGKQPRSGAGSPAHTIDPNAAGVDIGATEIYIAVPTDRDPHPVRKFSTFTEDLLAAADWLKQCGIKTVAMESTGVYWIPLFQILEAGGMKVCLVNARHVKNVPGRKSDVCDCQWLQHLHSAGLLRASFRPEQQICAVRSLVRYRDSLVQLSAMHLQHMQKALDQMNLQLHHVISDLGGKTGMAIVEAIVAGERDPHQLATLRDPRTRASKETIAKSLVGDYRREHLFTLRQSLTGFRQNGQLIADCDVEIESLLKEFSSGDGPGAEAVPEPQAELKRKPRRNEMNFDLRTQLHRIFAVDLTEIPGIDTLTAHTLFTEVGRDLSKFANVAAFTSWMGLCPDNRVSGGKILHAQTRRVNNRVAKALRMAAQALSRSHGWMGQYYRRMRAKLGGPKAITATAHKLARIIYHLLTTGQAYDETVFAQQETQNNQRNEKRLRHQARKLGFELTPIPTEV

SEQ ID NO: 341418 - protein, 334 aa, unidentified
MHKADRREDAAEDPVTHEPLGIDIAKASFDVSLHRRDGKRRNKQFANTSAGQAALVAWIGRYAAGAVHACLEATGTYGEALATALVDAGHVVSVINPAAVKAYAQSQLRRTKTDAVDADVLADFCAAHQPPPWTPWPVEVRELQGLIRRREALLDMLTQEKNRYAAGGLTPAVRASLERHIVMLEAELAALDLAISQHVDTHPGLRQQRDLLVTIPGIGDTTAARLLAECRAMTDFDSARAYAAFAGLVPREHTSGTLRGRARLSKLGSSRLRLALYFPALVAMRFNPPLAAFAARLRAGGKHNMVVVAAVMRKLLHMAYGVLKHQRPFDPQLA

SEQ ID NO: 341419 - protein, 356 aa, unidentified
MSNSSRVDFTGQHIYVGLDVHKKSWSVCILSEHCEHKTFTQPPEVGKLVSYLRRHFPGARYHSVYEAGYSGFWIHDQLKDQGIDSIVVNPADVPTKDKERRGKRDRIDCRKLARSLRSGELQRIYVPCRSKLEDRSLVRTRQSMVRKQTRCKNQIKSMLFFYGIHLPEESIMSHWSRRFIRWIESIQMDRDSGNMALKIHLEELTHLRQIIASVNRAILAPSRTEPYRAQVTLLRTIPGISTLTAMILLSELHDINRFGSLDELLSYVGLIPDTHQSGEKAHTGGITKRRHPQLRWLLIEASWVAARKDPALLMAFHQYLKRMRKTRAIVKIAKKLLNRIRYVLKNQTEYVPCVIE

SEQ ID NO: 341420 - protein, 437 aa, unidentified
MSYKYLQRKKEYISGKIVIGIDPSKNNHQAMILGPNRMQIGNTFSFRHTFDGFQNKLWKSIRKYIPDSDISKIVFAIEASTDVWQNLAFFLTSSGYSVVLVSPRITWSSRRLPDQSFSKTDPKDAMVIAQAASNGYFNYFQVNTSLQEAIKTMAITYHKLKKNMTQNRARIRSVVSRYFPEFIPILKPYTDTGLYLIQHYLHACDYLELDVQKEALVILKISNQQHGVETLDKLKKAAQNTIGVLRKGPEVEADKILLKAWINMHQTLTQELKNIENQLHALASQTEYFYILTSLKGISSTLAALFIAETIDLDRYTHYKQIQKLAGLDLQMSQSGNYMGRRRISHTGNRRLRHIIYLMVRETSKYVPEVRIKYLKRLIKKGGYNKNLIACSSPLLQLIKALVRDRRIYGPQPESIARVVQLQNEYDQSLKKNRRVA

SEQ ID NO: 341421 - protein, 357 aa, unidentified
MPSITSEAAAAGEVTGGVDTHQDTHTAAVIDQVGRVLGTREFAATPAGYTAMLAWMRGHGGLARAGVEGTGAYGAGLVRMLRSNGVEVIEVDRPNRRTRRLQGKSDPIDAVQAAKTALAGGRTSTPKHRDGRVEAVRNLRVARRSAIDQRADTRRQIKSLIITAPDTLRTILRGLSITKLIVVCANLRPDRADTGTPATAATIALRSLARRHEQLSAEITDLDELLGPLVAAINPALVAANGIGTDTAGQLLVTAGENHDRLTSEAAFAMLCGVAPLPASSGRTNRHRLNRGGDRQANAALYRTVLSRLRWDPRTRAYAERRTTEGLTKKDIIRCLKRYIAREIYQIITTNHTPPTT

SEQ ID NO: 341422 - protein, 376 aa, unidentified
MNEKLRFLGLDVHAETIAVAVAEPNGEVRSLGMIANREDSIRKFIRKLDSPEHLRACYEAGPTGFVLYWQLTQLGVKCDVVAPSLVPKKPGDRVKTDRRDALKLARSHRSDDLTAVWVPDEGSEALRDLVRAREAAKQDQLRAKHRLTKFLLRTGQRPPLGVKAWTEKYVEWVQQVRYTHPAQEATLLDCLNEVQHMEERVKRLEQSIVEVIQLAPAPMQEVVRSLQALRGIAHISAVTIAVELGNITSRFESARDLMGYSGAFPSEDSTGKRIRRGGITKSGNAHLRRIVVESAWSYRHRPAIGARLRRRQEGLPAEITGIAWKAQNRLHKRYMTLMARGKEQRKTMTAIARELLGFIWAIGIKAEAACKQQMAA

SEQ ID NO: 341423 - protein, 376 aa, unidentified
MGEYIICGVDAHEARLDCRIGVDREAGKRKRFKNTGEGRGELFEYLEDLSKQHGGAKVVMAYEASPLGFGLYDDCRDAGIECSILAPTKIARSVEDRKRKNDDRDASRIFEALRGHVLAGNKLPEIWIPDDQTRDDRETVRARLDVGNKATRVKTQIRMLLKRTRVEKPEEVGEGWTIAFRRWLRELPLPPGARNCLSSLLRQLESLEREMEILDGAIEDLRQGRRYRYPVVALCGISGVGPLTAMVWLTEMGDLSRFGNRKDIGGYVGLVPSSNESGESEDRKGHITHEGPARVRKVLCQGAWVRVRHDGKEALAYQRIVERNPKHKKIAVVACMRRLAVLMWHVGLEAQRRCGYSLQVGARHQVGGARQAGRSA

SEQ ID NO: 341424 - protein, 362 aa, unidentified
MCQIEVVQISSEGGPSVEKIIRIGLDTSKHVYQLHGVDSEEEPVLRKKLRRKEMVAFFQKLAPTVIAIEACGGSHHLARSLATFGHEVKLIPPHYVKPYVKRGKNDAADAEALCEAMSRPSMRFVPVKTAEQQAALMLVGLRERLIRNRTQLANSIRGYAAEFGVIAARGLCRIGPLLERIAADVSLPALARELFAIQGKEYALIEAELKVIDAKLMAWHRDNACSRRLSQIPGVGLIGASMLVMKTPDPRLFRSGRQFAAWLGLTPKDHSTAGKVRLGVITRAGDEALRSTLIVGATALLRRVREGSNRKSSAWLLDLLRRKPPKLVAVALANKIARIAWKLMVSGETYRANAASFVAAAA

SEQ ID NO: 341425 - protein, 365 aa, unidentified
MDNITHIGLDVHKDTIAVATLRPGSTGCEERVIPNTPEALRRWASRLGDPADLRLCYEAGPTGYDTHRLLTSLGLSCDVIAPALVPRRPGVRQKTDRSDARNLARLHRAGELIPIRVPSPAEEALRELIRAREDLKNDRRIARQRARSFLLRHGRRPPAGATSRTAFAAWARTQHFEEPAAEAAFSHLLAAEEVRSGQLTMIEAEIARAALTPELAPAVGLLRCFRGIDTLSAVTLVAEVGDFRRFGSAAAFMAFTGLVPSEHSSGLSVRHGSITKTGNAHLRRVLVEAAWAYQHRPAVGDKLAKRLEGQPAEAVAYAWRAQCRLAARFRTLAPRKGSNKATVAVARELAGFVWGMMTGNLSVAA

SEQ ID NO: 341426 - protein, 430 aa, unidentified
MATRWEHGTRPKGRETDVERIIERCAGLDVHKSSVTACVRIPDENEALHQEIREFATTTRGLLLLRDWLASFEVRLVGMEATGVYWKPIYYMLEDDFELWLLNARHLKNVPGRKTDVKDAEWICQLVEHGLVRPSFVPPKEIRELRNLTRYRKAQIEERTREVQRLEKVLQDAGIKLSSVATRVLGASGRAMLDALVGGTTDPEVLAELARGRLRSKLPALRDALEGSFSSHHALMVGKIVAHIDYLDESIGDFSAEIERVIAPFSEEVELLDTIPGVNRRTAETLIAEIGVDMSQFPTHRHLASWAGMCPGNEESAGKRRSGKTRKGSKWLRSALTESARAAARSKETYLAAHYARLRGRRGSKKAAVAVGHSILVICYHVLERGVPYEELGEDYFDRQRSGKAYAKRLVRQLERLGHKVALEPLPQSA

SEQ ID NO: 341427 - protein, 310 aa, unidentified
MEHRRIAGIDVSKDRLDVHVLPSQEAFAVSRDPTGLAELCRRLGDTATLVAVEATGGYETLVAATLADHGVPVVVVNPAQVRSFAQALGQRAKTDPIDAAVIARFAEATRPQIRPLPDAAARLLADLMARRRQIVEMIASERQRLHRTEPPRVRKSIERLLKALERELGTIDHDVDGAVRGSPLWREKEDLLASVPGIGRIIARTLLAELPELGRLDHKQIAALAGLTPYTRKSGLWKGKARIGGGRAVVRTALFIGAQVAKRWNPPLKAFYERLIAAGKTKMVATIAVARKLLVTLNAILRDSTPWQNA

SEQ ID NO: 341428 - protein, 345 aa, unidentified
MVTIGIDAHKRSHTAVMVDEQGRQLAQTTSSGTTSGDHLAMLEWAARQGGSRQWAVEDCRHLSRRLERDLLAAGERIVRVPPKLMANARDGARSYGKSDPIDALAVARAALREPGLPVARLDGPDRELRLLVDHRDDLVAERTRMISRLRWHLHELDPGDEPAARSLNHPRNLDKLAARLDGVDGLVARLARDLNERCRRLTLEINQLEQEIAELAAALAPALLQICGCGPLTAAKIVGETAGIDRFRSAAAYARHNGSAPLPVWSSNRSRHRLSRTGNRQLNAALHRIALTQAQWHPGAQALLARRKAQGDGGLEALRILKRRLSDVVYHALQTDAATQHPHAQ

SEQ ID NO: 341429 - protein, 463 aa, unidentified
MAKSRKQVTAKKQPRDVMEGLQPLNLDVAGIDVGSAEHYVAVPADRDVRPIQKFHSFTADLHRLARWLEGCGIKVVAMQATGVYWIGLFQILESHGFVVKVVNARYTRTMAGHKSDVQECAWIRKLETFGLLNNSFLPPHEIRALRSYLRQRETLVSEAGTYIQRMQKALTEMNIQLANVLSDLSGVSGMAILRAILKGERDGYQLADLCDRHVKATPQEIAQSLEGDWRPELLFVLQQTVALYDQSLKLITECDQRIQQHLDTMASKVDPAVTPPPEPRKPPVKRRAKHEPPLQLRTELYRIAGVDLTRIDGIQLATAQVVLSEIGVDMSRWPDEYHLGSWLGLSPNNQVSGGKVLRKGTKKVLNRASHALRLAAQNLFRSQSALGSKYRRLRMKLGAPKAITAMAYHLARLIYRMLKNGTDYTDKGMNYYETKYRESELKRLAKLARRHGMQLVPIAGVPV

SEQ ID NO: 341430 - protein, 273 aa, unidentified
MLNTETGEVVEKILRHEADKVREFYASLPGQVRVGIEATGSMHWFLKLMEELGIDCQVGHPAKIRAAEPRKQKHDRRDAALQLKLLVENRFPSIWMPPTEQRDLRVLLLHRHQWVRMRTRVQNTLQAIALSSGLRRGSTLWSQAGQHAIASLPLTPNAAHRRTQLQTLYRKLDRQIGKLDERVRDQALRRPGAKLLMTHPGVGAVTALATDVFLGDPTRFANGKALASYVGMIPSEHSSGGRQRLGQLSKQGSPLLRFLWGEQQCTPYTKIRA

SEQ ID NO: 341431 - protein, 391 aa, unidentified
MVCVGIDVAKDKHDCCILDSEGTTLVDCFTIPNNMDGFKSLLQTIQDCSQKSDKIKVGLEATGHYSYNILGFLLDNGLPTYVINPLHTNLYRKSLSLRKTKTDRVDARTIATMLLSDVDLKSYTDTAYHNEELKSLTRYRFDKVRERAKLKQSVSRLVTILFPELEKLVPSLHIASVYALLSEYPGAKQISEIHLTKLTNLLVTASKGRYGKDKAIQIRDAARTSIGSVMPAKSLELKHTIKLIRELTSEIDEIEVSIQKIMDELNPPILSIPGVGIQSAAMILAEIGDFSNFESPDKVLAYAGCSPSTYQSGKLTNCYAHMEKRGSRYLRYALYNATKYVCYWNPVFAEYLAKKRAEGKHYNVALSHATKKLVRLIYALQKSGKAYLTAA

SEQ ID NO: 341432 - protein, 401 aa, unidentified
MPTLYVGIDVSKDKFDTCVKDEFGNIVMPARSYENNLDGMNKLVSDLRKIPAKPSMFLIGLEATGIYHRNLMFFLLERDLHVKEFNPLELSGLKNSRIRKTKTDKIDSEIIADGIKLYSMTNTSRCINGKDHSQMKEFGIIYHRLTENIILIKTRLRSNLSQLCPGYDNNFSNIMSKSSQQILKKAMKITNIFDISDDEMKAILKKNYLSLEKAESLTKSIKKSFDDSVCPEHLMEPLIWDVKFLLEQYETVLKQRDRVTVRIDKLMKMLNPKILTIPGIGNVTGCVILGCLGNIQRFKDGNSLTAYAGLDPSVYQSGKTVSKTGHITRRGNKYLRRYLDNASLVAIRYNPVIKDMYHRLRSKGKSHKVANIACARKLLMIVYSVEKNQKNFVVPSYLQKQ

SEQ ID NO: 341433 - protein, 341 aa, unidentified
MEKFIRTAIDLGKNYFQVHGLESEGGRSISRKVKRSKMHEFYSQIEPCRVGMEACGSAHYWARQLTAMGHEVVLIPPAYIKPYVKRGKNDVVDAAAICEAMSRPDMRFVPIKSADQQAVLMLHKTRELLVKQRTMAVNALRGHLAEFGIVAAKGIGRVDELLALAKADAALPHIAGAAVACMARHLEGLDLSIETVDEEIAKAHRQNPISRLLDEIPGIGTLIASATAASVPDPGVFKSGRDFAAWLGLTPRQNSSGGKEKLGAITKQGNRYIRKMLVTGATSVLRVAGKRKGALADWINALRARKPERLVAVALANKLARICWAIMTTGEGFRTDTYVKA

SEQ ID NO: 341434 - protein, 336 aa, unidentified
MNTTPTNPNIYCGVDTHADTHHAAIVTEHGVFIEDRQFPTTRTGYDELAEWMNNLGHVIAVGIEGTSSYGAGLARHLRNIDTAVVEVPRPNRRLRHDHGKSDPIDAEAAARTVLARHQLSEPKYGTGVIESIRALRIARNSAVKAATAAINALRSMIVTAPEQLRTQLRGHSQGKLLDACAALTPNLADLADPAEATMVALRSLARRVGELRKEARDLKKQLTQLINDSAPRTAGVFGLGPDTAAALLITVGDNPERLRSEASFAHLCGVAPIPASSGKTNRHRLHRGGDRRANQALHTAVVVRLRYRDTAREYAKRRTSEGKSMPEIIRCQKRGL

SEQ ID NO: 341435 - protein, 354 aa, unidentified
MDKYIGFDIDCKKTVACVVQNGKKDVYATFGPDIESMKKFLIQQKQDRSKVHMTFEISGQAGFMYDSLIDSVDSLTVANPSQMTWIYRTTKKNDRIDAHKMAVLLSIGQVPAVYMPSKEVRQWRETILHRRKIVSKRVQVKNRIRATLKAQGHSQPLETGSWWKKANMLWMRNLCDQNIGVCDLWHMHISNLLDEYDLLASQLKRVNLYLNGYLAKNPGGKLLMSIPGVGPRTSEAVLAYTDDVSRFGNYKQYCSYFGLTPKLDESGSCRRLGHISKHGPSVVRWLICESSWIVVRKSPGLRKFYERVMCGQAGRKKIAIVAVARKMLSIMRAMLISGELFNEELVSEMIKKAA

SEQ ID NO: 341436 - protein, 347 aa, unidentified
MIVVGSDTHKHSYTFQAVGAAIGELRSSETVKATSAGHAHLLAWARGLDRERVWAVEDCRNVSGKLERFLLARGERVVRVPPKLMAGRRRGSRRPGKSDPIDALAVARAALEEGIETLPTAALDGPQREIKLLLDHREDLVAERTRIQNRLRWLLHDRWPELELPNACLDRKIWLERLAGRLQRSAQDADVRVMRAQLRRLRELVRETASLERELHALVTAQQPRLLELPGVGTLTAAKLIAEIAGIERFHSHAKLARLAGIAPIPASSGARHRHRLDRGGNRQLNAAFHRIAITQLRCHPVAQLYVHNKLSEGKTKREAIRCLKRHLVRTIYNTMTQPLTTPPALT

SEQ ID NO: 341437 - protein, 393 aa, unidentified
MDPARYKRPRNGPRMCEKHPKSEEGSEMEVTTIGIDLAKSVFAVSGADSRGRVVIRRQLRRAQVMGFMRGLPRCVVGMEATGGAQYWARQFTALGHAVRLMSPALVMPYRKGNKTDRNDADAILEAVSRPSMRFVMVKSVAQQDLLALHRVRAQLVKSRTALCNQLRGLLRERGVAVRMGVAALKRSLPAALADESSELSGEMRELLSEMSQWLRTLEQRIASCEARITRKFKHDERCVRLAEVPGVGPLTATALVAAVGNAQRFKNGRELSAYLGLVPRQHSSGGKTVLLGITKRGDRYLRTLLIHGARSALRQCKLKGDARSDWARRISAARGPNVAAVAMANKNARILWALLSRGDRYRSSRVLTRAVLRPGSPPPVKRARGAKLRVAKD

SEQ ID NO: 341438 - protein, 354 aa, unidentified
MTEFTRVAIDTSKHVFTVYAVTTKGEVVRRELRRTRLLAFFERISPTEVVLEACVGSHYWGRELQVLGHRVRLIPPQYVKPFVRRSKNDRNDAEAIWTAGAQPSIVGVPVKSVPQQAKAMLLKVREQLVGERTGMVNALRGHAMELGFVAAQGHRGLAQLQQALATAAEHEVPAAAKHAFALLGRQIDHLEAQLAEIDAEMKRQFAADPDAKRLAAIPSIGMIGALTLKRTVEFSQFASGRHFAAWLGLVPREHSTGGKHRLGGISRAGDERLRSLLVVGATAVIRHFKTGGKGLMAWLEALLKRKPRKLAAVALANKVARIVWAMMTRGEAFRLLPADPSVIAAGARAKRQRC

SEQ ID NO: 341439 - protein, 404 aa, unidentified
MTVMIGVDPHKGSHTAVAVDEKEQSLAELTVRSGQAQLERLLDWAGRFPQRAWAVENATGLGYLLAQQLVGAGESVIDVQPKLAARVRLLDDHAVNKNDPHDARSVAIAALRSRTPVEVRVEDHSAVAKLWSKRQRDLARARNKVACRLHSLLCELVAGGVPDEIYAAKVARLLASVRPQGAVAAARVELAGELLEDLRRLDAQMKESKKRLAAVVKASRTSTTKLFGVGPMVAAATIGITGDVTRFPTRDRFASFNGTAPIDVSSGGKKVYRLSRRGSRHLNHAIHMAAVTQIRHRHSEGRAYYDRKVAEGKGHREALRSLKRPISDALYACMIEDAMRDGRLAPKGPGGQTGNDSVSGAAGSHPATPALRTSHSRARTNTTTQRSTPKPTRAPTRKATRRAS

SEQ ID NO: 341440 - protein, 384 aa, unidentified
MTKAVTQDRDLLKNLSAILVSIELSKKAWLVTSISPGAGEKISRHTLVGGDIAGLLAGLKQLQHKARSRTGRDFPIITIQEAGFDGFWVHRVMQNEGCESYVVDAASIATSRRKRRAKTDRLDGETLIRALLAFKRGEPRVCSMLRVPTHDEEDRRRIVRERKVLLEERIRHSNRIKGLLFSQGVRGYDPLLRDRRAKLESLRTGDGRELAANMKRQVVRELDRIELLLDQIKEVETERDAMLADERQSGVREVEMLSKVVGIGPEFAAVLWGEGLFRHFDNRRQVAAYAGLAPTPWRSGSLDREQGIGKSGNARLRFTMVEMAWLWLRNQPTSMLSRWFNERVAQSGGRFKKVMITALARKLVVAIWKYVSAGVVIEGALMRP

SEQ ID NO: 341441 - protein, 364 aa, unidentified
MYESMTVTIGLDVHAGSIQLAAVRGDELLDERTLPYDFQAVERALGRFGEMRCCYEAGPTGFGLYRHLVGRGISCQVVAPGLVPQRPGDRVKTDRRDARLLARLYAGGLLEPIAVPSAELEAARDLLRAREDARIERMRARQRLGSFLLRRDRRPPTQCWGATRRRWLSQQSFPFLAQQAAFDDYLQALDLVDARIEALEREIGTLAAEGPWHELVARLRCLRGIDSLSALGIVTEVGDFRRFQNAEAFMSFLGLVPSERSSGERRAQGSITKAGNTHLRRLLVEAAWHARRRPQVGYELARRQRGQDAAVIARAWRCQQRLYRRWRRMAARGKPTQKIVVACARELAGFVWAIGSEQPLRAER

SEQ ID NO: 341442 - protein, 404 aa, unidentified
MKVTYQTCCGVDVHKSFLVATIVKTTGDIEPSYQKKRFSTFNNSILEFKQWLLDNDCHDVCMESTGKYWVPVFNLLEDDINVVIANPKWVKAVKGNKDDTKDSKWIGDLFRLGLVKGSYIPCKKFRILREYTRYRYKLVSCRSSEKNRYQNALTVCNVALDSVVSDIFGKSSTSIIDYLLEQSGSSINHEEIASKLLRSLKSKEDAVIESVEGYQMTDAQKYRMRLVRAHMDYITAEINDVDKMIENMISSNTDFENAVQFLCTIPGVKRDSAITIISEIGTDMSQFSSSKRLCCWAGLTPGSNESAGKKKSVRITRAGVYLKPALVQCAHAAVKSDKSPYYKKKYESLVKRRGKKRAIIAIARMILTAIYQMLSTGEQWNPSDLYKIDMPVALVEKQKAKAIK

SEQ ID NO: 341443 - protein, 482 aa, unidentified
MKKRNIYQNQSQEIVNLFETAGSNEKVMCVPMDYAKNDHLVMFCNGHGDILRKPFSVKNTPVGIAYIDDQVMRSCRRRGIKKEHVFFGGEDANSFAKNFVSTLRSKGFLVANVNAHDAKKQRGNIQASTDRIDLMGIATMLLNCRGNCCPAQSGTYRNLRLLVRHRRKLVQMLTEVKNRVHGIVDELFPGFLKEQNTGIVAFTESSLYLMEDRFSPKQIRRRKRQKLSEILKRFGTAKAEKTAAKLQHYAAKVLHAPIEYVDTMQLSLAQHVKHIRCLKESVAQMDKEIALNLAQTQGAFLTSVRGIGLVLAAGVTAEIGNSNEQKPLNNLSSYAGIVPRIKQTGGINGKTYTGPVARRCNRILKDYVVKSAYHLGLHGPPDLMLDYKRRDASGQHADFGIGRRYLRMAMCLMRTSQVYLPPDLRKGDYALEEKASYYLMNWPYLRGKWKKVGALEEAFALNRPLGLWRQIVQELYDIKLKL

SEQ ID NO: 341444 - protein, 371 aa, unidentified
MFGDEATFHQKGGTPMNYVGIDYHKKYSHVTAIDEEGRVIRSKRLENKPEPFQEFFKRLEGPSEAVLEASRTWGVMYDLLEELEGVESVELAHSLKVRAIAEAKIKTDKIDSHILAQLLRADLIPAAYIPGKETRSFKEMIRQRIFLVRMRTRLKNRIHVLLDRLHIPLPSVTDIFGKRGTDYMRRLNLPGVDGEILRENLQLLETLNTLIKEAEREIGMLLGEDPRVKLLRTVPGVGPILAAVAALEIDRIERFNSPSKLASYTGLVPSTYASGGKIFHGRLLPMSNKWLRWALVEAAWASIRTSPYCRVYFENHKRHKGPHTAAIALARRLSEIIWHVLKENRVYEERPFQKQQRTSITATSPAALALS

SEQ ID NO: 341445 - protein, 310 aa, unidentified
MGCYIGIDVSKATLDVASLPDGESWTVTNDDRGLAELTPRLVALAPALVVLEATGGFELLAALTLAKAGLPLAVVNPRQVRDFAKAMGQLAKTDALDAGILADFAQRVRPEPRPLPDEAAQLLESLLTRRRQLVDMLTAEKNRLGFARGPVKRDISRHIRWLEKRLADVDGDLQDAVASSPLYQAKADLLRSVPGVGQVTTLTLLATLPELGQLSRHQIAALVGVAPMNRDSGTMRGKRMVWGGRAPVRAVLYMAALAGIKHNPAIASFYARLRAAGKPFKVAATACMRKLLTILNAMVHHNRPWDPQLT

SEQ ID NO: 341446 - protein, 350 aa, unidentified
MQGTGRWIGLDLSKETYEMCYFDQKGKVGRSGGETTKAGRSKLYAKLKAEDIVAMEVNSLAFVMEKEMRVIGCTVVILDASQLSIIYSSTKKTDKEDALKLARLVKIYEKEDLPIVDVPTEKEYYRRKLTKECKTLKDDRTQEINRLHALFLQCGITTMKRSNLQTDANRQKELPQLFGYESGQAQRVCERLTLLEAQIKELEQTITKECKADKDIERLQTIPGVGDKTALAFTAYVGDGKRFNNGDEVANYLGLVPRVDCSGAINRYGHITKKGNRIVRALLYQAAWAIVRSKHGGALKAKYFYMTEHGKGKKISITAIARKMAKLLYLVMKNKQMVYQELPFPDLQAG

SEQ ID NO: 341447 - protein, 330 aa, unidentified
MNFKEFIGIDVSKSHIDVFIRFNGLHAKFENSQTGFKKMIDCIQTHVEYSLAEVLFAFEHTGIYSLHLSLFLDKAQYNFTVIPGLELKRSLGITRGKSDKSDARSIAQYAYEKKEKLKLHQMPSQTLLKLKRLASYRERLVKERAAFKSRLGEYETFLDQQENCVLFESHHKMMACLDQQIEKVENELYRLIKQDQELTRQFNLINSIKCVGCQTALMMIILTNGFTLFEKWRQFASYAGTAPFPNQSGTFKGKTRTSHLANKRIKALLSCCATSAIQYSPEMKIYYQTRVEQGKNQMSTINIIRNKLLARIFAVVQRDTPYVDTYRYVG

SEQ ID NO: 341448 - protein, 356 aa, unidentified
MRKMQDFIVKGKDIFIGLEDSKRTWKISCRCEKMEIHYTSMPADYAVLRSYLQKNYVECRITVIYEAGFKGFGLHDKLVEDGYSCIVTPPNKVTQEKVSRVKTDKIDCRRLATNLENSDFKKCHVPDKEILSDRQISRTLIAIQKDLVRTRNRIRKFLDFHGIDKGFPAGAWGKADYDRLMKLELDGMLRISLKVLTDLLTHLLSAKKLLKQELLLLTKKERYAAVYKIFNSAPGIGWFTAIRLVLEWGEDLSRFKTAKKFGSFAGLCASEYSSGDTVLKGNITGQSNGSVRAWLIESAWTALKYDPVLLNKYNGILHRCGNKKKAIVAVARKLAVRLWRCAMNKEPYCVGLLATD

SEQ ID NO: 341449 - protein, 366 aa, unidentified
MKKINTMAKRGNQIFKEPKLTIGLDLGDRTSHYCILDEAGNVILEHSLPTTPKGIHQVFCRIPRSRIALETGTHSPWVSRQLTQLGHEVIVAHARNVRLIGESSRKDDQLDARTLARLARIDPGLLGPVRHRSAKTQIHLTVIRARAALVSTRTALVNAARGLTKSYGERLRKCGTGQMNREIAKGLSQELRDALEPLLQEIESLNERIAEYDRRIEQIAKEAHPEVALLQQVKGVGTLIALTYVLTLDDPHRFRRSRDAGCFLGLRPGRRNSGMSEPQLHISKEGDRYLRTLLVQGAHYILGPFGEDSDLRRWGLQLAERGGRNAKKRAVVAVARKLAVLLHKLWVSGEVYEPLRNNHKMVSAVA

SEQ ID NO: 341450 - protein, 340 aa, unidentified
MQVTTIGVDLAKNVFQVHGIAENDDVLFNKPLRRAQFLPFFAKLEPCLIGMESCSSAHHWARELTALGHEVRLIPPMYVKPYVKRGKSDAIDAEAICEAVTRPTMRFVAIKTVEQQALLSLHRARDLLVRQRTQLINGLRGLVAEFGVYIPRGLARVIGFAEDITLGEVLDLPDIANEVIRNLSEQLMALHKRIRWYEERLKQVAKEDARVRLLRTIPGVGAVTASAIIASIGDGHQFRNGREFAAWLGLTPANKSSGGKEKLGRITKMGDQYLRSLLVVGMTSLVRQTRSHPERASKWLTSLLERKPARVATVAMANKTARIVWAVLTRDEPYSPRAAV

SEQ ID NO: 341451 - protein, 416 aa, unidentified
MDTMYERCCGLDIHKKTIEACFRSGKKKTHMSFGTTSAELRKLTMWLVENDCQSVAMESTGSYWKPIFNILELSGTDMKIIVVNARHMKNVPGRKTDVNDAEWIAELLQYGLLRPSFIPDREQRELRELSRYRKSLVGERAREINRLQKMLEGGNIKLTSVVSEVTGYSSRRLLDRLLRNDEPMTEDVISGLVHTSLAGKSKELETALDGLLSELQKELLIKVLDHIDDMSRRIADLDDFCRKQMKKYEDALDKLDEIPGIARRTAETILIETGLDMSRFPTAKHFARWAGLAPGNNESAGKRSSGRTTKGNPTLKSTLIQSAKVAARKKDSFFKARYQKIAARRGANRASVAVAHSMLIAIYHILKSGERFKDLGEDYYNQFNKEKKKKYYLKKLTKLGVNLKEATLSISIQAVT

SEQ ID NO: 341452 - protein, 352 aa, unidentified
MIQDLNKNIALVRIRFVGDGSTAHCPLKKQKCNLCYRSGLEIVREEECPNDVKGLKKAFKAALKVLGASFEDALVCAEYTGRYIYPLTVACQELGIFLWMDDPTRIKNSMGLTRGKNDVIDAARIAEYAYRYSDKAVRYYIQDAVLVSMKNLLSDREFLLTDRKRFQSQLSDQKKYMASGDYKHKSARWKKVIKSIDEQIAAIDAEIEALIAADPVLARQKELLVSIDGIGERIAINMIAITGGFTRFQNARQFCSFAGLTPYKYDSGTSVRSKAKISRRANQTMKALLHMSAVNVATRMKSGEYKDYYERKLKEGKHVMCILNVLRAKLVHRMFSVIRRDTQYTKEYKPAC

SEQ ID NO: 341453 - protein, 333 aa, unidentified
MVDGTKGSHRKEGTTKMSENNINAAGIDTGKAKLDVALAGGKARLQIDNALSGWRELATWVKRHNVDRIGIEASGGYERGVVAYLREKGFIVILFQPLQIRAYAGFRLQRAKNDRIDADLIAACTAATTTVRKAPDPRFQAFCEHLTLIEQIEEDIVRAKTRLEGFRDDRHREILASEIKRFKAWRTAELKRLLDALRCHNDLANRLTLIESVPGIGSRTALALLIRMPELGSLSREEAAALAGLAPYDDDSAKHHGLRHIAGGRGRLRKSLFAAALPAAFQWNPSLVALYARLTAAGKSHKVALIACARKLLIFANTVVARGTPWTEHHATI

SEQ ID NO: 341454 - protein, 414 aa, unidentified
MQVLYPRCAGLDVHKDTVVACVRLAGEGPATTEVRTFATTTAGLCALAEWLVESGVTHVAMEATGIYWKPVWHILSDNPLELILANAAHVKNVPGRKTDVNDAMWLAELLAHGLIRASFVPPREVGELRTLLRTRKQLVREHASHVQRVQKTLEDANIKLTSALSDIMGKSGRAMIEAMIAGETDPHKLAALADRRVKAARAKLVEALTGRLNAQHRFLLRLHLGQIDALDRATAEVDAEIEGHLGPFRDAVKLLDTIDGVDVLAAEVILSEIGLDMTRFPTDGHLASWACICPRNDESAGRRRSTRTRKGARWLKATLIQCARSAARMKGRYLSALYHRVRGRRGDKKAILAVASSILVAAYHMLKTGTPYRDLGPNHFEPTKKAAITRNLIKRLEGLGFAVDLKLLAAAQPV

SEQ ID NO: 341455 - protein, 451 aa, unidentified
MFSERTSVGLDVHARTTMAWALDGETGEVFSERLDAETHKVLAWVATLPQPAAVAYEAGPTGFVLARALDSIGLRCMVAAPSKMERPAGDRIKTDKRDAQRLAKLLRMDELPVVRVPTLAEEAARDLVRGRDDVRRDLARARNRISKLLLRQGRVWRGGSGWTYIHHEWLRKQRFDDADTEFAYDNGYEEVLALETMRDRFDQRITDAAARPEWCPVVRRLSCLRGIDTLSALGLAVEVGDWQRFTGATIGAYLGLVPSEHSSGPNRFQGPITKTGNSQARRLLVEASWHHYKPLPRSRRDPAPPDGTCLPAGTATGRPRQPAAPPAVGILPRPEEEHQRRRRRGGPRTRGLVLEFGGDGLTLRGPQNGRREAGRASARDDARGPYEHPLRRATLDCRPEAPSPTNIRSCGNQPADIRLTARRRTTRPRPPAGPTEPPPGPHRRAHTLLPT

SEQ ID NO: 341456 - protein, 406 aa, unidentified
MIFVGVDWAEAHHDVHVQDEAGQRLGGGRLPEGVDGIARFHELVGHHADEPSDVVIGIETDRGLFVSALVGAGYQVFAVNPMSTSRYRDRHSTSGAKSDPGDAKVLADMVRTDRQNHRVVAVDSGTVQALKVLARAHQSMTWSRGRQTNLLRSTLREFYPAALVAFDDLASADALEVLRLAPTPELGRSLSRSKIAAALRRGGRQRRVDERAGEIQAALRADQLAAAAEVSTAMGASVAASVAVIATMNAQIAELAKELEAGFELHPDASVVRSLPGLGTILGARVLGEFGDEPDRYATAKSRKNYAGTSPITRASGTKKAVLARHVRNRRLADAIYLWSFAALTASPGARALYDQHRAAGDTHHAALRALGNRLVGILHGCLHHHTLYDETVAWGHRQEKLPQAA

SEQ ID NO: 341457 - protein, 419 aa, unidentified
MSFKILKNNCCGLDVHKTWIYACIGITDSFKRTEYKQARFSSFTKGLQELCLWLAKYNCIDVCMESTGKYWIPVFNVLEKNNIFVTLSHPKYTKPQKGNKTDRKDAKWICDLYMCGMVKPSFIPPADIRQLRDLVRYRFKLTCMITGEKNRAHNCLTVSNLKLDDVFSDIFGKSSRSITEQILQHPGEVFDVAPFVDSRCKTPIEEIQAAVDGAISHEQAVKLRQCLKHIDELEMHKAEIEREIFRLSQKYESVLDLIRTIPGFDKNPLTAIQVLSEIGADMSVFPTAKNLVSWAGCCPRNDQSNQKIKSTRISRAGSYFKPVLVQIANALIKSKKHPEFTTRYRRIKARRGHKKAIIAICRMILTAIWHILTDLKPYTPEGFLESRPVNKEKVLTISQALNLIKQRGYIIKDDVGPVT

SEQ ID NO: 341458 - protein, 337 aa, unidentified
MKYSGIDLHSNNCVVVVTDEEDRVVVEKRLPNELEKILALLSPWREELVGVVVESTFNWYWLVDGLQAAGFAVHLAHTTAIKKYDGLKHSGDQADARHLAHLLRLGILPKGTILPPEHRAVRDLARKRMQLVRSRTTHILAVENILARQRGARITSNQVKRLTADLIDQLGLAEDVALAIKANVAIIASLNGQIDLLEKRLQERVGERLEYALLTTTPGIGQVLATTILLETGPIERFGATGNFVSYARCVDSVHTSNGKKKGEGNARNGNKYLAWAFVEAANFALRYCPEAKRFYERKKARTNNVVAVKALAHKLARASYHILKERQPFDVTRCFA

SEQ ID NO: 341459 - protein, 305 aa, unidentified
MSEIKFTQVVGVGCGIDVHKDLIVATIQKGNEQIETKEFNAYTSSLKSLRDWCKEEGVTHIAMESTGVYWKPVFNVLEEDFHIILVNARHVKNVPGHKTDKKDSRWLSKLLLSGLLKGSFIPPCEIRELRDLVRYRKKLVAQTASEKSRIIKILEDANIKLSSVLSNVDGAVGTKILDSLIEGKTEVSYLMQFYHGKIKTSKEEFRLALEGKINSHHRFMLQLHKDSIADKERMIVRIDKEIEIATQAYQVEIALLQTIPGVARDSAISIISEIGVDMSIFPDENHLSSWAGMSPGNNETGGKKK

SEQ ID NO: 341460 - protein, 347 aa, unidentified
MLTIGVDPHKDTHTAAAVDAVGDERSHRTQPARREGFGALLIWARDLDTDRVWVIEDCRHVSGPLERFLIDRGETVARLAPHLMAGARRGARTRGKSDPIDALAIAHAALRVGVHSLPAARLAGPELEIRQLVCHRQRLIAARTRLINELRWQLHDLWPDWEIPRRCLSGTSWQHQVKHRLRNAPTSAIVRIARDELRRIIDLTRTINQLHRELAGLVAHRAPQLLAQPGCGVICAAKLIGEIAGIHRFANDAKLARMAGCAPIPVSSGRTDRHRLDRGGNRQLNHAVHLLAICRIRHDPNTAAYIQKQRQTGKTSREAIRNLKRHLIRHIYQLLTHPPTNPQTIHC

SEQ ID NO: 341461 - protein, 340 aa, unidentified
MGKFSKKKHFVGVDISKETLDISLISQESYGSYKDKKIQNTMKGYSELKSWLNEKNIPKKDVMFCMEHTGTYGFMFFAWLANEDYDFCVEAGLQIKRSLGMARGKNDRIDARRIADYAYTHRDKLQDFHLPSKLILQLKELLTYREQMVRIRTSLKNSLKHHKQYTELTGLQNIPDNLVKMIEDYDQQINEIEEKIISLIENDAEVKKNFEMARSVRGIGLVIATFMLVTTNNFTSFENGRKYASYSGIAPYEHSSGTSIRGRTRTSYLGNKKIKALLSSGANVARRFDPEIRAYYQRKLEEGKDHKVIINAISCKLVNRVFAVVKRQTPYVVTYQHNFS

SEQ ID NO: 341462 - protein, 323 aa, unidentified
MEQKLPTTPEAMKQTFGKIPRSLIALETGTHSPWVSRLLTQLGHEVIVAHAQKVQWITKSSRKDDRHDAQTLARLARVDPELLGPVRHRSVQAQLHLTVIRARAELVSARTALVNAARGLVKSYGQRLPKCGTYQVSEKLAEGLSTELRGVLVPLFKEIESLNEHIKEYDERMENIAKEVYPQVSLLKQVKGVGTQIALTYVLIIEDPHRFPKSRQVGCFLGLRPGRRNSGESEPQKGISKEGDRYLRTMMVQGAHYILGPFGEDSDLRRWGRKLAERGGKNAKKRAVVAVARKLAVLLHRLWVGGEVYEPLRNSQKAMQEVA

SEQ ID NO: 341463 - protein, 328 aa, unidentified
MSDDVAALFVGIDVSKARLDCAALVGETVTQSKSFNNDSAGHERLLRWLQDGECQPGLIVVEATGGYESAVVAMLATAKLPIAVVNPRQARDFAKATGVLAKTDAVDARVLAQFGRAIRPQVRGPKSEELSLLEALLTRRRQLVEMITAETHRRGVATSPVIARQIDRHLRWLERQVQAADDDLNGMIGKSSLMQRKLDVLTSVPGVGRVTAVALLAQLPELGGLNERQLSALVGVCPFSRDSGTMRGRRVIWGGRARVRAALYMAALVASRHNPILRTFYRRLLNNGKAKKVALVACMHKLLLILNAMIKRDQMWQPAYVHPGAQVA

SEQ ID NO: 341464 - protein, 342 aa, unidentified
MSEIITVGLDLAKNVFQVHGADGAGRGVLRKKLRRAQVLEFFGQMPPCVVAMEACGGAHFWGREIGKLGHDVRLIPPAYVKPFVKRQKNDAADAEAICEAAVRPTMRFVPVKSEETQGAAMVFRVRELLIRQRTQAINALRGHLTEFGQIVPQGAANTSKLIAVVEDPDSGIPADAIATLKVLVMALAHLEAEIGKLNAEIARRAKENDVARRLMTVPGIGPLIATAIAVLAPPPETFRKARDFAAWLGLVPRQHSTGGKQRLGATTRMGERSLRRLLIIGANSVIIKRHAHAAAKPGTWLGGMLTRKPPMLVRVALANKMARIVWALMARGGVYQSPAAAA

SEQ ID NO: 341465 - protein, 428 aa, unidentified
MTVKDCTSVKEFWQLKKEIRGSKDYLIVGIDVAKDDHKAFFGTAYGKTLLKRLSFKNDIEGFGKLLARVKEMKMKHNLKELVLGLEPTANYHKPLGDFLIKCGHMVVLVSGVSVKRNRELLDGRWDKNDTKDSANVADLISQGKCLYYEYAPVLLKDLRGLLSLKRRLKKQEHGFRIRIRNSLLAQYFPELDKYYSKWEPEILSVVRWCLDPSVIAGLEYDQFVSLVSPGSKTIRQQGRLEWIWKKAVYSIGCDAGEAAEFEAKVMVEELRHIRDVIKETDAKIKDVCVRFPEYDYLLTIPGFGPDVSSKVLATIGNPFRFNSASQVLKMAGMDLNANRSGKSSDTAVPVISKKGSAHLRYALYQAAFIASVRSKYFIRYYTNTLIGREREKGIKTKMRVKLAAKMLVIAWTLMKKKEPFDPGYLKID

SEQ ID NO: 341466 - protein, 355 aa, unidentified
MNDEKYIGLDVHQATIVVAVMDSTGKLVMESILETEAATILQFFAGLRGTLSVTFEEGTWSVWLYDLLNPHVDKLVVCNPRKNALLKDGNKSDRIDARKLAELLRGNQLKPVYHGETGVRMLRELSRSYLTIVKDRSRVMNRLKVVYRSWAIPCAGRDVYYRRHRAQWLAKIREAGVRRRAERLYEQLDMLQHLRQQARRELLAEGRKHAITAKLRQIPYLGPIRSVLAVALMQTPHRFRSKRQLWAYSGLALETRISAEYRLVEGQVRRSKKLLSIRGLNKDHNHDLKGLFKGAATMASVRPGPFQDFYQAALAKGIKPTMARLTLARKIAAITLTLWKKGENFDAEKLKSQAA

SEQ ID NO: 341467 - protein, 449 aa, unidentified
MRKPQVIEDQEHERAFDRVAAVDVAKASGMVCTRTPNPSRPGARRSTVWEVPATMNAVLALAARLAQDGIEMVTLESTSDYWRIWYYVLEAAGLAVQLVTSSQAKNLPGRPKTDKLDAMWLARLTEMGMLRPSFVPPAPVRVLRDYARARTHLVQDRTRCWQRLEKLLEGALIKVSAVASKLTTVSAQDMIKAMIAGERDPRVLAGLARGRMKAKHDALVEALTGMFDDHHGELAQMLLEQIAFCDTRVAVLAGRIEEQLNQIPDAWGVDADGTTGPGAGTGTDAAVPPAAQRLAQIPGVSPELARSIIAETGLDMSRFPTAAHLVSWAGLCPSARQSGSRIRAGGKGQGDSYLRGYLGQAATGAAGTATFLGERHQRIARRRGRAKAQVAVARSILVITWHLLADPAARFTDLGPDYYASRTDKDKKIRNHIRQLQALGMDVTITPAA

SEQ ID NO: 341468 - protein, 407 aa, unidentified
MDGRASPGPRHAGVDWSWEHHAVCILDDVGVVLDRFVVKHEAAGLKELCRRLGGLGVDRVAIERPDGPAVQALLDDGFEVVVIASRQVKALRLRYGSAGNKDDRFDAYVLADVLRTDGHRLRPLRPDSDATRALRALVRARKDLIKHRLALANQLRANLLQAFSGAIGLFAELDSPISLAFLKRFPTAERAAWLTERRLHAWLRSVGYGGRRPTSRLLEHLRDAPAGLTGEVGDGHGIVTVQLVDLLTRVRSRIDVLDERIREALELHPDAQIFTSFPRAGTNRAALLLAEIGDCRERFPDEASLAAAAGVAPSTRASGKHWHVSFRRGCNKKLREALIDFAQDSVQASPWAEDIYRRARDRGMRHPHAARVVARAWVRVLWRCWTDGVAYDPSRHAGFTRLEGVPA

SEQ ID NO: 341469 - protein, 427 aa, unidentified
MAGVVTARVNRGKKVMTEESFTWFAGVDWGSEKHHACIIDTRGTVVGERQFPHSGVGLAELGDWLLSIAGTTATVAVAIEVPHGPVVDSLIDRGFVVYAINPKQLDRLRDRFSVAGAKDDRRDAYVLGDGIRTDRRLFRRLHVADPRIVELRAWSRLTEELQEERVRLGNRVQQQLWRYYPQMQKITNDLAAPWFLELWAMAPTPGKARQLRKSTVEQILKKHRIRRIDADTVLRMLREPAIKVAEGIAEAASIHLRSLIARLHVVNRELRQAEQKLDQLCAGIGETEGAPGECLQGQDIKILKSVPGIGRINLATLVCEASGPLRSRDYPALRTLCGAAPVTKRSGKSQIVVMRYAAHARLRETVYHWARTATQHDAKSRCRYAALRQRGHSHGRALRGVADRLLGLTCVLLQRQTMFDPHFGQAG

SEQ ID NO: 341470 - protein, 388 aa, unidentified
MRQVCGLDVHKDSVFVCILNEKGVVFQEKFGVLTTELEQLLVIMREPDVSEVCMESTSIYWMPVWRVLEPYFELKLVNPFFIKQLPGKKSDVKDAEWIATCLHKDLIKGSYVPEDRIQQLRQYDRRIFDLDKDIVYKLTKLDAALQRCNIRISNYLSNTSTKGYKDVVDMIADGITDPEVLVKAIHGRTINRVGRNVVLGALTGVITEADVDMIRQLRDEVALAEKHKDECQSKMDTLCRQWFPDEYALLQTIPGVKARSATAILAELGNDVSSFPDAAHLTSWCGLKPRNDESAGKIKSRKITHGNKYLRKTLIECSWAARRTQGSFYSRFSYHQTVVRRKNSMKVQVAVARKMLAAIWFILHDHVPYKDYTPPTPEETSSDIVTTE

SEQ ID NO: 341471 - protein, 317 aa, unidentified
MRQTNTKTAGIDTSKDKLDIAIDGSTTCWQVENTAIGWRHVADRLTAAGVTRVGIEATGGYERGVVRYLREKGFTVLVLQPVQVKAYARMHLRRAKNDKIDAALIAACAASLEAPTVPPDVRLEALAGHLTFVEQVEEDIARLKVRLEHVEDARLRDILKADIAALKQRRATEMLRIIKALRAHADLARRYHLVLSVPGIGERTALAIIVRMPELGRISREEAAALAGLAPYDHDSGAHKGQRHIAGGRARLRRSLFAAALPAAFRWNKALIELYSRLIARGKCHKAALVACARKLLIYANTVVQRGTPWVQGPAAA

SEQ ID NO: 341472 - protein, 366 aa, unidentified
MVTVKWAHPAETPAVLERLRGLPCGSLTAVMESTGVYGDTLRKQLREAGLEVHLMSAKRVHDACEVYDGVPSMHDAKAAQVIGRLYFEGASRVWVEASEQQRSHDAIGRLYRLYQKQHQQQQNRLEAALQRHWPELSHYLELDSVTLEDLLLSFGSPAALSAQAEEGRERMRRVSRGKLAAEKIEAVLESARHSIGVPCVAAERDYLMALGAELRRSREQKERVGVRLSALTQADPQLHALGVTIGRVTTGLLIAEGLDPRAYANSGSYCKALGLNLKERSSGQHKGQLKITKRGSGPARRDLYLATLRLMQRDEIVKTWFENKVKPNGGGNKQRIVVALMRKLSRALWYVARGQAFDARRLCAVG

SEQ ID NO: 341473 - protein, 416 aa, unidentified
MEPQMNKVCGIDVHKRFLIATILSRNGTKEIRRFSATLEDLLTFRDWLIENGCEQAAIESTGIYWHPVHAVLEGKIDLIVANAYKIKHTPGRKTDISDTEWIAELCLNGMIEPSRIFPKDDRELRRLTRAREGYVKQMTQEKNKIHHSLDSACIKLASVVSDIFGKSGMYLLNSILEGKDIDEIVEGIPSSRLKKKADQIKEAIKSHLEISQIILIRGSLCLMRSIQERINELDGEISARIQRRKNDLAIAMSIPGMGFISATAILAEIGDYTDFENSEKLAAWCGLVPSLYQSAEKVVLGGITKQGSKHIRRMLIQIAYAISRTKKSKLKRFFLRIQAKKGSKVAAVALARKVLCILHHLLINQEMYQEDEDKKNTRRKTIVSPSSIEMPIQEMIDCIVRAGYVVTKSDSRGRSG

SEQ ID NO: 341474 - protein, 337 aa, unidentified
MAFLMEETGECGEQELNHSDGQAEKFYRDLKQRGICVRVGMEATGYSRWFERLLAELGFEVWIGDPAEIKTKRVKKQKTDREHARLMRKLLLENRFPRIWVPDPENRDLRQLLWHRHRLVQMRTRIMNQLQALAMNEGYRWKKKLFSEQGRAQLEKLSLAPWASRRRQELLELLDRMNPTIEELTAAVEREGRKRPEVQRLMTHPGVGPLTALAFVLIIGTWERFPCDKQIGNYVGMIPSEDSSAGKQRLGHISKQGNSLLRFLLVEAAQAAARINPEWRRRYIHLAMRRHKSIAKVAMGRRLGIRLYWMWRNGWEYSPSMEFGSYAGQLGTGHGVK

SEQ ID NO: 341475 - protein, 461 aa, unidentified
MGQTIRLGIDVACRSDHQASCADQAGEFLWSGWRFRTRAADLEGLWAKVPDGAEVTVVLEPTRNAWVPVAAWLGAKGAKVVMVPPEQSADLRDYYNKHTKTDRLDSRILARLPLLHPDGLRPIDHLGPAQPLLRAVRVRSSFVKRRTATAQRLDCLVELLGPAWGDVLGTGDYNKSALAVLERFADPRALKKLGRKRLSTLLIRASRGAWRESKADDLLAAADESIELWAGGGLDFEELAADIATEVRLLRHLNAEIAAMDDRNEALYEEADPKGIVVSAPGIGLTLAAGILGRLGDPDRFASLAGVRSFTGLVPKIDQSGLENRHKGVTKAGDPGLREALFLAADLARRTDPTLAQRYHRLVVTDGRHHISAVCTIAAVLVTRIAACWRTGQLYVLRDVDGTEITEAEGREICAERYKVSAEVRAARKRSGKAQQMKRAGRGSKGVDQGRSGVRPTRRER

SEQ ID NO: 341476 - protein, 337 aa, unidentified
MRKAKPNQPTRYWAGFDIAKKTFQAALWGHKEFSDMEVHGFLRQKEVVREALGRMKAEAPKGMPLGIVMEATGKFSEQVAVWLLELDPRLRVAIVNPAQTASFIKSLGFRNKTDDLDAKALARYGHERNPVAWEPPSPEMAVLRDLTRTRADLVAARTAMKNRLNDHERASSAASDALSKIIESLAGQVEALDEAIQGHLKAQPELGRQVRLYMTIQGIGIVTSTVVLAEMGDLHRFERSRKLAAFAGLSPKLKDSGTSVHGKPRMCKQGSARVRTALYMAASNAIQYNPDMKAFYERLCKQGKVPRAALGAVMRKLLVLMRAVLVAGEAWKPRLAA

SEQ ID NO: 341477 - protein, 462 aa, unidentified
MSDQSRRPRRPRSSPYVLDCLNPDAAGIDCGATTHVVAVSPDRDAAPVQSFRTFTTDLHRLADWLVTCRVTSVALESTGVYWIPVYEILEARGIAVHLVNARHVRNVPGRKSDVSDAEWLRDLHSVGLLRGSFRPTEALAALRAYVRHRHTLVELAAMHIQRMQKALMQMNLQLPSVLSDITGQTGLRIIRAIVAGERDPVQLAAHRHGRCRASEAEIIAALTGHYRPEHLFALEQNLALFDACQVQMEACDRAIEAHVHTVTASITPPAEPLPPPRVTRKPRATDPAFDIRTVLHHLTGGVDLTQIDGIAPYTALKVVSEIGTDMRRWPTAQHFTSWLTLAPRNKVSGGRLLSAQTQPSANRAAVAFHLAAASLARTQTALGAFYRRLAARIGKPQAITATARKLAALVYHVLKGDFVYHDPGAHGYDEQQRTRVLRQLRQRADRLGFALLSRETGEVLGR

SEQ ID NO: 341478 - protein, 344 aa, unidentified
MNATTVAVDLAKSVFELAAADEHWKVAERARLTRGQFERWFQNRAVRLVVMEACATAHHWARTFRARGIEVRLLPPKDVRAYVRRNKTDAADALALLEAARSADITPVAVKSVEQQALQALHRLRSGWMSTRTRRINTLRGFCREFGMEVSVGAARGLAQIARLLADEHSAIPAMLRTPMRLALEEIRLMEARIDSLERELAAIARQSEPCKALSSVPGIGLLTSTAMVAAVGDPRSFQSGRRYASFFGLTPREYSSGEHRYLGRISKRGNRYVRTLLTHGARSVLRAATVARRAGRNVDRLRSWALEVQARTNHNKATCALANKLARIAWAVWVKHERYQATS

SEQ ID NO: 341479 - protein, 348 aa, unidentified
MLADELDFVLGVDTHRDVHAVGVIEVRSGVVVFEAAIAADSDGYAEALRLAQRHAPGRRAFAVEGTASFGAGLTRFLVERGEQVFEVGRLRRERRSGGKTDALDAVRAARSVLTQKRPSLPRSSGEREALRALVAAREGAVNAKQAGLNQLRDLLVTTPEPLRGELRTLTQARLLNRLAATRPERRRDPELRGIMLALRALARRVQSLTLEERQLAREIEKLIRTLAPQLLEQPGIGALLAAQVVLSWSHPGRIANEAAFARLAGVAPIPASSGQTIRYRLDRSGDHKLNRALHLILNTRKRTHPATIAYIERRMQERKTRREANRCLKRYLARNLYRLLEHGPPMAT

SEQ ID NO: 341480 - protein, 407 aa, unidentified
MRRDKHIYIGIDLHKFQHTAVILDCWFEKLEEVTFENKPSAFPSLLEYVNGFLTEGVTPVFGLEDVGGYGRDFALYLKEKGYIVKFVNSSLSNAERNSYAMTQKHDSWDAQCVANVLIRQLPYLPDAMPSDLYWMIAQLVGRRNALVKSQTALKNQLHLQLSFHYPSYKKFFSKVDGQTALAFWERYPSPAHLKGETVESLRTFLLKASHKSCSIRKAKQILSLIQADGEIKREYQTTRDFIIQSMVRDIRFKKQEIKKVDKELKALIKSLGMQLETMPGINTVTASAFIAEIGDIHRFANSDKLARYAGIAPVRMGSGGKETIQKSKQGNRKLYTIFYNLAVQQIHICKGSKTPRNPVFYEYYQKKLAEGKTKQQALICIMRRLVNIIYGMMKHKTAYIMPERKVS

SEQ ID NO: 341481 - protein, 449 aa, unidentified
MSNYAGVDWAADKHDVLVADEAGEELLAATFAHDEKGLRALCRALVRLKVKLVAIERPDGLLVERLLDAGLRVLALHPNQVAATRARFRVSGGKSDRFDAFVLCELARTDSHRFRVLEPDGDETKALRALTRAREDLVHARVALTNQLRAELERFWPGPIGLFSDLHSQISLAFLERYPSPGDVRGLGEQRLAAFLARQHYPGGQKPAQLLAKLRRAPEGRVGEAELAARRALVLALVAALQPLVAQIKQLNEQIATALREHPDGEIFTSLFRDPRSVVTAAELLAEIGDCRNRYPTRDALAADAGQAAVAVESGKRKTAAFRWGCNKRLRGAFCTLADSTRHWHPWAADRYAAARARGHDHPRALRTLGRAWCRVVWRCWQDRTPYDPARHRALQQHCAVTIPTSSGSLPDLAATQRMLGAAVTEPAARRAEREALDGKPTSAITLGG

SEQ ID NO: 341482 - protein, 385 aa, unidentified
MQKLNDLSRSLSPLDPNGTLIAVIEMSQSSWLVAGIVPGIERHPLKKLEPNEGELLRLLMRWRAEATKMGCTITRIAVAYEAGRDGFWLARWLRAHDIETYVIHPTSVAVSREHRRAKTDRLDTGLLKRVFIGWLRGEPDHCHMVKIPTLAEEDAKRPNREREGLVRDRTRIVNRMKSCLARFGVRSFKPTLRKAPERLATLVTPEGVPLPANTLLELRRDMARLRFIMDQIKEVEEARAQRLEQAPQEKSHAMVRLLARVIGVGIETADMLVHEILSRSLRDRRAVARYAGLTGAPDESGSRRQEKGLAKAGNARVRRGMIQLAWRFLLFQKDSALAQWYRTRTESAGKKRKTMIVALARKLLIALWRLVTIGEVPAGVVLRAA

SEQ ID NO: 341483 - protein, 347 aa, unidentified
MRFYTNQHRYYCGIDLHARSMYVCVLDPQGQILLHRNMPCAPESFLKAIAPYREDIAVAVECIFTWYWLADLCSKQNIPFVLGHALYMKAIHGGKAKNDKIDAHKIAVLLRGGMLPMAYVYPPEMRATRDLLRRRMYLMRKRAELLAHVQNTNSQYNLPEIGKKIAYKANREGVAERFSDPSVQRSIEVDLKLMDHYDQLLTDLELYIVRTAKEHDANAFYRLRSVPGIGKILALVILYEIHDINRFPTVQDFVSYSRLVKCAKESAGKRHGTSGKKIGNVHLKWAFSEASVLFLRANPKGQRFVEKLSSKHGKAKALSILAHKLGRAVYYMLKRKQAFDMNKFFNS

SEQ ID NO: 341484 - protein, 343 aa, unidentified
MQSISTIGLDIAKSVFQVHGVDAAGQVVIRRQLKRRFVLSFFEKLPPCLVGIEACASSHYWSRELRALGHTVQLMPPAYVKPYVKRQKNDSTDAEAICEAVTRPNMRFVPIKTIEQQSCLMLHRVRHLFIRQQTAVINSIRAYLAEFGVVAPVGRRGVEQLLEVVADPAECRLPEVARACLAALGSQLRALKAQILDFDRRIIAWHRSNATSKRLDAIPGVGPALATALVASVADANAFRSGRDFSAWVGLVPKQNSSGGKDRLGSISKQGDRYLRSLFTAGALAVIRYAKIHGARHRPWLTALLARRPTKVAAIALANKLARMAWAMMARNERYREPAALTA

SEQ ID NO: 341485 - protein, 380 aa, unidentified
MEARTVNNLPPAAPHDDAVRCLLAIELSKKSWIVAVNTPLSDKISHYTLESCDWKGLLDLCERIRTRVAREMKKPVEIISCYEAGYDGFWLHRLLEAHGIRNYVIDPASLQVDRRARRAKTDRVDVERMLRSLLAYLRGEPKVWSVVRVPSVAEEDDRRLHRERDRLINERVQHVNRIKGLLAIHGIYDYQPLRGDRVQRLEQLHAADGQTLPPRLKAEILRELQRLELAIRMIKAIEAERDAIASAKTGHTSAKKIQHLAKIKSIGPEFATALVGEVFYRSFDNRKQLASYVGLTPAHFQSGAMSRDQGISKAGNAKARTVMIELAWLWLRHQPASPPACLVPRTCWQTQGPYPADYDRRRRTQAADRALALSRERHGA

SEQ ID NO: 341486 - protein, 331 aa, unidentified
MFPVGIDVSKNTLDLCMLYDGIKGRIKTRNIQNNRHSVENILRWLRLQHCSPEDVHVVMEATGVYHERLATELHDAGFRVSLANPHRSREFARGMGIMTKTDKVDAYMLACYAFLKKPHRWEPPAPEIRYLGALLRRRDVLLGDALREENRLEKYLSTDTPADIISSCRRMAQLMREEVSNIERQIKAHIKASPALRRDYTLLTSIKSVGPLLGMHMLVVLRSHNFASAEQAAAFLGVVPIEKRSGTSVRRRPRMSKIGPPQLRAKLYMSALCGKIYNKRMRNIYDEMCLRGKPKMVAIGALMRKLVHWCYGVLKTGTVFNDESLKQVMST

SEQ ID NO: 341487 - protein, 304 aa, unidentified
MIIGCDYHPAFQQIAFVDTDTGELQERRLQHREEAEKFYRDLAAQGIKVRVGMEASGQARWFERLLVELNFELWIGDAAEIRTKRVRKQKTDRQDAQLILKLMLKDDFPRIWVPSWENRDLRQLLWHRHRMVQARTRIMNQLQAVALNEGLRCKKRLWREAGRGQLEAFRLAPWASRRRRDLLELMDRLNPTITDLTQTIEQEAEKCPAAQRLMTHPGVGPLTALAFVLIIGTADRFQCGKQIASYLGLVPLEESSGNRRRLGHITKQGNALLRFLLVEAAPDGIVWRLARGTRGLAASRDFLT

SEQ ID NO: 341488 - protein, 348 aa, unidentified
MLYIGLDVHKRTISYCVRHSDGTILQEGCVPALRENLDELAARVPAPCVIGLEATLFTAWVYDHLMSKGVRVKVAHPSMLKAIFAGKRKNDEIDARKLADLLRCNYFPECHIASREIRDRRRALRYRNMLVRQSTQTKNKMAGMLMEVGIPYNKAQLHNSKKYFEELLDSKGAMMPDALPGLLRLGRNVIDVLRSMNRQLVHMLENDSVLAERVARLTSIPGVGVILALTWALEIGDVSRFPSQKATISYCGLCGAEQSSAGKSQRTPISKQRNKHLQTTLIEAAKVAPRWHPDFALLYDREKQKGNRNRATLAIARKLVSYLLSVDRADRVFLPQRPVPTKLQPRSA

SEQ ID NO: 341489 - protein, 417 aa, unidentified
MNDVRWFVGIDWATKQHRICLFDAEGKRGAERDVTHDGAGLSELCSWLIETTKAQPAQIAVAIETPRGPVVEALLERGFQVYAINPKQLDRFRDRFSVSGAKDDSRDAHVLGYSLHTDPQAFRRLAIDDPLVIELREWSRMHEELTQERTRLANRVRDQLWRYYPQAFELTNDLAADWFLDLWQQLPTPAKAARATDKTVARILKSHRIRRWDAVEVLRILRQPPLVVAPGTTEAASAHIHSLAARIRLVNQQIKEAERRLDELCAAIAASAETKPGQICEQRDVAILRSSPGIGRIVLATLLAEACEPLRLRNYHALRVLAGVAPVTRRSGKSCIVVRRYACNDRLAQAVYHWARAATQHDPISRQRYTELRRRGHSHGRALRTVGDRLLGVLCTMLQRQTPFDPQYKNPQIAATA

SEQ ID NO: 341490 - protein, 371 aa, unidentified
MADYREAFVGIDVAKLRNAIAVAESGRDGEVRYFGEAEAADANMRRIIQRIATKFDRVHFCYEAGPTGYGLHRLIRSLGHECMVVAPSLIPRKPGDRVKTNRRDALALARLLRAGELTAVWVPDEGHEAMRDLVRARAAAVETLRVHRQQVSAFMLKHSRIYPRKKGWTMRYLRWLQEQQFDHPAHQIALQEMVDAVRVSKERVERLEKVIEEFIPNWSLGPVVRALQTLRGVDLIVAVTFATEVGDVTRFESPRQLMGYLGLVPGERSTGETVRRGSITKAGNGRVRHMLVESAWTYRHPPKVGARKLYRLEEAPPKVREIAWKAQSRLTARYRMLAARGKRTTVVCTAIARELAGFMWAVAKEAQTIKS

SEQ ID NO: 341491 - protein, 339 aa, unidentified
MKITTVGLDLAKNVFHVVCFNDHDKEIKKRMLRRNQVLEFFTQLPPCQVSMEACAGSHYWGRQLRALGHNVKLISPQHVKPYVRGNKNDYNDARAIAEAATRPDMPAVGIKTVEEQDMQAIHRMRSQCSRDRTALSNSIRGLLGEYGIVFAKGVATLRRKIPEILEDAENGLSLGFRNLLVRRYEQLVELEGHIAFYTKELERLSKQDDACQRLQTIPGFGPIVASAFRSVIGDGRTYARGRDAAASIGLVPRQYSSGGKNVLLGISKRGNKYLRKQLVHGARSVVLQAANKEDPLSRWINRIREERGWNKAVVALANKMARIGWAVLRHRSQYQPASI

SEQ ID NO: 341492 - protein, 332 aa, unidentified
MSIVSTVGIDLAKNVFSVHAVDSQGLVVVRRSLSRAKLSELIAQLPPCLIGMEACSGAHEWARRFVMFGHVVKLMAPKFVAPYRKSGKNDGNDAEAICEAVARPNMRFVPVKSTEQQSDLTLHRVRQGFVEERTATLNRLRGLLAEFGHVLPLRPSELHRRVPQLLEKLPARVATCAQDLLEHARGLQEKVLQYEREIKQHVHSNALACRAQTRLGIGPITASALVATVGNGRDFKNGRQFAAWLGLVPRQYSTGGKTRLGHITKRGDPYLRTLLVMGARAVLQRAVSLTDPLSRWALAVRERRGYHRACIAIAAKNARVAWALLAKEAVAA

SEQ ID NO: 341493 - protein, 412 aa, unidentified
MKDLLEISCGLDVHKEKIVACILTGPLGKPTHSEIREFSTLIPDMIALRHWIVSKNCHHVAMESTGIYWMPIYEILEDAFSGDITLLVVNARHMKNVPGKKTDMRDSEWISTLLRAGLLNGSFIPEKRIREFRDLNRYRKSVIRDITSQKNRIEKFLQSSGFRLSSFISDIFGASGRNIILHLIEHGQIDKTALDSCLKTKTRNRIDEILMSVNGTLSEHQKAFLRILMTHYDSLKKHLAEIETSLEEDMAPFALQIEQLNSIYGISTTASCAIIAEIGIDMKPFKTAEHICSWAGLCPGNNESAGKRKSTSVTKGNPYIKSMLCEIAWVIAGKRNTYLSAWYWRIKQKKGAQKAIVALARKLLVIIYTMLKQGTLFDESCFETRRKHCEQKQLSRYIRELEKHGYHVEAQS

SEQ ID NO: 341494 - protein, 403 aa, unidentified
MVLDQQDIDVFVGLDVGKSDHHAVALDRSGKRLYDRTLPNDEARLREILTGLGRHGKVLLVVDQPATIGALPVAVARDMGAAVGYLPGLAMRRIADLHPGQAKTDARDAAIIADAARTMPHTLRSIALGDEAIAELGVLCGFDDDLASQITATSNRIRGLLTQIHPALERALGPHLDHPAVADLLTRYPTPAALKTAGRGHVRARLKKRAPRAADRLTDAVFSALNEQTVVVAGTGAAATVIPRLAAQLLALRTQRDEVAAQVEALVEAHPLHTVLTSMPGIGVRTCARILTEVVGKDFKDAGHLASYAGIAPVTRRSGTSIRGEHTSRCGNKKLKRALFLSAFAALHHPPSRAYYDRKRAEGKRHNQAIIALARRRTDVLFAMLRDSTLYQDPKPAPLASAA

SEQ ID NO: 341495 - protein, 401 aa, unidentified
MDKNRIVAGLDVHKDSIYLCIMGHDETIIFQKTYGVLTPELHRMCVEMVFYGVTEAAMESTAVYWVPVWNALCDSMELKLVNPYFIKQLPGRKSDVKDAQWIAECLLKNLIRGSFVPEPVVQDMRKLNRRIFDLQEDITYNQNKLDAALQRCGFRLSNYVTKISGTSYRKAVESISKGITDPVELLKRIHGRVINKHGRDTILAAVTGDFSECDITVIRQYWEMLEICLHQSKECNTKLLQMCEIHFPKEYKRLQTIPGVKERAASAIIAETGVDMKMFATAAMLVGWCGLKPRNDVSNGRFKSRKITHGNKYLRHILIEISWVASRTRNCFFSNFSYTQVTQKHKSKMKIQVAIARKILVAVWHMLTKDEDFVDVYLKRLERERIEQERQQTILDTITAI

SEQ ID NO: 341496 - protein, 462 aa, unidentified
MGNYAGIDWASEKHDVLIEDPAGKELLAATFAHDEDGVSALCAALGCFEVEVAAIERPDGLLVDRLLESGVRVLALHPNQVKAARDRFRASGGKSDRFDRFVLCELARTDRHRFRLLEPDSDQTKALRALTRAREDLVGARVALANQLRAELERSWPGPIRLFSHLDSPISLAFLARYPSPQDARGLGEKRLAAFLKAHRYPNPKTPAELLERLRSAPSGRAGQAETRTRRQIVLGLTRTLTVISEQIRELESEITDALNAHPDGEIFRSFFSSPDSVICAATLLAEIGDCRARYPHRDAIAADGGQAPVADESGKRKHAKFRWACNKRLRNALATLAHNTRRWNPWAADRYANARQRGHNHRRALRTLGRAWSRIIWRCWQNRTPYDPKRHTGLQQHITVTIPDPSAPRPDVAATQRMAGPALTSRAARRPERAALDSKPPAAISIGAWPGFDSSVCVLAG

SEQ ID NO: 341497 - protein, 355 aa, unidentified
MPSKADTAVARTIGIDTGKNTLHMIGLDERGAIVLREKISRARIAARFVNLPPCLVGIEAGMASHYVARELVALGHEVKQVPPAYSKPFRQGHKNDFRDAHAVAEAVERPSTRCVPIKTDGQLDLQALHRLRSRLIGNRTAAINQTRGFLLEHGIPVRQGHHFLRQQLPQILATRTDVLSPRMVRIIGDLMTDWKYLDERIEGVTDEIEALAHADEGCQQLITVPGIGPIISSAMVAAIGNGAAFCKGRDFASWLGLVPKQMSTGDRTILGRITKRGNRYLRMLFIQGARAVLLRPASWAKHGFGSWLTAATRRLHRNVLAVALANKLARIAWTVLAQGRRYEARVEPRVEPAAA

SEQ ID NO: 341498 - protein, 308 aa, unidentified
MTTGLAAGTSELFVGIDIAATTAEVSTQRPGAKAGRSFKIDQTPEGFHRLVHTLQATDNEPSHVLVVMEATGSYWMSLATRLVHEGFRVSVINPSQAHHFAKALLKRAKTDAIDAQTLAQLAMVLQPEPWMPPPQIYYELQQRLAQRDDLLNLRQQVRNQLHALDQHPEVIASVRTRMERLLVLFQSQIDEVDGEIAAALNQDSAWAAAAERLQSIKGVGWVTAAWTLVTTLNFTTCDTVEALTAYAGLAPMPRQSGASVWHRPSIGHSGNGRLRTAFYMATLTAARFNPAIKAFYNRLLDRIGIRIL

SEQ ID NO: 341499 - protein, 402 aa, unidentified
MRRCIGLDVHREFAQVAIWEDGVIWQAGRIQTTPEALRLFADSLCATDEVALEATGNTYAIARLLERQVGRVVVSNPQKTRAIAEAKVKTDKVDAAVLAGLLAANYLPSVWLPDDQTHALRRQVTRRAHIVRQRTRLKNQVQSILHRNLIGRCPAADLFGTKGRAWLATQDLPADEHQAVGALLRQLDFHGQELRIVDAELGRVGLERVEVRRLMTIPGVDATVALAIVAAVGDFGRFSSPQRLVSYLGLNPRVRQSGGQPAQHGRITKQGRAHARGMLVEAAWAAAKTPGPLRAFYERVRARRGMQVAVVATARKLATLCWHLVVGEQDYAFQRPSLTDKKLRALQLRAGMPPRRGRKGAAAAYSLKEVRRRERALTEQAEVAYRQLVADWQPKRPATKPR

SEQ ID NO: 341500 - protein, 382 aa, unidentified
MDKSSTLYVGLDVHKDSIDIATADAGRDSEVRHVGTIGGDLASLDKSLRKLISKGHALHVVYEAGPCGFVIWRHLNMQGLRCEVVAPSSIPRRSGDRVKTDRRDAIMLARLARAGELSAVRVPDAADEAVRDLVRARDDAVRERRNARHRLKALLLRNGIIYSGKSSWSDAHLRWIARLKMVHPTQQIGFQEYVHSISESTARIERLEQAMRDALPDWGAMPLVQALQAMRGMQLIAAMTLVAELQDFVRFESPRQLMAFVGLVPGEHSSGAKRRQGSITKAGNSAARRMLVEVAWHYLHSPRVSPAIATRQDQLPKAVTDIAWAAQLRLHAKFKRLLARRVMKNKAVVAVARELAGFVWAIGCEVQNSGWRGIKLASVAAA

SEQ ID NO: 341501 - protein, 342 aa, unidentified
MKTVIDTPVSIGVDLAKQSFDVALAPEAATPSDWRGLAHGHIEHPPDSRAGMRAFMRWVAKRVGPGQCERIVAESTGRIAHRFAAALADKNLPRVAIVNPARPKAFIASLGIRDKTDRIDAACLALYGAMHRPAPTPVRSAAEKALRELTRLREACVAERTAWQCRLSETQGRSVQRTMIQASVRHFEKQVEKLDRQIQAQIDSAPALSRQVEAIQQITGLKRVCASVLTAELGDLSKYSRTELVAAAGVYPRHGESGTSVRQRPRMVKGGGGRVRRVLYMAAMSLLRSKGRLRELIERHRAEGKPDMVIIGIMMRKLLLIARAVVRNNGVYDPSRIANVRG

SEQ ID NO: 341502 - protein, 342 aa, unidentified
MREQRYIGIDLHRRRFTCCVRLGSGRNYLSTWNLEQLPQFVKKLRPSDEIAVEVTGNTRLFYEAVTPHVARVVVVDPNQFRVISHSVKKTDPNDARSLALYLAKGLLPEVRMKEKAQAEVASLTQTRDRLVKLRTALKNKVNNLFSARGIEIEKEDLSSEKGLCRVLEQTLEGLAQVELQIIVEQIRSLNQSIGRLEQVIKEAAQKLPGFSNLTSIKRIGALGASVLLSVIGDVKHFQEEGKLASYFGIVPRVQNSNETEHSGRITKRGTKLGRTTLVQCALIAKRYNSYLERYYEGIRSRRGTGRAIIALARKFLGIIYRTLKNNWVFEDFPSFVLAEVNT

SEQ ID NO: 341503 - protein, 387 aa, unidentified
MPQPNDLSRSLVALDQDSTIIAVVEMSQSSWLVGGILPGIERQPRKKLEPSPERLLALLHRWRDESVRAGRTITRIAVAFEAGRDGFWLARWLEARGVEAHVIHPSSVAVSREHRRAKTDRLDTELLKRGFLGWLRGERGHCSMARVPTIAEEDAKRPNRERECLVKERTRLVNRIKGTLARLGIRNFKPTLRQATERLATVHTPEGTPVPPNALAEMQRYLARLRFVVGQIKQIEEARRQRLEEEPECGRHATVRLLARVVGIGIETADMLVNEVLSRPMRDRRAVARYAGLTGAPDESGAKRREQGLAKAGNARVRRGMIQLAWRFLRFQKNSALAQWYQARTADHRGATRKTMIVALARKLLIALWRFVTIGEPLDGVTLRPAS

SEQ ID NO: 341504 - protein, 377 aa, unidentified
MSTTPTSSKQRRGVRIVSKTKVPLPPQLKRVNLDAAGIDIGAEEHWAAVPPGRDTEGQAVRRFGAFTGELCALADWLKQCGIQTVAMESTGVYWIPLYELLVERGFEVLLVDARQAKNVPGRKTDVLDCQWLQELHTYGLLRGAFRPVDQVCILRSYLRQRSMLVAYASHHIQHMQKALEQMNLKLSHVVSDITGLTGMGIIKAILSGERDPVKLAKLRDPRCKSSEATVARSLEGHYREEHLFTLQQAVELVEFYQQQMTACDRQIEACLRQFEEKRSETPVTTRRRKRRRGGIAFDARSYLYRMTGVDLTQIDSIEANTALTVIGEIGLDMSRWPTEKHFGSWLGLAPGSKVSGGKRLSGRTKPSANRARGLPSV

SEQ ID NO: 341505 - protein, 344 aa, unidentified
MNIYKVTQCERKGKSLVLDEFDHFVAIDWSLQTMAIAHMGRRNREPEVFERPSSIKALKKYLVSLKGRTIITFEETTTAQWLYVELRESVDRIFVCNPRHNRLLSQGPKTDKIDASKLCVLLRGGLLKEVFHAMNDLFELRLLVSAYEDLVQAGVRALNQKHALGRGHGDRSKHAPFIFQYLDKSIELYEQNKQQYEAKFETWCRRNRSLKMLLPVAGIGVISAVKIVAVVVDAHRFRKAAHYLSYCGLVKHEKLSGGRSYGRRKAPYNHTLKGVYKMAALSAIGGKNPIREYYDHLITGGVAEHNARHAVARYIARITYGILKTGTPYEPYRWRSQETKRNVA

SEQ ID NO: 341506 - protein, 327 aa, unidentified
MMFIGIDISKEKIDLSWLRDQLTNKIKTKVFKNKRQDFVTIEKWLLNTTKSAASELVITLEPMGVYHEALMYFLHEQGFNIILANPSKAKKYADALNIIHKTDKSDATMLAHYGCAKHAVVNYWQPEALAIRELKALIRRLDALESNRQREANRLEASEFSNVSARVCQSIKVTIAFLDDEIKQLKSDIDNHIDNEPDLKRNRKLLESIPGIGPVLSRELTYLFAAKKFNKAKEAAAYCGLIPRHNESGKLKGRTSISKLGPARIRCKLYMAAIVAGQWNKTIKRHKLTLINNGKTPMQAVCANMRKLIHICFGVIKNQEAFKLQES

SEQ ID NO: 341507 - protein, 316 aa, unidentified
MIAINKDIIATIGVDLGKNIFHICAMNDKGTILLRERLTRAALPKRLANIPPCRIGMEACAGSHHIGRQLTALGHDVRLMPAKYVKPFLKSHKNDYRDAEAIAEAVQRPTMRFVPFKSDEQLDLQALHRVRSRLVGQRTAVINQIRAFLLEHGVAVRQGPGALRLALPSILAQRTDVLSPRIIHLIEGLTGDWRRFDERIADVTREIEQLAKQDQYCKGLMGVPGVGPMTASAMVAAIGDGAAFSRGRDFAAWLGLVPKQISTGDRTILGGISRRGNRYLRTLFIQGARSVLQRSDGWEKKSFGRWLISGDPKARA

SEQ ID NO: 341508 - protein, 452 aa, unidentified
MAKKREKRECKAVALEPDAAGIDIGAEEIYVAVPPDRDEESIRMFSSFTCDLHALADWLQKCRIRTVAMESTGVYWIPLFQILEARGLEIYLVNARYLKSVPGRKSDVSDCQWIQYLHSVGLLRASFRPAMDICALRSLWRHRASLLQMASEHILHMQKSLSQMNLQIHHVLSDLTGASGQAILDAILAGERNPVLLAQLCNCRVKSPREKVAKALQGDYRPEHVFTLKQSLDGYRYYQKLIAELDREIQRLMQSLPSAIESEQEIPQRTKHSAFQRQGNDPGFDLRGQLYRIAGVDLTDIPGVSAVTAQVILTEVGPDLHRFRNASAFASWLGLCPENRVSGGKILSCKTRRVKSRAALALRLGANSLCRAKGYFGEFFRRMRAKLGTAQAITATAHKIARVLYHVLLTKEAYVETVFHKCDEHARRRAEMRLRKHAASLGFQIIPVNPAT

SEQ ID NO: 341509 - protein, 409 aa, unidentified
MLKIVYPNCCGIDVHKQFVIAVIAITDSEGITQYKRRRFSTFTNGLKELKKWLEFHSCFHVCLESTGKYWIPIYNVLEDEMDICLAHPKYVKAIRGKKTDKKDAQWIADLYKHDLVAGSFIPPAKIRQLRDLFRYRMKLTYLQTSEKNRYQNSLTWSNLQIASVVSDVFGKSAQKIIQSVLDNPEEKPDIASLIHRRMKASVDELELSMDGELSEEQAEKLHVIKAHYDAITLCKNDLEEMITELGKEYSHQQELIQSVPGFKNPLTALRVISEIGIDMNQFPTAGHLCSWAGVVPANNESAGKKYSTRISKGGRYLKPLLVEVANAVVKSEKNPEHRNKYLQLKKRRGHKKAIIAIARRLLVAIYHILKKDEVYNPALYHYQEYVAPNKKLSIQEAVQFAKSHGFQVV

SEQ ID NO: 341510 - protein, 351 aa, unidentified
MMIIGCDYHPSDQQIAFVDQETGECSERRLNHNEGEAEKFYRDLQQRGVSVRVGMEATGHARWFERLMAELGFELWIGDSAEIKTRRVRKQKTDRQDAQLLLKLLLEDRFPRVWVPSPENRDLRQLLWHRHRLVQMRTRIMNQLQAVAMNEGIRRKKALWSKSGRAQLESFSLAPWSSRRRQDLLELLDRLNPTIEQLSAAIAQEAEKRPEVRRLMTHPGVGPLTALAFVLIIGSPERFRCGKQIGSYVGLIPCEDSSAGHQRLGHISKQGNSLLRFLLVEAAQIAVRHDPDWRRRFLRLAMRRERRIAKVAMARKLAVRLYWMWRKGWDYQQVLQFGSHAGQPVKAHGVK

SEQ ID NO: 341511 - protein, 343 aa, unidentified
MSEDYDGRQYVGVDLHRRRSVLVRMTEAGERLETVRIVNDRELLAKVMARAGEDPEVVLEATYGWYWAVDALAELGGCVHLAHPLGVKGFAYRRVKNDERDAADLADLLRMKRLPEAWIAPPATRELRGWVRHRAKLVALRSGLRCQIHAVLASAGMQVPMSDLFGVSGRELLTTATLTVESRSRVESLLRIIGALDFEIDLYTKLVASRLRTDPGYHAIQAIPGVGPVLAAAFVAEIGDITRFHRPAELASWAGLTPRHHESDTTVHRGRITKQGSRLVRWAAVEAVQRVPARTRLGQRRDRVAERRGHNIGVVAAARDLITLVFYGLRDHHLRCLPPKAAA

SEQ ID NO: 341512 - protein, 346 aa, unidentified
MTIVEADRVVTGGVDTHLDVHVAAALDPIGGVLGVESFPAGPSGYRELLGWMGGFGVVTRVGVEGTGAYGAGLARFLRACGVEVIEVDRANRQARRQQGKSDPVDAVEAARAAQSGRARGLAKSRDGNVEAIRALVIAKRSARSMRIKTLNQIRHLSFTAPDQLRERLRGLSPLMLGGEAAALRPRAGSDPVVFATKVSLQILGRRVLWFDAEIARVDELLDDLVKQTAPSLLGLYGLGVDTTAALLVAAGDNPDRLRSEAAWARLCGVSPVEASSGKVTRHRLNRGGDRQANSALWRIVMVRMAGDPATRAYVQRRTIEGRSKREIIRVLKRYVAREVYPHLPRA

SEQ ID NO: 341513 - protein, 316 aa, unidentified
MSEPVYVGIDVAKASFEVAVSGEAQTLSLGNDEAGHAELCQVLVPLAPRLILLEATGGHERLLALALAAAGLRVSVINPRQARDFARCMGKLAKTDRIDAQVLRGFAALLDAQGHEPRALLDEQQRELTALVTRRRQLVAMLVAERQRLALAHPKAKASILAIMDAIAAQLHDVDGQLREHVQAHHADLAKLLTSVKGVGPTTASTLLAQLPELGHLNRKQITSLVGLAPMNRDSGTLRGQRHIFGGRADVRRVLYVAALVGTRFNPVLKAFYAKLLAAGKPKKVALVACMHKLLIILNAIARSKSPWSQEIAGIA

SEQ ID NO: 341514 - protein, 308 aa, unidentified
MRFYNRQHRHYCGIDLHVKTMYVCILDAAGQVLVHRNVKSTPEAFLEIVAPYRDDLVVAAECMVTWYWLADLCAAEGLVFVLGHALAMKAIHGGKAKNDKIDSHQIASLLRGGLLPQAYVYPAGMRSTRDLMRRRLHLVRKRGELLAHIQNTRAQYNLPAFERRLAYPANRDGVSAHFADPSVRKSIEVDLALIDQYDTLVVDLELTIIREAKRHDADAFHRLRSVPGIGKVLALTILYEIHDVTRFDRVQEFASYARLVKCVHHSAGKKLGTGGAKMGNVHLKWAFSEAAVLFLRHAAGGKKLLRGH

SEQ ID NO: 341515 - protein, 349 aa, unidentified
MQITTIGLDIAKNVFRVHGIDATEKVVVRKQLRRGQVLAFFKALAPCLIGMEACATAHYWARELTKLGHQVRLMPAKDVKAYVKRNKNDAADAEAICEAVRRPTMRFVPVKSAEQQARLMQHRARDLLMRQRTQLINALRAHLAELGIAAAQGREGVKELLAIVAQDGAPRLPVDAHASLMVLAAQLQAVQTMIGSIEKRIVAQHRSSEESKRLKTIPGIGIIGATTIAALVPDPKVFRSGRNFAAWVGIVPREDSTGGKQKLGPISKQGDRYLRRILVVGACAVLRRARQQPEKYPWADTASRPATIQGRRGRTCQQDGADRLGAAGQGWDIPGASARGSVRTGPAMG

SEQ ID NO: 341516 - protein, 319 aa, unidentified
MDTTAQPAHTYVGIDVAKEHLDVAVGDDTPPARLAYTSDGLKQLLERLHELPGPQIILEATGGLEVRLMAELWAAHLPVARLNPKRVREFAKASGRLAKTDQLDARLLAQFGAALQPAATPLPSEETQTLAALVSRRRQVVDMRTMESNRLLSAAPTMQPHIQKHLTWLDEEIAALEQEISDFIQNTPAWAAKDALLQSVPGIGQITARTLLADMPELGTIDRKKIAALVGVAPFNHDSGHTRGKRYIQGGRPAVRSVLYMATLAATRFNPIIRTFYEHLLQAGKEKKVALVACMRKLLTILNAMLRDNSPWSPVATQS

SEQ ID NO: 341517 - protein, 339 aa, unidentified
MKCTPVGVDIAKHVIQVHFIDEHTGEVIDKQLRRQDFLAYFSNLEPCLIGMEACGGSQHWARELTKQGHKVRLLQARFVKAFVMGNKNDVMDARAIWMAVQQPGKEIAVKTEEQQSFLVLHRTRMQLVKFRTAQINSLHGMLLEFGETIHKGRAAMEREFPEALERMKERLPPYLIAVLENQYNRLNELDSLIEDIEKQLTSVARQNETCRRLLDIPGVGPLIATAAVAIMGEASAFKSGREFAAYVGLVPRQTGSGGKIRLLGISKRGDKYLRTLLIHGARAAALLTKEPGPWITELKKRRPASVAIVAMANKLARTVWAIAAHGRKYDKNHVSIRPY

SEQ ID NO: 341518 - protein, 356 aa, unidentified
MNNVKYIGFDVHQATSVIAVVNNSGKIVAESIIETKANTIVDFLKSQRGTLYVTFEEGTYAHWLYDLMRPHVSKLVVCNPRKNKSMQQGTKTDKIDARRLAELLRTNALTPVYHGEESIRTLKELARSYTTLVGDVTRVKNRIKAIFRSRGIDCAGETIYSEEHHKEWLKQLKEEGVRRRAERLFAQLKALELLREEASEEMVKESRKHSASKILKTIPGLGPVRTALIIAIVMTPHRFRNKRQFWTYAGLAVVTRGSSEYEMVQGQVRRSRKSALPRGLNHNHNHILKDVFKSAALTAAFRGPLQEKFDEIVKGGTEQNLALLTIARKISSVTLSLWKKGERYDPDRNQLAEQAG

SEQ ID NO: 341519 - protein, 408 aa, unidentified
MVVMSDGRFAGVDWASEEHAVCVVDERGRIVQGRRYRHDEPGIRALCARLVRLRVALVALERPDGLLIERLLDAGLAVIAVHPNQVKAMRPRYSVAAGKSDGFDSFVLAELARTDRHRFRVLVPDSDQTKALRAMTRAREDLVRTRVALANQLRDELACFWPGASKIFCAVDSPIAPAFLRRYPSPVDARGLGEQRLGAFLDRHHYTGRKPARELLGRLRNGAEGRAGELEMRARRQIVLGLVDALEPIVAAIRQLTAQIRQAVDDHPDGQTFRSLFIAADSVLCAATMIAELGDCRDRYPTYRALAADGGQAPVAVESGKAKRAQFRWACDHRLREAFCVLADSSRRHNPWAADIYDRARARGASHQHAARILGRAWCQIIWRLWQDHDTYDPARHTARQRLTATAA

SEQ ID NO: 341520 - protein, 347 aa, unidentified
MNITTVGLDLAKSVFQVHGVDTRGNVKIRRQLKRSQVSAYFAQLPACLIGMEACGGAHFWARKLTELGHTVKLMAPQFVKPYVKTNKNDVADAEAICEAVGRPNMRFVPIKNNDQQALLSSHRVRQGFVRERTAQVNQIRGLLAEFGIVMPVGIRSIEGKLPGILEDAENGLSGASRSLFARLFEHFRALDHHVKEIEREINAWHRDHADSQRLEAIPGIGPLTASALVASVGNAHAFRNGRQFAAWLGLVPRQCSSGGKNTLLGISKRGDTYLRTLLIHGARAVIQTLHRHPNQGDGWLGGVAKRRHSNVAAVALANKNARIVWALLAHGRNYQAEYRLTSSVAIA

SEQ ID NO: 341521 - protein, 316 aa, unidentified
MQSILNLGADVDSRTVMVACSAGSFKPHRIANERNAIQAWLRTVPRGSRLAMESTGSYHELLADLAHQAGLQVFIVNARDLRRYGQGIRRRGKTDRIDAEVIARYIAREHQELHAYVPSTDAQRLLARLIGRRAKLVQAKDSIRQSLRGLPALQSEACRLIGHIDRVIASLDLLMQRTVQQIPAAREAAGHIATIPGIGVLTSTFLGHRFTRLPYATSDAVVAATGLDPRPEDSGQKEGRRRLSKRGPAEARRLLFNCARSAAQRKPWRPYYDAQLAKGLSKTAATVVLARKMLRVAFAVYKHHQPFNPLLIGGGT

SEQ ID NO: 341522 - protein, 361 aa, unidentified
MSFETTTVGLDVHARSTTACAIHDPTGEITTTKLTSDHTRILNWIHTLPEPVRAVYEAGPTGFALARALNDADIDCVVAAPSKLQRPSGDRVKTDARDALHLARLLRLGEVTPVRVPGPAQEAARDLSRAREDARADLMRARHRLSKLLLRQGLLWEGKNTWSRAHHDWIARQRFTPLALQAAFEAAHEQVLLTQGRRDRLDEAITATAAEPDWAAVVDRLRCLRGVSTTTAFGLATEIGDWHRFTGSSIGAYVGLVPSEHSSGSRRVLGPITKTGNTHVRRLLVEAAWHHRRPYRHATREMRQRWGQAPATARTRAHSGNHRLHRRWVRFDERGKKPSVAVVAIARELAGWCWSLAVTED

SEQ ID NO: 341523 - protein, 443 aa, unidentified
MARKQAKQRFQLVHPHCAGIDIGSREHWVAASKDHEPIVRSFATFTHDLNQLADWLSEMGVEVVAMEATGVYWIPLFELLDARGFNVYLVNSRSTRQISGRKSDVLDCQWIWQLMSHGLLRGAFRPSESICTLRALVRQRANKVRDQAQALNRIQKALTQMNIQLANVISDISGVTGMRILRAIIDGERDPQILAGMIDRRIKATPETVARSLHGNWRLEHLHALAQEVEAYDFLEQQIADNDEAISGVLALLPVRQEKPQPSRKVLRSPHRSAAAQTALHQAVWKVMGVDLTAIPTIGVDTALVIASEIGPDLSRFPSSQHFCSWLGLAPPTRISGGRQLSGSGPKVINRAAQALKQAASNARNDKSFIGASHRARLSRMDTSCAIKATAHQVARLIYAMVTRGQAYAEKGIEEFEERSKGRQLRALLRKARKLGLELVEAA

SEQ ID NO: 341524 - protein, 422 aa, unidentified
MSYCPVAGIDVSKRFSDMCILSPDNKIFAQEKIYHDETSINRANALLQKAERLFFSKPVIVMESTSHYHLILFQFFSEHGYDVIVVNPLQSNSMKDFSIRKRKTDRVDAFKLAMMYRTKTLRPSQIPQTATRALRQLCRHRAELLNDVSSYKNRLTALLDQTFPGYDKVFSDVGGVTSCAVLVRFPTPTILLVEEESELVEVIAAASKSGYSFAKKKAGLLISAAQKAQTLGIHSCADETLIVCTIQMLRTLSESVLQIETAIDNLLAQIKEMRNNVSLLQSIPGIGSHSAALLLGEIGDISLFKKPKQLAAYFGLDPTERQSGSFRGTKNKLSKRGSSYARAALHMGIVNSICKRGKDSAANPVLLSYYEKKCKNKPAKVAQAASMHKLVFIIFAVLRDQKPFELKTPEQHAVEQGFVKAA

SEQ ID NO: 341525 - protein, 385 aa, unidentified
MQKLNDLSRSLTAFEPDGTLIAVIEMSLSSWLIGGILPGVERQPLKKLAVDESALLKLLHRWREEAEKAGHRIGRIVVAFEAGRDGFWLARWLKARSIEAYVIHAASVAVSREHRRAKTDRLDSELLKRAFLGWLRGERDHCKMVAIPSIMDEDAKRPNRERESLIGEQSRIVNRMKAALIRLGIRGFNPKLKRAAGRLDGLHTPEGEPIPPNTLAELRRDMERRRLVSNQIRRIEQARLQRLEQEPDDGPHAMVRLLARVIGVGIETADMLVREVLSRNMRDRRAVARYAGLTGSPDESGRKCREKGLARSGNARVRRGMIQLAWRLLMFQKNSALAQWFRARTENARGTRKTMIVALARKLLIALWRLVHEGVVPDGIVLRPA

SEQ ID NO: 341526 - protein, 320 aa, unidentified
MSGFDCVGVDVAKDKFDVSVEYKGKSKHKVFANKEQGYIEFLTWLHEYTINPWVCMEATGHYSTKIADFLIGQGIRVSVVNPFQIKNYAKASLIRNKNDRVDSEVIRQFCKRMEPRPYQASSPEQKEIKDLTKLLDMLKGQLTQLTNQRHSTQGSIAKKALTKLIMQLEKEIAKVEKQIADLIASNSQLKEKLELITSIKGIGNLTAYHILALMPDVNSFSTAKQFAAYTGITPKQRESGTFIGKTTISKLGDARLRKSLYMAALVAKRYNKGLASFVARLQLKGKTPKTIICAVMRKLTHIIFGVLKNKLPYNENYHCI

SEQ ID NO: 341527 - protein, 373 aa, unidentified
MNDHIEAFVAFDTSKLRNAVAIAEAGRSGEIRFLGEIDNTPKATAKLVKKLAGKYPRLAFCYEAGPTGYGLYRQITSLGHECVVVAPSLIPKKAGDRVKTNRRDALDLAAQLRADQLTAVWVPDPRHEAMRDLTRGRGAAVEDLRSKRQQVSAFLLRLGRPYEGKTNWTKTHMNWLASQKLEQAEQRIALEEMLLAVRQAQERVVRLEEAIRGAVPDWSLAEVVEALMAMRGIDMVSATAFLAEIGDLSRFRTPRELMAYLGLVPSEHSTGDTVKRGPITKTGNRRARRILVECAWSYRHPPRVGKEKQDKVAAAPRAAREIAWKAQNRLYARYRALTRRGKLKTLVITAMARELSGFIWAIARELANTHAAA

SEQ ID NO: 341528 - protein, 349 aa, unidentified
MLHVGLDLSRKRVDVCLISSEGELVEHFRAPADRDGLYGLTRRVAVYGEPVRGVVESMNGARFVHDELVRYGWEVLVADAQRVKGLAPLACKTDKVDARVLAELSFRDLVPAIWLPTPELRAERERSRWRLHLVKHRSILKNRIHSSLIAFGHQVPMADLFGVAGRKLLAELEFPEPWLSHVRASLELIDDLDHRIGEIEKWLHRSGADHRYIPLLMSAPGIGWVTGFTIAAEIGEINRFASPVKLTGYTGLCPRVNQSGEVDRRGPLSKHGPRYLRWGLMEAAIAASSHPLYKERYQRTKRRLGRQRGAKVAQIELARKLTEAIWYMLTRNQPFTPFAPAGAINRLTA

SEQ ID NO: 341529 - protein, 451 aa, unidentified
MALLDRTVRIVLTSLLNVWWNSQWLLYLTLKGVLTIKVVYQTCCGIDVHKSFLVATIIKTTSGVDPSYQKKRFSTFNNSILQFKNWLIENQCRDVCMESTGKYWGPVFNLLEDEMNVTIANPKWVKAVKGNKDDTKDSKWIGDLFRLGLVQGSYIPCKPIRILREFTRYRYKLTSCRTSEKNRYQNALTVCNVALDSVVSDIFGKSATSVIDYLIEQSGNSINHEEIASRLLRSLKKKSDSVIESIEGYQMTAPQKYRMRLVRAHLDYITSTINDIDTMLDSLIAPYENAVQLLCTIPGVDRNSAITVISEIGTDMTPFSNSKRLCCWAGLTPGSNESAGKKKSVRITRAGVYLKPALVQVAHAAVKSDKSPYYKQKYERIMKRRGKKRAVIAIARMILTAIYQMLSTGEAWNPTDLYKTDMPEPLKEKQKEKAIKQAKKLLIREGILSES

SEQ ID NO: 341530 - protein, 446 aa, unidentified
MAQRTRMKLDIANPNAAGIDVGSASHFVAVPPDRDDEAVREFRSFTEDLERLADWLIACGIDTVAMESTGVYWIPLFELLESRGLTVYLVNARHVKNVSGRKSDVLDCQWLQQLMSYGLLSGAFRPKDEICALRSIMRQRTMLLCYQGQHIQHMQKALSQMNIQLGNVISDVVGETGQRILRAIIAGERDPLKLAELKHGRIQASTEQIAMSLRGNWREEHLFALTQAVELFDAYSQALQRCDVRLESMLGALSRTRDEPGPTKRRRISKVKNAPKFDVRTYLFRICGVDLTAIDGIDTTTALKIIAEIGPDLSRFKTAKHFASWLGLCPGTKISGGKLLSGATKRTANRVAQALKMAAISLRASHSALGAYFRRMCARLDKGKAVTAVAHKLARLIYAMLTKGASYVDQGQEYYEERYRQRVLFHLKKKAAAMGLQLVPVQSQQT

SEQ ID NO: 341531 - protein, 359 aa, unidentified
MQPEASLEVKLEVRYVGLDVGKWKCRAAIMNQDGQILDEFWFPNNHEGIETLTAKLDLQDRVVMESTGSVWTNLYDRLDDRHIQVSLANPLKTKAIASAKIKSDKVDARILAHLLRSNLIAESYVPEKPLRELRALIRHRVAIVKIRTMVKNQIHAIVDKHGLICEYSDMFGKSGMKWLRSLELPSLDKLILDNHLTHLESLNQQTNRVDEEIHRNACEDEDVRLLLSLTGVDVHTALLIRSEIGSIDRFPDYKKLVSWAGLAPSLHQSGSVEYHGSITKQGSKMLRWIMVEAARVAVTHDPRMRGFYERVKHRRGDQKAIIAVANKMLKITWFMLTQREPYKSRNEKRYLQKLNSVAA

SEQ ID NO: 341532 - protein, 345 aa, unidentified
MTNMNYIGLDVHKKTISYCVKDVSGRVQQEGKIGSTRRELDCWMKSLPQPWTVAMEATIFSGWIYDHLLPHATQIKVAHPLMLRAIAAAKKKNDQIDASKIADCLRCDFLPECHMMPAEIRDRRRTLRYRHLLVRQMVQMKNRVSGLLMETGVEYNKQRLHKVSYFRELLSANGEVHPSIRPLLKLSRETIERCQKTEYALVSSLQRDPMLADRIKRLRTVPGVGPITALTWALEIGDASRFRTIKQAISYCGLCGDERSSADKALRMPLSKQRNKHIQRTLVEAAKLAPRQSHELAVIYDKEKQKGNGNRATLAVARKMVAYLLAVDRQQRDFTPAEERRTAAA

SEQ ID NO: 341533 - protein, 334 aa, unidentified
MQYQYVIGMDISKHSFDMAILSTTSPEEIFHNAFSNDASGFKAMMNFVDEKMSGFDIKKALFCMEATGLYCNALLQFFESQQANVWVENAIQIKRSLGIKRGKTDKVDSISIAKYAFKNAELVRLWKPSGAVLEKIKHLATLRERMVITQKRLVTPIEELRDAGQEKMAEYLHKSIKRSITAIDADLQKIESKITECLKEDASLHHLFTLITSVVGIGFVTAVNLIIYTQGFNVMCDSRKLACYCGVAPFPYESGISIKGRTKISHMANKKLKTNLHMAALTAIRYDPELKAYYDRKVLDGKPKMSVINAVRFKLLARVVSVVKNDREYVKRIA

SEQ ID NO: 341534 - protein, 365 aa, unidentified
MLSVSHLAPIHLGLDVHKDTISVGILDPDQQVPDVERITHDEASVRRLLARFPDRARLRACYEAGPTGFELARLLHRMDVRCEVIAPSLIPKAPGDKVKTDRRDCRRLARLHRAGELVAVRIPTPAEEAVRDLCRTRSDMVEDLTRARNRLGKFLLRHGRPWRGGSTRTKVYQTWLRAQRFDQPAMTQTFEHYLAVVEVRNQALDAVEADLVGWCARPPFDWQVARLAAYRGITRLGALTLAAEVGDWRRFAHASQFMGFCGLVPSEYSSGNRVHRGRLTKAGNAHLRAQLVESAWSYQHRPGVGVQIARRQQGLPPEVVARAWAAQQRLSGRFRTLAARKHTKSIVAAAIARELAGFLWAELTA

SEQ ID NO: 341535 - protein, 337 aa, unidentified
MELNYPLLGIDVSKAKIDVCLLDEQGERSALLVKNASSGFTQLRAWLGRHKADHVTACIEATNVYSAAITLFLYEQGMTVCLANPTAVHAFMRAEMQRAKTDKADAVSIANFARAMAEKLRPWQPLPAHYAELRDLVRYLHDLTRCRAKAKNRMEKIPYLKSAAKARIQRAIKADLAHYEKEIRLLTKDIRACLRKNLAMQQRYDLVTSAPGIGFVTAVTFMAEIPDINQFSHAKQLAAYAGVTPRIRHSGDRRPVSQPISKMGNARLRQAFFMASLSARQHNNAMKVCPQHGHEKKPMVLQIAVARKLLHLLYAMETHHKPFDQNHQKQRMSPGTI

SEQ ID NO: 341536 - protein, 362 aa, unidentified
MKEFSKYVGLDVHKETIAVAVAEAKGGEVRYLGDIANTPEAIDKLVRQLRKNGATLSFCYEAGPCGYGLHRQLTDLGWDCQVVASSLIPKKAGDRVKTDRRDSLMLARLHRAGELTAVWVPDAAHEAIRDLTRAQEASVADLLRCRQRIAGFLLRQDIRYAGTPWTKKHRAWLGRLDFAAAAHRLMFAELLDALDQAAARRDRLSDHIAELVPSWSLAWLVDALQALRGYRLTNAARLAAEIGDPRRFDSPRQLMAYLGMVPSEHSTGARTRRGGLTRTGNGRARKTLIEAAWTYARPARTPAADQQPAALRAIADKARHRLNGRYRRLLARGKRPQVAVAAVARESLGFIWAIAHAAAPHR

SEQ ID NO: 341537 - protein, 342 aa, unidentified
MKFYCGIDLSARDCHVCVIDEQLQILVQQKLRNELPKIVQLLEPYKANLKIVVESTFNWYWLIDGLQAAGFDVVLAHTLGLYLITGAKVKTDRRDAYSLAKLLLVGAVPAAYIYPVETRPVRDLLRRRARLVQVRAGEYGSLRRLLLRQGILSSKQQEIKTATEAELEQWFTHPLVRLHASQELQRIELYSEQIAELEKSILGLAKTERSYELLLKLPGVGQTIALTILYEVGELTRFTNVKVFSSYCRVVPGIAQSGNVTRRGRASKQGNHYLKAAFSQAAVHAVRCYPKVRRYYERQLKRHQGRGRQMICYNIIAHKLAQAAFHVLKEQTEYRAELLFGR

SEQ ID NO: 341538 - protein, 390 aa, unidentified
MSQSFDASKSLTAFEQDSTLVAVIEMSQSKWLVAAVVPGIARQPLKKLDADAGALLKLLQRWREEARKAGREVKRIVCAYEAGRDGFWLVRWLQARTIEAYVIHAASIAVSREHRRAKTDRIDTELLMRSFLGWLRGEKRHCSMVAIPTMVEEDARRPSRERESLVAEQTRTVNRVKAALALFGIGGFNPRLRKAAQKLETLRTVEGTPLPENAHAELRRDLERLRLVHDQIRTIESERLRRLAQAPAAATGPHAMVRLIAKVLGVGIETADMLVNEVLARHLRDRRAVARYAGLTGAPDESGKRRREKGLARAGNGRVRRGMIQLAWRCLIFQKESRLVRWFRARTADGRSTTRKTMIVALARKLLIALWRLVTTGEMTEGLKLRPAGT

SEQ ID NO: 341539 - protein, 317 aa, unidentified
MRASAAFFVGIDVSKQQLDIAVRPSGESWTVAHEEAGLSALVARLRGLAPTLIVLEATGGWEVPVTGALAAAALPVAVVNPRQVRDFARSTGLLAKTDRLDAQLLAQFAEVLRPAPRPLPDAQAQELTALLQRRRQLVEMLTAEKNRLPLAARRIRPQLQAHIAWLHQQIAQFDEDLRQLIRSSPLWREKDDLLRSTPGVGPVLATTLVAALPELGTLSRRQIAALVGVAPLNRDSGTLRGRRTVWGGRAQVRAVLYMSTVVAVRHNPVLIAFYQRLRAAGKAPKLALTACMRKLLTMLNAMLKHHRRWAPVRAQHA

SEQ ID NO: 341540 - protein, 430 aa, unidentified
MKKVDQLKRKIETVTFRTLVVGIDIAKHTQWARFVDCRGMEHGKAFNFQNNKNGFTDILSEVYRMCNEGNFTDVVIGMEPTGHYWKPLANFLIKQAKITVVLVNPYNVKKSKELDDNSQTKSDKKDALTIARLVKDGRYFDTYLPHDVYAELRGLTTARIGMVKRGNAIKNIITAVLDEYFPEFTTVFKHPFDGKASMQILKSCPIPRFILELGEEGVLSEIKKAVKKTVGRKKARQLVEAARESIGVDYGEYAAKFKINQLTEELELIEKQLMAVEKEMADALYKTGLSENLLSIKGVGVASLATCLGELGDPLRFADARQMSRMAGYNLIEDSSGKNKSGTCISKRGRKNLRCVLYKMAITMVATNAEMKTLYKYLKTREHNPLKKVQALVVISKKILTLIYTLAKKKVNYNPELVFGDVRKSQLKAA

SEQ ID NO: 341541 - protein, 332 aa, unidentified
MTNSSSQSVASSQPVASLFAGIDVAKNKLDLARSDSGQILTVANDPGGIRQVVDLLRSTPPAVIVVEATGGLERPLLDALLDAHLPVALVNPGHVRHFAKGIGVLAKTDAIDARVLVEFAKLASPRLLEKRSKNQVELDALVTCRRQLIHVRTEQTNRRQATSSKSAKNAIDAVLKTVNEQIKDLNEKIQKLIESDDDFNSIDKLLRSVPGVGAVVSSTLLAELNELGSTDRQQISALVGVAPFNHDSGRMKGQRCIRGGRTTVRSVLYMATIAAIRFNPVIRRFAARLQKAGKLSKVTITACMRKLLTLLNAMIRDHLTWEQLDVVKNIDI

SEQ ID NO: 341542 - protein, 408 aa, unidentified
MNAVGIDVSKGKSMVAALRPMGEVALLPQEFLHTEVGLEQMAYAIIALGEDTRVIMEATGRYHEPVAAALHEYGIYVCVLNPLFIKQSGGGSIRKVKTDKADAMKIAKYGLDNWVDLREYTPMDTVRQQLKLCSRQYNLYMKTVVSLQNNLISLTDKTFPGVNELFSSPERADGHQKWVDFVMTFWHCDCICRVSEKAFTERYQKWCKRKGYHYSAEKALDIYAGSCGHFTTLPKNDNTKLLITTAAQQLLAGKMTLAALRAEMARLARQLPEYDTVHAMYGVGEITAAQLMAEIGDVRRFPRRSSIVGFAGVDPAVNQSGKHAAQSTPTTKRGSPHLRKTLYQIVCTYLRKAPEDEPVYQFLDKKRAEGKPYFVYMTAAQNKFLRIYYARVKECLEDFDAQQNSAQS

SEQ ID NO: 341543 - protein, 341 aa, unidentified
MTIVTLGIDLGKNLNSVVGMGADGRVVLRRRVRRNTLVGLARKLEPCVVAMEACCGAHHVGRLFADRGHEVRLMSPEYVRPYIRAQKNDDNVAEGIAEAATRPTMRFVEVKSQDRLDLQTLHRARSRHVAARKALLNQLRAILLERGHVFPQGRKVLERGIDALLATPPSDLSARILALVRDARNEWRALDGRIDALNEDLAEHARTDAAARRLTSIPGIGVLGATALVAAIGDGEAFQRARDPPAWLGLVPKQMTTGGKPRLLGITKRGNTYLRMLLIHGARATLPGLSKQETPLGAWLRGLLARAHRNVVIVALAAKLARIAWAAVRRDATFDAGWRPA

SEQ ID NO: 341544 - protein, 413 aa, unidentified
MSIDPNAGAQRVTAGVDWAKDDHAVCVVGGQGEALERFTVAHDAAGLRQLAARLLSAGALQVGIERSDGPAVEALLAAGLTVFVIPPGQVKNLRGRYRSVSSKDDRFDAYVLADTVRTDARRLRPLERDSDQAAALRAAVRARRDLVGHRVAAANQLRAHLQAVFPAAAVLFAAVDSEITLAFLSRFTTQEQADWLSPLRLRAWLKSVAYSGRKDPAVLHARLLAAPRGQSGPHASALAGVTVALVAVLRTLNTQIQALANSIGAQLAAHPDAVIFQSLPRSGTVRAARLLAEIGDARGRFPTRESLTCLAGVAPSTRQSGKVKTVTFRWGADKQLRDALCDFAGDSRRASPWAASLYDKAIARGCDHPHAVRILARAWAHVIWRCWQDHIPYDPAAHNSLQAILRQQQPIAA

SEQ ID NO: 341545 - protein, 346 aa, unidentified
MRFYNRQHTYYCGIDLHVKTMYVCILDGAGQVLVHRNVPSTPAAFLEIVAPYRDGLVVAAECMFTWYWLADVCAAEGIAFVLGHALAMKAIHGGKAKNDKIDSHKIAVLLRGGMLPQAYVYPAAMRSTRDLIRRRLHLVRKRGQLLAHIQNSRAQYNLPVFGRKLAYRTNRDGVVEHFPDPSVQKSIAVDLALIDQYDALVLDIELTIVREAKRHNADAFHRLRSVPGIGKVLALTILYEIHDITRFDRVQEFASYARLVKCKKQSAGKTLGTSGAKMGNVHLKWAFSEAAVLFLRHTEGKKLIARIEKQHGKGKALSILAHKIGRAVFYMLSRGTVFSREKFLAA

SEQ ID NO: 341546 - protein, 338 aa, unidentified
MEYGAIDLHLRYSEIRIIDGDGKVVRETRVVTSRDTLTRAFADVGAVRILLETGTESEWVAQTLEAAGHTVVVADPNYAPRYGEVRRRVKTDRRDVAALAEANRRGWYRATHRRSAAQRTVQQILRSRRQLVAMRTGTISVLRALLRQEGYRLPAGSAAQVPARLARLPLPEALAPTLAPVRHVIETLTRELAEIDTRLGRYAAADPVVTQLQTVPGVGPVVALTFRATLDEVTRFEAAGQVSAFLGLVPREDSSAERRHRGHITKAGSRELRSLLIQAAWACWKSRGSGTLRAWAERLAGRRGRRIAVVALARRLSRILYAVWRDGTPFDGARVAAA

SEQ ID NO: 341547 - protein, 400 aa, unidentified
MKVTFQTCCGVDVHKSFLVATIIKTSSGIEPSYQKRRFSTFNNSILEFKKWLLENECLYVCMESTGKYWIPVFNLLEDEINVTIANPKWVKAVKGNKDDTKDSKWIGDLFRLGLVRGSYIPCKKIRILREFTRYRYKLVSCCSSEKNRYQNALTVCNVALDSVVSDVFGKSSTSIIEYLLEQSGTSIDHEVIASKLLKRLKAKEDAVIESIEGYQMTDSQKYRMHLIRAHMDYITAAINDVDSEIESLIASDPDYENAVELLCTIPGVKYDSAITIISEIGIDMSQFYSSKRLCCWAGLTPGSNESAGKKKSDKSPYYKKKYESLVKRRGKKRAIIAIARMILTAIFQMLTTGETWNPCDLYKIDMPEALLEKQKQKAIKQAQKLLIREGLLPPTEPIAS

SEQ ID NO: 341548 - protein, 395 aa, unidentified
MFIVGIDVAKRSHEVCMITSDGRTVQRPFSIRNNCTGYNLMLEKIRKHTNIKSQIVFAMESTAHYWLALFTRLRKDGYHVILLNPIQTSAMRDMFIRKIKTDAKDSFIIAELIRFGRYAESNVAQDRLLALKELCRNRFYLVDMAGDLKRKLIALIDRVFPEYEAQFDTIFCKSSVALLKKYPTPQRLSNAHLDKLTELLWNSSNGHFGEWKARELRELARNSFGVEDCDGAYSTLILLMLDQIQSLSGKADALEKEISRLFQSFDTTVTTIPGVGPIIGAVILSEVGDISRFSSADKLAAYIGVDPSVNQSGEFQAAHAHMSKRGSPYLRRCIWMASQVAVQRDPMFRAYYEKKAAEGLKYMTIIGHVTRKMTAVVFAILRDHKVYEPVLPTAA

SEQ ID NO: 341549 - protein, 350 aa, unidentified
MLIIGCDYHPGFQQIAFMDSESGEWNERRLGHREEAEQFYRDLKVRGVKVCVGMEASGHARWFERLLGELQFELHIGDAAEIRSKRVRKQKTDRQDAKLLLTLLVEDRFPSIWVPNWENRDLRQLLWHRHRMVQMRTRIMNQLHVVALNEGVRLKKALWRPAGRAQLESLLLAAWASRRRQDLLELLDQLTPKIQELTRALEQEVEKRPVTRQLMTHPGVGPLTALAFELVIGTPERFGSGKQIASYVGLVPCEESSGDRRRLGHISKQGNSLLRFLLVEAAQITVRCDPDWRRQFLHLAMRRERRIAKVAMARKLAVRLYWMWRKGWDYEQLKKLGAHAGEPGNRQGVQ

SEQ ID NO: 341550 - protein, 408 aa, unidentified
MDVFCGIDWAEGHHDVAIIDNTGKLLAKCRIDDDLDGYQLLLDLLADHGDSAETPIPVAIETSRGLLVATLRTGARQVFAINPMAASRYRDRHGVSRKKSDPGDALVLANIIRTDMPMHRPLPADSDLAQAIAVLARAHQDAVWNRQQIANQLRSLLREYYPAALEAWRHKAGGLTRPDARKILAAAPTPTKAAELALWKLKVTMHNAGRQRGINEDAERIQTLFRQPAARQLPVVEEAMGIQAKALLVQLNAVCKAVDELAKAVERTFRTHPDAPVMLSFPGIGPGVGARLLAEIGDDRTRFATAGGLKAYAGAAPITRASGKRKYVGRRFVKNNRLNHAGYLWAFSTLTHSKGANAHYRKRREHGDWHAQALRHLFNRMLGQLYHCLQTRVPFDEVIAFPVDAATA

SEQ ID NO: 341551 - protein, 323 aa, unidentified
MLIHYIDIAKRNFVIAVSSLSKTKTETNNPKGIAHTIEYLKKHKVALVVTESTGGLEIPAAKAIRRAGIAVIIANPRQTHQFAQSQPLTKTDAKDAKMPAFFAQMTAQKEDSQTMPYQPPTEAEEVLEALVNRRNQPADMRTAEKNRLHQVHETQVGSVKQLIAHFDRLIDELDKQIDDHTHTHFDGKAQVAEQIKGIGSITTATLMAMLPELGRLSHKRIASLVGIAPHPRESGETKFKSRCFGGRSAVRKALYMATVAATRFEPLIRDFYQRLPSEGKPYKVAVTACMRKLLTISNARMRDYFAENDTAENDTAENGIRTA

SEQ ID NO: 341552 - protein, 418 aa, unidentified
MNIKGTKKKNQVVTVNIFEQQELLKKAEVIRENLTASTWRELETNGKFGKNEKLSFVSDDMLILGCDVGSDTHYVRAIDTRGRELSKSAFPFSNTLEGFQSLMDWATKIAASNDKKQIILGLEPTGHYWFCLATWLIGNGISVVQVNPYAVKQTKEVEDNSQLKDDRKDPKLIANLVKDGNFGMPYLPEKLYADIRRLSMLRDQINEDRIRDLNRLHREMKIYFPEYKDAFGKIDGTFCLEVLKVAPFPEELVTLGVEGIRQIWHEAKLRGRGYVNATSIFENAKKSIGIQDGAESCKLAVKWFVHRMMESNEQLAEIESRLHQMCMEIPYAENILEISGIGENTLSGILAEMGDISRFDDVKEIQKLSGLGLVACSSGKHKGETKISHRGRKRLRYWLFQAAKSAVAHANELHDTKR

SEQ ID NO: 341553 - protein, 409 aa, unidentified
MRYYLGVDWADQTHAVWVVDEGGTKVAMRTVPHTAEGLTEWGRALDEWRAQGIELWAAIERPEGRVMDLLLDHGVVVYAVNPKTLDRARDRFRQSAAKSDPFDARVLADFLRTDHAHLRAVQPSSEAAQELKLLTDDYQRQIRQQTRLVNQLTTTLKAYYPRGLEVAELTTGLAREFLQAYPTPATITALTERQWQRWAHAHRLSETRTQQLWVVLQRPQLPVPPHVVRAKARLMQSLVAQLLVVMEGVGAYREAIEDFFARIPAAQWIRTLPIGDHGITAPTLWARLGDAPGRWESFRHLQAQAGTVPVTIRSGKQQVVRFRFACDKSLRYIIDHVAFLSLRWSEWAHAYYAGQRARGHSYRQALRALSAKWLKIIFVMWERQIPYDEQYHLAMMTRQQLRQRQEKVA

SEQ ID NO: 341554 - protein, 440 aa, unidentified
MLNPSLPEMVLAFDFSLDRLDVALRGPTPQWLWGPRAYANNWAGYQQLKQDLLEELQRTHPVHLTAVGESTGPYWWHAFYQLSHDADLAPFDLQLALLNPAHVKGYRKALAEQDKTDPDDARLIDHYYRAVGVKQPYQFADRYLRLRTFSRAYARVMHTLAAEKAYFLSVLYLWGSEYQRREAQPFSNLFGATSQCILDEYADLQALSDIPLDELTALLVQRSHNTFREPQDNARKLQQVAHDSYPVPDALRAALYQVLQLTLAHIRLLTDNQQAYRQLLSEELATLPEAQRALDFKGLGPVLVAGCLAEIQDTTRFTTGVKFDRRTQRDRPRTYRDGQAAVAKLAGLWWPKQDSGRVQGLQTRLARERNPYLRFWLVQSAYTLQLYQPDYRRFYQKKFREAHDHHHRRALILTARKATRLIFALLHKGRLACLEEGVLT

SEQ ID NO: 341555 - protein, 357 aa, unidentified
MAMLAEIVDAVIGVDTHRDFHQVEIAYPSGVMIATRSFSNDSVGHAETLAWVFEHAPGPRLVMSIEGTRSYGIGLARAAATAGLPVIEAEQPRRTHRRGRGKSDSIDAHLAVLSAVGLDAAKLPTPRCDGDREALRILLCARQELTTTTTGQTNRLRALLRDGDDTDRQLARARLTDTVLASVARRRLPAHASRDQAVRHAEIRRLAVALRCAARALKANRDQLATIIDDLAPGLTDQPGIGPVSAAQAIVSFSHPGRCRNDAAFAKLAGTSPLEASSGQTTRHRLNRRGDRALNKAIHTIARTRMRSDPTTKAYVARRRAEGKSKREIRRCLKRYIARQLYRTLTTAMKPNTAVTA

SEQ ID NO: 341556 - protein, 355 aa, unidentified
MRTYYIALDVHCAFTEMAVVGARGGVIRRERTATKIPDLAAALGSVAGRRWLTFEEGPMAGWLARNLGELVEELVVCEPRRNHLIAKDSDKDDPIDAEKLALLLRGGYLKKVHQAGSLERAIFKQHVGLYHDSVRDRVRMANSILAQLRRFGVFSREQEMADPQRRAPLLRKLPADRLLRDDVELLWLTYDMHLQQSEVMRDWLVQRSKREAILGRFVEVPGIGWIRAATFFAYLDTPWRFRSKQKLWKYAGIGLERSHSGAGPTQLRVAQGANRRLRGALLGAAQTAVRTAGNPFYDQYQYWTQEQGLSIPNARRNVARSLAATLWGMWKNGNRYQPHWVATGGKRADTLVACR

SEQ ID NO: 341557 - protein, 402 aa, unidentified
MRFFVGIDWASEAHAVCLIDQAARVRWHTSVPHSAAGLAALVHRLRRWRQRGSFAIAVERPSGLLVDTLVQAGFDVVPIHPNVVKATRPRYAAAPGKSDPGDAFLLADLLRTDGHRFRALQPPSDDTRALRTLVRGRDDLVAQRVALANQLRALLERAWPGAARIFADVDSPIALAFLARYPTAQSAARLGEKRLAHFLVQHAYCGRRAPRDLLARLQAAPPSQLGDNEAEAAGELVRSLVAVLVPLVAQIQQLGAAIAAALRQHPDAPVVQTFPRTGTINAAQILAELGDDRRRFTSADHLAAEAGVAPVTHASGKHHGVTFRWACNKRLRAALTTFADNSRHASAWAATIYRRAVGRGCDHPHAIRILARAWVRVLWRCWQNATPYDVTRHRAAVALIAA

SEQ ID NO: 341558 - protein, 372 aa, unidentified
MRFYTTQHRFYGGVDLHARTMHVCILDAAGAVVYDKNLAARPETLLRALEPFRDGLVIGVECMFAWYWLADLCVQHDIPFVLGHALYMKAIHGGKAKNDRIDAGKLARLLRGGTFPIAYAYPKGMRETRDLLRRRTYLVRKRAELMTHLQILNAQYNLAPFPKKLSFAANRTEMKVAERFSDPSVQKSAAVDVAVIDRLDVLIGELELYLVRTAKVDDVQTFHRLRSIPGVGKVLALILLYEMHDVERFASAGQFLSYARLVRCAHVSAGKKLGSGGKKIGNAHLRWAFAEAACLFLRSSERAKQWKQRVGAQRGEGKALAILAARLGRAVYHMLRKRVAFDEARFWNDVPQPTTTVSSSLSRTEEAEHAAD

SEQ ID NO: 341559 - protein, 355 aa, unidentified
MNDEKYIGLDVHQATIVVAVMDSTGKLVMESILETKAATILQFFAGLRGTLSVTFEEGTWSALLYDLLHSRVDKLVVCNPRKNALLKDGNKSDRIDARKLAELLRGNQLKPVYHGETGVRMLRELSRSYLTIVKDLSRVMNRLKAVYRSWAIPCAGRDVYYRRHRAQWLAKIREAGVRRRAERLYEQLDMLQHLRQQARRELLAESRRHTITGKLRQIPYLGPIRVALAVALIQTPHRFRTKRQLWAYSGLALETRTSAEYRFVEGQVRRSKKLLSIRGLNKDHNHDLKGLFKGAATMASVRPGPFQDFYTAALAKGIKPTMARLTLARKIAAITLTLWKKGENFDAEKLKSQAA

SEQ ID NO: 341560 - protein, 344 aa, unidentified
MDHFAGLDVSVNETSICIVDDTGKIVRELKVASEPEALLAVLKNPAYNFKRIGLEAGPLSQWLFGALAEAELPVVCVETRHMQAVLKAQINKTDRNDARGIAQMMRVGLFRPVHVKTIRSQKLRMLLTHRQLLQSKAIAIENDLRATLRNFGLKVGMVGKVRFEARIKELVENLPDLAALVEPLLIVRRVLREQMVILHRRLLAVVRDDEVCRRLMTVPGVGPVVSLTYRATVDAPARFRKSKAVGAVFGLTCSKYQSGEIDRSGRISRCGDEMMRVMLYEAAQSMLRSKKWSWLKAWAMQIARRRGMKKAIVALARRLAVIMHRIWVDGTEFRWTREQVPAAA

SEQ ID NO: 341561 - protein, 384 aa, unidentified
MTVYAGLDLHATNTYVAMIDEENKVLYKQRHKNELPAIVAALDPFKKDLKGVVVESTFNWYWLVDGLMHQGYSVHLANPSAIKQYEGLKQIDDRRSSLWLANLLRLGILPSGYIYPKEERPTRDLLRKRLQLVRHRTSHILSVKNILARNLGLRMESADVKKLTDAEVKRLFSDKEMQAAVLSSIGLVRHLGDEITKIEQMILKKVKIKKEFAKLMTIPGIGIIIALTIMLEVGDIRRFPTVGNYSSYCRCVKSIRTSAGKVIGHGNRKNGNKYLSWAYVEAAQAARRFHETVRSYYEKKMAKTNKIVAVKALSHKLTRASYYMMRDQVDYDPARLFGQEAREGGEVNQEPSRPVAKHPSGSLSQHRTKKEVRCHEREGRRIGP

SEQ ID NO: 341562 - protein, 452 aa, unidentified
MSKQAKTTAALPVLHPHAAGIDIGATAIYVGVPEDRATPCVRRFETFTADLLAAADWLEHCGVKTIAIESTGVYWIALFQILEERGFEVCLVNARHLKNVPGHKSDVEDCQWLQYVHACGLLRASFRPDEQICAVRSLLRHRETLVAYAASHVQQMQKALTQMNLLLHNVISDLTGKTGLAILDAILSGERDTAKLAALKDPRIQASPQTIAKSLQGYYRPEHLFPLKQALAAYRHYQQLLSECDQELEKLLADFDGRVDPTQNPLPLASKKLSGGNCLRFLETDLRTELYRILGVDLTEVPGLGTLAIHTLLAEVGPDLSAFPTDKHFCSWLGLCPDNRISGDKVLSSHTRKVANRAAHVFRMAAQSLWHSRSFLGDHYRKMRARLGPAAANTATAHKLARIFYHLLTTGEPYDESVFAQEQERQRQHRERRLRKEAIALGFQLVPQTDGV

SEQ ID NO: 341563 - protein, 350 aa, unidentified
MLHAGLDLSRKRLDVCLLSEHGELVEEFSAPPDADGLRGLVRHVGRHGAPVRGVIESMTGARFVHDTLERLGWEVLIADAQKVKGLAPLACKTDKIDARVLAVLSERDLVPAIWLPDPRIRCEREQARFRLHLVKHKSMLKHRIHSTMLSFGHPCPVSDLFGAAGRQLLERLEIPDPWRQSVDASLALIDDLERQIAQINRDLKASGAEHPHVPLLLSVPGVGWVLAFTIASEIGDITRFPTAKKLCGYTGLCPRVTQSGEKDRRGPLSKQGPKYLRWAMLESTMHALRHPAYAERYQRNKKRLGRQRGARVAQIDIARKQTEAIWHMLTTNQPFAPTPASGGAAFRLAA

SEQ ID NO: 341564 - protein, 372 aa, unidentified
MKKNSTVKRHRKKGATKDIQEPITIGVDLGDKTSRYCVLNGTGEVKEEGSVPTSKEGMMQMLSSGRRCRMAIEVGPHSPWVSRLLSGLGHEVIVANARQVKLISTSSRKNDRLDAQVLARLARMDPQLLRPIHHRNEQAQIHLLEIRARAGLMEARTSLVNAARGLVKALGERLPPCDPDQLRVEQLKSLPPPLQEALRPLLQEVESLTEKIRVYNERIEQIARNEYPETELLKQIQGVGTLIALTFVLTVGDAGRFESSRDVGCYLGLRPRQSDSGESQPPLCITKEGDRYLRAILVQGAHYILSARGPDTDLKRWGLKLAERGGKNAKKRAIVAVSRKLAVLLHRLWVTGEVYEPLRNCNVRMAEKKTAA

SEQ ID NO: 341565 - protein, 407 aa, unidentified
MIFAGVDWAEAHHDVHIQDEEGRRLGGGRLPDGIEGIARFHELVAARADDPGEVVIGIETDRGLFAAALVAAEYQVFAVNPMSVSRYRDRHKVSGAKSDPGDAKVLADLVRTDRHNHRRVIPDTELAEAVKVLARAHQSVIWNRRRQLNQLRSALREFYPAALAAFDDLASGDAIEVLKVAPEPALGAALSKTQIAAALRRGGRTRRIDERAAAIQAALRGPQLQPPPVIAAAMGTSVAALVPVIGEMTRQITGLEQQLAADFEQHPDAEVVRSLPGLGTILGARVLGESGDVPDRYADAKSRRNYAGTAPITRASGTRRVVLARHARNKRLADAIYLWAFAALTASPGARTLYDRRRAAGDTHHQALRALGNRLVGFLHGCLATRTLYDEDIAWARYTVSTHTKAA

SEQ ID NO: 341566 - protein, 404 aa, unidentified
MDAILQRCAGIDVGKKFSLVCLITDQGRKAPNIQIRTYGTTVAELDQLHEWLKQAGCTHVVMESTASYWKPIFNVLEGSMTIVLANPAHLKNVPGRKTDVKDCQWLAELLRHGLIRGSFIPPRSIRELRDLTRRRRRLVAAGSSERNRIQKILEDANIKLGNVLSDLFGVSGQDMLEALLKGSPTAEQVAQFARGVLKRKIPEIIKSLEGHRFNDHHRLLIRQSLAHMEFLESQISDLDGEILRKLEPYQRQFELLQTIPGIKADAAASVLAEIGPDMSQFPTASHLASWAGVCPGNNESAGKQRSGKARKGNAWLRGTLSQSAWAAANAKNCSYKVRYRRLSSRRGKKRAVVALVHALLRTSYYVLRTTTPYKELGENYLDEHRRDALIRYHTKRLHQLNASV

SEQ ID NO: 341567 - protein, 454 aa, unidentified
MDPGFLEHVRLSPRAIIGPGARFLEFLLTEPHADDATQKEEQMELLHRRCCGLDVHKETVVACLRLVIDGKVTTEVRTFQTTTADLLRLSEWLATNDCTHVAMEATGVYWKPVWHILDDGEFKLVLANAAHVKNVPGRKTDVNDAMWLAELLAHGLIRASFVPDAQTQEMRNLLRTRKQLVREQSSHVLRVQKTLEDANIKLDSLLSDLMGKSGRAMIEALIAGETNPVKLASLADRRVKASPEELREALRGRVTKHHRFLLRLHLNQIDTLDAAMATVDAQVEANIRPFRTAVDLITSIPGIKNLGAHVIVSEIGIDMSRFPSAAHLISWACICPGNDESAGKRRSNRMRKGAPWLKATLLQCAWAAAKKKDSYLQAQFYRIKARRGPKKAIMAVAASILTAIYHMLKDGTMYQDLGCNHFNRRSTDQQKRRLVKRLADLGYAVEIKPLAAMA

SEQ ID NO: 341568 - protein, 429 aa, unidentified
MSYRIAGIDVHKRMLAVVVSDVEVDSEFHFERRKFSSSPEQLRSLAAWLLEQEAEEVVMESTAQYWKPVWEALERYWKPICEKREGARRKSGTLHLAQALSNRGRRGRKRDFPDAERLVKRLVAQELTLSFVPDAEQRLWRTVMRKKYQLRCDRIRLQNQLESLLEEAHIKLSSLVSDLLGLSAQRMLKAMAQGETNSAALAALADKHLRATPEQLCDALGACTELNAVYRRLLGMALQELQLIDEQIGRLDQEMASLLSAHQDAVQRLAEVPGLGVDSAQQIIAEVGPTAATFPSEKCLSSWVGACPGDDETAGVNYSHRSPKGNRQMRRILNQAANAAARTKGSIFEIVYRRSVPRLGHNQAIGAIAHRQCRLIWLILHQGVRHEERGPAVTKRSKQLRTWRMIRQLRSLGYRIEPAIPLPSQAHAQ

SEQ ID NO: 341569 - protein, 408 aa, unidentified
MNTLYVGIDVSSKSNVVYLMLPNGDKHSNFSVANSHEGSTLLVKKIYSALTSHSLDTVLIGLEATSVYGDNLVYFLREDATLAPFNRKIHVLNPKQVKKFHDTYNDLPKNDYVDSFVIADCLRFGRINKEVYMGDYRYKALQNLTRARFFAVQNLVKEKQRFMNVLFKKYSTMTQEKVFSDAFSTTALAVYDEFESAEALANMDLHELTDFIIEKGKNRFPDPDAVAKAIQKAARSSYRLPKTVNDSVNQVLSISITSMKALESQIKEFDKAIKALMELLPNVLISIPGIGPVYSAGIMAEIGDINRFDNQASLAKYAGLAWKQHQSGGFEAEVTRLIPSGNRFLKYYLCEAAFSLVRCDKEYSDFYHLKYKEVNRYQHKRALALTARKFVRLVFRLLKDNRLYCPAK

SEQ ID NO: 341570 - protein, 426 aa, unidentified
MSTQEEDPLWFAGLDWASQSHRVSLTDASGKPGHRRDVSHDAAGYAALCSWLENTTQASPARIAIAIETTHGPAVDALLDRGLQVYAINPKQLDRLRDRFTVAGAKDDTRDADVLASSLRTDRNAFRRPGAEDPLIVQLREATRRHHTLVTDRMRLTSRMRDQLLRYYPQMLKLFDDLCDSWVLELWRLAPTPARGARLHKATIERVLKTHRIRRLSADQVHAILREPALVVAPGVTQATSNHIRDLLPHIRLLNSQIKHLGREVDRLSAALAGPPIIEPGESVPGQRSEQRDVTILLCVPGIGRIGGATLLAEAHDAVRARDYQMLRLVGGAAPVTRRSGKSCTVVRRVACNKRLADALYNMARVAISVDPRSRARYDALRKRGHRHARALRTVADRLLFVLCTLLKRQVLFDPNYRASPANAEV

SEQ ID NO: 341571 - protein, 393 aa, unidentified
MRKPNRQDKPLNDLSRSLTPLDVNQTLIAVIELSKESWLVAGIIPGVERQPLKKLLADEDQLLKLLERWRTEAEKAGHKINRIAVAFETGRDGFWLARWLRARGVEAYVIHAASVAVSREHRRAKTDRLDTAGLKRAFLGWLRGEREHCKMAAIPTLTEEDAKRPHREREMLVGEQTRIINRLKATLARLGIRNFNPKLKKAPERLEHVRTPEGEPIPPNTLAELMRDLERKRLIHEQILNIEKARLEQLKRAPKVGPNLMVLLLVRVIGIGIDTADMLVKEVLSRNLRDRRAVARYGGLTGSPDESGKKRREKGLARSGNARVRRGMIQLAWRFLKFQKDSALAKWFRVRTENAHRLRKKMIVALARKLLIALWHLVRDGVVPEGVVLRPAH

SEQ ID NO: 341572 - protein, 346 aa, unidentified
MTIVETRAITGGVDTHADVHVAAALDPIGGLLGVKEFPATAAGYTRLMSWLGGFGTVGLVGIEGTGSYGAGLARHITTAGVRVVEVDRSDRQDRRRQGKSDPLDAVSAARAAQSGRARGASKGRDGAVEAIRALMVAKRSAAGERTQTINQARALVLTGPDDLRARFTGHTAAALVAELASLRPRPGSTVGYATRIALRELGRRAEFLDGQLERLDEFIGPLVAARAPGLLALYGIGPHTAALLLIAAGDHPERLRSEAAWAHLCGAAPIPASSGKTVRRRLNPGGDRQANHALWRIVFTRMGSDPATRAYAERRTAEGKSKKEIIRCLKRYVAREVYPHLRITAG

SEQ ID NO: 341573 - protein, 343 aa, unidentified
MNEYDGKQFVGIDLHRRHSVIVRQTSTGERLSAVRIVNDPDSLALQLEEAGEHPDVVLEATYGWYWAVDALQAAGATVHLAHPLGVKGFRYRRVKNDVRDAGDLADLLRMNRLPEAWIAPPATRELRELVRYRAKLVALRSGLKAQAHAVLAKAGVLIAVSDLFGVEGRQRLARVPLGAAYAQRMSSLLELIDVLDTHERRFAEQIAAKLYDDRGYGAIQQLPGVGPVLGAVFVAEIGDVHRFADPSHLCSWAGLTPQHRESDTVVHRGHITKQGSKLVRWAAVEAIQRQPAGTKISVDRKRIEARRGKNIAKVAAARKLLTLVYYGLRDGHIRALTHQPAAA

SEQ ID NO: 341574 - protein, 428 aa, unidentified
MNIVDDIRHEEFIQFKKEIRGSEEHLIVGIDVAKDKHNAFFGTATGETLLKRLIFENNIEGFEKLIIQVKAIKVQNGFKKVVFGLEPTANYHKPLGEHLIKCGHMVVLVSGVAVKRNRELLDGRWDKNDTKDSANVADLISQGKCLFYEYPSMLLRDLRNILSLKRRLKKQEHSSRVRIRNHLLALYFPELDGNYRQWEAETLAIVRWCLDTSVIAGLEYDQFFSLVTTGNRDIRQKKRLKAIWRKAVYSIGCDAGELVEFEAKIMVQELKHKRDAIRATDAKIKDICLKFSEYNYLLTIPGFGPDISSKVLGAIGNPFRFKTQKQVLKMAGLDLSANRSGKRSFDATPVISKKGKADLRYALYQAAMIASIKNRDFIIYYTNKLKGREREKGIKTKMRVKLAAKMLIIAWTLMKKKEPFNTEYLDTD

SEQ ID NO: 341575 - protein, 373 aa, unidentified
MKYSTVYVGMDVHKETFSLCCYTNEKEQAEYPQKVDGHYSKVINYIEAMRFHYGDDALFICGYEAGCLGFTLYHQLTDHNVKCIILAPTTMLQQKGRKKVKTDKRDAALIARCLAHHDYSPVHIPTEQDEQTKEYIRMRDDHKLALKKVKQQILSFCLRHNYRFDGTTNHWTQAHLKWLRSLKPEGLYAEILQEYLLTYDNLTDKLERFDKRIEELASNETYQENVHKLSCFIGVKTVTALAVLTEVGDFKRFASAQHFASYIGLTPGEDSSGGDQNRLGITKAGNRHVRCLLVEAAQSYSRGQIGFKSKALKARQEGNNPGIIAYADKANERLRRKYYRMVLKNNKRTNVAKTAVARELACFMWGMITGNVA

SEQ ID NO: 341576 - protein, 359 aa, unidentified
MSPEHSIDIFLGLDVGKSEHHACALDRDGNKVFDKPLPQLESELAGVFHQLQELGTVLVIVDQPNTIGALPIAVARDCGCEVGYLPGLAMRKAADLYPGRAKTDKRDAFIIADTARTMPHTLRAVDRNDEVLSALKMLSGFDDDIARDCTRTVNRLRSILTQIYPSLERVFAGSTLTRTPILDLLIHYKGPQGLKRAGYQRVLNWMIKHTRKDPTPLVDDIFAALKAQSVTVPGSDAAELVIPQLAANIKALKEQRNTIAEQVEEMLADFPLCEVLMSMPGVGIKTAAQILLAIGDGSDFDSAGHLAAYAGIAPVTRRSGSSIRGEFPARSGNKRLKNALFYSAFAVIRLRPLVWCNAC

SEQ ID NO: 341577 - protein, 352 aa, unidentified
MIVLGADTHKRSHSIAAVAAGTGELRGEQTVPVGVRGFDALVRWARGLDGERVWVLEDCRHVSGSLERFLIGRGERVLRIPTHLSATARRSSRQRGKSDPIDATAVARVALQEGLAAFPVAHLDGPELDLRLLVDHRERLVRQRVGLNNTLQWHLHDLWPELQLPGSSLFYGRWAPRIARRLARAEQTMRVRIARDELRRIRELSQTIKRLEAEIAGLVAAIAPQLLTEPGFGPLTAAKLVGEIAGAQRFATPAKLARAAGVAPIPASSGNTQRHRLDQGGNRQINAALHRVIVTRARCHPATQDYIARRQAEGKTTREAIRCLKRYLARHVWRHLQPPHPPGGTPPPPSIS

SEQ ID NO: 341578 - protein, 394 aa, unidentified
MKLVGIDVGKNSHHFCVMDKETGELNVAPSSFSNNKEGFDFLINSLKPYSKKSILIGMEDTGHYHVALLKFLLSNGYTVALINPKTTDLTRKMEGGITKNDKLDTITICDVLDTPERKKQYRITKVDRFDLYEQRQLTRHHHNLKEELNIYCNRLQKSIDLVFPEFNTLFSSKYGIVYMNLLKTFGSAEIIASTDIRTIRKCFEIKGRGGRISLTAEKLKECAKNSIGISSEVETIQIKHLVSQISLIKEQIAEIDKKIEEFSIKNNSPILSIPGISHFSGTSILAELGDIGNYSKPSQIIKFAGVAPYHYESSQYNAQHTGITKKGSKYLRKTLYQIILPVINNNPVFKKYYRLKISQGKGHRCAQGHCIRKLLRIIYHLLETGQSFNPALLR

SEQ ID NO: 341579 - protein, 391 aa, unidentified
MSMYFLGIDISKYKHDCCIISAADQQVVSKFVIRNDKDGFNELLKTLNSLSSPKDIKIGFESTSHYALNLELFLEKAHHSFMEVNPVLISEYKKSTTLRRTKTDRVDCESIARWLMTVEYKPHPNGFYHAYSLKSLTRLRDRLIRQRSLYLVKLTNVLDHTFPEFKPFFGERFSKTAFYLLETYGTAEKMSRMNSASYEKIRVLSRGKFSPQQFLALKEMAANTVGVSNEIFETELSCLLTLYKGIAEQVDCLETKIVELISEIRPHYISIPGVGPISAAVIYAEFGDVSNFSSPAQMLAFAGLEPGVNDSGTESHGGRMVKRGSSHLRYVLMNCALPLIRFDITFATYYAKKRAEGKPHRVAMSHVAKKLVRVIFALERQKTDFVTAALR

SEQ ID NO: 341580 - protein, 501 aa, unidentified
MGYEPVAKFLSSARFKSGNNLVHRHRRLTRLMIPGTQIYRQKGGIMEHYYLGIDVSKGYADLIILNSKKEPIVDNFQLDDTFEGHCYLYKFLVKFLDDHPESIIYSAVESTGGYENNWYNSLIEFQGFLNLQTARLNPLGVYHNNQADLKRNITDKISAKGVAEYMIAHPEKITYQQEDSLASLRKQWAFVKMLTKQCTQLLNQLESLLYSANPEILVYCKDGFPEWLLRLLAKYPTASNLAKAKVVPLSRIPYVTPDKAQELINNAKRSIASAKDKITQQLIVSTVKQILHLKETIKAQTKIMENECAISEVELLKTFIGISDHSAIGLMLEIQTIKRFKTVKKLASFFGLHPELKISGDGSAAFRMSKKGRKEPRQILFMVAMSAINTNPLIMDIYQVRVEKGMEKMAAIGLCMHKILRIIYGMLKHNQPFDPEIDRRNRERSAKRKKTIRMDKNRRFQVYDPKAPISRRQYMKRMERELSHSDNNTKSGINAPVPFPT

SEQ ID NO: 341581 - protein, 380 aa, unidentified
MSDFQRLHAAITSYVSSPYEAIIAVDHTGGHYSEPIVYFLQGREYPVYYLETKAAKAARERFLDQESKSDTIDAVSCAYLLYLRDAHGLSFRISAVTPELGSKAAALRSLILQRWQLSKLASQATNRLHQLLLAVFPEGEAQCFKKLLLVTPYYSTPKEILSSHCLETVEGLSKKDKRKMVELARNTVGVENPLYASLIKDISNQRMEFLTKRDVLTSKIREEVVAHPYGEILLSFPQVGEVIAATIIGVIGDINRWPDKKKFKKALGVYSKLTQSGATPAKTRRGREGSRHGRRVLFQACFGCARTRARESDFKDYYLRQVARGKPRIKALVSTMGKLAEIIYHCLKAGEPYQYQGKYKAVTTSDNKKLQGEKTPSLEC

SEQ ID NO: 341582 - protein, 345 aa, unidentified
MVTFGVDVHKRTHTVVVVDERGLKVGERTIGTTTKDHLGLLRWAVQFGDGRAWAVEDCRHLSRRLERDLLAAGESIVRVPPKLMAATRNSARTFGKSDPIDALAVARAALREADLPVARLDGPEREVRLLVDHRESLIAERTRMICRLRWHLHELDPSWEPNARALDRASAYDAIEAHLAGRLGVVARLARVLVARCREITSEIDQLTGEITELVERLAPSLIAIPGCGALTAAKIVGETAGVTRFKSKDAYARHNGTAPLPVWSSNKARHRLSRTGNRQLNTALHRIAMTQARCHPPAKAMMTRRKESGDSGREALRILKRRLSDVVYAALRADVVTMTQPVAA

SEQ ID NO: 341583 - protein, 424 aa, unidentified
MLGVGIDWAESFHDVALGQPGKGVIEQFRIDHTVAGVHRLIARCLELEADPAEVRVVLETRHGVLVEALADAGFTLLPVNPDLVARRRGPAKKKDDAEDARICCLMALDQFLELRKLIPHGELSGELRAIARDDERAARDERRLLNRLRADLLATFPAALVIAGDDLGSPVMLKVLARWPGHAHLAAASGEDIEAFARAAKHGWPDRFTVRVTDALAAEQLPVKNYLVRAKETTIALTATQLLALRQARKAWERRMGELLLGAARRGRGKQPKELDPGKAIPGGDIYLSFPGLGDILAARVAGEIGDHIEQFEAPSGLQCYAGTAPVTRRSGRSELVIARRLAHNRYLGAAVHQWAFCSLTKSRWAREFYDSKIGAGKGHHAALRALANRWLEILWHCLMKGVSYDETVHIRNRQQALQPRTAA

SEQ ID NO: 341584 - protein, 312 aa, unidentified
MKDKPIVGIDVSKGWLDLCIAGNAKVERLANDEKAIGAWLDRVRPAVVAFEPTGGYERVLVAALRTRAILFVRVHPNDVIAFRKSRAIKAKTDRIDAQLIAAFAAEELVRRGMRPTILGNDLLRALAARRSQLARALHAERCRLALATEKPVRQNLELMIATLGDSLDTIEADIAKAIDRDPQTAQLATLLRTVQGIGPVTAATLIADLPELGLLSAKEIASLVGLAPNTRQSGKARPRAPTSHGRPHVRQVLFNAARAAVRHPSPFKDFADRLVTLNKRPGKVAITAVMRKLLVTANAIARDRQPWKLHKA

SEQ ID NO: 341585 - protein, 457 aa, unidentified
MAQPKTGRRPKSKRPLVPIHRDAAGLDVGATFHVVAVPPGRDAEPVRSFKSFTGDLHALADWLKLVGITTIAMESTGVYWVPVFEILEGRGFEVLLVNARDVKNVPGRKTDVNDAQWLQQLHEHGLLRGSFRPRDGVARLRALLRHRERVVEYAASHIQHMQKALMQMNVQLHHVVSDITGETGMKIIRAILDGIRDPKVLVKHRNERCKASIETVRKALEGNYRTEHVFTLRQAVELYDFHRAKVDECDVEIEAALAELNNDREAPSAPLPKATRRGRNPNEPKFELRTALYTFLGADLSQIHGFGAHTVLRLVGECGDDMRKWPSVKHFTSWLSLAPGNKISGGRVLSSKTRRSSNRAAVVLRMAALNVGKTHTALGAFYRRLAARAGKAKAITATARKLAVLFYNALRFGMSYVDPGEDHYEEKYKQRVLHQLHRRAKQMGFTLVNENTTVGVT

SEQ ID NO: 341586 - protein, 448 aa, unidentified
MPTRKPSRPRKMKLPKDLQHINPHAAGIDIGGRSHFVAVPEGSCEQPVREFTSFTDDLHRMADWLLACGVSTVAMESTGIYWIPVFEILESRGFEVRLVNARHVKNVPGRKSDVLDCQWLQRLHSYGLLEGAFRPSEQVCTLRAYVRQRMNLVRYAASHIQHMQKALAQMNLQLANVVADITGGTGMRIIKAVLAGERDPLVLAQLRDARCKSSEATIARSLQGNFRPEHLFSLKQAVDLYEFYQGQIGECDRQILNQLSSFDGPDASGNGPAESLDEALQRMTGVDLTQIDGINSNSALKIISEIGTDMSRWKSAKHFASWLGLCPGTKISGGKRLSAKSKPVANRAAGTLRMAAFSLFNSKSALGAYLRRQRSRLGAPKAITATAHKLARLVYSMLKHGTAYVDVGQKRYEERYRSRVVENLKRKAHDLGYALVEVCAKQPQPVAS

SEQ ID NO: 341587 - protein, 332 aa, unidentified
MSVFVGIDIAAKSVDVVARSNNKSSVVKSYEQTPQGHKKLADSLLKLQPTCVVMEATGIYYLNLAIVLHDAGINLSVINPKSFNHFAKLTLTNSKTDDIDAALLAEYAQRMTPKMWKPPSKGRLQLRDISRQINRLTHDCTKSKNRLHALLAYKDTNIIIIEDEREGIEQLTKRIKRLHQLAIDVINADEFLKQKMENLTTAKGIGPVSAVTILGELMVLPDTLKPNQVSRFAGLDVRLNQSGTSLNKPGRLSKAGNAYLRSALFMPALSALQHDPNVKAFHDALVARGKKKIQAVCAVMRKYLTGIWACLQSNTHFDSSKLFSEIHKQACV

SEQ ID NO: 341588 - protein, 342 aa, unidentified
MEITTVGIDLAKSIFQVHAVDAAGHVVVRKALRRAQVTPFFAKLPRCLIGMEACGTAHHWARELIKLGHDVRLMPPAYVKPYVKRGKTNANDAAAICEAVTRPSMRFVPVKSTEQQAALALHRTRDLLVKQRTQLVNMIRGLLAEFGIEMARGLRHALELAARLSAGDAAEVPPLAQRVVTGLADQIGALQIQLTRLEKELLTWHRDSDLSQRLATIPGVGIVSATALAASVSEPERFRSGRQFAASLGLTPLQNCSGGKERLGRISRMGDRYLRRLLVVGMTSLIRRAKTTPTSVDPRLPALLQRKPVRVVTVAAANRTARVAWAIMTRGGTYRAPAATAA

SEQ ID NO: 341589 - protein, 382 aa, unidentified
MSRESAFFDFQLVLIVSNELFDFPCACRKPDQSESSDVFTRSNSRAIHLSRRSLNLSKKTSPAIQIQINALKSLPGRVVAAVEPTGDYHRPMAYRLLSEGIEVVSISSVALARVREARFGTWDKNDPKDAQVILSMLAQRMVQTYYDPLIAGTHDLQELANTYFQITLTRMRLQHSLLLHYIPLYFPEFARYWNSTRSEWFIRFLLRFPTAEAIRMLEFETFSREAWDLIGRKVAKRAWLAETYAMAAESIGLPVSLESTAIAMFRMQLSRQVQLNLERKQLDQTAQRLLAENADFRRLLTLPGIGAIMALTILAEAGDLRRFGHHRQFLSYSTLRRLAAQYLVTVLRDPHQVILDVAHRVPAMSILTHPLILVENRSKLTA

SEQ ID NO: 341590 - protein, 339 aa, unidentified
MQVTTVGIDLAKHVFQVHGITADGTVVFNRAIRRAQLVTFFDELEPCLVGMEACGSSHHWARELSKLGHDVRLIPANYVKPYVKRGKSDAVDAEAICEAVTRPTMRFVAPKSEAQQAVLFLHRARDLIVRQRTQLSNMLRSLLVEFGIIIAQGTGSAVKYAKSLLDGDKPDLPEIAIDVLKQLSHQLVAMHLRLRWYEVRMRLHSKLDKRVMLLRTIPGVGPVTASAIVATVGDAKQFKNGRQFAAWLGLTPLNRSSGGKERLGRITKMGDRYIRRLLVTGMTARLRQMKVNPDRVDPWAIDLLTRKPPRLATIAMANKTARIVWAVLTKSEYYRPHTI

SEQ ID NO: 341591 - protein, 367 aa, unidentified
MKKVSTAAKKQGRNISRQTLTIGLDLGDRNSWYCVLDEAGQIQLEQRVRTNAKALCEVFGAIPHSRIALEIGTHSPWISRLLSELGHEVIVANARKVRLIGESRKKDDRLDAQTLARLARIDPELLYPVKHRSAEAQADLMMIRARAGLVRARTGLVNTARGLAKSYGERLRGCNVRDMDPEKAENLSPELQRALEPLLATIEELSERIVEYNDRIEALAEASYPQVELLKQIKGVGTLIALTFLLTLEDPHRFRKSRDVGGYLGLQPGRRNSGQKEPQLHISKEGDPYLRTLLVQGAQHILGPFGIDCDLRRWGLKLAERGGRNGKKRAIVATARKLAVLLHHLWVSGEVYEPWHNSSRVTVAAAA

SEQ ID NO: 341592 - protein, 413 aa, unidentified
MEVVHQRCAGIDISKKDAKVCVRIQGRGSRATSTTVSTWGSMTNQILALREHLLAEKVTCVVMEATSDYWKPFFYLLEDVLPVMLVNAHHAKNMPGRKSDVSDSAWLADLGAHGLLRGSLVPPPPIRRLRDLTRARTNLTRDRGRQVQRIEKVLEDCGIKLSSVVSDIMGVSGRAMLAALVEGRDDPSTIAELARRRMRSKIVLLTEALTGRFTAHHAFLIKMHLGLIDQYTQALTELDSRIGEEMQPFGAARELLISIPGISTTVAEVFIAETGADMTVFPSAGHLASWAGTAPGSNESAGRIKSTVTRPGNRYLKGALGTAALSATRSKDTYYAAKYRRIAARRGPMRALVAVQHSMLTAAWNMLTRGDLYQDPGADYFTARHPAKTKARAISQLEALGFHVSLQPVPRTA

SEQ ID NO: 341593 - protein, 458 aa, unidentified
MRRPNRQAPRAAAAPTLKRHHPAAAGLDIGAEEIWACVPADHAAHPVRAFGTFTPDLHALADWLAQCQVTTVAMESTGVYWIPIYEVLEARGFEVALVNARHLKHVPGRKSDVQDCQWIQQLHSYGLLTASFRPAEDMRVLRAYLRQRAMLVEHRAGHIQHLQKALQQMNVQLTQVLSDITGTTGLQMIRAIVAGERDPQVLARLRHGRCQRSEAEIAKALSGHYRPEHVFALKQALALYDFYTAQVQECDTYIEQHYTAIKPAYDAQTPPPPLGPDPKPNSHAKNAPAFDVRACLYRILGFDLTATEGLEASSAQVLLSEIGTDLSKWPTEKHFASWLGLAPHNDISGGKVLRSKPLKGNRRAAQALRLAAQTLGRTQTALGSYYRRLRARKGPTQAITATAHKLARILYHILKHRTPYQPQSQETYEHHLRQRAIRHLKRTATRLGFTLLPQPVAA

SEQ ID NO: 341594 - protein, 322 aa, unidentified
MSEAVLGIDIAKQKFDAALLVEGKTKHKTCKNSAEGFETLRLWLEKQGIQKVHACLEATGNYGEDLAIYLHEAGHMVSVVNPARIKGFAQSELLRTKTDKLDAALIARFCLAMKPGAWIPPSPEIRSLRALVRRVDSLIDMRNQEKNRISTAHESVSLLIKEHIAYLDQEIEKIRKQIADLIGQDPNLKRKKDLLDSIPAIGKVTIPHILAELDDLEKFNHVSELVAFIGLAPKETLSGSSVKGKPRLCKIGHARLRKALYMPALVSIQCNPVMIAFYNRLKDRGKNGKVIVCAIMRKLVHVIFGVLKSGKKYDPNFKPVSA

SEQ ID NO: 341595 - protein, 402 aa, unidentified
MNPVIGLDISKEESHGQAFIERGKPYRGTFKFEHTQEGLKKLLQVVQDLEHSSRQRPMLILEATGHYQSPVVQFLEEHHYLYIVINPLISNRLRKSNLRKVKTDAADAYLLAELYYKEDFEPFKKRGVQLLNLRYLTRQYKALSKMCVQTKLQFQAVLDQVFPAYKGVFGAMYSNISLQFLNEFPTSNSVLQTDEDTLKAKMKELLSSKRGRSEDWIHLRVQRLLDAAKENPFQRTMYASHLVNLKVLISLILQYQEHLAGLEQNIDALAGEIEEYDLIQSIPGIGHKIAATILSEIGEVDRFDHPKKLVAFAGIDPSVFTSGKFTATRNRITKRGSRQLRYALVLAVQCGLIRSRNTRIKEFYDRKRAEGKPHKVALVACANKLVHWLYAILKNKKMFRPA

SEQ ID NO: 341596 - protein, 348 aa, unidentified
MVQQIMVQQTSVLGIDLAKQIFHVVGMDDTGNVVLRKRLPRSALMSFIAQTPPVVIGMEACGGAHYWARRFREHGHTVKLMAPQFVKPYVKSNKHDMADAEAIGEAVTRPTMRFVPIKEIAQQDLQALHRVRERLVKARTALINEIRGLLGEYGIVLPKGITQFRHALLSTLEQEQAKLTKLSRHVFRQLHEEWLALEQRLTSYTEQLEAIGQAHPACQRLLTIPGVGPLTATALVVAVSDATHFKNGRQFAVWLGLVPRQHSTGGKPRLLGISKRGDVYIRKLLVHGARARIRWVGLKNDRRSQWLRALMQRRGTNRAVVALANKNARIAWVLLATDQVYTPAHSAA

SEQ ID NO: 341597 - protein, 355 aa, unidentified
MDCYAGLDISLEETSVCLVDSDGKVLREVKVATDPQAIDKVLVIEGGVLKRVGLEASSLGGWLHAELTRRSFPAIVVEARHMRSALNAQRNKTDRNDARGIAQMMRMGWFRAVHVKSPEAQRLRLLLANRRLLKRKLIDIENHVRGALRSFGLRVGTVARGGYEARIMELIDDADGALKTFVLTMLEVRRAVMGGYNTLHKALIAIVAADPVCRRFMTVPGVGPIAALSFRAGIDDPLRFTSSRAVGAHFGLTPRKWQSGTIDIDGRITKQGDGDVRTALCEAAASLLLRVRRWSALRAWGMRIAKRTSMMNAIVAVARKLAVILHRMWIDGTEFRYVAGAAIVEKLELPSPKAV

SEQ ID NO: 341598 - protein, 357 aa, unidentified
MTKRSQDILRKEKVFVGLEDSKKTWQLCVRSGGVIVNETSMPAKLDVLSNYFNNKFPECQIQVIYEAGFKGFGLHDELEAKGWDCIVTPPHTVTEEKCQRKKNDRTDCRRLAKNLENGDYHSCFVPDKELREDRQISRTYEQVQADIRRECNRIRRTLEFHGLDQGLSPGSWNRAMYTRVKLYLEDLEINTSLRFSLKVMFNELEHLRQLRKELLQQLRTLAKSDRYKERVEILQSAPGIGMFTAIRLVLEWGDVSRFKRKEEFASFLGLVPSDYSSGETERQGHITKQGNSSVRSWLVECSWMAIKYDPVLLDKYRRVLKNCGSKKKAIVAVARKLAIRLRWILLNGEPYVIGVVE

SEQ ID NO: 341599 - protein, 473 aa, unidentified
MAKGSGGSGMTRGDRRRNARRERLRELLPRDGAVIGIDLAEDKQALAVIDHDVRVLARKTVRVKAFRLGEALDWAVARARPKGFEQVTVACEPTGPRWLQVQRLCAERGLPLVCIQPLISHLAREQQDFTRHKTDESDCVMIARLAVELHCYVPEELDETWAHLRHLGRRRAQLITAATASAQRIQDFLSVAWPAVPETCARPLESVTWLAALQVVTARCGADPGKLAGMGEQEFTALVRGAVPGWGGRKAHGPISRRVFAALTDTEGVVVSSRRGLLRRIADELGDLQRTRAQLRAVEADMVAVLDELGLSRLGDIPGLTAVGAAAILAETGDPHRYDNSSSLVKHAGMSPSDNASGAFSGQAHISRRGRPGLRLVVWRAVWPMLQFNPVMAAKYQAMTRAADTTAADAGPQQGTAAQAAARARRAKARVACAASLLRWIYCLVVHDTSWDPAAASGAASRHETPRTQAKAA

SEQ ID NO: 341600 - protein, 356 aa, unidentified
MTKVQQFADFSNKEIFVGIDVHKKSWNVTLYYERQYLRTFSQPPSIDALTGLLNRDYPGATYVCGYESGFSGFWVQRKLSEKGLTCHVIHPGDIPRTSKHKTAKTDAIDSKSIASALSAGTVSSIYIPDPKTENDRSLLRHRRRVLRDITRCKSRIKGFLLQFGYNIPDCFEKSWSLKFVQWLKDLQMEYPMGRLTLSHMISQLELLRGSFLQVNRDLRLLQKSEEYKPLMDILMSVCGIGPLTAFTLILELVDMNRFHSFRHVNSFVGLYPMEHSSGEHEYKGRITVRHNRYLRDLLVEAAWVAVRHDPAMLQVFENWKKKMTAKRAIVKVARKLLSRIRHVWINQTVYVKGVVK

SEQ ID NO: 341601 - protein, 343 aa, unidentified
MELYAGIDLHARNSYFAVIDAEGAKVFSKRISNASDQVFKTLEPYKEWLRGVVVESTFNWYWLVDGLMDAGFKVHLANPSAIQKYKGLKHSDDKSDAIWLANMLRLRVLPEGYIYPREYRSVRDLLRKRMHLVKLRVSLINSLQNILVRNGSARLGAAKIKQLTKDHVTPLLDWNEDLVLSARVSKEAIDYLTGQITAIERVVAKKAQLKPEYEFLMTIPGVGIILSLTIMLETGPINRFAKVGNYASYCRKSPVSWTSNGKKKGDANKKNGNKYLAWAFSEAAELTRRFDNTARAFYDRKARKTNFMVAHSALAHKLARAAYYIMRDQVPFEKEKLFALSLA

SEQ ID NO: 341602 - protein, 344 aa, unidentified
MTKISTIGLDLAKNVFQVHGVDASGAVVLGRQLRRAAVEKFFARLPPCLVGMEACGSAHQWARVISRYGHEVRLMPPAYVKPYVKRNKNDGRDAEAICEAVSRPTMRFVPVKSVEQQATLAVHGTRALLVRQRTMIANALRAALSELGIVAAQGYEGLRELMARLQEASDEIPETMRGALLLLAQHWQALDTDERALERQIAKAARCDGEARRLMEVPGVGPIIASTVLAKVPDAKVFRSGRDFAAWIGLTGRDHGTGGKHRPGRISKQGDRVLRALLISGASAHLRQQKRRGISDPWLRELLARRPYKVAMVAFAAKTARIIWAMLVKGEHYRDRATAPAAAC

SEQ ID NO: 341603 - protein, 391 aa, unidentified
MVCVGIDVAKDKHDCCILDSDGMVRADCFTIPNNMDGFKQLLQTIRNCTQKSDKIKVGLEATGHYSYNILGFLLDNDLAVYVMNPLHTNLYRKSLSLRKTKTDRVDARTIATMLLSDVDLKSYTDTAYHNEELKSLTRYRFDKVRERAKLKQSVSRLVTILFPELEKLVPSLHIASVYALLSEYPGAKQISEIHLTKLTNLLATASKGRYEKEKAIQIREAARTSIGSVMSAKSLELKHTIKLIKELTSEIDEIEDSIQQIMDELHPPILSIPGMGVHSAAMILAEIGDFSNFDSPDKVLAYAGCSPSTYQSGKLTNCYAHMEKRGSRYLRYALYNATKYVCHWNPVFAEYLAKKRSEGKHYNVALSHAMKKLVRLIYALQKSGKAYLTAA

SEQ ID NO: 341604 - protein, 438 aa, unidentified
MKVMHERVAGIDVHKKMIKVAIRSPGDKPWTRKTEILTFRTFYGVLREMARELRARGVTHVVMEASGVYTEPVYYALLEEDFTEVLVVNPAHVKALKGHKTDAKDCARLAELLECGLLQGSYIPAAELKEVRDLTRYRSKTVQARTSEIQRLDKTLESAGIKLGSVASDITGKGPAAMIEALIDGERRGKVMADLAKGRARAAGKLADLSMALEGRFTEHHALMCRLILDRIRVHDTAIGGLDKQIAGLAAAWQREIDLLKTIPGFGDVVAWTWIAEIGPAPHQWFGSHEKLASWVSLAPGNYISAGKRKHSRTGDAGTYIKPVLVQAAWAAIRVRGRLQARYNRLVRRFGGPKNPAAKKKAIVAIAHTLLKIAYSVLKSGTPYQDLGEDFYTRRETPAQRQAWLERQIQKLHPGCTVTITISPPPGHAPEAALTPGA

SEQ ID NO: 341605 - protein, 321 aa, unidentified
MQTIPVTVYAGVDVAKATLQLHLQGRQAEFSNQPAGLVQLCQQLKTIPHIHVVCEATGGYERLLVQAMHQAQIPVSVTNPAQVRAAAQAQGQRAKTDRIDAALLTDYGQRYQPKPTSPTTASQDQLVALTQWLMQLVQAQALAKTQAEHHEAAFVCGRHTKLMAHYQSQIVAVEKQIRALLAQDAQLQQRVDCLDEIKGVGARTAWLVLAHMPELGQINRQQVAALAGLAPWTRESGTMKGMRCIGGGRPEIRLALYMAALSAARCNSVLKPFYQRLRAKDKPAKVALTAVMRRLLVYMNHQLKALQATQTDTKLQNAKIP

SEQ ID NO: 341606 - protein, 319 aa, unidentified
MRKVVFVGVDVAKDKLDISFTCDGQKYDSLTILNNEGSILGFFDYLKTTYKKSEFFVGYEATSNYMHLLQKLLCQQDFKQIMINPYMMSHYLKHLNSRTKSDLADSKGIAKFIQTLDQEDFKTIFNQNDKTLRKYTSSINLLRKLDTQLKNFIHSQKENPIDSLDLFLVSLKLTIKETKKGLEKEAENVLKQLFPHVIELKEQIKGVGYALLLELVPIFLKSENYTLKQLQSFVGLSPRIFQSGTSVHKKESMSKRGSSLVRKLLYLSAMSAVRYNDIIKEKYNRLVEGGKNKMVALVACMSHLFRAVYVKFHQGLVNV

SEQ ID NO: 341607 - protein, 466 aa, unidentified
MSESVTSGGPRVGTLAQAPPVSETGSAALGYLGLDVGQSEVTACLLLSDGREAVRRWSVPNTRLGAEVLVGRVVELAEQHGLGRLRIGLEATGLYWWPLACLLNDTPALQGLQYEVYALNPNLVHGLKKVYTDTGKTDPRDAFLIAERLRIGRLPAPFQLDVVYAPLQRLTRYRMHLSQTLAREKGYFLNFLFVQFSGFSQEKPFSDTFGPTSQALLEQFSTEELAQASLEDLTSFIQQQGHGGFTDPRLVAASLQRAARQSYQLNSALQPPVGLVLAMTRATIRILQAQLVTVDQTIARELRAVPAHARTIDSVPGLGPVWTAGLVAEIGNIQRFTDDGAVAKYAGLVWPPHESGDFQAQDSRLSKAGNSYLRYYLVEAANSVRQHCPEYRHYYLTKFAQSPKHSHQRALVLTARKLVRLVDALLRTGSVYRSPTFDQNQEEVRTTPHAARPRPQRRARLVTSAN

SEQ ID NO: 341608 - protein, 441 aa, unidentified
MAVEFVGGPEQAEFMARVRGLDPSRVLLVPVDVGKSEAMAMVTDLRGEVVTSPFKFALTASGAKTLSDRTVSASASRSAALCRVGVETAGHYHRPLVEHLVAGHVEVVELNPAAVKAARGQQLRARQKTDERDLAAIADLLIRGAGRPPQQRSAAVLEQAAWVGHRRRKVDMGRRLRQQIHAQLDLVFPGLGGCFGDIFATKSGRMILTEFCNPERVVRLGPARLAGCARTRGIRMTVAKSELIVACARDALTPQSSQRDLVEQHLAADVAMFLTVEAEVLRCERELAALIASTPAGVLTSLPGVGVVRASAYGAAIGDHTRFTNADTAYAFAGLSPASYESAGRARPGLGITKSGSVTLRQAILELGKGMGMHHPDFADYRTRLISRGKPRPIAAVAVAHRAHRVAFALMRDGVVFDPTHPIPTSAGRPVTTSQPTPETT

SEQ ID NO: 341609 - protein, 322 aa, unidentified
MAMLSFGGIDVSKHRLDVILLPEGECASVSNDAAGWAKLVEQLRGFSIGAIGLEASGGYERGVMRALLAAGISVRQVNPLKLRQFARASGVLAKNDPLDARMIASFVAIMPTRPAQRLAPTTERLVEILAVRRQLTAEKIAAENASRLLEDAMLRGLSRRRIGRLAADIGLLDKRMVELVTTDDALVHRYRLLCSMPGVGPLLACTLIALLPELGAMSRKQIAALVGVAPYAFESGTMKGRRCIWGGRAHVRQVLYMAAMSASNWNPVLKVFHNRLKAAGKLPKIALVAVMRKMITTLNAMVRDDVVWADRVSGRHSVPIAR

SEQ ID NO: 341610 - protein, 392 aa, unidentified
MVCVGIDVAKDKHDCFIISSEGEVLADVFTIANNRDGFETLLWKIHTCTNPADEIKVGLEATGHYSYNILGFLLEKGLHTFLLNPLHTNLYRKSLSLRKTKTDRIDARTIASMLMSDVELKSYTNTAYHNEELKSLTRYRFDRIQMRAELKRSVSRLITILFPELESLVPTLHMASVYAVLSEFPGASQIASSNLTRLKTVLLSASRNHYDREKAVEIREAARRSIGSVIPAKSLELQHTLRLIRELDKEINEIEAEIKAIIDDMAPPILTIPGIGYRMGAMILAEIGDFSRFDSPDKLLAYAGFSPSTYQSGKLNATGTHAHMEKRGSRYLRYALFNAAQCVCKWEPSFKAYLNKKRAEGKHYFVAVSHAVRKLVRLVFALQTSGRVFQPV

SEQ ID NO: 341611 - protein, 424 aa, unidentified
MRFIGLDVHRDFCEVAIAEAGAVRSAGRVKTEPAALLLFAQSLGADDQVALEATGNALGIARIIEPHVRRVVLANPKAVKGITRAGAKTDRIDARTLAQLLAGGFLPAVWLPDEQTRVLRRRISARAQLVRQRTRAKNQVHATLVRNLKGRPPVSDLFGVRGRRWLADQELPADEQETVAACLRQIAFLDGEIGQVERALAEQVLASAEMRRLLTLPGVNFVTAAALLAAVGAIGRFPTARQLVSYLGLDPRVNQSGSEPARHGRISKQGPGETRHVLVEAAWHASRTPGPLRAFHQRVAGRRGRNVATVAVARKLAVVAWHMLSRGEDYAFARPSLTREKLRRLELMTGAERQKGKRISVWVTREQHQLDKELAAQAELAYRRLAQDWQPTISKGTGAAPGRASRRPSSGQAARQETAPPPAL

SEQ ID NO: 341612 - protein, 490 aa, unidentified
MECIAIGIDISKGRCDVAILNQSGTLLAGSGGYDDIRRDHERLRDVLLALHDKHPEVCVVVGMEATGGLERNWMAFFRTEKRWEKFVFAHRLNPLAVKRYLESDLHRKADDASAALGIAQFVMEKHQERSPAPDAFDGKVAFYRVVRTQILRRTQTVQRLQSLLPAVHPGLVQYCRKGVPDWVLFVITRYPTAGKLTRAKAEKLADLPHVDLKRAQSLIEGAKESVAALNDEGTALAIGAITDEIRDLDRRIDDGKERLKALLSDDPRVALLDSIIGIGTWSAIALSLEIGDVSRFATVRSLIAFAGLDPRTSVSGDGEVKHGISHRGNANIRATLFMVAQVALVHNPVIAAFYQRLTSGEKPKPGMVALTACMAKVLRIAYALLCSGRTFDAEYEENRAASAAATRQAGRSASASATPALLQEQAPALEPQLDAPITRKEARRRREMAAKNAAAPGSGKNEVRPQTGTGASAPPLSRSQAAAKRPLRRT

SEQ ID NO: 341613 - protein, 364 aa, unidentified
MNATTVRPGRELAATVAIDLAKEVFELAFADGNGRIIERKRLGRGPFQRCLINRPPLRVVMEACGSAHYWARRLARLGHSVVLLPAHHVRPYVRGNKSDRTDAAGLLEAARCQDIHPVPAKSPEQQGIQALHRIREHYKAQRTAGINLVRGLLREFGVVMPAGAGNLRPATLAALEDGDNELPMELRHALAGLLENIATCEAAMDDLEKRFTAMARNDPRCQRLMAACGVGPLTATALCAGVGELSRFPSGRHLASHLGLTPREHSSGHIRRRGRITKRGDVYLRTLLIHGARAAINAAQAARKRDRCLDRTQQWALELADRIGHNKAAVALASKTLRRLWAAERHGARFDPNHRSLRPSVQAA

SEQ ID NO: 341614 - protein, 315 aa, unidentified
MSEVDCFAADVSKRELVIAVYPGEVGVKRIANQDAAISAWLDTLPAGSVIAMEATGTYHRRLADLAHGRGLVVYVVNPRNVYYYVRGMGARGKTDPSDAKLLARYVAHERAQLHPYVPPSALCERLTTLLERRAVLVRSRQALTQSLAELPALGREKRNLFKAIASLLSGIDRELAALTSSDASTATLVTRLKTISGVGPLVASLLCALFKRFAFRHADALIAYLGLDPRPDESGQHRGRRRLSKRGHPEWRRLLIAAAMSAARTKIWRDYVTLQRAKALPATAVHVILARKMLRTAFALFKNGQEFIPPRVRPT

SEQ ID NO: 341615 - protein, 338 aa, unidentified
MTPDMTRVSFPETRAALMANHHLQTRRSTLSQSRTLFIGMDVHKDAMAVASVAQDHGADVPSLGAIGTRQCAIDPLLRTRPSKATHLVFVAEAGPGGAWLSRYLTNKGDACRVVAPSLIPQKPGDRVKTDRRDAGPLARLARAGARTAVSVPKGEDAALRDLTRAREDTMSALKDAQLRRKAVVLRQAIRDVGRAHGGPAPLRWLSAVVGPTPAQPIVFHDYIRAVHDHPERLQRLEQARHDPVQSWRVHPVVEALQALRGGPCTVAVTRVADIGDLTRVDHPRALMTCLGLIPSESTSAERRRQGSLTQAGLPMPDGRWLKAPGPPALPSRSVDIGT

SEQ ID NO: 341616 - protein, 476 aa, unidentified
MNCAAQPFRWHQQEELEMNPKRSKSRHGRKMPMVHPNAAAIDVGATMHMAAVRADRTPEPVRSFGTFTADLHRLVDWFTQCGVETVVMESTSVYWIPVFELLDARGFTVFLVNARDAKHVPGRKTDVSDAQWLQRLHSYGLLRASFRPKGQIAELRSYVRQRERLLEYAASHIQHMQKALTEMNLQLHHVVADITGATGLRIIRAILAGERDPEALAALRHYSCHSSAETIAKALTGSYRAEHLFALDQALALYNAYREKASACDVRIEAVLKELSIHRGRDHGAVPPPRRRHRTDQVNALAFDVRAALFALLGKDITAIDGLGAYLSLKLIAECGDDLSSWPSAKHFTSWLGLAPSNKVSGGKMLSSRTRRSGGRAAALLRLAAVTVGRTDTALGAFYRRLSSRIGKAKAVTATARKVAVLFYNAVRHGMEYVDPGASSYETRYRTRVVNNLHRRAKAFGFVLQPLEPKAGAVVS

SEQ ID NO: 341617 - protein, 360 aa, unidentified
MDDASTSEQAKVTVGLDLGDRYCQICVLDETGEVTEEGRVTTKPEALRRRFSGADPLRIVLEAGTHSPWVSRLLAELGHEVIVANPRKLRLIYQNDSKSDRVDAEYLARVGRLDPALLAPLAHRAAETQSDLALVRSRNALVRARTRLISHARGCTKSLGSRLPTCASDVFARKAGPSVPEELAPALAPILTIIQNLSEEIHALDQKIEDMAKERYPETALLSQVPGVGTLTATVYVLTVEDPQRFPKSRSVGSYLGLRPRQASSGSLEPQLRITKAGDDHLRWLLVSAAHYILGPFGPDSDLRRWGLALAAQGGKRGKKRAVVAVARKLSVLLLRLWRTGEVYEPLRNARLRGEAVSTT

SEQ ID NO: 341618 - protein, 315 aa, unidentified
MSDVPCFIGIDVAKAQLDMALRPSGERWAVPNDASGVAMLVERLQTLHPTLIVLEATGGLERAATSALAAAGLPVVVVNPRQARDFARATGQLAKTDALDARALAHFADVIRPTPRPLPDAQTQELRALLGRRQPLIGMRTAEQNRLAGASERLTKDITAHITWLNVAIATLDDDLETMLRASPLWRANDDLLQSAKGIGPVSAHTFLLELPELGTLTRQQIAALVGVAPLNCDSGTLRGKRTIWGGRAHVRTVLYMSTLVATRFNPQIKVLYERLLAAGKVKKVALTACMHKFLTILNAMLKHRTPWQPQEVQS

SEQ ID NO: 341619 - protein, 401 aa, unidentified
MSAFVDVRFAQKAIELLHRSEMTRMGWTGRAPPATVVRVREGLGKERNSIMPHTSTVHAVTAIGIDMGKNTLHMVGLDSHGAIVLREKVSRVRIASRLANLSPCLIGIEAGMATHYVARELAALGHDVKQVPSSYAKPFRQGHKNDFRDAHAVAEAVQRPTTRFVPAKTNEQLDLQALHRVRSRLVSERTALINQIRGFLLERGIIVRQGLRFLRQLLPDILAKRTDVLSPRMIRIVVDLAGDWRQLDERIETVTDEIEVLAKSDDSCRRLMTVPGIGPIISSAMVAAIGGGAAFARGRDFSAWLGLVPKQMSTGDRTILGRISKRGNAYLRMLFMQAARVILLRPANWPKHGFGCWLVHAAQRLHPNVLAAALANKLARIAWTVLTQERSYEARVTKAVA

SEQ ID NO: 341620 - protein, 331 aa, unidentified
MTAILGIDVAKDSLAVALWRAGQAVEQAEFANTRQGFNDLQRFLKKRRAVPVHACLEATGRYWENLADFLVERGHPVSVVNPARIKAYAHSQLTRNKTDQLDASTIADFCRTQQPALWTPPAAAWRELQELVRHLDDLETDRQRQRNRLHALQQGAHPSPTVTAHLQQQIAFLTQQIEQARQAIQDHINRHPDLKRQRDLLDSIKGIGPLTAAKLLGEYGDMSQFSDVRQVTAFAGLNPRHRQSGSSIRGKTKISKVGRPSIRAALYMPAVVAKRFNPQLAALAARLASRGLTPMQIVVAVMRKLLHLAYGVLKSGHPYSPSFVPPGAAYA

SEQ ID NO: 341621 - protein, 347 aa, unidentified
MRFYTRQHKHYCGIDLHARKMYVCIISNRGKVKVHKNIKTDPELFFELIFAYLDDLIVGVECVFCWYWLADFCAQHHIPFVLGHALYMKAIHGGKTKNDRIDSYKIASLLKGGNFPMAYSYPAKWRATRDLLRRRMYLSRRCSELVAHIQNTNTQYNLPAFKKKLSRKYNHDGVAERFKNPAVRKSVEVDLVVIQALNQILKKLEWHIEKTARQHDYHTLYLLRSIPGIGQILALVILYEIHDIKRFPRVQDFSSYARLIKPVKESDGKWAGHTNKKIGNHHLKWAIKEAAILMLRDSHQAKYYVSKLTHRYNKGKALGIFTHKLGRAIFFMLKNKEAFDMKRFFAR

SEQ ID NO: 341622 - protein, 374 aa, unidentified
MNKSREAVSKEISDQANQENPVLGRVARILKLGLDLHYRQVTVAMQEDGGRIKAVGKMSYELFLNWIQKKLAEGWQIQSCYEAGASGYWLHRLLVAMGVNNLVVVPKVMDPGGKKQKTDQRDSGQLCDALDRYLRGQDKALSVVAVPSLEQEEKRALIRYHRQIMADRGRCESRGKGLLCAQGIQVQGPWWGLKGWLALQHDPQLKDWMKEQLRGWRSKILSADKEQSLLRERIEALAPALLPKGLGAYSAVVLEYELRGLGRFQNRRQVASMTGLCPGIHLSDGRGKEGAINRCGIGLVRWTLVEAVWRLVIWQPHYPPVRRLATGLVKGKRAKKRLVVQAARRLAIDLWRLASGQTTPEKLGLVMQSIPHKK

SEQ ID NO: 341623 - protein, 432 aa, unidentified
MISVSPPVAPENSVFAAFVGLDWADQKHDLVLYDQRGGRPEHRELIQTPEAIDEWACGLRQRFGGRPIAVCFEQSRGGIAYALLKYDFLVLFPLPPARLASYRESFSNSGAKDDPTDAALLVDYLLRHRDQLRVWQPDTPATRELQLLAEARRDAVDQRTRLSNQLTAVLKRYFPQAVVLVGHDVDCPLACDFLSKWPTLAAVQAAAPTTLRKFYYAHHSRNEERIAERLELVKSAIPLTTDQALIQAGVLQVQCLIGQLRALAKAIEKYEARLNELMDQHPDAALFRTLPGAGPALAPRLLVAFGSDRQRFQSAAELQSYSGVAPVTKRSGKQCHVHRRWACPKFLLQTFHEFAHCSCKRSAWAKAFYLQQRSAGKGHHAALRALAFKWIRILFRCWKTKIPYSEERYLESLRRRNAPLLAFIIAAESTDA

SEQ ID NO: 341624 - protein, 316 aa, unidentified
MTSESVVGIDVSKRSLEVQMYGEAKGRKIGNDVDGFTTLIEQMKAIQPELIIFEATGGYESRAVRALSEAGFAVAVVNPTRVRRFAEGLGILAKTDKIDAQVIAHFASVVRPPVNSRQTPLEEQLAAFVERRRQLLVELTAEKNRLSTCPEWVRVDLEENIAWLEERIDRLETDIQVCIGLKPEWQERAEIIDSVPGVGVVTATTMVAELPELGQLNRQKIAALVGVAPFNKDSGPKKGKRRIFGGRSGVRRTLYMAALSATRFNPVIRAFYEKLLQRGKEKKVALTACMRKLLVIINSMVRKGEAWRFSPAISMA

SEQ ID NO: 341625 - protein, 355 aa, unidentified
MTSTKYIGLDVHKESISIAVLNSAGKVVMECVIETKASTILQFIHGLRGDVHLTFEEGTWAGWLYDLLKPHVTELVVCNPRKNALLKEGSKSDRIDARKLAELLYMSNLSSVYHGEHGLRMLKELSRSYLTITKDLGRVMNRLKALYRGWAIPCTGTQVYAPHYRSEWLSKIREAGVRRRAELYYQQLDALRLVRQQARKELLAEARKHRATKLLRQIPGIGPLRAAHLVAVMQTPHRFRTKRQLWNYSGLGLETHDSAQYRVVEGQLQRSKKPVTLRGLNDNHNHDLKDIFKGAAMRASTAAGPLHDFYEALLAKGRKPTMARLTLARKIAAITLIVWKKEVRFDANYLKQQAA

SEQ ID NO: 341626 - protein, 350 aa, unidentified
MREVCTIGLDIAKNVFQVHGVDRNGNQLFNKKIARSGIKAFFANTPPCLVGIEACGGAHYWARELQALGHTVKLIPPHIVKPFVMRNKTDAADAQAICEVVRRPGTKFVSMKTEEQQDLTALHCIRERLIAARTSLVNQTRGLLYERGIIFNQGIPAFEKGIKEFLEKESNCGIFKDMLQEQWKEYVSLNERIKVLTERLKDMATSDATCQRLMKIPGVGPLTATAVVGKIGKAQEFKNGRQFAAFLGLTPREHSSGGKQRLLGISKRGDSYVRKLLIQGARAVCMVWNAGECVPKGDRRKLWLREITLRRGKYCASVAQANKTARILWNVLAKGEEYDAQKNGNKAETM

SEQ ID NO: 341627 - protein, 362 aa, unidentified
MNKCRLNTELSSHEETRSQFNGSKSVIKSAEGRIRRYVGLGIDVHQDFYVVVMQVGGSNPKPPQRFAKEAFLHWATKLTRQGSQVHAVYEACGFGFGLQRQLSALGITCHVVCPQQLDEHNRRVKTDSLDAKALCLKLDRFVQGNKDALALVRVPTEQEEQLRAMHRQREQLVKARKQLEAQGRSLMVNHGMEPLKNWWKPRTFAALSVPAWLKELLSNSQPILLALQEKIRLLTMQLQAAAGPDQPRGLGALSSVIIDREIANWHRFNNRRQVGSYTGLCPGEHSSGNTRLQSCVTKHGNPRLRAALVELAWRLVRFQPNYRPIIKWNEVLRNGALWRWPADWRWIYGASAPAECAQKHWV

SEQ ID NO: 341628 - protein, 336 aa, unidentified
MTLYCGIDLHSNNHVVVVIDEQDRRLVDKRVPNDLEATLRLLAPYAEELHEIAIESTFNWYWLVDGLMAHGYAVSLVNTSAAQKRYGDLKYSDDRHDAFWLAHLMRLGILPTGYIYPKEQRGVRDLLRRRAGLVRIATRQLLSIQSQLWRSTGVRVASQLIKRADFQPQLEDAHEQAAIASGLAVLRTTQCEIRRLERLALQAMQPRPEYQVLQTIRGVGPVLGLTISLETGPIDRFAGPGRYASYCRLVDSKHLSNGKKKGEGNAKAGNKYLSWAFSEAAHFGVRLEPRAKRFYERKRAQRNGMVAIRAVAHKYARAAYVMLRQQQPFDAQRLFH

SEQ ID NO: 341629 - protein, 400 aa, unidentified
MHLTANISGPQKNFIAIDLHSDNAVICVRRNALNKAGELVGKNIWCGRVSIRDGLDNFIKALLPYCQDFDHVAVVESTYNWYCLADVFEERGWLLRIADPSTVSQANLKASDDRTDAQYLAERLRVGSLKHYLPLNYSSRALRDLCRYRMAMVQDCASSKIKLINLYRNQLSKNMRVADLLDRCRNHMQSNYRFDPDILEEFKDPNIRLRVAFEVSRIAMLEEMIEECNAEIQKQCKDQELVKLCKTIPGCGPVLSAVICTEIGTMQRFKSAGDFVSYCRLCSTSKLSNGKSKGLGNAKNGNAYLSWAFTEVAQYASRNPVIREILQRLLRKYGGLRVKAIRTLAAKIARVTFYVLKNRQPFNAAQCFGDELTKGIKQKLALKPLSKDDSVVLPIVAGLA

SEQ ID NO: 341630 - protein, 406 aa, unidentified
MSVHAAAVTASTVVVAVDVGKSSAALSVTDAGRHRLLGPVELSMTRSALVDLVEKVRGVLPGIGGPVKVGVEAAGHYHRPLIELSAWPAGWEVLELNPAHVTEQRRVQGRRRVKTDAIDLEAITELLLAGRGVPVTGHDLVIGELVAWSAHRARRIQTRTATKNQLLGQLDRSFPGLTLALPDVLGCKIGRLVAAEFADPARLASLGVTRLIRFAAARDLQVRRPLAERLVKAAGDALPTTDAAVARRVLAADLVLLGDLDSQIVAVEAELARLLPVSPFHPLTSVPGWGVVRASSYGAAVGAPTRWPGSAQLYRAAGLSPMQYESAGHRRDGSISREGSVELRRALIDLGIGLWHNEPAAKAYAAGLKARGKRGGIIACALAHRANRIAFALVRDQAAYDPARWT

SEQ ID NO: 341631 - protein, 321 aa, unidentified
MTQENFVGIDISKDKFDAAILISPGKYLDKVFENTTTGIKEFHQWLKKHTQTPWVCMEATGCYGQKLADYLYTKKIPVSVVNPLKIKHYGRAIFMRNKNDKIDARLVAQFGQALRPRLYTPKSLEQKAVNDLVNLLNMLKMNFTQFTNQKPSVQTKVAIKITEKLISNLKKDIKKVENKLAELVEKDLDFKRQFALITSIKGVGKLTAYRVIARIQDISSFENGKQLGAFIGTAPRQCQSGKFQGKTRMSCLGDAGLRKALYMAAIVAKRHNPALQPFVKRLAAAGKAPKAIIGAVMYKLVRWIFAVLKHNKPFDMDFHSV

SEQ ID NO: 341632 - protein, 407 aa, unidentified
MHEGGFDPTAIEVFVGVDMAKGDHYAQAITTTGEALFDRAVANDEAAIAGLIRDAAAHGAVALVVDQPASGAQLLLAVARDAQVPVAYVTGLQMRRAAELYAGAAKTDPRDAWVLADFARRNADRLTWLAISDELLAELRVLNGRDVDLAADANRIVNRCRDALVAISPALERAVGDRLDKPGVRDLLARYPTPTALRAAGPARIRKTIAKRSPRLADKVTAAVVDALGSQTLTLPAESTWGQVIAELAADLDRVHARRAELAAQIEEVFLKHPLAEVLVSLCGFGPRTGARTLAEIGDPARFANGGRLAAYAGLAPIDRRSGRSINTATRARNGNHRLKNALFLAAFIAARHDPIARGYYQRKRAEGKDHNAAITCLARKRCDLILAMLKHATPYDPTRHQPALAA

SEQ ID NO: 341633 - protein, 392 aa, unidentified
MYIVGIDIGKNHHEASIVSPEGKQIGRSLRFATTHKGADSLMSFIFKNIGNSPCVFGMEAIGHYWYPIYSFLKAKGYTICVINPIQSDSLRKMYIRQTKNDSIDSFLIAEVIRFGQFGTTSMADENILAMRQLCRYRDSVISSRTEIKLRIGTIMEQIFPEYEKQFSSLWVSTSMGILEKYLTPENIENAPIDELFEIIKDKSHNRLTKAKAISIKEAAADTFGIKIAQDAFSFQLKQLIDRMNFLDKQIEALDIEIMKYYEQFDCYLHTIPGIGMIATATILAEIGDIHRFKSSSALVAFAGIDPTVRQSGEFSSTHNHMSKRGSPYLRHAIFLAATTCSFHNSPLNAYYKKKREQGKHHLTATGAVARKLTTVIYAVLRDGKPYEPKKFC

SEQ ID NO: 341634 - protein, 315 aa, unidentified
MSEVPCFIGIDVAKAQLDIALRSSGERWAVPNDPSGVTMLVERLQPLHPTLIVLEATGGLERLVTSVLAMAGLPVVVVNPRQARDVARATGQLAKTDALDARALAHFADVIRPTPRPLPDAQTQELRGLLGRRQQLIVMRTMEQNRLAGTSGRLQADIEAHITWLNERLATLDDDLETVLRGSPLWRENDDLLQSVPGIGPVCARTLLLELPELGTLTRQQIAALVGVAPLNCDSGTLRGRRIIWGGRAHVRTVLYMGTLVATRYNPRIKAFYERLLAAGKVKKVALTACMRKFLTILNAMLKHRTPWHAQEVEG

SEQ ID NO: 341635 - protein, 370 aa, unidentified
MAQPTPIFVGLDVHKDSIAVAHAQGECADPPVFVGAIGARQADLTKLIRRLQAKTSNLVFAYEAGPCGYGLHRYLTGQGFSCQVVAPSLIPKRPGDKVKTDRRDAVDLARLLRSGDLTHVYVPTVEDEALRDLCRARDAARLTLKNAKLRLKAFLLRLGLHYVGRADWTDAHRRYLAKVVCPTATQQIVFQESVRAVDEQVDRVHRLEAELLERAPAWRLYPVVQALQALRGVQWLVAITVVAELGDLTRFDSPRQLGAFVGLVPSEYSTGPSRRLGAITKTGNGRARRALIEGAWAYRHPAKVSEHIQRRIDTLPKPIQDIGWKAQVRLCKRFRRLTARGKHPNVAVTAIARELIAFMWAIAKEVPITT

SEQ ID NO: 341636 - protein, 330 aa, unidentified
MTNADVRESTMPPLEFVGVDMAQQGFEWAVHGVRGTHSARNDDSGFEALREALQGRNIGLIVIEATGGLERALAGFLLHHGLPVAVVNPRAAREFARSMGHLAKTDAIDAVALAHLAQTLAAKADQSGVRLTPPSAAVELLQAMVARRVQLLAMRTAEKNRLGGAVRVLHQSIEAVIKTLDKQLAKLDRDIDAHLEQHFTDQAQRFDAIKGLGMTTCAAVLAFMPELGTISGARAAKLAGLAPLNNDSGKERGKRHIWGGRSIVRSALHMATLSAVRFNPVIKAFYDRLLAAGKPKKVALTACSHKLLRILNAMARTGQPWDESLHAITP

SEQ ID NO: 341637 - protein, 410 aa, unidentified
MSESPYAFYVGVDWASETHQFTVLTPERRLEAERRIEHTGRALGEMADWLTALADGEPARIAVAIEVPRGPVVETLLERGFHVFAINPKQLDRFRDRHSPAGAKDDRRDGFVLADSLRTDRPAFRQVHVDDPLLIQLRELSRAEEELQTELRRLSNRLWEQLQRFYPQVLRLSPAVDEPWIWALLQLAPTPVAARALRRATLARLLARHRIRRVTAETVLAELHSPALRVAPGTTEAAREHIALLLPRLQLLHEQRGRCARRIEQLLDALEGSDAEHRDVTVLRSLPGVGRVIAATMLAEAARPLAERDYHAVRTQGGVAPITRQSGKSVLVSMRYACNHRLRNALYHWGRVSAQHDPSTRRHYRALRQRGHGHARAIRGVIDRLLAVLMAMLRTGTTYDLARRRVPAAA

SEQ ID NO: 341638 - protein, 350 aa, unidentified
MMKKIVRQVLGIDVAQKELVVCLGRVYDVDWVLELYGHRTFPNTDKGFAAMVLWVKKLTMEDIPVRYVMEATGVYHEALAYFLEGKGHEVSVVLPNKISNYFRTLDVKTITDKTASEAIARFGLERKLDNWQRPKEIFRELKQLTRERDQIVEDRTVSKNQLHAEETQAFPNKRSVTRVKARIKLLNKQEVEVKAEIAVLVKREKEVALSVAIICSIPGVGLLTAVTVLAETNGFELIRSKRQLTSYAGLDIQQKQSGTSVKGKSKISKKGNRYLRKAMHMPALSAIRNEERFTTIFVRLVSKHGVRMKAAVAIQRKLLEMIYTLYKTNKPYDKDFLKNEVSKGEQKMAA

SEQ ID NO: 341639 - protein, 309 aa, unidentified
MDTITIGIDVAKDRLDVAVRPSGELFVIDRNAAGLERLVERLKPLAPRLVALEATGGFETVAAAALAAAGVPVVIVNPAQVRAFAKALGQRAKTDPIDAAVIAHFAEATRPEPRPLPDQATNLLSDLVARRRQIIEMIVAERQREKRATQRLKRSIARLIKALEKELASVDTDIDDAVRGSPAWREKENLLASVPGVGSVIARTLIAELPELGVLDRKKIAALAGLAPFTRQSGQWRGRSFIGGGRVSVRSALFMGAMSARRCNPVLKAFFERLVAAGKPRMVALVAVARKLLTILNAIVRDQTPWQTA

SEQ ID NO: 341640 - protein, 331 aa, unidentified
MMNASEMIFVGIDVSKDTLELALDDKSKTQCFNNNEQGIKQLLARINGVKNGDESVSVGAIVLEATGGFERQAAVALCEAGWPVMVINPRQARDFAKAMGYLAKTDAIDARVLSHFARTLHQSDRRERLLMKLPDAQQVALQALLTRRSQLITMRVAEDNRLAISHKSQRKSIETVRKVINKQLAGIDSNIDGLLQAHFADKLSLLKDFKGIGIGTQASLMATLPELGLLTHEQISKLVGVAPLNCDSGRHKGKRFTWGGRVDVRSMLYMAALSAVRYNSVIKPFYERLLAKGKPKKVVLVACMHKLLVILNAILKSGKKWNPLHLKTITA

SEQ ID NO: 341641 - protein, 596 aa, unidentified
MLPQHAPAQQSPRRYGVGIDTSRYGHYAAFLKDDLQPAADELQFPESAAGYALLRQRLEAIVQRHGVRHFVVRLDAAGPYADNLLHFLHSFAPPKTATSATPAPFTLTLSCGDPQRNKNYRAALFGSKKSDPVEARAAARFALTEKPRPDTPRSRELRLLRQVAGRLQAVVRQRTRLLNQFHHLLALTFPELALLTKDLAAGWALELVHRYPTASLLAQGTPTDLANIAYLPDRHVAALLAHARTSVASLDGPTAEELLREQVRQLRDVSARQQRLEKLLVSAYHALPSDNLLATIPGIGDVTAAVLTAIVLDINRFATPHQLVAYLGVLPIEVASGVDRDGQARAPRRYVMSRRGNDLARRYLWMAALSAIRCNPAVRALYARVVAKHPQEKAIAVGHAMRKLLHLVFAVWKTGKPFDPQHYPWQTPAHLDGEDSATPPASAPREPAPAAAEQAAGHKPDALPAGSVVTAACPDSVAEAASVGEGLFVDFAHLKRQLSLAAVLDHLGLTARLRGRGPQRRGACPLHRGDARGGTFSVNLDENVFHCFDKKCGQQGDVIDLWAALHGWSLRQAALDLVQTFGLEPAATTGTEKRHG

SEQ ID NO: 341642 - protein, 375 aa, unidentified
MSKKLSRLGCGVDVSKEDIYACFGGVRPDGSHVVKGSRKFGNNSSGIKQFIGWLKKKLVKYNAGSDVPFQMIMEPTGVYHEALLAFAYEEGLPVCLVLAQRVKYYLLSLNQISKTDKVDAKGICKMACQTKQRQWQPCSPNIMKLRSALRHRKSLLNSQTRYKNKLHARKHSSWSGSYEEESLQRLIAILDEELAAIEKIITKLYKQDEVLKDRLQKILDSVHGVGLITALTVVAETNGFTEIRSRKQLARFAGYDIIQNQSGQREGRTKISKRGNSSIRAVMHMASLTAIQKEGPLQAMFLRIHRRNPKIKMKAYVAVQRKLLLLIYTLYQKDAAYDPDYHKELQKELGKAKKGSPHFKSGLHGIDAEKSALPI

SEQ ID NO: 341643 - protein, 381 aa, unidentified
MPDVSSTAPEQVRLWIALDVHKHSIVAATLPPAGGTPELARIENTERAICRFIDRVGGSDGLAVSYEAGPCGFDLLRLLGRLGVACDVIAPSLVPVRAGDRVKTDKRDAKKLVRLYRAGELSFVQAPTPQQEGLRDLVRCRDDLMCARRAARHRIAKALLRYGHIFREGKKSWTRQHYAWVRRQRLDDELAQRAVDHMLAQLDSLDAQIAVVDHELEQIAAREPWSDAVAWLCCFRGISTRTALGLLAEIGDFRRFGSARELMSYLGLTPSEYSSGDQQHRGHISKCGNQHARRLLVEAAWHYRHRPRRSQRANRLAGRVPADVSTRAWQAQVRLHHRHRALAEHGKRSTVTNVAIARELTGFVWAAMTHQPLRDQETAAA

SEQ ID NO: 341644 - protein, 344 aa, unidentified
MEHYAGIDVSLESASICVVDATGRIVREAKMASEPEVLIGWFGGLEIVVARIGLEAGPLSQWLYAGMRDVGLPVELLETRHVRDAFKTMPVKTDRKDARGIAQLMRLGWFRSVYCKSLPAQEVRALLAARKLLQTKNHDVEMSLRGVLRGFGLKVGPTTPRTFASRIRELVAGHATLSTIAEALLAARGTLFEQWQKLEKRLRSLAREDRRVRLLMTAPGVGPIVGLTYASAIDDPGRFRSSKAVGAHFGLTPKKYQSGETDVTGRISKIGDGGVRTALYEAANVILTRPVKGSTLKSWGMRLAARAGMRKAKVAVARKLAVVLHRMLADSTEFLADKAAAAAR

SEQ ID NO: 341645 - protein, 418 aa, unidentified
MKDIKTEKGKKINRKTLIVAFDIAQEKHVVYIRCPDGREEKPFVVFNRREEYDQMWERISRTKEAYGVEEVVVGFESTGPYAEPLVHYLMKKEVKLVQVNPMHTKRVKELRGNSPNKTDEKDPQVIADIIELGNYLTVVIPEGAPAELRRLTQARERAGERRTMLVNQVHSLVSVVFPEFLMVMKDIKTKTAQYLLKQYPRPQDIVGLGSEGLEATLKKISRGRLGKERAEALYEAAVNTVGVREGQGSIVFEIKQLVAGIEEIERSREDTEERMREYLKEVPYSRYMLSIEGIGEVTVAGLIGEAGDFTKYKTAAEITKLAGLDLFEVSSGRHKGERHISKRGRPLMRKLLFYAAINVVRKGRIMHERYERYLQRGLPRMKALIAIARKLLGVLFALVRDQREYVRNYEEKPLKQVA

SEQ ID NO: 341646 - protein, 406 aa, unidentified
MGLSSGEVLEEFEIEHRPEGFHEFFSRIEKHRRKKNYPVAVAMEGYNGHARPLDSMVRERGYRLYNLNNLKFARFKEIFPGAAKSDRIDARKGLELFQLSDHLPLAKEVLQEVRSTAPENEVLKRLTRRRRRLVNERVRVVNNLQADLQAVCPGLLEITREASNQWFLNFLLSADTFHQLARLRRSTLLKIPSVGVKTAAIIEGWQKRAHFSQEVNWVGEMIQEDAKRCLELDEKIKRLETKIAEVARASKIAKLLRTIPGFGAVCSSELAGEIGTIERFSSEGSLSLYLGMSTLDNSSGKYRGTKAPKHVNTRAKAAMMIAVDRHRKYVPESQRYYEKKRSEGKKHNQAIRALGRHLSRIIYKMLKEDRPYELRLEKGNTTTKVSPRSRVKTQIRRPKISAKGKN

SEQ ID NO: 341647 - protein, 343 aa, unidentified
MTISMLGIDIAKNTFQLHGADNSGKAVHKKRLARRELAAHIANLPACTIVMEACGGANYWARVFQGSGHTVKLISPQFVKPFVKTNKNDANDAQAIVEAASRPSMNFVPIKQVEQQDIQSIHRIRTRVVKNRTALINEIRGLCLEYGVVLIPGAARVKSSLCVAIADGDNELTPSSRESMQDLYEELVDVEARVKNLNTKIRQLCRQNENCQRILKIPGVGELTATAIVAAVPDPGEFRNGRHMSAWLGLVPRQSSSGDKQILLGISKRGDRYLRTLLIHGARSVLSHYKELDNDYNRWVGRKKATLSHNKAAVALANKNTRIIWSMLSSGEEFNYGVQTAVA

SEQ ID NO: 341648 - protein, 297 aa, unidentified
MTFVGCDLHTRMQQVAVLDTETGEISERQLPHDGMAVEEFYAALPRPVTIGIESTGYATWFHTLIQRLGHTLLVGDAAKIRAMVVRKTKTDRRDALHLLDLLRHDRFPTVWVPDPATRDLRALLAHRMRLVRIRTMVKNGLHAIALNYRLARGSKLLRQAGLVQLHALALPPHTAQRRDQSLELLAGLTTQIRTLDDAITTAALAHPDGPRLITHPGVGALTALATIVVLGPVARFHDSKHVVSYVGLAPALNASADKHHLGHITKQGSPLLRFALGQAAAHAARMDARGGRQRSPQ

SEQ ID NO: 341649 - protein, 310 aa, unidentified
MEKVIEYPQIVETGCGLDVHKDIIVGTVSRGNQRFETREFGADTSSLTSLRDWCKQAGVTHVAMESTGIYWKPVFNILEEDFEILLVNARHVKNVPGHKTDKKDSVWLSKLLLSGLLKASFIPPQDIRELRDMVRYKKKLVGQIASEKNRIIKVLEDCNIKLSSVLSSVDGSVGTRIIDAIIFGERDVDILMGFYHGKIKASKEEFRKALTGRITPHHIRMLQFHKKHIEDTEWLIKDIDKEIDKAAEAYKIEIDLLQTIDGIGKESAIAVISEVGVDMSKFPNEHHLASWAGVSPGNNESGGKKKTPKP

SEQ ID NO: 341650 - protein, 450 aa, unidentified
MEILYTNCAGLDVHKKTVKVCLLIHMSDGKTHKEFRTYFTTTEELLKLGDWLKEQGCTHLAFEATGVYWKPVFNLLEGSFEVLVVNAQHIKAVPGRKTDVKDAEWIADLLQHGLLKASFIPSGPQRQLRDLTRYRVRLTEEKAREVNRVQKTLEDTNLKLGDVVSDIMGKASRMILHAIADGETDPGRLAALAVGQVRAPQEQLEAALRGHVTDHHRFLLSEHLTQIHHLEQAIERVSAEIVRRFTPSPPEDTPASQKEAEAEQDLSPVSTSPQESPASSPPILSWAEAVVLLCSIPGIGERTAIGILAEIGINMQQFPTAGHLASWAGVCPGNHESAGKRLSGKTRKGNPWLRCLLVQAAHSASHQKQCYLAEQYRRIAKRRGAKRAAIAVAHSILVMIYYLLRNQTTYQEKGETFFEEQERQGAEKRLVRQLSRLGYHVELQPVALAG

SEQ ID NO: 341651 - protein, 431 aa, unidentified
MKNITKNRRLSEINTTTLIVAIDIGGYEHHARAFDWRGIEQQKKAFKFKNDRYGFESFLSWIERIQWMSGFTEVMVGLEPTGHYWFALFDYLLSRNLRLVITSPISVKQTKEAATTSASKSDPEDPKAIAHVMISGNYQEIYRPQGNYAELRKAYTLRNSVMEQKKATANRIHAWASTYFPEWHKVYTSVQRIGFLTLLRRAPLPSDIVKLGVHGILHHWHECQLLGGISRNRAERLVEEAKCSVGVTEAAEMARVEIQMLLQHYDLQEAQLTRLDKRLEELVEQYPGGKRLMQIPGIDLQIAAGFLAEVGDIRRFPSAAQLQSYAGLDILRNSSGKRRGQSRISKRGRNKLRRIMFVAALCVVNHTSEFRAVHQYYKHRTKNPLKAMQSLIAVACKLLRVFHVMLTKDVDYDPDKVTCGLVVKSSEKQVA

SEQ ID NO: 341652 - protein, 337 aa, unidentified
MKYCGIDLHSNNSVIVVIDDEDRVVARKRLPNELARIVEFVASWRDELAGVVVESTYNWYWLVDGLQAAGFEAPLANTAAIRQYDGLKHSGDEADARHLAHLLRLGILPTGTILPRDERAVRDLARKRIQLVRGRTTHILAIENIMARQFGGRMTSNQIKRLSADDIDRMPIAADVGLAMNANLAVIGALDAQIEVLERRLRERVKPRPEYAFLTSVPGIGQALSTTILLETGPIDRFASVGNYASYARCVDSVHTSNRKKKGEGNVKNGNKYLAWAFVEAANFARRYCPEAKRFHERKKAKTNNIVATKALAHKLARACHHILREGRPFDVTRCFA

SEQ ID NO: 341653 - protein, 332 aa, unidentified
MNNKIYIGIDLHKRSQTWVALGEIGNKLLTKTYPVTPEDINTAVAEVKQLGGNQYSVLIEPVCGWIWVVRQLRQLGMEVLISNPRKIRMIAESLNKTDENDAYVLARLLKTGEVALSYDCSPETRKHRSLSRERCYLVNVRSGLKCRLESIVTRDGNHTFINQAKNRTQIIIANNEVKIHQKAIASIDIIIKEVEEEIKNTIQVSPDIKRLMTIPGVGIVTASTICAEVGDFKNFNKPENLAAFSGLVPRERSSGGKQKLGSITHAGSPYLRYVLIETAMRVRNSKETLSLYSFYERIKIKSGTMKARVALARKLIVIMWYMMNRQQDYVSY

SEQ ID NO: 341654 - protein, 272 aa, unidentified
MQVTTIGLDLAKNVFQVHGIADNGDVAFNRALRRSQMLPFFARLDPCLVGIEACGTSHHWARELIKLGHNVKLIPPVYVKPYVKRGKSDAVDAAAICEAVTRPTMRFVEVKTPEQQAILAVHRTRDLIVRQRTQTINMLRAQLAEFGVILPQGVGHAIQFAKDYLDGEQPDLPEVAGNVIVELGDQLLFLHGKIQRCSREMIQIAKCEKRVALLQTIPGVGPITASAIVATVGSGKQFNNGREFAAWLGLTPINKSSGGKERLGRISKMGDQ

SEQ ID NO: 341655 - protein, 344 aa, unidentified
MDHFAGMDVSVKETSVCILDDAGKILKEVKVASEPQALLKVLGNPAYCFKRIGLEAGPLSQWLFSALAEAELPVICVETRHMQAVLKAQINKTDRNDARGIAQMMRVGVYRPVHVKTLRSQKLRMLLTHRKLLQSKAIAIENDLRGTLRNFGLKVGMVGTVRFEARVQELIETIPDLVVLVEPLLVVRRALREQIVILHRRLLAIVRDDEVCRRLMTTPGVGPVVALTYRATVDVPARFRKSKSVGAVFGLTSCRYQSGEIDWSGRISRCGDEMMRMMLYEAAQSMLHSKKWSWLKAWAMQIARRRGMKRAIVALARRLAVIMHRIWIDGTEFRWTREPATAAA

SEQ ID NO: 341656 - protein, 370 aa, unidentified
MAKRNTFVGLDVHKESIDISVAEDGRDGEVRHYGKIAGDLEALAEVVAALRAPGRRLRFVYEAGPCGFGIHRYLTSHDEDCVVVNPSSMPKRSGDRIKTDRRDADALARLHRAGELTAIYIPTAEDEALRDLVRAREDAVGLSTQAKHRLKAFLRRQGRRYPGRAGWTVAYRRWLADLSFPLPPQHIALQEYRDTIDETERRVERITDQLRQITPTSRWAPVVDALQALRGVSFVTAVGLVVEIGDIRRFDHPRRLMAFLGLVPSEHSSGPSVRRGGITKAGNPHARRLLAEAAWAYQGTARISRHLLMRQESLPKPICDIAWKAQLRLTSRFRKLVARGKAKPKVATAVARELTGFIWAIAQEVPAPRA

SEQ ID NO: 341657 - protein, 348 aa, unidentified
MTQTILLSVDYHDQNCVIRQHAVATGQEQVISVPTTEGDLLRVVAQARAAAGRRGRVIWVQESTTGWARVKATLGERVEFQLANVLQMPLPPKARRRKTDKVDTARLQREYLNGSLPRAHQPPAWWRQVRRLVAYRENLVARRTSLQNWLNRYLAHETWESRVGLWSAKGRRRLQRLVESWPRRDGLVASAKLRELDELEKALSSVLVELLAVHRECPEARRLDAIHGIGLVSAVSIVARIGPVDRFKSAEQLIAYAGLAPGVQQSDQTRRNGRIGGGGTDRHLRHYLIEATMWARRFPRYHSTYDRVAKRRGNKIGRLVVSRLLLRSIYKVLKDGVAFEPAVATASV

SEQ ID NO: 341658 - protein, 418 aa, unidentified
MKTDYAVLVGLDWSDVKHDLCVLDTQTEKTTSLVLEHTPERINEWVSELIAKYPEQRIAICLEQSRGPLVYALMGYAEIDLYPVNPAAFAEYRKSFHPSGAKNDTGDAALLLDLLLRHGERLKVWHPHTQATRLLSALCRDRRKSVDLRAKISSTLRSKLKEYYPQAIDLVGDVLYSDLCCAFLMKWPSWDRLAVAKLDRIRRFYYAQNCRNEKAIAKRLEMIATGRALTNDAAVVESNSMIMKTLIGVIRALNKSIAEYDARIDEVFAEQPDAFIFKSFPGAGKQQAPKLMVAFGEDRERYESAKDVSSFFGVAPVVERSGKQMLIRWRWHVPKFLRQSMVEYAGSSIMFCKWAKIYYNEQRKRGKRHNAAVRALAFKWTRILFRCWQDKVPYDEQKYLASLKQHGSWLAEVVEKAA

SEQ ID NO: 341659 - protein, 326 aa, unidentified
MNKNIVGIDISKATFDVAFFIAGKWHIDKFDNNQKGFNKLLLSITPDSHIVMEASGSYYLPLALFLFDNDIKISVLNPLVIRRYSQMRLIRSKTDKKDAQTIAEYGMSNTLVLWQAPSASSMFLRQLYSLLELLSKQLHQSKRQHEAFLSSGICNPYTDDYLKEFICILESHKAVLESKFIDVAQSEYGETIERLSSIPGIGPKTAIMLTLITDNFKKFENYKQLIAYIGFSPRIFESGSSVRGKSHICKMGQGKIRKLLYLCSWSAKRCNKTCKAMYDRLKSKGKPERVIKVAIANKLIKQIFAIGKNKTKYDENYNKIVKNICF

SEQ ID NO: 341660 - protein, 423 aa, unidentified
MSSKNISKNLAGVKPGTLHAGIDLGLEENVAVVIDEQARQLARIRFKNDREGYDQFKNRIEDLCQSKPAPQVIVAMEPTNMLWKLLANYLEEEGISYQLVNAYTVKKHREGDQIDRSKDDRRDAFTIADLSRTGKFTQTQLQHGTYAELREYIALYYRLRRQVCREKQYIWNSVGQLFPELGRVFKGYSGQTVRAMLKTCAAASQIRLLSEAEFIQQVRTGFDGYRLYTSRLRQVFQLAKTSVGLTQGTQGLQLALTLHTDTLTMLQLQQQQLLAAIETCFLSLLEASFLLSVKSIGLLSGATFLAEIGDPKRFRNASQLVKLAGIQPTPNRSGKKQRSATPMSHQGRPRLRAMLYLICLRLIQDDQRFSALFQQLQHRKANPLTKMQALGVLMNKLLHILWALMKQQTNYDPLYQPSAALIS

SEQ ID NO: 341661 - protein, 332 aa, unidentified
MDYTTFIGIDVAKLTVDVCVLSRDGKYLGVKQFSNSHSGFKTMMTWLCGVVDMDAPLFCLEHTGVYCLPVCVFLEGNNLVYSLQPGLEIKRSMGIQRGKNDKADAQIIARYAYLHKSDIKLYKLPTKSILQLKNLLSYRDRLVRTKVALQSSSKELKTFSSKDLHDWVCADSRRHIDQVKKSIAKINKELKQIISLDTELKRLFDLVTSVKGVGLQIASQLLVSTHGFTKFNSWRKFSCYCGLAPFEYRSGTSIRGKTRVSHLGNKKIKAIIGNGIASAIQNDPEIAAYYKRKLEQGKHKMIVLNAVKNKLLSRIFAVVNRGSAFVPLYQHV

SEQ ID NO: 341662 - protein, 345 aa, unidentified
MPIVGGLDIHRKQITFDYLDTVTGEVKRGQIAPADRSHLRAWLARFASWDDVAFAVEGCAGWRYVTGELAAAGIAAHLGEPADTAALRGRKRHAKTDKTDARHLRTLLAEGRLPECWIPPAQILEYRALLETYHDLRAEHTAWVQRIHAVFFHQGAPALSEGALRTGQGLAALRAAAAAHLSPAGQLQVATALDMLTATEARLGPLRHQLRDAAAHLTGAKVLAARLYGVGPVTALALTCWLAGAGRFSSSRKAVRFTGLDITVHSSDRKGPPGRLSRQGPPVLRWAVYEAGKTHARTSAPDHAYYAAVKDRKNSKRAALSEARKIVRQACHILTELGDDALTAA

SEQ ID NO: 341663 - protein, 333 aa, unidentified
MQFTQLLGVDIAKNKIDVALSQNKANAPMVNHQFANSLGGYKKMLIWLKKQGIAFDNLLVCMENTGIYHRPLVDFLQKEKVFAWVENPVTIKWSLGLARGKTDKMDAQKICLYAFRNQDKAKAYSAKDQSIQKVSHLLAARERLIKVRKMLLAPIEELKEMGLKEEEKMSRKACKQTLAALDKEIKAINIDLENLVQQEGELQASYHYIRSVEHVGPITALHLLVYTHGFERFDSGKKLACYAGIAPFAYQSGNSIRGRTQVHSMANKTLKTSLHMCALSAIRQGGELKNYFDRKVKEGKNKMSIINAIRNKILQRVYACVKAQRLYVRYQPN

SEQ ID NO: 341664 - protein, 428 aa, unidentified
MDEVNRNRLEEFRQLRQEIRHSEEYLIVGVDIAKDRHHAFFGTATGKTLLRRLVFSNDHEGFRKLLDQAETLRVRHGLKKVVYGMEPTANYHKPLGEYLITLGRTVVLVSGVTVKQNRESLDGRWDKHDVKDSANVADLISQGKCLYYEYPSAELRGLRGLLSLKRRLKKQEHGYRVRIRNHLIAQYFPEMDRDYERLGAAGLSVVRWCFPTSQITELDVEPFIERVTSRRIRMETRRRLEGVWEKAGASIGCEGVPGVDHEAKVMVEGLRQIREVIKETEDKIEELCNRFPEYPYLLTIPGYGPDVSAKVLGAIGDPDRFQNGKQVLKLAGLDLSADRSGKDSDKAIPEISKRGKADLRYALYQAALIASTKNPDFMRYYASKLEGRQKEKGIQTKMWVKLSAKMLLIAWTLMKKKEAFDPAYLTAE

SEQ ID NO: 341665 - protein, 433 aa, unidentified
MKVKYEDRLKQKVIAITPDTLVVGVDIAKNYQWARFVDFRGIEHDRALKFKNRKGGFETIIAKIQEICKKENFTKTVVGMEPTGHYWKAFANWLEKQEGITVVLVNPYATKQAKELDDNSQTKSDKKDALTIAKLVKDGRYFELYLPHDIYAELRGLSTTRSGLNKRKNALKNTITAVLDEFFPEYEEVFKHPLTGKASRHILKTCPFPKFIIELGEEGVTAEIKKAVKKTVGRKKAGQLVEAAKGSVGVDYGEEAAKFKLRLMLEELELLEKQTEELEGQMESALEKTDYAEFLLSIKGIGVVTLAACLGELGDPTRFDSPRQMSRMAGYNLVEDSSGKNKSGTKISKRGRKNLRSVLYQMALTMVATNDEMKQLYHYLKTREKSPLRKMQALIVVSKKILTLIHTLTKKKESYDPEKVFGYVRREQFKAAA

SEQ ID NO: 341666 - protein, 404 aa, unidentified
MNAIGIDVSKGKSTVAVIKPFGEIVKMPFDVTHTTKDLAELTSFILSLDGESRVVMEHTGKYSEPVVTALCNAGIFVCVVNAKLVHDYGGNTIRRVKTDKVDALKIAGYCLDKWVNLKTFIPACEHRKMLKTYNRQLSTYAKIKSVLKNNLISLLDQAFPFANELFTSPARSSDGHEKWIDFIAQFYHCECVSSLSQPVFTKTYEKWCRKNGYKFSQSKAEKVFAVANEHSATLPKNDFTKTLIAQTVRQLNSLCETVAIVKSEMEQIASLLPEYETVLDMHGVGKTLAPQLIAEIGDIGNFPKRSSLARFAGIEPPENQSGSYNQHSRRISKQGSPHLRRALFQVMCCVLQLSHENEPTFQFLDKKRSEGKPYKVYMIAGANKFLRIYYARVKECFNNLEKSA

SEQ ID NO: 341667 - protein, 459 aa, unidentified
MIRRLVGVDLGIASAHTVRVLAEDGREVCRRRCEPTVDSLGRVEAAALAGAPAGTVLEVVMEPTGPAWLPVAVFFTARGHLVFRVSSAKAADLRRFLSRHAKSNGIDADTLARLPLVDPTGLHPLELPGAEAAALDRRVRATDRLTVLAAQHKVRIKDLTRQLLPCSPLTGELGVADLAVLERWADPRALLAAGPARLTALIVKASHGKLGADRAQQWRAAAAAAVELYADHPAIAWTDLAAEVGTEVRLLRATQAELAAHAQERETAYRYTDLGGLARSLPGVADVGGPVLVAGMGRAGRFPNGAAFKSYTGLAPRASETGNTDRKGQPMSKAGSSLLRTTLIRAADNARRQDPQLARIYYTQMVERGAEHLKAVCVVAGALAERAWAVMNRQMPYVICDIDGTPVTPEQAKRIIAQDFTVPDEVRRRRRSSKTPGRKPQQDPTANGGRPLSKPHTAA

SEQ ID NO: 341668 - protein, 389 aa, unidentified
MKIYVGIDIAKLNHFTAAISSDGEIILEPFKFTNDADGFQLLVSKLESFDKNSIIIGLESTAHYGDNLVRYLVTELYQVCVLNPIKTCQMRKNNVRKTKTDKVDTYVIAKTLMMQDDLRFVSFYDLDMMDLKALGRFRQKTIKQRTRLKIQLTTYVDQVFPEIQYFFKSGLHQNAVYALLKEAPSPKEIASMHMTHLANLLKVNSHGHFTKEQAKELRVLAQKSVGANDSAISIQITQTIQQIELLDIQLEKIEAEMTDIMKFNDSVIMTIPGIGYINGGMILGEIGDIHRFSNPNKLLAFAGLDPSVYQSGNFQAKTTRMSKRGSRVLRYALVNAAWNVVRNNATFKAYYDAKRAEGRSHYNALGHCAGKLVRVIWKMLTDEVEFNLE

SEQ ID NO: 341669 - protein, 357 aa, unidentified
MRCIPTDAVGITLGVDTHKDFHVAVALDCLGRRLGTLSIPTTPAGYEKLMDWANGFGALEGVGIEGTGSFGVGLARSLRAEGAKVLEVDRPKRRDQYRSGKSDPIDAELAARAVLAGTATGRPKGADGEVEMIRTLRVTRRSAVKARAQAINQLKNLLITAPEGLRSELRGLSTAKLVAKVSEFRPGTNPSDVEAATKFAMRSVARRHQRLSEEISELEEQLDRLVAEAAPELVAMEGVGTDTAASLLIAAGDNPERLKDEAAFAHLCGVAPIPASSGKSVRHRLNRHGNRDANRALYVVASCRMSRDERTRTYVAKRTAEGKTKKEIIRCLKRYIAREIYRVLASLSLNKPPILAP

SEQ ID NO: 341670 - protein, 369 aa, unidentified
MEKGTTCVALDDSKRKIVAGILRSGETQPELRELPNEPHHIRRLFERLKQEGPVVACYEAGVSGYDLYRQITILAVPCQVIAPALTPRRPGQRVKTDRRDACKLVRLFRAGELTPIHVPDEAEEAVRDLVRCRDDIRRDVLRWRHRLLRVLARHGRVYHAGRNWSHRHWRWIREQRFDLPALQRAFEASLFALEQALTRLAELDTEIAALTTTAPYREPVGWLRCFRGIDTLSAMILLAEVVDFQRFGRPRQLMAYLGLVPSEYSSGDTQRRGALTKAGNTHVRRLLVEAAWQYRHRPSLGGALAGRSRGQPHEIVAHAWRAQQRLHRRYRHLVGHGKRPPVAVAAIARDLVAFIWAAMTQPHPTAVAA

SEQ ID NO: 341671 - protein, 341 aa, unidentified
MDKELYFGVDVSKKTLDLAYYDGETIDWKNAHIKVSNDDAGFKKIGSWVAKVGKDFDTFLFCMEYTGLYNQNFRLWLESKEYIYGMVEPRKMHHFEPDLDDDQRSLDRIKTDELDAFRIAIYCEQNHKKILRNPSKLPSPVYFKLKRLLAERKQNTKQSTLYKQQLHDICAYDTDLSVERKKLLLKNMMENQKAIDKEIDSYMNEDASISKNYDLLTSIPGIGRIIALETIVLTENFTAISNSRKYACYIGIAPFKKESGTSVRKRTSVSKKGFSEAKADLSIAVLSAIKNNPSIRDYWIRKRKEKCGGIVLNAVKFKLVLRMFAVIKRGTPYVETDAYKN

SEQ ID NO: 341672 - protein, 331 aa, unidentified
MVKCHYVGVDVGAKELVVSIDRNGSRESGRVFTNDAGGHRKLIRWATKQGATARVVLESTGVYGLDLAFALQRAKRVEVMVANPRAIAAFAKASLQRSKTDALDAETILEFSMRMPFVPWVPPDPSILELRALSRRIEAMSKTATQEKNRLHANQQSEELSDFVKEDIRELAELLEGRIERLRKQALLVIEQSPELANAFGHLTSIKGIADAAGIQLLAELGTLPQDMTTRQWVAHAGLDPRQHQSGTSVHKPARISKTGNAHLRRALFLPAMAASRWEPNVKAFYEKLLAKGKTKMQALIAVMRKLLHAIHGMLRHDRDFDGQKFFAVRG

SEQ ID NO: 341673 - protein, 436 aa, unidentified
MSDASMPVNITQLRQQLQAGAPWLLVGIDVAKAGHLAAFGTPRGLLPDRLRFPNTRAGFTQFATRCSALRERTGSTGILVGVEPTGSFGLPLLRFCSQQGYTLVWIPTLAAARNRETWDASGDKADPKDARNLVDLLRQGKLQALWLRDDAAATLQRLVRLHAELVATQARVKVQLRNNLLAVCWPEFEASCRDVTAPLALAVLRRLPFPAWAAAVPADEFVRRLGETLGRARTPRGTAQLTRLHATAASSIGDATGLAGLHVELQWRLRLLECTRAMAAEVQAHLAAVLQADPRAGLLQTIPGVGPTVAATLLATLGEIRRFQAAAQVERLAGLDLKGWQSGAWTGPKRISHRGDRRLRTALFQAALAAIRTASPLRAWYQRRVAAHPGDRGAKLKALVALAAKLGRIAFRVLRDGRPYDPRGEVSEQQRYRRVA

SEQ ID NO: 341674 - protein, 337 aa, unidentified
MAKEKAVRWVGVDVSARWVDGSRAAADEPVSARQFANTPAGHGALASWLTQGGRRARVVLEATGLYSLDLALRLQRTARIEVMVINPRASKEFAGAWGQRARTDASAAQGLREYAARMPFTPWTPPGPQALALRTIMRRVVALIEARVQERNRLHALSATEAVPAVVRTDIRQHIRTLERRIARLEHEARALVEPAPALRAGFRHLCSVKGIGRRSALMILAEVAVLPGELTARQWVAHAGLDPRPIRSGTSVHPPVRMSKHGNVYMRRSLFMPALVAVRRNSAVQRFATELTARGKAPLQVLVAVMRKLLHAIYGMLKTDTDFAGEKFRRSAHAEG

SEQ ID NO: 341675 - protein, 416 aa, unidentified
MSVALPQALFFTGIDWASAEHAVCVLDAAGKITARFTIKHSAEGIASLVRRLARYGDPAGLPVAIERPSGRLAGLLLEAGHPVVPVSPNAIKTWREGEVLSGAKSDAGDAAVIAGYLRLRYHRLAPAAPYCDETRALRAAVRTREDLVQMRVAATNQLSALLEAHWPGARAVFADVESPISLEFLTRYPTPAAARHLGHKRMAAFLVKHGYSGRRPAAQLLARLHGAPAGTAGRALTEALQDAVLAVVAVLRALNGAVKDLDRSVAAHLGEHPDGPVFTSLPRPGQINAAQMLAEWGDCRPAYDGPDSVAALAGVTPVTKQSGKYRGVEFRWACNKRFRRAVTTFAGNSRHASPWAAQIYAEARAAGKDHPHATRILARAWIRVIWPCWVNGVPYDPARHRAAAALAGQTPSQPAA

SEQ ID NO: 341676 - protein, 359 aa, unidentified
MDATTVAVDLAKNVFELVAADQHWKVIERARLTRTQFQRWFGNRDVGLVVMEACGSAHHWARVLQQQGIQVKLLPPRYVRAYVKRNKTDAADATALLEAVRCADIVPVRIKSVEQQALQSLHRVRSAWVATRTARINTLRGLCREFGILIGAGARLGVEQISRVLVDPHSNVPAMLRDTLKLLVEEIRLLEVRIAQLERELSEAAKLSPACCTLLTVPGVGLLTATALVASTGGSVQHFKDARHFASWFGLTPKEHSSGSSRYLGRISKRGDRYLRTLLTHGARAVLRAASLAQRRGAVLDPLRRWGLLLQSRSNYNKATCGLANKLARICYASLRDQQPYQSLRLAKKLERQSFPMPA

SEQ ID NO: 341677 - protein, 353 aa, unidentified
MKLDKYMGMDVHQAMTVVVVLDADGKVILETMVPTEAAAIIRLVQSLSGPLRVTFEESTQAAWLYEVIRAYVTEVIVCDPRRNKLLEDGSKADKVDARKLAELLRAGLLRSVYHGHEATRNLKELVRAYETLSIDTQRTMARIKAIYRARGIQTPGRGVYQPKQRERWLELLTDAGIRQRATWLYEQLDQLQPLRRKAKQAMLAESRRHRAVSLLRTIPQMGPIRCAFIVATVDTPHRFRTKRQFWSYVGLAVVTHMSSEYEMTAGRVVRRRKPVATRGLNHNCNRRLKEVFISAATGGSLHEPYKPFLERLKQNGMRAEMARLTLARKIAAVALIVWKKGVAFDSTKLNWTT

SEQ ID NO: 341678 - protein, 340 aa, unidentified
MDVVIGIDPHKASHTAVAVGCDEVELARLKLRSGRDQVGRLLAWAEPFPSRRWAVEGAEGLGFLLAQQLVAADQLVVDVPATLAARTRVLGSGRSDKNDSNDALSVAVTALRHRDLRAVGPAGSCELLRLLAKRHFDLSNQRTRLVSRLHALARELSPGGIAKELNSTDAAKFLATLTPTDPVAQLRKDLLAELAADIAGIEAQIKQSRRRIRTAVNASGTTLTEVFGVGPVIAAMLIGNSGDVSRFSSRDRYAAYTGTAPTEFSSGGRTVHRLSRRGNRTLNHALHLAAMIQLRHRHSAGRAYYERRLAEGKTGKEATRALKRQLSNVVYRHLVADAIR

SEQ ID NO: 341679 - protein, 480 aa, unidentified
MNVKTRRTKKQVNVENQAIKLLAKEELGRKIEVIKKELRSYTWRDLETNGKFAKNDKLSFITDDMLIAGCDIGSETHYIRAIDVRGRELSSGAFEFSNTSEGFANAKAWVLALAAKNDKKQIVLGLEPTGHYWFALAAWMISNGISVVQVNPYAVKQSKEIEDNSQLKDDRKDPKLIANLVKDGNYGMPYLPEKVYADMRRLSMFRDQLTEDRIRNINRLHRELKIYFPEYMDAFGKIDGAFTLEVLKVSAIPSDITALGAEGIKNIWHNEKLRGRGYSRANEIVSYAEKSVGLTDGTDAGREAVKWYAEQILKLDEQLAVVESTLHEKCREIPCAENILEIKGVGENILAGILAEMGDISRFDDVKEIQKLSGMGLVACSSGKHKGQSKISHRGRKRLRYWLFQAAKSAVSHADEFKQLHEYYTTRTNNPLKKMQSLVVIACKILRVIYTILKTGTTYDPQKLLKDIKRPTASQAPMAA

SEQ ID NO: 341680 - protein, 427 aa, unidentified
MNRSNNDQTQNNYAAFIAIDWADQKHVFSLQVAGQTKKETGTLEQKPEVIGPWVATLRERFGGQPIAVAVEQSRGALIHALLTYDFIVIYPIHPTTVARFREAFKSSGAKNDPLDTDQIMQILTKHLELLKPLSPDTEETRLLARLVEDRRKAVDLRTSHDQAALASLKEYFPQAITLCSGNLTSRLACDLLKKWPTMEAFQQAKASTIKRFFYGHNIRSPEVIEKALRLAATAKVLTTDSAIVESGSRLSLMHLQIIQTLNPIIDHYERRIEKVFHDHPEAHLFSHLPGAGPALAPRLLAFFGTDRSRYEAAENIQSFSGIAPVTKSSGKSKVVYFRRACPKFDRQTFHEFARLSLSRCQWAHNYVDYYTAKGKKFQTIIRALAFKWIRILFRCWKNRTPYDESKYMEILKKRGSIFATFHLEQKP

SEQ ID NO: 341681 - protein, 406 aa, unidentified
MFIGWDWASETHDVTVMDDTGKRIDRWELAHTEEGFAKTLARLRKHGNPAGLPVAIETTRGLAVDRLLAAGHPVVPVHPNAFHAMRARWGASKAKTDAGDSMKLADYLRTDGHLLPRLEPTEQATLDLQALTRQRADHVEAKVAAVNQLAALLDEHWPGGKTVFASLDSDIAMAFLERYPTPASAATLTAGRLEAWCKRRGYSGKKPGSVLIERLRATPKAASRLSEAITGQLVRVQVQLVQGIRGTIRTLDKTIAEATKAHPYAPLFATMPRIGKVSLGQVIGEIGPILERAQTCEQLIAEAGVVPLTRASGKSRTVAFRFATNRRARVALTTFADNSRHGSTWAAKIYNDARARKKRHPHAIRILARTWLRVMWACWRDGTCYDPATHQANRKINTPADKPLAT

SEQ ID NO: 341682 - protein, 337 aa, unidentified
MEKIIRIGLDTSQSVFQLHGVDASEKVVLRRRLTRRQMPKFFADLPASLIGMEACGASHHWARRLQDLGHEVRLLPPQYVKPYVKRGKNDAADAEAICEAMSRPSMRFVPVKTAENQAALMLHGARDLLIKQRTMLVNAIRGHAAEFGIIGIKGEGRVTELLARVASDRAVPDLAREVFAQLADQLKGLEKKIRALEAKLMAWHRNDKRSRDLATIPGVGPIGATALAMKVVDPAQFHSPRHFAAWLGLTPKDHSTAGRQRLGVITRAGDETLRRLLVAGAMAVIQQAKPGRSSPWLLALLARKPKKLAAVALANKTARIAWAVMRRGETYHRPSLG

SEQ ID NO: 341683 - protein, 459 aa, unidentified
MAPRKQKQAPSQTTLPPQLAAANLHAAGIDVGAEAHYVAVPPSDDPQPVRGFAAYTADLEALAAWLAQCQITTVAMESTGVYWIPLFELLEARGFEVLLVDPQQVQKIKGRPKSDVHDCQWIQRLHTFGLLASAFRPTDQICVLRSYLRQRAMLLTYAGQHIQHMQKALTQMNLKLQHVISDITGVTGFAIIRAILAGERDPAKLAQLRDYRCQHDEATIARALQGNWREEHLFALAQAVALYDVYHQQITACDRQIEAYLQTFADRSDGHTLPPAPRPRKRGRNQPAFAVREPLYRLTGVDLTQIEGLDETTSLVILSEIGLDMTRWPTVKHFTSWLGLCPHQRVSGGKVLSRRTKACANRAATALRLAASGLHHSQSALGAFFRRMKARLGAPKAITATAHKLARLIYTMLKHGTAYVRRGMDEYEQQYRDRVVKSMTRRAKALGYTLVKAPEGAPV

SEQ ID NO: 341684 - protein, 352 aa, unidentified
MWYCGIDYHKKYSQACVMDATGEVVREERLPHEGDGRMIACFFDGVAEPCEVVFEATQNWMWLYDVLEPLKMVSGIHLASPYQTRLIAAAQIKTDKLDARKLARLLRGGLIAEVHIPGPVTRADKQVLRQRMFMVRLRTRVRNRVHKIIARQHGLEMPQVSDLFGTKGVAALRAAKLGEPDRQMLDDALAVLKTLDEQIKREEKLIKERMDENETMKLLSSMPGIGPILGGVIAAEIDVIGRFCDADKLCAYAGIVPSTYSSGGKTAHGRTLRACNKWMKWALVEAAWVAVGHSAYFGGFYRHHVARGKTKTRAIIIVARRMCQIIWHMLKEGRPYEDRPLQRNSPAAPRSR

SEQ ID NO: 341685 - protein, 569 aa, unidentified
MPSPKRSASPRATFNTAVVDSLKVLDPERPIREADFVMVCRMRADRKRQSMAIDNRHDFHAFSALRGSDLRAAALGHNEGRVNEAFLFVQYASVAKVVSNIRQYPAQSLVATPSLKAPVHSFVVRIALRQHMPLRAGVENPQHRFKHAPARNRFTTRTSIDNMLLRKMIPDAFPLLVGEPNHSAFISDRQRSAILRMGWTGRAPALSGRASKHEEHAAMSQKTNAVAVRTIGIDTGKNTFHLIGLDEQGTIVLREKLARVRIARRLANASPCLIGIEAGMATHYVARELLALGHDVRQVPPAYAKPFRQGHKNDFRDAYAIAEAVLRPSTRCVPVKTDDQLDLQALHRVRSRLVGQRTAVINQIRSFLLERGIAVRQGPRFLRQRLPEILAKRIDVLSPRMIAIIEDLSGDWRRLDERVERVTEEIEQLAYGSESCRQLMTVPGIGPLIASAMVAAIANGAAFAKGRDFAAWLGLVPKQMSTGDRTILGHITKRGNRYLRTLFMQGARVILLRPANWARHSFGPWLTAAAKRLHHNVLATALANKLARIAWTVLAQRRNYETRVVTQAA

SEQ ID NO: 341686 - protein, 459 aa, unidentified
MTKPKPKRSRREWEMSPVHAGAAAIDVGATMHVAAVGPGRDPEPVRSFGTFTADLHRLADWFKQCGIKTVAMESTGVYWIPTFEILEQRGFAVVLVNARDAKHVPGRKTDVTDAQWLQRLHEYGLLRASFHPERRVAALRDYLRQRERLLDYAASHIQHMQKALMQMNLQLHHVVSDITGASGMRIIRAVLAGERDPAALAALRDQRVKASEETVRQALVGNDREEHVFALLQAVELYDAYQAKVAACDVRIEAALKEIEAACPPPASPIPAPRHRTRQPNALAFPAREALHRILGVDLTQIHGLGPYLALKLVGECGTNLSAWPSAKHFTSWLCLAPSNKISGGKVLSARTRRSSNRAAALLRLAAVTVGRTETALGAFYRRLAGRVGKAKAVTATARKMAVLFYNTLCHGMDYTDPGASYYEDRYRRRVLTNLQRRAKSLGFVLHPVEPKPGGAGVS

SEQ ID NO: 341687 - protein, 417 aa, unidentified
MQMELSDFTAVIGIDWGDKKHDVCVQAKGSDKRQFSIIPHQVNKIDEWAQSMYMRHGGQMAVALELAKGPIVSALQKYNFFVIYPINPTTLAKYRQAFNPSGAKDDPTDAELALDLLLKHPGHFEALNPQSVEMRTLMTLVEQRRRLMNDRVRITNRLRNALKQYYPQVLDWFDRIDTPLFGAFIRQWPSLGQAKRARRATLAKFFHKHKLYRKPVQERRIQAIKSALPLTSDMAVIVPYRLQTLALVNQLEVTLQSIALYDDEIAALASRHPDYSLFSCLPGAGAHLAPRLLVAFGEQRERFASAAEVQKYAGIAPVTERSGQKNWIHWRWQCPKFLRQTFVEWAAQTINKSYWAGLYYYQQRAKGCSYQAAVRSLAFKWIRILYRCWITRTPYDEAKYLKALKERGSPLLKTESA

SEQ ID NO: 341688 - protein, 338 aa, unidentified
MKSYAGIDLHSSNNYVGIIDEHDRRLYQKRLPNQLEDIFMALEPFKETLEGVVIESTYNWYWLVDGLQERGYKVHLANPSAIKQYEGLKHTDDKWDSFWLAHMKRLNILAEGYIYPKGQRPVRDILRRRLLFVRHRTSHILSLQSAITRNLGYKMSSRDIKQLNESDADKLFEDPFLILAARSSISAIQFLRTRIKEIEKAAKSHVKLKPEFEYLLTMPGIGNILGLTIMLEVGDISRFPTVGRYSSYCRCVKSERLSNNKKKGEGNRKNGNKYLAWAYVEAANFANRFYPEVQSFYKSKKAKKNGIVAIKALSNKLARASYYVMRDQVPYDPKKLFE

SEQ ID NO: 341689 - protein, 391 aa, unidentified
MRAPKQRKANDLSRSLSTLDTHRTLIAVVEMSQSSWLVAGMVPGIERQPLKKLCVDESALLKLLFRWRDEAAKAGHKIERIAVAFEAGRDGFWLARWLRARDIEAHVIHASSVAVPREHRRAKTDRLDTELLKRAFLGWLRGERDHCKMVAVPTIADEDAKRPNRERQSLVGEESRIVNRMKATLVRLGIRGFNPKLKRAVDRIEGLRTPEGEPVPPNTLAELRRDMERRRFVRDQIQQIERARLERLEHAPSDGPHAMVRLLARVIGVGIETADMLVQEVISRNLRDRRAVARYAGLTGSPDESGNRRREKGLARSGNARVRTGMIQLAWRFLMFQKDSALAQWYRARTQTAPGTRKTMIVALARKLLIALWRLVREGVVPDGVVLRPAP

SEQ ID NO: 341690 - protein, 410 aa, unidentified
MNLLYQRCCGLDVHKDTVVACLRLASDGKVTTEVRTFKTTTAALLQLSGWLAANNCTHVAMEATGVYWKPVWHILDDGEFVLVLANAAHVKNVPGRKTDVNDAMWLAELLAHGLIRSSFVPDTQTQEMRSLLRTRKQLIREQSSHMLRVQKTLEDANIKLDSVLSDLMGQSGRAMIEALIAGETNPAKLASLANRRVRATHEELREALRGRVTKNHRFLLRLHLNQIDALDAAVATVDAQVEGILGPFRTAVELVMSVPGIKNLSAQVIISEIGIDMSRFPSDQYLISWAGICPRNDESAGKRRSNRLRKGAPWLKTTLVQCAWAAKNKKDSYLQAQFYRIKARRGPKKAVMAVAASILTAIYHMLKDGTMYQDLGRKHFDRRSNDQQKRSLVKRLADLGYTVELKPLAT

SEQ ID NO: 341691 - protein, 413 aa, unidentified
MEVLYPHCAGLDVHKDTVVVCVRHMVNGTVKREVRTFKTTTKELLALSEWLATEGCTHIAMEATGVYWKPVWHILSDGDFALVLANAAHVKNVPGRKTDVNDATWLADLLAHGLIRGSFVPDQQTQEMRDLLRTRKQLVREASRHIQRLQKTLEDANIKLDSVISDVMGLSGRRMIEALIAGQSDPEELAQLAHRRIKASPEELREALRGRLTRHHRFLLSLHLQQIDAIDAAIGAIDQEVDAQIEPFRTTVHLLTTIPGVDELSACVILAEIGRDMSRFPTAGHLISWAGLCPRNDESAGKRRSTRMRKGAAWLKTTLVQCAAAAARKKASYLQALFHRLRARRGAKKADQIEQGHRFALQGMDNVLVIDDVAVFAAWLRAPPAQAHQRRRAEKAFQPIVVKPHPQAMADQP

SEQ ID NO: 341692 - protein, 353 aa, unidentified
MIGLNPPTITMPSGSYTTQWDTTAICIVDQEGAIRLERSVRSELPDILKVLTEFGEPIAKIGFEAGVLTQHLTYGLKAAGHEVVCMEARQVSAALAAMRNKTDKNDARGIAQILRTGWYSRVHVKSIESHYVRALLASRKAIFNKCIDLENEVRGLLKVFGVKLPPRVYHGAFDGEARKGIEGDRQLTEALAPLLDARLVLLRAFRDLDARVKRMAREDQVCTRFMTVPGVGPLTALTFKAAIDDPARFTSSRTVGAHFGLTPRRFQSGETDNPGRISRAGDADVRAALYIAANSMMMRSIQWSWLKAWGTRLIKTKGRRRAIVAVARKLAVILHRMWVDQTDFRWSNTEAAA

SEQ ID NO: 341693 - protein, 352 aa, unidentified
MIVGAFDVHRRQITFDWVDRETGEARRGQFAPATREVLRGWLGELPAGGGDVAVEGCTGWRFVVEELQAAGVTAHLAEPADTAALRGRKRRAKTDRADARHLRELLEQDRLPESWIAPAHILDLRELVRLRKTLIDQRTQWKQRIHAVLFHHGLPKPPGALSTQASRAWLAGVGLPPPSRLLVEVGVAQIGGADAWLEPISGWLRAYAARQPGCRALMRELYGVGLLCAPTILAELGDARRFGDGDAVVRYAGLDITVWSSDTKRSPGHLARQGPEVLRWALFEAAKSSARRTAPDHGYYARVKDRLSANRATLSTARKLARHARHVLVELGEQALAPVCGDLLPPLLPEAA

SEQ ID NO: 341694 - protein, 321 aa, unidentified
MDTTQQTIFAGVDVAKDALEVCVLPGEHRITVARDGEGVAKLLDFFKQHGVECVIVESTGGYDRIVTAACLEAKLRTSLINPRQAKHFGIALGLLAKNDRIDARTLALFGDRIRPRTMEKTPEKQRELHDLVTRRRQLVAMQAAEKTRREQAATKLAKKSIAASLAFLEKQIAALDAEIARRIEADDSWRNTDGLLQSVPGVGEATSAALIAELPELGKLNRQAIASLVGLAPFDHDSGKMKGQRSIWGGRKTVRTALYMAALSAIRWNPKLRAFAERLKRAGKKFKVIITAVMRKLLVTLNTMLKNNTPWQDSLATEISQ

SEQ ID NO: 341695 - protein, 360 aa, unidentified
MFTERTSVGLDVHARSVAAAAIDGVTGELVQAKLTPSHEHVRSWLGDLPGPVAVAYEAGPTGFGLSRSLNAAGIRCEVVAPSKLQRPCGDRVKTDAKDAIHLARLLRLDEFTAVSVPTVDQENARDLVRAREDCRGDLMRARHRLSKLLLRQGIVYSGGRAWTGAHDAWLRRQRFDASALQLTFDSDYDAVLSVKARRDRLDAAIAAMAADSEFTPLVARLGCLRGIGTLTGFALAVELGDWHRFTGNTIGSFVGLVPSEYSSGQSRVQGSITKTGNSHVRRLLIEAAWHHRAGYVVGKTMRDRWELASPSARARGDEGNRRLHHRWNTFRARRKRHVIANVAIARELAGWCWSLAVLED

SEQ ID NO: 341696 - protein, 379 aa, unidentified
MPSEITVHVAIELSVSSWVVAARLPGIDKSRLHRLEGGDTAALLRTIADLRLKASAKLGSAAEVACCFEAGRDGFWLHRLLTAHGIAAYVLEPTSILVNRRARRAKTDRLDAEGMLRVLATWLAGDRQTCSMVRVPTPDEEDAKRPHREREQLVQDRLRIENRIEALLFTQGIRGRPSLRSWVRDVAALRTGDGRALPPLLRTELDRLRRRLVLVLELIRELEAARADALEKADAADAIVGKITALQRIRGIGENFAAVLTREVFYRSFDNRRQLASYVGITPMPYQSGGMDRDRSISRAGNPRARTTMIQLAWLWLRYQPDSALAAWFRERVGQLQGRTRRIAIVAMARKLLIALWRYVETGVVPNGIALGPESAATA

SEQ ID NO: 341697 - protein, 362 aa, unidentified
MMAASVAGIDSHQDQFTVGIVDGNGVEIAHETFPNTASGFVDAIDLLTTHRVGMVGVEGSASWGAHVAIAVVASGFDAREVPAQRSAAQRRARRLAKTDIVDSISVARALLAEPSLGPVQTLEVYDPLVARIEAVLEHRRALVETRTLMLHYAADQIAKLPTDIRDQLSTKGKIESRLRRLETIDATQASTTAGEYRLSWLLPLIDQDRQARREIRRLERLLDELLDDHGTTLRDEHGIGPIAAATLLAEVGDPFRFARESKFARWCGTGAVALSSGEGDGEPVRHRLDFRGNRRINSVLYIASVTQQRDYEPARTYLARKSGEGKTRREARRAHKRHLANRVIRRMWRDETARTAPITIAA

SEQ ID NO: 341698 - protein, 311 aa, unidentified
MATSSGTYVGIDVSKDRLDVAVLGEEQEWQVDNTPKGITCLVKQVTELQPELIVVEATGGYQRAVVDALFWAGLAVAVVNPARVRQFARACGLLAKTDKLDAQVLAVFGQRVQPRRYVGKSEAEKQLSALLVRRKQVEEMLKAEQNRLRTVSPSLRGSLERMIVVLKEEKKRLDEEIRGLMNEQQAWQEQIEILDSAPGVGVVTTATLLADLPELGKMDRKKVAALVGVAPMNYDSGKKRGYCKTKGGRTEVRSVLYMATLVATRRNPVIRTQYQHLLKRGKLKKVALTACMRKFLTILNAMVRDQQPFRM

SEQ ID NO: 341699 - protein, 343 aa, unidentified
MEPQMNKVCGIDVHKRFLIATILSRDGTKEIQRFSATLEDLLKFRDWLIENGCEQAAIESTGIYWHPVHAVLEGKIDLIVANAYKIKHTPGRKTDISDSEWIAELCLNGMIEPSRIFPKDDRELRRLTRAREGYVKQMTQEKNKIHHSLDSACIKLASVVSDIFGKSGMYLLNGILEGKDIDEIVEGIPSSRLKKKADQIKEAIKSHLEISQIILIRGSLCLMRSIQERIDELDGEISARIQRRKNDLAIAMSIPGMGFISATAILAEIGDYTDFENSEKLAAWCGLVPSLYQSAEKVVLGGITKQGSKHIRRMLIQVAYAISRTKNSKLKALRYFLWVMDNH

SEQ ID NO: 341700 - protein, 422 aa, unidentified
MRLIYPICCGLDVHKNVIVATIVTTNGSGISEYNQKSFSTINSDIQKFHDWLMENNCKHVCMESTGKYWIPIFNYLEQDMDICLTHPKYVKSIKGKKTDKKDSKWIADLYKFDLVRCSFIPPKDFRGLRELARYRFKLVCMKSSEKNRIQNCMTISNIGIASILSDPFCKTATEIMTYLLSNTSETIDDKAVRKLIKKKANAKSDEIIEAIKGYNIETDQAKKLELARAHLDYLDDMITQTEVELYVRIKPYYEYVELISALPGITELSATIVLAEIGVRMDIFDNAKHLCSWCGLSPANNESAGKKKSVRIAKAGAYLKPLMVQCALAAIKSKKQPYFAIKYGRIRKRRGHKKAIIAIARMMMVCIYHMVSEKQPFNPTDYEELMDPHYNQPKVTLNDANVFEYLKSQGYDTSLLVKCNDN

SEQ ID NO: 341701 - protein, 441 aa, unidentified
MAMRKHDEEVVFPNAAGIDVGASSHWVAVSRDAAENPVREFGAMTADLNALADWLIACGVDTVALESTGVYWIPLYEVLERRGLKVWLVDARQMKYVPGRKSDVQDCQWLQKLMSLGLLRAAWRPGDEVCVVRAIVRQREVLLTEQASWVQRMQKALVQMNLQLTEVITDVMGMTGQAIIRDIVAGERDPQVLARHRNGRVKASAAQIERALTGTWREEHLFVLAQALAMYDSVAQRVAECDTKIEALLAALGRHELKPVGPAKRGGKNTPTFDLRTALARWAGVDLTRINGLAVSSVLTVLSEIGPDLSRFASVKHFCSWLGLCPGTKISGGKVLSARTRRSVNRVRQALKMAAMSLSRSGSALGAFYRRLCARMDKPSANTATAHKLARMVYFMLTRGEDFVDQGQQHYEQQQRQRSVAALKRRAAALGFVITPIAAIA

SEQ ID NO: 341702 - protein, 433 aa, unidentified
MKVMYERVAGIDVHKEMIKVAIRSPGDMPWTRKTEILEFRTFYGVLQAMARELRRRGVTHVVMEASGVYTEPVYYALCEQDFTEVAVINPVHAKALKGHKTDAKDCARLAELFECGLLRGSYIPPAEQKEVRDLTRYRIKTVQARTSEIQRLGKALESAGIKLGSVASEITGKASTAMIEALIDGERRGGVLADLAIGRMRSAGKLADLSMALTGRFTGHHATLCRLHLDRIKVLDDAVDGLDDRIAAGAARWQREAGLLKSVPGFGDVVSCAWLAEIGPAPHKWFSRHEKLASWVSLCPGNNISARKRKHGRTGDAGTYIKPMLIQAAWSAIRVRGRLQARYNRLVRRFGGQKNPAAKKKAITAIAHTLLKIAYQVLKSGTPYQDLGADFYTRRNSPEEQQKYLERQLQKLHPGCTITITISPPEAALPPGE

SEQ ID NO: 341703 - protein, 343 aa, unidentified
MHTTLFVVLKIKSMKKYAIYAGVDISKNSLDICLLCADHPKEMKHERISNDEKSIRKFLKTVIAENIILCMEDTGVYGLPLCYVLEESRLDYTVVPAIHIKRSRGLKRGKTDKADAKDIVNYVFTHIHEIRLSHLPEEDLQELRLLLSERDKLVAAIKMFESTKETLPYFPKKTCNSTRKNNDKTIRQLKKQLTDIEESLATLTRSNETMNEQMTLLQSIPGIGPQTARLLISYTRCFTSFDNWRQFACYAGIAPFEYQSGTSIKGKTKVSHFAQKRLKSAIHLAALTFKKHDAEMKKYFERKVEEGKNKMLILNAIRCKLIARAFAVINRKTPFVNTQKFAA

SEQ ID NO: 341704 - protein, 341 aa, unidentified
MRIVEVTGGVDTHADVHVGAAIDSNGGVLGVESFPADETGYGDLLDWLVGFGELVRVGVEGTGSWGVGLTRFLTDHDSMVLEVDRPNRQTRRKKGKSDPTDAVSAARAALSGTATTTPKSRDGAVEEMRVLLVSRRSARQQRIQTLNQLRHLVFTAPEPIRIRFKDRYKTGLVTEAANMRPNKGSDPIVFTTNLVIRNLARRIKGLNNEMAEVDRMLTTLIENTAPSLLELYGVGTDTAASLLVAAGDNPDRLHNERSWAHLCGVTPLPASSGKTTRYRLNRGGDRQANAALHRIVLTRMSSHEQTRRYVARRRDEGLNTTEIMRCLKRYVARQTFKHLTA

SEQ ID NO: 341705 - protein, 408 aa, unidentified
MGVLSMNAVGIDVSKGKSMVSVLRPFGEVVAKPFEVRHTAGELRALADYLKSLDGETKVILEYTGRYYEPVAQLLHDAGLFVSAVNPKLIKDYGNNSLRKVKTDKADSRKIARYGLDNWVELRQHTPMDTIRYQLKTMNRQYGLYSKTKVSMKNNLISLLDQTFPCVNTLFSSPAREDGSQKWVDFAASFWHLDCVRGLSLAAFTQRYQKWCKRHGYNFSSGKAAEIHEGTKNQIALLPKDAMTKMLIHQAIEQLNATSKTVELLRTEMNRLAQQLPEYPVVMAMGGVGKSLGPQLMAEIGDVTRFAHKGSLAAYAGVDPGANQSGTREAKSTPSSKSGSPELRRTLFLVMSALLQTSLADDPVFQFLDKKRAEGKPYYVYMTAGANKFLRVYYGRVKEYLLSLEPTD

SEQ ID NO: 341706 - protein, 397 aa, unidentified
MIAVGIDISKAKSTVAVIDSDGTVLASPFTMAHTQPEMEAFVTYLKGLGEPTTILMEYTGHYHYPVLKKLQDEGFPVCIVNPYQMKKYGDVEIHKAKTDKKDALRIAAYALEKSYKLVPYSSMEQKYEDLKFLSRQYSQRITYVAKLKVQLIALLDQTMPGITRILPLNSRNPEKCALLLFIKRFKSFDEIQRIGKARFLASYNVLAKKASERSASSKGLSIYELAVDSITTRGEDPYIWLSQNQCVDLLSATQNAADEIISQMRNIAETIPEYKVLRAMHGVGDRLGPIILAEIGDVHRFHSGKALNSYAGNDAPPYQSGQFESRNRHISKRGSSTLRKACYEVMQALKLTKPQDDPVYLFMLKKEQEGKPFNVAKMAGVNKFLRIYYARAMELYK

SEQ ID NO: 341707 - protein, 475 aa, unidentified
MNIKTTKKKNQEVTPNIFEQQELLKKAEVIRESLTASTWRELETHGKFDKNEKLSFISDDMLILGCDVGSETHYMRAINTRGRELSKSAFSFNNDLEGFQNAMEWAVQLAVQHKKTQIVLGLEPTGHYWLCLAAWMISKGISVVQVNPYAVKQTKELEDNSQRKDDRKDPKLIANLVKDGNYGMPYLPEKVYAELRRLSMFRDQLTEDRIRFINRLHRELKIYFPEYKDALGKADGVFSLELLKEAPFPDDLLALGEDGIRQIWRNAGLKGRGYSRAKEIQQYAETSVGIKDGANAGRQAVKWFVERILELNDQLADIETQINQKCGEIPYAENILEIRGIGETILSGILAEMGDISRFDDAREIQKLSGLSLVASNSGKHKGETKISHRGRKRLRYWLFQAAKSAVVHAGEFKELHVYYTTRSENPLKKMQSLIVIACKLLRIIYTILKKGTVYDPQRMLMDIKRPAKQEAIAA

SEQ ID NO: 341708 - protein, 321 aa, unidentified
MTPIICGVDIASSSLAARIGQDGAAAIFANTPEGIAELAAFCQTHQVALVAMEATGGYEQRAFAQLSEYGLPVAVVNPRAVRQFAQSMGWLEKTDAIDAGMIAWYAQTRKSQPLCLAPPTQLELRARVTRLRQLTEVRTAQLNQQRLVTNPAIQNSFRQMLTFLAAQIEELQQAIAALIDADPLWRELNQAFRTIKGVADRTVARIMAEMPEIGTLSNKTISKLAGLAPLANDSGKHQGKRAVRGGRAAIRDILFIVGSVVARHEPDFLAFQQRMRDAGKPPKVVRIAIAHKLLVRLNAKAREVRQKNVHSQPNWATPQQP

SEQ ID NO: 341709 - protein, 339 aa, unidentified
MESFIGVDLHKRVSQLAALREPKPAWQLRFVNDTVTVEKVLKKLPQGSKIALEATGSWWWFVELAQKTGHEVIMSHPKQTKAIASARLKSDKVDALMLAKLLKSDLLPTVWIPPAKQRYIRELLTHRARLVRQRTSVINEVHALYAKRNIDPGMIFHRIRPPAFRSEDLSGYGPRIVEEDVDLLAFFNRQLRGLDTELKKIAEEDAESKRLMTIPGVDPLSAVAVNCWVGTIERFSKAKKLSSYFGLAPRVRQSADRERHGHITKEGNRMVRSLLIQAALWHIRLGKGASRKHYLGVLKRRGKQIARVAAANKLLGIMFHILKERIEYQEFLGRGGNAQ

SEQ ID NO: 341710 - protein, 367 aa, unidentified
MEKSSTVFVGMDVHKESIDITLAEVGGEVRRLGQIGGDRGSLLKMVRKQQSQGGERVFVYEAGPCGFWIHRELAALGERCMVVSPALVPKRAGDHVKTDRRDSERLASLARAGELEAIHVPDIRDEAIRDLVRGRDDAVIAQRRVRQQLKALLLRNDIRYVGKTSWSGAHRRWLSELKLPEPAQQIVFEEYVDAIAVATARIERLTRAIESEVTTWRFAPVVAALQAMRGIQFVHAVTLIAELGDLTRFGSARQLMGYLGLVPREDSSGEHRRQGSITKAGNSYARRVLIEAAWAYRHPARVTRIIATRQTGLPKAACDIAWRAQLRLSAKYRRMNARHLHHNKIVVALARELSGFVWAIGHSVRPQ

SEQ ID NO: 341711 - protein, 414 aa, unidentified
MKYARASLPDTPCGGVIAGIDWASEDHAVCIVGAAGEVVTRFTVAHTAEGLRCLVQHLAKAGVGEVAIERGGGPVVEALLAAGVTVVVITPRQVKNLRSRYGAAGNKDDRFDAYVLADVLRTDRARLRPLVPDRPETVALRQACRARKDLVRHRVAVTNQLRAHLQVAFPGAVGLFSRLDSAVSLAFLSRFDSQDRVGWLTEKRLAAWLKAAGYSGRTSPAELHRRLASAPRGPAGDSSTAITRALTAVIASLNTQIKALETQIAGQLAAHPDASIFTSLPRSGTVRAARLLTEIGDCRARFPDPQSLICLAGAAPSTRQSGKHKAVTFRWAVSKQLREAVCNFADGSRHNSPWAARIYGDAIAPGKDHPHAIRILARAWLYVIWHCWHEGIPYDPARHKGLQRILTEQQPAAA

SEQ ID NO: 341712 - protein, 495 aa, unidentified
MAKRAEKRERRSMVLEPNAAGIDIGAEEIYVAVPPDRDEESTRRFSSFTGDLHALADWLGRCRIQTVAMESTGVYWIPLFQILEERGFKVYLVNAHYLKSVPGRKSDVSDCQWIQYLHSVGLLRASFRPPDAICALRTLWRHRGSLLEMAAEHILHMQKALCQMNVQLHHVLSDITGTSGQAILDAILAGKRDPVELAQLCHSRVKSPRDKVARALVGDYRQEHLFTLKQSLEGYRYYQKLILELDQETARLMQALPSATEHPIPPRTKATAYQRKANDPRFDLRSELYRIAGVDLTDIPGVSAATAQVILTEIGTDVSRFRNASAFASWLGLCPEKRVSGGKVLSCKTRQVKHRAATALRMGANSLCRAKGYFGEFFRRMRAKLGTAQAITATAHKIARILYHVLSTKEPYAETVFHRCDEQARQRAEIRLRKQAAHLGFHLLPIPITGELKLVPQEPVYGTARRSAEALREMIRPSRKKWAPRLLPVGRPSVS

SEQ ID NO: 341713 - protein, 422 aa, unidentified
MLHDSEDTEEIIERVAALDIGKAELVACVRVPSPDRPGRRAQEITTYSTMTRSLLGLADRLGELGVTRVVMEATSDYWKPVFYLLEGRGLDPWLVNAKDVKHLPGRPKTDKLDAVWLAKVAERQMLRPSFVPPPQIRLLRDLTRYRVDLVNVRTAEKNRVEKLLEDAQIKLSVVASDIFGVSGREMMARLIAGERDPKALAQLARAGMRRKIVLLEEAFVGRFTDHHAFLLRTMLARIDETSADIAAIETRIEELIAPFAQAVARLDEITGVGVTAAHTMIAEIGLDMSRFPTAAHLCSWARFAPGIKQSAGKSKGRGSTGHGNPYLARVLGEAAVGASRTDTFLGERYRRIARRRGKKKTIVAVGRSILVIVWHLLSDPDDRYHDLGSDFYDNRLGPERKKRAHVRQLEALGYKVTLEPAA

SEQ ID NO: 341714 - protein, 410 aa, unidentified
MKRDNHIYIGLDLHKFQHTAVILDCWFEKLGEMTFQNKPLMFPSFLEYVNRFLSEGLTPVFGLEDVGGYGRDLALYLLEQGYIVKFVNSSLSNAERNSYAMTQKNDSWDAQCVADVLIRKLPYLPDATPSDIHWIIAQLVGRRNALVKAQTALKNQLHMQLNYHYPSYKDFFSEVDGKTALAFWGNYPSPSHLEGETIERLRVFLLEASNNACSTRKAEHILSLVQTDGEIKREYQTSRDFIIQSIVRDIRFKKQEIQKVDRELKVTIQTLDMQLETMPGIDTVTSSALIAEIGDIHRFATSDKLARYAGIAPIKMGSGGKETMKKTKQGNRKLYDTFYNLAVQQVQVCKGSKIPRNPVFYTYYNQKLNEGKSKAQALLCIMRRLVRIIYGMMRNKTAYIMPDQPKEKVS

SEQ ID NO: 341715 - protein, 414 aa, unidentified
MIALWQNTYNRVRPHSPLGYRPPGARQLPRSGLPATHGSGRAVASCNLIHPASGILLGAVAGERPLASGATKPASEPGSSPAVPSNPNSRLGRSTRSPLAQGWDQMDAPVVGIDVARDRLDIHVHPAGANFAVDRTTEGVEQLCERLRSLKPKLVVLEATGGLEVMVARSLTTCGLPTVIVNPAQVRAFAHALGQRAKTDRIDATVIARFAAATNQPVRARADAETQALADLVTRRRQIVGLIASERQRASQAPSCIRDSVRRVIEALEQERGVVDRAIDAAVDRSPAWGRKVTLLTSVPGIGSTIARTLIAELPELGSLDRKQVAALVGLAPWTRQSGQWRGRSFIAGGRAPVRTALFMGALVASRHNAALKTVRDRLIAAGKPKLVALIATARKLITILNAILRDGAPWQTA

SEQ ID NO: 341716 - protein, 429 aa, unidentified
MRTESTPGARGPVFCGVDTHADSHWLCVLDWRGRKVLSRQFPADAAGYEALAGAIAAAGEPACVAMEGTSSYGAGLTRHLASLGMPVREALSPARMQRRRPGQGKCDEADAERAARAAMSGSKLGTPKSQDGWVDGVRCMLAARSGAVKARTSAINTARSLLTTAPEGLRSRFRGVAGPRLMEELPSVRAEGALGAALGALADLWAAARDAALDMERAIEASLEENCPARLAMYGCGPVSAAKLAVAAGDNPGRLRSEASFAAICGACPIPASSGKTVRHRLNRGGDRQANSALHEIARQRVMRDPETAEYAERARARGKSDREVMRCLKRYVAREAYRALMHPHEIRRPEDASELVAARRAAKVSQVRAASILGTSEKYISMLERGQRELKPIRRAYEAWVEAGLPLDWDRRAFEAERKMVSKKHLAK

SEQ ID NO: 341717 - protein, 367 aa, unidentified
MKKVSTRAAAQSRNISQQKLTIGLDLGDRNSWYCVVDEAGQIQQEQRVRTNAKALQEVFAAMPRSRIALEIGTHSPWISRLLRELGHEVIVANARKVRLIGESRKKDDRLDAQTLARLARIDPQLLYPVKHRSAQAQADLMMIRARAGLVRARTGLVNTARGLAKSYGERLRGCNVRNMNPEKAEGLSPELQAALEPLLNAIESLSERIVEYNERIENLAQQSYPQVALLKQIKGVGTLIALTFLLTLEDPHRFRKSRDVGCYLGLQPGRRNSGQSEPQLHISKEGDPYLRTLLVQGAQHILGPFGIDCDLRRWGLKLAERGGRNGKKRAIVATARKLAVLLHHLWVSGEVYEPLHNSRRTTVAAAA

SEQ ID NO: 341718 - protein, 377 aa, unidentified
MKRILKIGMDVHSTNYTLCAMEPVIGAEDRVFANIQVTPDYRNILMFIENLKCKLGLEDAYDIECGYEAGCLGYSLYNQLTASGVKCVILAPTTMLTRQGQRIKTDARDAHMIAQCLSYGGYHPVYIPTEEDDSVKEYLRMRDDHKKALKKVKQQINAFCLRHGYHYDGTKWTFAHLKWLKKLELSPLYQETLDEYMASYDEQTAKIERFDARIEEIASQAGYSDKVKKLGCFLGIRTHTALSLIVETGDFNRFAKGNVYAAYLGLAPGEHSSAEKINRLGITKAGNSHLRLLLVEAAGGICKGAVGHKSKELRHRQQGNPAEVISYADKANARMRSKYYRLIRHGKKRNIAVAAIARELACFVWGMMTENIEAKAA

SEQ ID NO: 341719 - protein, 352 aa, unidentified
MHMIAFDSHKHYTVASVQSINGQIIKEARIDHGRGNIVRFLAQWDKGSPVAVETIGNWYWIVEEIEHAQMHPRLVHARKAKLMLGMINKTDKLDARGLNRLQQTGTLPTVWIPPLEIRDKRELPRTRMVFTHQRTKLKNRIHSVIDKYGLQNKFTDISDIFGKRGRQLIQESLRLLPEQTRYAMETLLHHLDEVERQIEEIEKRMKEVFQPDEETRLLMTMPGIGFILAVVISLEVGDVRRFSGPEPLASYSGTVPRVHASGEKVRYGRLRPDTNRYLKWAFCEAGSSIAMNRNKWPHRHISKVYARVRTRQGHAKAVGAVARHLAEATYWILTRKEPYRERGVSRVSLAEA

SEQ ID NO: 341720 - protein, 368 aa, unidentified
MFEHTFIGLDVHAVNVVGHALNPATGEISNHTMASDPALVLEWLGRFTPPLKVVYESGPSGFVLARYLRAAGINCVVAASSKLLRAPGDRIKTDRRDARVLAEMLAVGSVTEVRIPDPDEEALRDLSRLRSGTATDLAHSRQHVNAILLRHGIRYPKDTRWTKEHSLWLHRQRFDEAALQFTYEADLEQAELLAGHLKRIDKQLTTTAATCRYGPVINALMCLRGIQMTTGFGLAVEIGDWTRFTGSTIGSYLGLVPSEESSGQSRHQGPITKAGNTYARKLLIEAAWQHRRPYARPGERLLRQLDLVDPATRIRALEGNHRLHRKWEHFDERHKMSVKANTAIARELAGWCWSLAAPLQQGDRMTAA

SEQ ID NO: 341721 - protein, 360 aa, unidentified
MDGSKEQPKVTAGLDIGDKYSYLCLIDTLSGEVIEEGRVRTTPEALRRRFASEPSLRVAIEAGTHSPWASRVLEECGHEVLVANARKTRLIYANKRKTDEIDAENLARLARLDPKLLYPLKHRGEDSQAHMALIRSRQSLVGCRTQLVNHVRGAVKSFGGRLPKCPARSFHKRAAEHIPEALRPALGPILEQIGSLTERIRDYERQLETISEEHYPETDLLRQVEGVGPLTALTFVLTLEDPYRFEKSRSVGAYLGLVPARDQSGESDPQKRISKEGDEMLRRLLVGSAHYILGPFGKDSDLRRHGEKIASRGGKNSKKRAAVAVARKLSVLLQRLWVSGELYDPLYSTHRRQEQEEEAA

SEQ ID NO: 341722 - protein, 413 aa, unidentified
MPTPFVPTRFVALDIHRKYLVVGAVDSQQHIVLTPRCFGFEAFDEWAKTHLGPSDAVVLEATANAWLLCDQLEQLVASVTVAHPLAVKLIAAARVKTDSRDTIKLARLLAANLVPAVWVPPVHVRELRALVTHRKRLVNQRTQVRNRLHAVLHRHNLTVPPGKPFAAHQQEWWLSLDLSSSEKLRVQQDLSLLRSLEELVGAVEAELGRLSTCDPWVKQVPFLVQLPGLGVLSVMSVLAAIGDITRFPSAKKLVGYAGLGASVHDSGETHQGGHITKEGRRDLRGVMVEAAWVAVEHHPHWKAQFERLSRRIGKQKAIVAIARKLLVAVWHVLTEQQADCHADAQAIARKLMNWIAHAGVTPGQHRDRLLLLYQQLDQLGISEELEEINYYGTTYRLSVRQQLLREAQKRKRS

SEQ ID NO: 341723 - protein, 371 aa, unidentified
MFTERTGVGLDVHARSVAAAAIDTVTGEVIERRLGGDYGSVVDLARRLEAGHGPLRITYEAGPTGFGLARELAAAGLTVQVAAPSRLLRPAGQRVKTDRTDAMLLARLTINDDIVAVRVPTLSQESARDLVRARDDARADLMRARHRLSKMMLRRGWVYPGRTTWGPAHDAWLRRIRTNDVPALGSGAAAAFDDAYDAVAHALARRDRLDEAITALAADCEFTDTTTRLSCLRGISTLTGFALAVEIGDWNRFTGATIASYLGLVPCEHSSGQTRSQGGITKTGNTHARRLLIESAWQHKPAYRPGPTLRAAWAKAPAVVAERADRGNRRLHRRWTALAARHKRHAVANTAIAREPAGWCWSLATMDAQPP

SEQ ID NO: 341724 - protein, 415 aa, unidentified
MSLNIAGGSAYYVGVDWAAATHAVCVLDPAGKRVAAFTVEHSAAGLTALAARLARLGAAESMPVGIERPDGRVVDVLLEAGHPIVPVKPNAIKAWRDGEVLSGAKSDAGDAEVIAEYLRLRQHRLSLVAPYSAQTKALRTVVRTRGDLVQTRVATTNQLTALLDLHWPGAKAIFADIASPIALEFLTRYPTARHARQLGVKRLTAFCTRHGYSGRRTGEQLLARLRAAPAGVTDPTLCDAVRDAVLALVTVLRAITTAGKDLDRSVTATLGEHPDSEIFTSLPRSGQINAAQMLAEWGDTRQAYDGPDAVAALAGTTPVTKESGKHRAVHFRWACNKRFRVAVTTFADNSRRASPWAAKVYTDARTRGHDHPHAIRILARAWIRIIWRCWTDRLPYDPARHGNAVRLHQNEPLAA

SEQ ID NO: 341725 - protein, 331 aa, unidentified
MHFSQFIGVDISKDTLDAAIYPAKDKKMDFLHFDNTTRGLNEMLKWLKSRGIKPSEMVICAEHTGVYTNPLIDFTEKKGLSLSLNSPLDIKHSMGITRGKNDAIDAGRIAEYAHDHKDKLRLYQKPSEAIVKLKYLLTERHQYVRQRTAMLSFNKIMGKYETPEARSRNGSDIPHCETLILKVERQMLDIIKENPELKRNYDLVSSVKGVGLINAINIVVFTNNFKSFETPRQYACYIGVAPFGYTSGTSVKGKTQVSKICRTQQKAELSMAARSAIIYDPGLKRYYQRKMKEKGEGKDAHGVVLNAVKFKLILRMFAVVKSGQPYKILNY

SEQ ID NO: 341726 - protein, 343 aa, unidentified
MTIIRIGLDTSKHVFQIHGVDENEKPVLRRQLRRSEVEKFFAKLAPTRIGIEACGASHHWARLLRGLGHEVLLMPPQYIKAYVKRGKNDAIDAEAICEAMSRPTMRFVPVKTAEQQAALVLGLDPRMLGVRDLLVKQRTMLINAVRGHAAEFGVIAAKGRGNVAELLQRTHAEETGVPALALALLKVLASQLDALDIKLKALEGKLMALHRQDPVSQCLATQPGIGPIGAVSFSLKVPDPKAFGSGRHFAAWLGVTPKENSSGGRHRQGRISRQGDDGLRRLLVLGATAVIRFAKAGRASPWLINLLARRPRKVAAVALANKMARVLWAMMVSGEVYRRPLAA

SEQ ID NO: 341727 - protein, 354 aa, unidentified
MKRARKELQAGDTVFVGIDLHKNKWHVTARTSELELFSCSISGKWEALQRILERYRGHRIETVYEAGYFGFWLYDELIEYGAECIVTPPSLIPQEYGNKVKTDRRDSRKLAHFLAKGLLKRVWVPTEKERYHRQVIRRRRQLIRDRIRTQSRIKAELQLHGIDLSAPHGKWTKIYLGNLGRIRFNNRFMQESFKCLLEQYYFLDEQINRQTDLLKKLSDTELYKKRVAILMTIPGIGMIAAMELLLELQDLSRFQRADQLAAYVGLTPSQYSSADKIRMGRITCVGKNSLRAMLVQASWALIRKDGVMREKYDRLKSRSGGKRAIVAVARILLIRMRRLLLDNNPYVVGLVATN

SEQ ID NO: 341728 - protein, 384 aa, unidentified
MENGTRWVGIDLHRRRSFVTAITEDGEVSLRRRIVNDRDAFLELLGDPEGTHVALEATYGWEWLADLLEDAGYELHLAHPLRTRAIAAARVKTDAVDAATLAALLRAGLLPEAYIAPRELRDVRELLRHRVALVAMRTALKNRVHAILARHGIFHDYSDLFGKAGRQFLAGLELRQASRQRLDSLLALLDDFDREIDVAGSEIDRQAKGDERVALLCQIHGIGRYTAMLIIAEIGDVRRFPTARHLCAWAGLTPTVRSSDGKARLGHISRQGSSILRWAVVEAAQHVPTRGGPLREQFERIAKRRGRRVARVAVARQILTLCYYGLRDGEIRALKTSRPGEPTECLGDSDEPRQSATVPDQAPRAGTTTRARSGELAPMSGLPT

SEQ ID NO: 341729 - protein, 457 aa, unidentified
MEKEKKKAEEKKKEITHHVGKGLPVFNPHAAGIDIGDTEHFVAFSDDANGYVVKRYDAFTDDLRSIVNDLKEAGITTVAMEGTGVYWLVLYLLLEEAGIEPYLVNAKHVKNVTGRKKDDTDAIWIQKLHTCGLLHKSFQPDAEFRILRTYVRQRKNLILISSDSVRRMQKALELMNLKIHTVISDLLGKTGMKMVQAILSGERDAAILAELRDPRIQASEEEIIKSLVGIWKDEYVFMLQQAYDEYCFYQKQIKECEEKIKEQLFKQVAIVKEGDISCLDGKVELKKKPKKNQLGFNLSPFLQELTGVDLCKIPAMGEVTILEFISETGVDMGKWKNHKHFAGWLNLAPNTKVSAGKTISSRVMKKKNKAGQSLKMGASTLSRSKTPLGDYSRRMRAKYGGKGAALATAHKISRIIYTMIKEQKEYNPDLMYDSQEKAKQQKIKRLEKQLERLKRVA

SEQ ID NO: 341730 - protein, 313 aa, unidentified
MSEHYAGRQIVGMDLHRRRSVLVRMTDTGERLETVRISNDPEYLKAVMARAGEAPEVVLEAAYGWYWAADTLAELGATVHLAHPLGVKMFSYRRVKNDQRDAADLADLLRMGRLPEAWIAPPATRELRGWVRHRAKLVGLRSSLKCQVHGVLAHAGVWVPMSDLFGVAGQQLLAELSAGDRLSIESRSRLDSALRVIGALEFEIELFAKLVNGRLRTDPGYRALQAIPGVGPVLAAVFVAEIGDITRFHRPEQLASWAGLTPKHHESDTTVHRGRITKMGCGGRRRGLRLRSTRVSGRLSWRSWVVSTFTGRS

SEQ ID NO: 341731 - protein, 467 aa, unidentified
MERTGAIGIDPDAQGFVCALVNGQEPKVLRRTFLVTDRDLGEFLQWLKGQPDTIVAIEGSGGLSRPIERLLRDAGRIFYSFKPADTDKFRKAVLGQNKNNQRDAESVARYALALQAQGKLDRYRRVWFADPQLQPLTRSYERLSQQMTAEINRLWKLLRQAAPELYLALGDSHPEVKLGANVLKNSGFLTLLATTPDPGQWKTLSEVELLETMGGLSSSSRRQLVQGLHLLSERLPSCSASLAMLIQTSAQRLSMFKAHLAAMTAMLDTITQDNRAVAALRKTRGIATVTASTLVAEIIDIRRFASEDSLACYAGLGRREHSTGQNSRMVSSSLFNHRLKDAFMTAARNLVRFNPDSHLAGYCRNLIKAGMSPLEAYKRVARAWVRVLYRTLNGLLPHDTREDANSDEAGSDMASGQARSDECHQSNMPLPARRHGTTPGVEKIKRESAKARVSRRPRKVAVAHRRA

SEQ ID NO: 341732 - protein, 344 aa, unidentified
MEHYAGLDVSLELTSVCIVDVQGGIVCEAKVASEPEALIGFLRARALPIVRVALEAGPLSQWLHAGLVHAGFDAVLLETRHVKAALSAMTVKTDRRDARGIAQLLRLGWYRSVHAKSASAQEVRALLTARKLIQAKLLDVECGIRGVLRGFGLKVGAISRGRFEARILELVDGNATLEMVIGAMLAARTALAAEFKRLHRELLALVRDDPVCRQLMTVPGVGAVVAITFKSGVDDPTRFKRSRDVGSHFGLTPRKYQSGEIDVTGRITKVGDRMVRTALYEAASVMLTRTVRFSSLKAWGMAIAKRRGTKKARVALARKLGVVLHRMWVDGASFRWSNEEPTIA

SEQ ID NO: 341733 - protein, 384 aa, unidentified
MKKTQETLRIKDSIKEAILYTAFELSLKKWKLAFSNGEKMRTVTIDARNLAQLHEEIDKAMQRFALGDNIRMISCYEAGRDGFWLHRYLLSCGIDNVVVDSASIEVNRRKRRAKTDRIDVRKLMHMLLRYHGGEQLVWSVVNVPSEAAEDGRQLHRELEVLKKERTMHRNRLKGLLIQQGIVVSNPSSRKFLIELETLRTWDGKELPADFKSRIIREHGRLRMVEEQIYTLGKEREKRVAAADTDAMEQIEQLMTLVGIGMNSSWKFVMEFFGWREFKNGKQIGQLSGLAPTPYDSGAGQREQGISKAGNVRVRTLAVEMAWVWLRFQPQSKLSQWYMQRFAEGGKRMRRIGIVAMARRLLIDLWRYLEHGVVPEGARLVNVVK

SEQ ID NO: 341734 - protein, 387 aa, unidentified
MYFVGIDISKFKHDCAVVDELGDVITPSWSFQNDCEGFSLLRELLDALDGEKKIGLEATGHYGQNLKLFLENNGFSFMEFNPLLINRFVRSKSLRKTKTDSIDALMIARYLMTVEYKPYPPSFYTLEKLKSLTRFRDSLVRQRSKQLVELTNILDKVFPEFKPFFKGRFSATALYLLSHYASPEKISSMNSKSYEPLRRLSRGKFSMVDFVELKTLARNTVGSTCDYLLQEMEITIDIYNQLQSKVDEVEQQISDCVLGLDPSMLTIPGIGVSSAAVILSEFGDLSKFNSPSKLLSFAGIEPGYFQSGTSESTGKMVKHGSSHLRYAIMNCAQTVINNEPTFAAYYAKKRAEGKEHRVALTHVAKKLLRVIYTLQTKELSYNPDLVR

SEQ ID NO: 341735 - protein, 348 aa, unidentified
MKILKQVLGVDVSQKELEVSLGKLNEDLSIEIYSHRVFSNKETGFKALNKWLLKNTDTDISVRIVMEATGVYHQKFAHFMVENGFDTSIVLPNKISNYMRTLDIKTVTDKTCSEAIAKFGLERKLENWKKPDQTYQQLQQLTRERDQIVEERTVAKNRLHAEGSEAFPNPGSIQRISELIAFFNRQEKEIKKEIKVILSNNPTVKEEVNRICTIPGMGELTAVVILAETNGFELIRSKKQLTSYAGMDIKEKQSGTSVKAKPKLSKKGNRHLRKALHLPSLSSVKYNPMHKELYARLVGRHGIKMKALVAVQRKMLELSYILWKNKEEYRADYEKEERAAIITSSPGN

SEQ ID NO: 341736 - protein, 421 aa, unidentified
MPNIEIGVDSMVKENFIYVGIDLHKETHTAVMIDCYNQKLGEITFPNRPADFPKLVTKVKKCNTDAKEVVYGLENAYGYGRPLAVWLIDKGYFVKDVNTAISHRQAKHRGAMYRKSDSDDAEAIALATLNMLDKLPDACPNDAYWSLGQLVHRRDNIMKQRTRLVNQLHEQLCIAYPSYKQFFNDISRPTALYFWEHYPSRKYLKGKSVEDLRAELVPVSHNKCSTKTCEKILDAVASDKVKNNAYQDARDMVTLSIVSDLQHYDSQLAEVDKMLEQMYKMLGCTLTTIPGVNVITAVKILAEIGDIKRFSNANKLAQFAGIAPLHLSSSGKGKDLATKQGNRRLQATIYFLAIQMVQISSKGTPRNPVVRAYYEKRKAEGKTSQQALICISRRLISIIYGMLKSGTEYRMPVMENTGETV

SEQ ID NO: 341737 - protein, 408 aa, unidentified
MSPPGALAYVVGIDIGMESCLMCCLTMEKRQVIKPSQFSNEAAGFEWLFAHLEALKSTPDQILIGLEATSRYGENLYYALRSKGYRVCLLHPGQIHAFAQQRGLRAKTDRLDATTIARALLSEEARFGYVPSDQVVTYRELTRLQQQLTEEIVRYKNEIHALLVVLFPEFTQVFADPSRPSALTVLKAYPSAQAMREADPTALSQLLREQCPGRYGRKTADKLVQLAKSSVSSGVGVQGRSSSMRILCDQLEHTQNNLTLLQQEIERLLGTDPKAKGVLAISELGPMTVAVLRAELGDLDRFARMDQVVAYAGLDLQVKQSGKWKGQTKLSKRGSGHVRRILYLAALRSIRLPTSPFGTFYHRLVDRGLKKGMAVIAVMRKLLIVAAHLIQTQEDYDASKVGVQALRA

SEQ ID NO: 341738 - protein, 411 aa, unidentified
MHNRQNYLYVGVDLHKEHHTAVIINCWQEKLGEIQFENKSSAFSKFLLEVETYVCDGITVVFGLEDVGGYGRALAKYLVDHERVVKEVNPALSFLERKSQVMIQKNDSWDAECVARILVNKFNQLPDAKPNDLFWSIQQLVSRRNALVKAQSALKNQLHIQLNHHYPSYKKFFSELDGKTALAFWQQYPSPSCLEGANIKQLTAFLLDVSNNTCSVKKASDILKLVKEDGHTMKEYQEIRDFLVRSIVRDIEFKKQGMKYIEKELKQLVNLLDYQLETMPGIELVTASALIAEIGDVRRFSNANKLARFAGVAPVYFGSGGKGKTHKSKQGNRALHALFYNLAVQQVQVAKGSKMPRNPVFHAYYQKKLKEGKTKGQALVCIMRRLVNIVYGMMKYKTAYELPEVQEKEVV

SEQ ID NO: 341739 - protein, 347 aa, unidentified
MTLYIGVDFHPHQQTVAMCNTEKGEIEQTTLFHNPELVRRFYEQLPKSVVGIEASCTARWFEQMMNDLGHELLVGNPTQIRARARSRHKSDKRDADLLLDLLLKREFPALWRRSLAAQSVLELLRFRHSLVKQRTQVGNRLQALAHAAGLPKRGIRTKRARLALLASNFTETQSFERDQLFELLDDLNVRIKVIEALLEQKAAGDAQVERLLSHKGIGLLSALAVVHTLGDIARFPSSKEAVAYTGLDPLERSSAGRVRTGAISKAGSTVLRHLLGQAVQVASRYDDELKAFYKRLASRRTKSIAKVAATRKLLIRLFIMLRDEIDYAEFKRRGSAVGMPAASHGLK

SEQ ID NO: 341740 - protein, 422 aa, unidentified
MNQLTGGQFTACIGIDWADAKHDICLQATDSEHREFDCIPHKVDRIEQWALSTHKRFGGPIAIALELSKGPIVYALQKYDFLVLFPINPSTLAKYREAFTPSRAKDDPTDAELALDLLLRYPDRFKPLAPQSVAMRTLVTLVEQRRGLVNDRVRITNRLRNALKQYYPQMLEWFDRIETPLFCDFLTRWPTLAQVKRARQSTLERFFHAHNMRFSHVLDTRVKAIKAATPLTMDAAVITPHRLYALVLAEQLRVSLQAIRRFDDEIAQLAPTHPDYALFSALPGAGPSLAPRLLVAFGEQRNRFSSAAEVQKYSGIAPVTERSGRKHWVHWRWQCPTFLRQTFVEWAAQTINKSFWAGAYYRQQREKGCSHRAAVRALAFKWIRILFRCWQARTPYNETTYLNALKRRGSMLLNSPPVAEIA

SEQ ID NO: 341741 - protein, 414 aa, unidentified
MRRDILIYCGVDWAEWTHDVALVDDTGQLLAKRHITDDAVGYKILLDLLAEYGDTEEDPIPVAFETSRGLLVAVLRTGKREVFAINPMAAARYRDRHSVSRKKSDPGDALVLANILRTDMHAHRPLPNDSGLARAVAVLARAQQDATWNRQQIANQLRSLLREYYPSALAAADGWKNGLCRPEVREILRAAPTPTHAARLTRTQLQAALKRAGRQRGIEADAERLRVVFRAAWAHQPLLIEEALGKQMLALLVQLEAACTDADDLAEAVEEAFPQHPDAEVILSFPGLGIQLGARVLAEIGDDRNRFADARGLKAYAGSSPITRASGKKSSVTRRWVKNDRLNHAGYLWAFSAITASPGAKAHYRRRRDEDGDWHAAAQRNLFNRMIGQLYHFLQHRKLFDEDTAFPVHAAVAA

SEQ ID NO: 341742 - protein, 349 aa, unidentified
MTKISMIGLDLAKNVFQVHGIDAAGKVVVRRQLRRRQLEKFFAALPAGVVVGMEACGGAHHWGRVLQKLGHEVRMMPPAYVKPYVKRNKNDGRDAEGICEAMGRPTMRFVPVKSLDRQAVLVLHRTRRLLVRQRTMTGNALRSALTEFGIVAAQGVKGLRSLMELIAASASEIPERARLPLAVLARQWETLNADICKLETEIVRAAKTDEVARRLMAIPGLGPIGATAILAAVPDAGVFKTGRDFAAWLGLTPRQFGTGGKHSSGGISKQGDRTLRTLLTVGATAHLRYERVRDTKDPWLQALLARRPFKVAAVAYAAKMARIIWAMLVTGEHYRAPNRGHGGSAQAAA

SEQ ID NO: 341743 - protein, 375 aa, unidentified
MTADLRVKEYEIGKVLYMALELSNKTWRLAFGDSAKQRQVSIASGAIDELQGQIAKVKEKWDLAEDTRVVSCYEAGRDGFWIHRQLEQLGIENQVVDAASIEVTRRARRAKTDRLDAQMLLEKLIRYARGERSVWSVVRVPPAQWEDLRQLHRERKQLQSECTRHTNRISSKLVAQGVRLKIDKSFLERLEAAKLFDGQALPAHLTAGLKHEWERLQLAKRQLKEVEARIGELIKTDKALSMVRALMLLTGVGWVSAWTLVLELFGWRELANRRQLASLAGLVPSPYNSGQMVRDQGISKAGNARVRTLMIQLAWLWLRYQPGSKHSQWYQKRFGGGSRRQRRIGIVALARRLLVDLWRFLSAGVVPQGARVAMG

SEQ ID NO: 341744 - protein, 370 aa, unidentified
MQVLYPRCAGLDVHKDVIVACVRCVSNPVHQEVRSFPTTTSGLQSLDEWLSSHACTHVAMEATGVYWKPVWHILEADFELVLANAQHIRNVPGRKTDVNDATWIADLLAHGLIRSSFVPPAPIQELRDLTRTRKQLVREISQHSSRIQKILEDANLKLGSVLSNVLGKSGRAILQALIAGETNPETLADLAEGTARKKRAELIEALHGRIRDHHRGLLKVHLELIAALEQALADIDATVGKTLAPIRNSARLLTTLPGVSDLTAQVMVAEIGVDMSRFPTAAHLISWTGLCPRSDESAGKRRSSRVRKGAPWLKTALVTAAWAAVRVKDSYLQAQFHRLRSRRGAKKAILRLVRRLSDLGCEVQISPQAA

SEQ ID NO: 341745 - protein, 392 aa, unidentified
MVVSVGIDVSKDKHDCFIVNSESEVLADVFIIPNNMDGFHYLLQRIQDCTNTQDKIKVGLEATGHYSYNLLGFLLDNGLSTYVLNPLRTNLYRKSLSLRKTKTDRVDARTIASMLLSDAGLKPYTDTAYHYEELKSLTRYRFDKVKARSKLKSSISRLVCILFPELEKLVPSLHLASVYALLEEFPGAKQVAGAHLTRLKTLLETVSNGRYKRDMALEIRNAARNSIGSRMPAKSLELQHTIRLIRELNAEITEIEEPIQSIMAELHSPITTIPGLGFRMAAMILAEVGDFTRFESPDKLLAYAGMSPSIYQSGQLKNCYPHMEKRGSRYLRYALYNATKYVCQWDPTFSDYLAKKRAEDKHYNVALSHAAKKLVRLIFAMEKSRTTYRLAA

SEQ ID NO: 341746 - protein, 358 aa, unidentified
MEYIAFDAHKHYTLASVARPDGQVVREERIEHDRGALRQFLERCESGSPVAVETIGNWYWIVDEIEAAGCAPRLVHARKAKLMMGMINKTDRLDARGLNRLQRNGTLPTVWIPPGELRDQRDLPRTRMVLVRQRTQLKNRIHATLAKYALHNLDVSDLFGVGGRALLRQRLPLLPGHTAYATEHLLEQVESLDRQVDGFEHRMTTVFKPTPAIQLLMTLPGVGLILAVLIALEVGDVARFATAEKLAAYAGTTPRVHASGGKTRYGRLRPDVNRYLKWAFVEAANAICIARRRAPQRHVSRLYERVARRKGHPKAIGAVARHLAEATYWMLSKQEPYRQPKAAAVSSTGDKRDYRMSS

SEQ ID NO: 341747 - protein, 300 aa, unidentified
MAGCVDRAGSCERCGNTAEGIADLADFVWEHAGDDGLVVLEASGGCEKLAFLQLWAQGIACTIDNPRHARAFAQAMGCLEKTDRIDARMLAWFADARKLIPTPPPSAQQAKLEALTARLRHVTRDIIVQKQRRSATTDPLALAQIGETLALFARQAKDISAMIAQSIASDPHWRAFDRTIRSIKGLADRTTAYLIADLPELGTLSNKAIVKLVGLAPIANDSGARFGKRRTRGGRASIRTILFLVADIARRFEPSLADFRDKLLAAGKPKLVVRIALARKLLVRLNAKMRDTRLSIPLTY

SEQ ID NO: 341748 - protein, 349 aa, unidentified
MKKLSKVPTQMGETIGIDLGDKISRYCIVDQNGEVMEEGSFRNQASSIDKHFGGEPRRVALEAGAQSAWISRELKRLGHEVIVANPRELKWITASDTKNDPADARKLALLARADVRLLAPVEHRTAEQQAELAVIRARDAILRARTLLINSARSIAKGFGVRLPQSITNTFGARAVEALPEFLRLALTGLLEQIDAISRAIAGYDQQIAKLVAKHPELERLESIPGVGRLTAMTFLLTLGRAERFAHSRDVAGFLGLRPKQRQSGARDPQLGISKSGDPYMRKLLVQCAHHILGHYGKDSALRQWGLAKSERGKKATLRAIVAVARKLSVLLHRLWVSGEFYKPFPKMA

SEQ ID NO: 341749 - protein, 343 aa, unidentified
MDADGTALMTCRVATDPPEIAKALQPFANKLRRVGHEAGALSPWLHPALKAIGLPVVCLETRHVRASMSAQRNKTDAADALGIAHLMRTGWFRQAHIKTDQAYRLRLLLIQRRNLKQKFLDLENTIRHSLKAFGIRLSKVGRARFEAAVRDACANDQLTAELMECMLSARAALWREYLKLHGLVVRIVARHELCRRYMRIPGVGPITALTFVTAIDDPARFRRSRNVAAYFGLTSKRWQSGTSIDVKGRISKAGDPDVRRALYEAASSMLTRYKGKTTLKTWGEKIAKRCHRKGVVAVARKLAVVMHAMWRDGSEYADQPLADAATPRRSPQAKDRKLLGAHA

SEQ ID NO: 341750 - protein, 320 aa, unidentified
MTSKGAEKIILSTIGIDISKDSLEVCRLPGGESARFDNNGSGHQQLIRWLAQTPIARIVFEPTGAYHRTLEQTLTAAGLPLAKVNPRQARRFAEAAGKLAKTDRADAAMLARMGMALAPQSRPPTSRMLSQLKELHLARQALIKDRTAAKNREKILTLPLLKRQNQNRQRQIEAQIAAIEAEIEARIAADPALAERLAILESIPGIAKVTACALLIEMPELGTLDGKQAASLAGLAPITRQSGRWTGRAFIRGGRASLRQALYMPALVATRFNPQLKAKYHQLITAGKPTKVALTAIMRKLIVLANALLRQRRNWAENPA

SEQ ID NO: 341751 - protein, 280 aa, unidentified
MHYTIEYLRRFSVDLIVLESTGGLELPLAKALHRTGFRVVMIANPRQTNQFAMSQSLAKTDNKDAKMLAFYAQMLAMRDNVAQQLYIPPTPEQEQLEALVSRRNQLVEMRFAEKNRLEQVHSTQVFSVEQHIDYLSLRIDELDREIEQHLKHFDDTIKKFKDIKGLGTQTIAVLMSMLPELGQYTHKQIASLVGVAPHPKESGNTKWKSRCSGGRKAVRNALYMATFVCVRFEPKLKQFYERLRANGKAFKVAINACMRKLLTILNAIVRDDSQWDAHAL

SEQ ID NO: 341752 - protein, 439 aa, unidentified
MPQPIVAVGIDPAKRLHRAVAVLFPDQVILDVALPNACDAIANLDDRLTELANRHGAELVYGLEDHRHYGHLFCQVLSERGRDVRVVNPLWTSRQRAFYGQDKDDSIDGRSIAAVVLRRHHELPLAAEFGEVVRAIREAERSLQDLDKARTRSVNRLHLQLNDTYTAVYDKFFGKLRSPFALRFFRRFPLPQDLVGHDVEMLASLLLELAGGKVGPHKGANRLIAMQRKAKTILETSAAMGTRPRSSALELKAELIRQLCDELLAIHDRVTRLNRLLRKKLLPATGQTITTITGISTTLGATMIGETGSVTRFRSPAAFAVYNGTAPARRSSGGRDRHTARRNCNHRLKRAFYLTARAAVLHDPIARAYHQRCINRGLDNTEALKRVARRMSDLVYALLKSGKAYDRSIVENAIAKRRGQAARAEPCRAKQSLVHPRRV

SEQ ID NO: 341753 - protein, 416 aa, unidentified
MGKQRDIACGADIHKNTIVATILSLAGTKNQAKFGTTLSELLRFKFWLTDNGCGVVAMESTGTYWIPVYTVLEGSIEVVVANPYMIKHIPGKKTDLIDSDWLAELCLKDLIVPSRIFPKEDRALRSLTRAREGLVKIRTHLKNRIHRDLSSSHIKLSSVVTDIFGKSGMHILRGLLDDQSIDEIIKGIPSGRVKKNADKIKESIENNLDSSQIFLIESSLDLMGHVQDKIDRIDMDLKSKIITRLNDLKIAMSIPGIEFTSAATILAEIGNYRNFSSPEKLASYFGLVPFVNQSADKLHTGCITKHGSKHLRWIMVQVAHAASKKIGSKLRKFYLRVRARKGANVAIVALARKILCILYHLLMNQEMYEEPGAARKTRPNRLDQSTTQREFTAQEMIDILKRSGYEIRKIDRGACG

SEQ ID NO: 341754 - protein, 337 aa, unidentified
MSKSINFKYFIGIDVSKKTLDISVLNFDEVIYYQQITNDERSINSFLTRLKRQHIELSECLFCAEYTGIYNTPLQNVVTKKELNMWVEKAMQIKRSQGMQRGKNDKIDSLRIAQYALKNREELRLWHPLRKELMLLKKLVSSRKRLLSVKKQITQTFTEKDFLSKEELKVLKRSCKHTLSAISKDIKATENQLLEIINGDSELHKLFNIIKSVDGIGMYTAIEVIITTNEFKNISEAKKYACYCGVVPFEYTSGTSLKKKARVSRMANTSVKTLLHMAALSVINMEGDLKQYYERKVKEGKNKMSVINAIRNKLVLRIFSCIRNERMYKKEYNYSLV

SEQ ID NO: 341755 - protein, 375 aa, unidentified
MFHFTTLFIGMDVHKESFSLCYYDMMANQFKHSTKVGPNVSYIVNYVNELRRLYGQDVEVLCGYEAGCLGFTLYHQLQAHGIPCIVMAPTTVMKEGSKRVKTDKKDAAQLTKALAFHSYRPVHISTVEDEQVKEYICMRTDHKVALKKIKQQILAFCLRHDFRYTEGSSNWTQKHVRWLCPLNIDGLYAEILTEYLLTYEKLVDQIERYDARIEQLGQSDSYQEKVSQLFCFIGIKTLTALSIVMEIGGFNRFATAQHFDFASYLGLTPSENSSGDRERRGAITKTGNSHVRRLLIEAAQSLAKGTIGYKSKELKRRQSGNRVEVIAYADKANERLRRRYRTLVLGKNKKQNVAKTAIARELSGFIWGMMTGRIA

SEQ ID NO: 341756 - protein, 348 aa, unidentified
MQHGITAVVGLDVGDDWSHMYAVELATGEVLEEGRVRTRRDALREVFASRPPARVALEVGTHSRWMQALLLSLGHEVLVADARKLRMIWQGTNKQDRLDARSLARVARLDPQLLYPVRHRSAQAQSDLSLIRVRDQLVRTRVKLVTMVRSMVKATGERLPSCATDRFAERVAGVLPESLRESLEPVCALVAELSRAIARLDVRIEAVARARYPQVWPLTTVRGVAVLTALAYVLVLEDPARFARSRDVGPALGLVPRRDQSGATDRQLGITKTGDGLLRRLLVECAQHILREGSADSDLKRWGMAIAARGGGKAKRRAVVAVARKVAVLLHRLWVTQEDYVPLRNSAA

SEQ ID NO: 341757 - protein, 304 aa, unidentified
MYVCILNQDGEILLHRTMKTRPEVFLKAIAPYREDLVVAVECIFTWYWLADLCAQEQIPFVLGHALYMKAIHGGKAKNDKIDSQKIAVLRRGGMLPQAYVYPAAMRATRDLLRRRVPLTRQRAELLAHVQQTNSQYNLPEIGKKLAYKANRDGVADRCPEPAVHKSVEVDLTLIDYYARLLRDVELTSGQTAKEHKAQALYRLQSVPGIGKILRLILLYEIHDIHRFPSVQDFVSYCRLVTCAKESAGKRYGTAGATIGNTHLKWAFSEAAVWFLRNNPAAQKYLARLEHNHGKGKAFTLVAHQ

SEQ ID NO: 341758 - protein, 337 aa, unidentified
MRYIGLDVHKDNITACFMSTGGKVLENIEVPSDADGLATILGHMNKEEHCVMMESSTYSYRVYRHLEDLRIETHVVHAANFKVVTGSDKKTDKSDAETIARYLRLWKHGDVKLSMAFIPTPEQCALKDICRYCEEVSRKVGMESQRIKSHMARNCMVLPETSKNLDTIKAMRFIRNTWPDDKTLIHRIGIFEQLLKEKKAVEKEVCSHMKGDPNVTLLESIFGIARQSGVQIMSMIVDIRRFPTPEHLCAYFGMVPRVRDSGGKTYHGKMTKKGDRMMRMIMERITLVHIGRSKSFITRYYERKVKEMGEKKALVTASRKLLTVIHAMLTKKEPFKA

SEQ ID NO: 341759 - protein, 347 aa, unidentified
MSSPYDGVQWVGMDLHRRRSVLVRMAADGQRLGKMVRFNNDPARLKREIAKAGPQPKVVLEATLGWYWAADALSEAGAEVHLAHPLGVKAFSYRRVKNDERDAADLADLLRLGRLPEAWLAPPETRELRELVRGRHKLVSLRISCRNQAHGVMGKLGIAVPMSDLFGTTGTAFLDELLLPAGYAARVRALCAVMHELGRQIGMLDKEIAARLASDTGYRAIQKIGGIGPVLAAVFTVEIADVTRFPDPQHLCSWAGLTPRHRESDTVVRRGHLTKQGSKLVRWAAVEAVHHAPENTPMRAHRDRIEARRGAGARNIAKAAAARKLLTLVYYGLRDGEVRCLTRRDPV

SEQ ID NO: 341760 - protein, 343 aa, unidentified
MEVSTIGLDIAKNVFQVHGVDGSGVTVIRRQLRRGQLLKFFAKQPPCLVGMEACATSHYWGREIAALGHEVRLMPPRYVKPYVKRNKNDAADAEAICEAVTRPSMRFVALKSTEQQSVLMLHRTRELLVRQRTQLVNAIRAHMAEFGIVAGVGLPQVKELLAVIADPDDDRLPPGARSCLESLARQFGSLHAEICAAEQRIHAWHRSNEVSRRLATIPGIGPITATALAATVTDAGVFKSGRELAAWIGLVPRQSSTGGKERLGRISKQGDQYLRWLLVAGAMTVIRHARRRGAADHPWLVDLIAHKPTKVAAVALANKMARIAWVLLAQGGAYRKPTTASAL

SEQ ID NO: 341761 - protein, 303 aa, unidentified
MGLGGDRNHGGADMAQVRTWAAFDVHVSGVVAATLERDLGELRVRRLAGGSDAVVEFVAGLPGPVRATYEAGPTGFVLARRLAAIGVDCLVCAPGLIPRAVTDRVKTDRRDAERLVRLLAAGELRRVMVPSVEEEALRDLVRAREDLRGDLMRARHRLAKLLLRHEIRFDGPQANWTQAHLGWLAGVRLEQPASQRALEDYRGAVAGLMIRREQLEAEIARALPASPWAQTARRLMCLRGIDTLTAAGLCAEIGDFGRFRHPAQVMSYLGVVPSEHSSGERRRRGPITKSGSQHARRLLIVVV

SEQ ID NO: 341762 - protein, 388 aa, unidentified
MEVVKKNVGIDISKDDFVATLVTLMANQEIVYHGNNKYKNNPEGFKKFYLWVNSIFVDDDLPVHFTMEPTGVYYESLAYYLFEKEQIVHVVLPNKAKKFAESLNIKSKTDKLDSKALGRMGAERKLDRWVLSSKIYRKLKILTREREMLQKDKTRTQNQLHAENHSAEPIKRTINRMKNRTKYLEKQIKAVEKDIRELIENDEFVSQKVKKITTIPGIGLLTAAVIIAETNGFCSIKNQKQLTSYAGYDIILKESGKWKGKSKISKKGNSHIRRALYMPSLSSINHTETYKNIYTNLNEYKQNGLIAGTAIQRKLLCLIYTLWKNDTCYIENYQQMKRSKDVTSGNDETKSSFCAFAKQKKVGEKLPLNKIDFGLMNQLKPSFCALQN

SEQ ID NO: 341763 - protein, 396 aa, unidentified
MFIVGIDIAKHTHQASVMNTDGSLVGKSIKIPNTSGGFDVFISKLKEIDRDISHFEFGMEATGHYWLNIYTHLADLGCIVHVINPVQSDALRGLYIRQTKNDIKDSAIIADVIRIGRYCETSVSDDKMLALRDLTRQRFYLVDMISDLKRKSLTLIDRIFPEYPKLFSDTFGSTSLELLANCNTPEDIIAIDTDKLVEMLSTASKGRFKREKAEKIKAAAQNSFGALLCTDSTSFMLKQFVEQIKFLENQLDELNEMISERLAEFNSPITSITGIGDVLGASILSEIGDISRFESADKLAAFAGIDPTVSQSGNFLGTKNKMSKRGSPYLRRAIWLAATAAILHDPAIKAFYDRKKAQGKHHYVCVGYICRKLINIIFSVLKSGQSYQPVFPKNLV

SEQ ID NO: 341764 - protein, 428 aa, unidentified
MNPNDSTNTNDQTDPSAQPPQACIGLDWGDQKHSFALQARGGPIETGVLEHSAENLHRWLKELEQRFGGRPVRLGLETSRGAVIAALRHYPWLEIYPLNPVTSSRYRSAFKPSGAKDDLPDALVCLELARDHAAKLRPLQLQDPQTLKLAGLVEARRDLVDRRTTLLNQLTSLLKSYYPQALALLENLNTPLAVAFLKRWPEVISLKAARPAAVKNFFYQHNVRSEELVKKRLALMAQAVALTTEEARVSVAVLQLRALVDQLEVFQKHVARMDAEIKSAFAAHPDAALFRDLPGAGAQMGPRLCAAFGTDRAAYPDPASLQKYAGLAPVREKSGGQLWTHWRWNAPRFLRQSFVEWAGQTVRYCEWARVYYERMSKKGKKHAVILRALAFKWIRILWKCWQERMAYDDARYLKQLIQRKSPNAVTAP

SEQ ID NO: 341765 - protein, 356 aa, unidentified
MSIVAHSHPFVVGVDTHARNHVYAIIAAGTGELLQTRDFPTTSAGINRAIAWVARRTGADLGTLWVIEGAASYGALLAGAVGAAGYQVAEAARMDARALHGVGKSDPLDAHRIAAAVLPLQEQQLRRPRLNDGVRAALRVLVTARESMTTERTRAVNALTALARVNDLGLDARKPLTGTQIAEASHWRARDEPLALSVARSEAVRLARHISELDADIKTNTSQISGLVEISEAAPLLQETGFGPVTAAICLTAWSHQGRVRSEAAFAALAGASPIPASSGNTVRHRLNRGGDRTLNKALHMVARSRMSFDAQTIEYVQKRQTEGRTKREIRRCVKRYLARRIYRTLNATNHTRSQA

SEQ ID NO: 341766 - protein, 318 aa, unidentified
MAEVVTFEQIVERGCGLDVHKQTVVATIDGFGLKRETREFGTTTRSLTELKEWLLREKISHAVMESTGIYWKPVYHVLEPSGIKVWIVNARHVKYVPGHKTDKRDSKWLCKLLLAGLLKPSYIPAREQRELRDLTRYRRKLIEQIASEKNRIIRLLEDCNIKLSSVLSDTQGVVGTKLIDKLCSNGKVTMEDIEEVYHGKLQASREEIYEACEGMVTEHQVFMLQAIKKDIHSCESIIAELTLRIREMLSPYENVLELLKEVPGLGTKSTEDLIAEIGLDMSVFPTEKHLASWSGVSPGNNESAGKKKVDALPTETNR

SEQ ID NO: 341767 - protein, 377 aa, unidentified
MEKDSRFVGLDVHAETIAVAVAEPGGEVLALGTIPNTPDAVRRLMKKLAPADELRVCYEAGPTGYVLYWQLTQLGVACEVVAPTLVPVKPGDRVKTDRRDAEKLARCYRSGDLTAVWVPDAAHEALRDLVRAREAAKKDQLRARHRLDKFLLRHGRRRPAKTTAWGTKHRAWLKTVRFDHPAQEATLLDYGAEVEHARDRIARLERDLDTAIAAAPAAMRAVISALQALRGVAQLSAVTIVTEVGVLSRFARPRQLMGYSGVVSREHSSGPTIRRGAITKTGNAHLRRVIIESAWAYQHRPAIGATLRTRQRDVSEEVKAIAWKAQHRLHGRYRRLLAKGKSTPQVVTAVARELLGFIWAIGVQVEQAQREAATRAA

SEQ ID NO: 341768 - protein, 319 aa, unidentified
MSETPLGIDVAKSKLDVALPTGGKVLVKKFDNNLKGFKLILGWLASLHIEKVHACLEATGPYGDAIAEFLYEHGHRVSVVNPIQIKSFATSNLQRNKTDQADARTIAAFCLAMDPDDWQPMSPEAKYLQALVRRIEALERMLLAETNRQENAPAATRPSIDRMIETLKKEIDNVQRLIKDHINNNPDLKQQSELLQSIPGIGEKTATLLLGEIEFRRIKSARGLAAHAGVTPRQFRSGTSLNRTRLSKLGNSRIRKALYFPAITALRYNVIIKQFAQRLGQNGKTPMQVVCAAMRKLLHIAYGVIKHNRPFDPTMAFSA

SEQ ID NO: 341769 - protein, 366 aa, unidentified
MQDSTIWVGLDVHKDSVTAAILDGDEPQAEVIRMSSDLNKIRRLFRRLSARGAIRSCYEASGSGFVLHRALTDHGYACEVVAPSLIPRKPGDRRKTDRIDAIQLAKLLRSGHLTSVEVPSEEQEAVRGIVRYRAVLKQEAKRAKHRICGFLLGQGLTFDGTKSNWTKKHRIWVAQVRCELEGPAQLCLSMELEHLEYLETQINALDTEVERISRRAPYRETVEALQCLRGVKTLTAMTLATEIGDVTRFRSPRALMAWVGLVPSERSSGDRERRGPITKAGNSEVRRVLIEAGWNNRHKARSTLNLKRRRQGQNPTAVAIAVKAQHRLSKKFQRLWERKHPNVAVVAVARELTGFVWAIMNTAPQH

SEQ ID NO: 341770 - protein, 343 aa, unidentified
MHVSTIGVDLAKNVFQVHGVDSAGKVVITRQLRRKQVLDFFSKLPGCLVGMEACGTGHHWAREISKLGHTVRLMPPSYVKGYVKRSKSDAADAAAICEAVTRPSMRFVPIKSTDQQALLMLHRTRDLLIRQRTQLINALRAHLAEFGLVAEKGREGLAELSAIIADEMNREALPSAMKQALQTIVDQLAALELQIGTLDRVIHAHHRANEMSCRLETVPGIGVIGATALASTVTDPSGFKTGRDFAAWIGLVPRQHSTGGKERLGGISKQGDRYLRRLLVIGATAVVRQARKHPQKHPWIMKLLAKKPAKLVAVAVANKMARIAWAIMARGGYYRAPALAAAA

SEQ ID NO: 341771 - protein, 339 aa, unidentified
MAILYVGIDLAKNVFAIHGVDEHGKPALVRPSVPRSRLHQLVAALPPCTIGMEACSGAHHWARLFAQHGHTVRLMAPKFVAPYRMSGKRGKNDAADAQAICEAVQRPNMRFVPVKSQDEQARLCVHRVRQGLVEQRTATINRLRGLMSEFGIVLAQKAATVRREAAAHLEDLPGWANTAVGDSLSELHRLDERIAEYDRHVVHMAREDERSRALMQLQGIGSTTASALVATIGNARDFKNGRQLAAWLGLVPGQYSSGGKTRLGGITKAGDGYLRTLLVLGAKAVLAAARNKDDRLSRWAMALEVRRGYWKAVVAIAAKNARMAWAVLVKGENFKPLEA

SEQ ID NO: 341772 - protein, 361 aa, unidentified
MIHIGIDHHKKYSHVVAMNDSGEIFWDGRLASEKEAFQSLKESLPSEEPMQSVLEAGRNWGILYDALEELELNPKLANPLKMRLIAETFTKTDKIDATTHAVILKAGLTPLVHVPSKEVRDQKNLLRQRVWLVKLQTALKNRIHNVLDRNHLKPPEKTDLFGSYGRAWMNALNLHDPDSKLLKSDLELLDTIRSHIRQTEKWIDEALKENLYIPILMTFPGVGKLLAALIALEIDTIERFPSAAKFCSYSGLVNSTYSSSDKTFHDGLIPTCNHHLRYAFIEAAWTAVRVSPYFQAFFRRLKSKKGSQNAIGAVGRKLCEFTFSCLKKQRAYEEKAYRFQPGRIAPRPTHSIASCTTRSNR

SEQ ID NO: 341773 - protein, 343 aa, unidentified
MTCFVGLDVSQKMTAICVVDNAGHRLWRGQCPTNPEQISMLVRRHAGSDARIGIETGAMTPWLVHELRTLGLEVVCLDARHARAALEMQINKTDQNDAEGLAQIVRTGWYRSVHVKSFDSHRARALLGARTQLIGMTTRLSNHIRGVLKTFGLLPGAMRGLPFDRKVEALLLDRSDVALIVRPMLVAWRQLREQIAVFDKAIRVLVRSNSACRLLMSVPGIGVFSALAYVSTVEDPVRFSRSRSVGAHLGLTPRQYQSGEIDRSGRISKCGDTLARTLLYEAAVVILTRLKKASSLKDWGHSIARRSGNGKARVAVARKLSVILHSVWRSGQPFLWSDHANAA

SEQ ID NO: 341774 - protein, 378 aa, unidentified
MISVGIDVSKGKSTVCILKPYGEIVSKPFNITHTHKDLSELSSMLFRLNDEVKIVMEATGIYHLPVLTYLQEKGFFVSVINPYLMKSYRNESLRKAKTDKIDSRIIANYGIDHWFKMKEFQTSGEIYEELKLLGQQYRHYMKLHLLSLAELTHLLDLTMPGIKNLLASWNETNRKDKRSDFVERFWHYDVITSMSEQEFTEEYILWAKEKKYVPSQEKAKVIYTLAQESIPTLPSETSSVKMLVTEAVRVLKEVDATLGLILSRMQEIAKTLPEYSVVREMGGVGNTLAPKLIAEIGDVRRFRNGKALVAFAGIDPPPYESGQFVGCNRKISKRGSASLRKVGYETMRSLKMRSRPEDPVYRYVVKRNQKVKVKNQQR

SEQ ID NO: 341775 - protein, 345 aa, unidentified
MEITTIGIDLAKNVFQVHGVDQRGKVILRKQLRREQMVEFFAKVPPCLVGMEACGSAHHWARVLQGQGHTVRVIASQFVKPYVKSNKNDAADAEAICEAVAPPNMRFVPVKSVEQQAVLAAHRARQGFVKARTAQANQIRGLLAEFGLVIPRGLWHIHQRVPALLERAADTLPLALRHLIERLLAHLRELDRQVAELETQIQAWHRSSELSRRLEQIPGIGPLTASALVASIADARSFDNGRQLSAWLGLVPRQSSSGGKPLLLGMSKRGDVYLRTLLIHGARSAILAAQRKAATTDSWLGKLLQRRHLNVATVALANKNARTAWALLAHDREFQPDYRPSLATA

SEQ ID NO: 341776 - protein, 399 aa, unidentified
MFVGWDWASTAHDVTVIDSAGELVHRMAIPHTEDGIARAVAKLADYGDPGELPVAIEATRGLVVDRLLGVGHPVIAVHPNAFHAVRPRWGAARAKNDPGDSFKLADYARTDIHRLPMLVPTLPETLELQALTRQRDCQLALRIAAVSQLAALLDQYWPGGKTIFAQLHSPIALDFLHRYPTPRAAASLTPARIEAFCHRRGYSGRRSGAELLDRLRSAPISASRLGEPVVAQMIRGQVAVVRALQAGIDALDIVIAEKVTAHPYAGLLAVLPRIGTLNLAQIIGEVGPILERATSFDQLAAETGLAPVTRSSGKTHTVAFRYATNRRARQALHTWLDNSRRSSDWAAQRYAAARARGQRHPHALRTIGRAWLRIIWACWRTKTAYDPARDERAKQPTAA

SEQ ID NO: 341777 - protein, 344 aa, unidentified
MDQISRIGMDTSKHVFQLHGVNAAEAPVLRKKMRRKEMVAFFKKLAPTVIAIEACGASHHLARLLQSFGHTVKLIAPQLVKPYVKRGKNDAADAEALCEAMSRPTMRFVPVKTTEQQATLMLVGVRDRLIRNRTQLANTIRGYAAEFGEIAAKGMAHLVPLLERIQADESLPVLARELFAIQAKEYVELQTQIDEVEAKLTAWHRADECSRRLAKIPSVGPIGAVLLRMKTPDPAQFRSGRQFAAWIGLTPKDHSTAGKIRLGVITRAGDEGLRSVLVVGATSVIQHAMRSGKASPWLAALLKRKPPKLAAVALANKTARIAWKMMLTGEDYSAKSAATPAGAV

SEQ ID NO: 341778 - protein, 345 aa, unidentified
MQITSEFSEESIAWYVGIDISKAWLDVHLRPAGHSFRCDNNSEGFTALDTWLRTHGANPKTTIVCMEQTGIYGHRLLATMTGLGWRCAVEKTTITATVGPEHHRKEDPYDAALIAEYAERYLDTLHLQAPAEEAIDTLRCLYAERSRVVRERAATKTKQVQADQYVHLNALLTEIWEDPLAFYDAQIVRIEARMQECVDSHTGLETYFRLLISIPGVGSVTAWLWLFLFYGQDHLNHKQVASRFGFAPHSHISGSSVRGKTRSSGHGMAEMRAKMTMVVRSSSTHVQKFQAYKQKKEEEGKAWPVIRNNLINRYIKITCAIWNNKTPYDPNHTSRFHRQKKAKAA

SEQ ID NO: 341779 - protein, 446 aa, unidentified
MPLEATPAAIGIDAAVVANHHVVIRRPGLSGAGETIEDFVVAPTLAGMEILTKRMSQWPGVMAVAEPTSMTWLPLSVALRNAGADLALIGNRHSARLRSALAGKNKSDPIDAAVLSRAGELFVLQPARIPSPSELALRRAAQRRGKTLLEANRCLRRVISQARWAFPDVWNAFAGSRPTALAVLNRWPHLESLGRARTSSITEAVAQHTRGVGHVEARAERIRSAARNWAEFWSGHLDLDALAWETSELLEDLSVAEARLERANQQARRWWEQLWGDDPLLLSVPGMGPIVAPTVRAFLADGTQFETAKEAQAYVGLNPSNWSSGQMESPSRAITKEGPPALRLAFYQAANVARSHDPQLAEFYRHLMVERGHCHTKANCAVARKLVARTWATLVSGRSYEVRGLDGEPVTARQAKAIAESLAVPATVRRRSRAHSAATHRARLTH

SEQ ID NO: 341780 - protein, 316 aa, unidentified
MKTEIFIGLDVSKHHLDVAVRPQGRHFVAPNNDRGVKQLVKRLAAIKPKLIVLEASGGYEFLATAALAEAQLPVALINPLTVRKFAGATGKLAKTDKIDAQVLAHFAEALRPEPRLLPDQDQQLLKAALSRRLQVVKMIGQEKNRLEKTFIPALRQDIEAHLAWLQQRLAQLDRDLNNQIRQSPLWRDRDRLLQSIPGIGPVVSRAVIAQLPEAGNLPGKKTVALVGAAPYNRDSGRFRGKRMIRGGRSYLRRMLYMAAVVASRFNPVIRTFYQRLLAAGKPKKLALTACMRKLVLIINAMLKNNQPWNQSLNQVP

SEQ ID NO: 341781 - protein, 361 aa, unidentified
MKDSISLVGLDVHASQTHAAIVDMSTGELRGVKLRMPPVEVVEFLATLPGTVRAVYEAGPTGFGLARAGTARGIDVRVVAAGKIPRASGDRVKTDKRDAERLARLLAAGELHFAFVPSVADEQFRDVIRAIEDCRGDLMRARHRLGKMLLRRDLRWAGPGSTWTVAHMRWLRSLRFADACSQAVLLDYLSGVEMLVARRATLVATLEQVIPDSRHAPVIAALRCFRGIDTLSAAGLCAEVGDWQRFRPKQLSGFLGIVPSEHTSDRKRRQGSITKTGSAHGRRLLVEAAHHYRHKPAVGDGLARRQHAQDPRVIEISWRAQRRLHQRWNTLAGQRRKPAGVVAIACARELAAFCWEAATLN

SEQ ID NO: 341782 - protein, 387 aa, unidentified
MTQVDDLSRSFVAFDQNTSLTVVVEMSESSWLVAGMVPGVDRQPLKKLEPDPDALLRLLERWRAEAVKTGRTVERIVLAYEAGRDGFWLARWLQARGIEVSVIHSTSVAVSREHRRAKTDRLDTAMLMRVFVGWLRGERGHCGMVAIPTAEEEDAKRPSRERESLVGERTRITNRMKSALARLGIRGFKPQLRKAPERLAALRTPEGSAIPPNTLDEIRRDMARLAVVREQIKEIEQARLERLEQAPDEGPNAMVRLLARIIGVGVETADMLVREVLSRNLRDRRAVARYAGLTGSPDESGSKRREKGLAKAGNARVRRGLIQLAWRFLMFQKDSALACWYRARTEGPKGARKTTMIVALARKLLIALWRMVTTGVVPEGVVLRQGA

SEQ ID NO: 341783 - protein, 346 aa, unidentified
MPIVGGLDIHRKQITFDYLDTETGQVQRGQISPADRLHLRAWLARFAGREDVAFAVEGCAGWRYVAEELAAAGIAAHLAEPADTAFARGRKRHAKTDRTDARHLRVLLAEGRLPECWIPPARILECRALLETYNDLRRERTAWAQRIHAVVFHQGAPALGEGALRTEKGVTALREVAAAHLSPAGQLQVATALEVIDALEARLHVVRHQLTDAARHLAGARALAARLYGVGPVTALALTCWLGGAGRFSSSRQAVRFAGLDITVHSSDRKGPPGRLSRQGPPVLRWAVYEAGKTHARTSAPDHRYYAQVKDRKNSKRACLSEARKILRQAHHILAELGDDALAPAA

SEQ ID NO: 341784 - protein, 347 aa, unidentified
MDYVGIDLHKTSSQICTLSEGGELTERRIKSTRASFDEVFAGRPPARILVEASTESEWAAQHLEALGHEVIVADPNFAPMYATRDKKIKTDKRDARALCEACRLGAYRPAHRTSERQRRVRSQLLVRSTLVRTRSKYISLVGSLARREGCRIATGGSDNFTARVEAAGLPAHVMAAIAPLFESLKMLNRQIAEADAELEKIVKEDEVVRRLCTVPGVGPVTATTFAATIDDATRFGAAKQVRSYLGLVPREYSSGERQHRGRISEAGGSRARTLLVEAAWALLRWRNAKNQALYDWAMRIAARRGRARACLALARKLAGILYAMWRDGTEFDPQALRQGDAVAAAAA

SEQ ID NO: 341785 - protein, 368 aa, unidentified
MDSSCDLVGIDVPKSRLFRAKEEPIMQNHTVIAVDVAKAVFEIAVSDRPGHVCHRARLPRAQVMEFFAQQPAATVVMEACGSAHFWGRQFQQLGHRVVLLPPHQVRPYVRCNKTDRTDAKGILEAFRNADIKPVPVKSVSQHALTALHRLRSGWIHERTARINALRGLLRELGIFIPVGPRNVVPMVWAQIEDADSGLPDSLRPVFAAACQEIRDIEARIKLAERQLEALSEQLPPVAHLRSVPGIGLLTATALVAFIGDIRRFPSGRHLASYLGLTPREYSSGLKRYLGRISKRGDGYLRTLLIHGARSLLLHARQNQPDRLREWAHKLERTHVHNKAAVAVANKLARIVWAVWTHQRPFERIEKAA

SEQ ID NO: 341786 - protein, 338 aa, unidentified
MNTVTLLGIDIGKNTFHLHGQDAKGHQVLRKKLNRNQLLPYLAQIASCKIAMESCGGSQWLARKIMEQGHHVQLIAPQHVKAYVTGNKNDFIDAEAICEAASRPRTRSVQVKTVEQQVLSTEHRLRKSLVNRRTAVINQVHGFLLEFGVIFPVGYAALDRVSDLMASRELPTRLRNAIERMLEDIRQLTREIKKLDVEIKQQLAQNDAGQRLQSIPGIGPLIASALVADVGDASGFKSSRDFAASLGLVPRQYSTGGETTLLGISKRGDKYLRSLLMQGAHAVLCRIDKRTDGLGIWAKNLLARKHPNKVACAMANKMARIVWVLLTKGGTYNSQLLA

SEQ ID NO: 341787 - protein, 400 aa, unidentified
MNAVGIDVSKGKSIVAVLRPFGEIVSKPFEVLHTSSDIHQLIDFLNTLEGSTRIIMEHTGRYYEPVAQWLTDAGFFVSTVNPKLIKDYGYNSLRKVKTDKADSLKIARFALDNWQELRQYTCMDTLRNQLKTLNRQFGFYMKQKTAYKNNLIALLDQTYPGVNALFDSPARCDGSQKWVDFASSFWHVDCVRGIGLVAFTDRYQKWCKRHGYNFQRGKPAALFKASKELISMFPKDSMTKMLIKQAIEQLNTVSATVELLRTEMNRLAAQLPEYPVVMAIKGVGPSLGPQLMAEIGDISRFTRREALTAFAGVDPGANQSGKYEAQSVRTSKRGSPQLRKALFQVMDCLIKTTPTDDAVYRFMDKKRSEGKPYYVYMTAGANKFLRIYYGRVKEYLSSIS

SEQ ID NO: 341788 - protein, 343 aa, unidentified
MHIASVGIDLGKNTFHLVALGERSKILLRKKFSRAQMLAYTANLPSSLIGLEACAGAHCLGSVLRGQGHQVRLIPAQFVKPYRKSNKNDFLDAEAIAEAVTKENMRFVPIKTEEQLDVQAMHRVRDRLVQRRTALINEIRGFLLERGITFAVRPIHLRKNLLAVIEDAEQNLSSRLRWLLERLWLEWKQVESDIQAITEEIERIANEHALCRRLQQIPGFGPLVSTATVAAIGNGAAFRRGRDFAAWVGVVPRQYSTGGRQKLFGISKRGNIYLRRMLIHGARAVLFRIKYDTAGFGQWVHRLMQRAPRNKVVVAIANKLARMAWAVLSSGKDYQHQPLQMIA

SEQ ID NO: 341789 - protein, 340 aa, unidentified
MEKRFIGIDLHRNRFTCCIRLENERMYVTEWELEDIEKFVKKLRPSDEIAVEITGNTRLFFDAVVPHVARVVVVNTNQFKVIRQSVKKTDPHDARALALYLSKDMLPEVRMKDKEHGELASLTQTRDTLVKLRTALKNKINNILSARGLNLAKEALGSEKKLNEVLELPFDEIVRIELRVIVEQIRSLNKSIAELEKTIGEEGSKLEGHKGLSSIKGIGKITGAILLSVIGDVNDFADEGRLASYFGIVPRVSNSNETERSGRIHKRGTKLGRTALVQSALIAANYSPYLKRFYEQVKARRGAGKAIIALARKFLGIIYRTLKNKWVFEDFPNFVLAEAS

SEQ ID NO: 341790 - protein, 364 aa, unidentified
MKTYYIGADVHSNSTELAIEHKGSIVSRYSVPTTIPAIRNVLSSIDGEKHLTMEEGPMAGWLYRNLNNAVDEMIICDPRRNKLISSDGDADDRIDAGKLASLLRGGFLRAVYHNDDMNRVTLKEWVCLYYDRVRDAVRMINKIRARCRMNGISIPRAVIREPSKRKLWLSEIHNSALAAQLNMLWLNYDSIVKQVKISKRQLAILSRQHDIIKLWSELPEIGTIRAITLFASLDTPWRFKKKNKLWKYCGVGLERSASGTDKKGKPKPAFLQLAWRVNKVLKYTVLGAALSAINQNKNVFSCYYERMLHEGIMPSNARHAVARKMLTVMWGMWKQNSRFRENMVMPVSKSSAVSPARGKWTTLS

SEQ ID NO: 341791 - protein, 384 aa, unidentified
MQKPNDLNQSRIVLKQDSTLIAVIEMSLRSWLVAGIVPGVERQPLKKLAVDESALLKLLNRWREEAEKAGRRIERITVAFEAGRDGFWLARWLRARGIEAHVIHASSVAVSREHRRAKTDRLDTELLKRAFLGWLRGERDHCKMVAIPTTKDEDAKRPNRERQSLVGEQTRIVNRMKAALIRLGIRGFNPKLKKAAGRLEDLRTPEGEPIPPNTLAELHRDMERRRLVSDQIRQIEEARLERMEQAPGDGPHAMVRLIARVIGVGIETADMLVHEVLSRKLRDRRAVARYAGLTGAPDESGSKRREKGLAKAGNARVRGGMIQLAWRFLLFQKNSALAQWYRTRTEGGRNRKTIIVALARKLLIALWRLVTTGEVPAGVVLRAA

SEQ ID NO: 341792 - protein, 344 aa, unidentified
MSITMIGLDTAKSVFQIHAVNETGKAEMKRKLSRNDLIPFFKKQDSCTVVLEACGAAHHWARILTGLGHEVKLIAPEAVRPFVKKGKKNDAADAAALCEAASRPDIKFVPMKTTEQQAILALHSVRSLLVKQQTMLANAMRGLATEFGLTVPKGVSKLEELTVLVDTDETFPAKARQAFAGLFDQCKALTESIVTFAAEIVAHARHDETARRLATIPGVGPITASLIAATVGDISLFKSARHFAAWLGLVPRQHSTGGKTRLGRITKTGNREIRKLLVLGATSMVYRAPQWNSAAGVWIRGVLERRPVRLATVALANKMARIAWALMTREEVYQAKGRVAAAAA

SEQ ID NO: 341793 - protein, 394 aa, unidentified
MKPIITCDVSKNKSHIRGYLNPETPLDKAFKIQHVKSGFKEIKSLAEKLKSLTGLYPAFVLEDTGVYSECVKRYVESIGLDLYSISPLESAKQRKAKIRVTKTDPLDCDNIAKVYYSRNLRKSNNTNQNVRNLARSKESLTKLIITQKCNISRYLDLIRPCIENFFGDFDKKWLYVVIKQYGHPDVLKRRTVDQIASLLMHQANKRKLNAYRIAHKLKDYALEVVSGIQNNDETITQLVNSIKRLEQLALEKDVINFKLNEKVKKYPIYEVIKHLPCVGENLLLSLSSELLSIDNYKSAKQLVAYAGLDPSILQSGKENGEHYSITKKGNGLLRSKLYLLVKLMLSNKKDNVVTRFYLKKKNSGLPNKAAVIATCRKLLTVIYGMNKNKTFILQ

SEQ ID NO: 341794 - protein, 357 aa, unidentified
MKEPSKGQGMTVGLDLGDRFSHSVVIDEHGQIVEEGRIATSEVALRRRFSGCPPMRIALETGTHSPWVSRVLKECGHEVVVANSRKLRLIYENPSKDDRVDALYLARLGRVDPALLSPVQHRGATAQKDLALLRSRDALVSARTQLINHVRGLVKSLGSRLPGCSSRAFPQRASEKAPESLRLGLVPVLEEIASLNDRIKALDRQIERLAQESYPETKLLRQVPGVGPITSLAFVLTLEAPQRFPKSRTVGAFLGLVPGRKQSGDSDPQRRITKHGDSSVRRLLVNAAHYILGPFGRDCDLRRFGAKIASRGGKNAKKRAIVAVARKLAVLLHHLWRSCEVYEPLYQTQRDRRGKVA

SEQ ID NO: 341795 - protein, 345 aa, unidentified
MNEIIRIGMDTSKHIFQLHGVDASEQVVLRKRLGRSTMLAFFAKLSPTVVVIEACGAAHYLARELGKLGHTAKLIAPQLVKPYVPRNKNDGRDAEGLCEAASRPRMRYVPVKTAEQQAALMLLGIRDQLVARRTQLSNTIRGHAAEFGLIEAKGLDKLASFLAAIEQDERVPVPARELFAMLARQCEQVQVELKAIEAKLLAWHRANALSRRLTQIPGIGPVTAAALVMKAPDPHAFRSGRLFAAWLGLTPKDHSTAGKKRLGKITRAGDERLRQLLVVGATSVVKQAKARGRGPRWLIELLKRKAPKLAAVALANKMARIAWKLMTTDERYDRARIDAQAATAA

SEQ ID NO: 341796 - protein, 327 aa, unidentified
MEQRVLGIDVAKDTLDIALFDGFRLQHGQFANSEKGHMQLEYWLRERSATSVHVCLEATGQYGDKIAEHLYSQGFLVSVVNPARIKHYGNSKLRRNKTDKADAQLIAEYCMREKPALWTPPPASFKELQALVRHLEDLQGLKRQEANRLQSGVRSAFVLDNITSVCNYIDDQIGKTKKAIQDHIDRQSELKRMQDLLITIPGIGKLTASKLLGEIRNVMDFKSARQLAAYAGLTPRNFLSGTSVHKKSRLSKTGNTNLRKALYMPAIVAMKYNPIIRAFCLRLSQNGLLPMEVVGAAMRKLLHLVFGILKTGRPFDPNYLNLVQSLS

SEQ ID NO: 341797 - protein, 344 aa, unidentified
MDHFGGLDVSVKETSICIVDDTGKIVKEVKVASEPAALLKVLGNPSYRFKRIGLEAGPLSQWLFSALAEAELPVICVETRHMQAVLKAQINKTDRNDARGIAQMIRVGLYRPVHVKTLRSQKLRMLLTHRKLLQSKAIAIENDLRGTLRNFGLKVGMVGKVRFEARIQELVENFPDLSVLVEPLLIVRRVLREQIVILHRRLLAIVRDDEVCRRLMTTPGVGPVVALTYRATVDVPARFRKSKSVGAVFGLTCSRYQSGEIDWSGKISRCGDEMMRTMLYEAAQSMMHSKKWSWLKAWAMQIARRRGMKKAIVALARRLAVIMHRIWVDGTEFRWTREQAAAAA

SEQ ID NO: 341798 - protein, 307 aa, unidentified
MKEEVVYCGIDVGKSHLDIALLQQRWQVANTQAAINGLVQQLKSESLNLQVICEASGGYEQALVRALHRASVPVTLVQAKRVRQFARAAGILAKTDCIDALVLARFGQAIRPVPTPSQPLHMARLRELDRERCHLSRLLVAEQNRLEQLSSPELRRLARSLIKKVEKQILLIDQAIAQLIGQDQILRTKAKTLTSFCGVGERTAALLLAQMPELGRLNRRQVAALAGVAPFNRDSGSIHGKRCVFGGRRVVRNALYMAALSAARRNHILAPFYQRLLAAGKPPKLALTAVMRKLLIALNSALTHSPA

SEQ ID NO: 341799 - protein, 359 aa, unidentified
MSNIPVFVGLDYHQDSVQVCVLDAGGKKLFNRSVRNDSLAVASAATQYGRPVRIAIEACCGAADMAEELVVKRGLAVELAHPGYVARLKRSPDKTDLGDAHLLADLARVNYLPTVWLAPESTRQLRRMVHHRAQLVNRRKDVKLRIRGLLRENRVRNVEASAWTKAWIAWLKNEAPLLEGDRFIIDDHLAELISLAARIAAVEARLKKAVENDPLVAQLLSMPGVGLVTAVTMRAQIGRFDRFQTGKQLARFCGVTPRNASSGARQADAGLIKAGNPELRVVLIELAHRLIRGLDDRWARLAAGMLQRGKPKNVVVAAVANRWVRWLHHELRRDDQRLGSGSTKGVPPLPSSPSPGGRG

SEQ ID NO: 341800 - protein, 402 aa, unidentified
MAYDCVIGMDVGKYFHHACVLDPQGRQVLSKRINQHEGSLRKLFGTYLADNASVLVVVDQPNNIGRLTLAVAQAMGADVRYLPGLAMRQLSRIHVGNSKTDVRDAYVIAHAGLNLPDALRSVDRVGEVFLQLKVLNGIDEDLARAYTRLINQMRSALVGTYPAFEHVLHGQMIHRKWILHLLAKYGGPTKIRRVGKARLAAFARGHRARNPEPVIDAMLAAIEGQSVTIAGAEYAELGVAMSAKDALAKLEHRKEIEAQVLELIQDIPQTEILLSMPGIGPRSAAQILMTVGDMSDFPDAAHLASYAGLSPRTNQSGTSIMSNSPNRAGNKKLKNALWQSSCASIRFHERSRQFYERKRKEGKRHNAAVVALARRRLNVLFAMMRSGELYRDISTVQEAAAA

SEQ ID NO: 341801 - protein, 353 aa, unidentified
MLAEDYEFVIGGDPDRDTIDLAVLDTGAGRVHAHLADSADGAGYRRMLTWAGEHAPGRRIWALEGTGSFAAGLVVFLGDAGEKVVEVGALKRARGAKNDRIDAIRAARQALARDEQGAPRSGGLREALRMVFACREGVLVSRTKAINELKSLIVVAPEELRAQLRGRSLLVQLARIEQLQIATVAPVEQRLSVFSLQSVAARVRFLYAQLAELDPQLLELIRQHPAGPALLAEAGVGPVVAAQLLISWSHHGRVRNEAAFASLAGVSPLEASSGQRSRHRLNRGGDRALNRALHTVAITRMRCHPETRVYEARRIAEGKSHRDIRRSVKRALARRLYRKIEAAVRLQDVTVAA

SEQ ID NO: 341802 - protein, 322 aa, unidentified
MNTAAMPLGIDVSKAKLDGALWLGSKYRSKAFADTPEGFARLSEWLHHHGADQVHVCMEATGTYWEAAALYLADAGQRVSVINPALAKAHGQSLGLRSKTDALDAKLLADFCREKQPPMWTPPSEAERRLRALVLRHQSLVEMQTQEKNRCESLREDVRTSVETHLAWLASELARIEQAIARLLDDDDHLRGQRALLDSIPGLGERTIAVLLAYGVSSERFQSARQFVAFAGLSPRLHQSGSSVRGKPRLSKIGHAFLRRALYMPAMVTLYKTAWGKRFQQRLAAHGKPPKLIIGAMMRKLAQVAFGVIKSGKPFNPALHGA

SEQ ID NO: 341803 - protein, 412 aa, unidentified
MDLVYARCAGLDVHKATVVGCVRVPRAPRGDRQAETRTFATTLRGLEELRTWLTAHEITHVAMESTGVYWRPVYAGLEGAVQVLLVNARHVQMVPGRKTDVRDCEWLAQLLECGLLRGSFVPPPAVRDLRDLTRLRKALIRERGHHVNRIEKTLELANIKLGTVVTDIMGKTGRAILEALSAGRDAPEPLVALAQGSIRTKKQAALREAVVGRLTPHYAFLLRQHLSLIEALDLHIVTLDARIEAAMAPFAEAAALVQTMPGVATRAAQAILAETGVDMGVFPTAGHFASWARLCPGTHESAGKRRPTTTGQGAVWLRATLQEAAWAAARTKRSYYRALYHRLKGRRGAKKAIVAVQHAMLVALWHMLKRRVPHHDLGADYFDRRNTARLRHHHVRRLQQLGYQVVLVEEAA

SEQ ID NO: 341804 - protein, 346 aa, unidentified
MYQDNLFALDLSKNSIQGALFDKSHQVRFNQEFSPKKLVDWLSRQQPLTVAMEACSTAHHWVRVVERLGHRSLLVPTRTANRYREGHKTNATDALAVGVAARQPTTRFVAPKTIEQQEMQSVERIREHLSSQLTATSNMMRSLFGEFGLAIPKGKKGFKRRVVELLEDAENDLPMCLRTELIGQWEYYLDLKERLEQVTRTQKRLVNQHETCRQLLQLESVGPVNALGLYLALGDLGSSFKNGREASACIGATPKQYSTGDTVTMGGISKTCANKRLRSNLIQGSRAVIKVVKKRDPRNQKEAWLKQLIGRRGEGRAAVALANKTIRVAWAMLHYGDEFKLHPNMA

SEQ ID NO: 341805 - protein, 338 aa, unidentified
MKLYMAIDLHSTNNYLAAVSEDGKPIMSKKLRNDPRVILETLAPYKPEMAGIAVESTYNWYWLVDALMDEGYQVHLANPTAIKKYSGLKYADDKHDARWLAEMLRLGILPEGYIYPKEHRALRDLMRKRQHLVRLRTSLLLSLQNIITRNCGIKVGGNTLKRQAEPVEIHLSSSRELALAGTVSKELIDHLTRQILILESHIERQVKDLVSYRNLMTIPGVGKILALTIVMETGPIHRFAKVGSYASYCRKVISRWVSNEKTKGKGNEKNGNKYLAWAFSEAAEQARRYDPQSRAFYERKKQQKNLMVAHNALAHKLARAAYYILRDNVPFDAARLYA

SEQ ID NO: 341806 - protein, 346 aa, unidentified
MEQIIRIGMDTSKHIFQLHGVDAAEQVVLRKRLRRSEMVAFFAKLPPTVIGMEACGAAHYWARELRQLGHVVRLIAPQHVKPYVKRNKNDGRDAEGLCEAMSRPTMQFVPVKTQEQQAALMLAGMRERLVARRTQLSNAIRSYAAEFGVTTAKGLDKIEPLLADIAANQTLPALTRDLFAMHGTEYAQLQAELKIIESRLLAWHRANADSRRLAQIPGVGPIVAATLVMKAPDPHLFPSGRHFAAWIGLTPKDHSTAGKTRLGTITRAGDERLRSVLVAGATAVIQQARRGRGRASPWLLALLARKPPKLAAVALANKIARIAWKLMTTGESYDGASMPVASALAA

SEQ ID NO: 341807 - protein, 342 aa, unidentified
MQVTTVGLDIAKHVFQVHGIDQDGQVLIRRQLRRGELIDFFRRLPPCLIGMEACSTAHFWARELAALGHEVRLMPAAYVTPYVKRGKSDALDAEGICEAVTRPTMRYVTIKSPEQQAVLMLHRTRDLLVRQRTMLVNALRGHLAEYGIIAPQGLPSVPKLMEAAEKARGGALPELAWRCIRLIIAQLEDAHVRIGQIEHEILAWHRTNELSQRLETIPGIGVITASALAATIPDPGSFRSGRHLAAWIGLVPRQSGTGGKVRPGHISKQGDRYLRRLLVLGACTLMRHARGRTSLMAAWINALLARRPAGVVKTAIANKLARVAWAFLQDSRGYQTPAAAAA

SEQ ID NO: 341808 - protein, 405 aa, unidentified
MYYVGVDIAKEKHYVCILDDTKELACKPFWIYSDILGLRELLKRLAELSLDMDDFIIGIESTGAFSENFYSYITDADYKVILLNSYQTSKYRDFSTLKKIKNDSIDAYVIAELLASGKYKASYISNEDYHNLKVLNRLKKSLDDKIKTIKREISTVVATVNPEIEKVFPNIFTKTAIAIIKAYPTAMDISKATPEKLTKIFRHIKGNSFNLEKAKYLIELAKSSIYTGRANESRALMIKTNIKILELYIQEKDEVEKQILDLIDNQLDDDSTNIDNVKSIPGVAHKTVTAILGECGDLRRFESAKAFIGFLGLYPTLYQSGKSLSTGTLAKRGIPIAKHALYMAAVSSVRHNTELNKIFRDKLSAGKSKKEALIIIAKKLASIIYSLFKYDQPYNPNRVLIQHKR

SEQ ID NO: 341809 - protein, 420 aa, unidentified
MRKIETKKIKKINKKTLVATVDIGKAMMMGYWRCPDGTESKPFEFFNNGCGFAKFWKRISQAKKAHSLEKVIVGFESTGPYGEPLIHYFRKKGVQLVQVNPMHTKKVKELQGNSPCKTDQKDPKVIADIIVLGHALTLVIPEGAAAELRRLTQARERCIRGRVSLLNQLQNIVYPIFPEFSQIMNGIGSKSAQYILKHCPTPQEVIEYGLDPLIESLRKVSRGKFGKERAEALYKAAWQSVGIREGQQSIHSEIAYILSMVEKTNRFISEVQEQMRCYLGQIPYSQSILSLKGVGEITVAGLIGEAGDFTQFKTIPEITKLAGLDLFEISSGKRKGIRRISKRGRSLMRKILYFGALNVSRKGGILHERYQAYLKNGMPKMKALIAIARKLLAIIFALVRDHSNFDEEYIHNPLLLKKAA

SEQ ID NO: 341810 - protein, 309 aa, unidentified
MDAIYVGIDVSKDRLDVHVRPTGEAFAVARDGEGLAALVARLTPLAPHLVAVEATGGFEVTVAAAIGGAGLPLAVVNPAQVRHYAQALGRRAKTDAVDAEVIARFAEATRPAPRPLPDEATQALADLVTRRRQIIAMMVAERQRAGRLPKRLKRSCERVVRVLEKELAALDGDIDDTVRGSPAWREKEDLLASTPSVGDITARTLIAELPELGTLDRRKIAALVGVAPFTRQSGRWQGKSFIAGGRPKVRAALFVATMSAVQHNPAIRALRERLLAKGKPKMVVMVACMRKLLTILNAIIRDRKPWQPA

SEQ ID NO: 341811 - protein, 331 aa, unidentified
MNFNLFIGIDVSKSTLDVHLKPIGCYKAFSNDPHGFITMVEWIMDQAGKFCHKELVFGLEHTGLYSENLILFLDQNDFAFTVIPGLELKRSLGIRRGKSDKADARNIAEYIYEKREKIKLYKLPSETLDKLKKLASIRERMVKERAAYQVRMDEYLEQFPDSTFETYLQTQQELIHCFNSQIERVEKDIERLIKEDSSLSDQYKLINSIKGVGPQTAIMMIILTNGFSSFDNWRKFASYAGIAPFPNQSGTFNGRTKTNKLANKRIKSLLTMCASTAIQFNPEMRKYYENRVQMGKNKMSTLNIIRNKLTARIFAVISRNTPYVEIHKYAA

SEQ ID NO: 341812 - protein, 403 aa, unidentified
MTAFFAGLDWASQSHAVCIIDDHGNVRERVDIAHSAAGLTQLQRSLVRDERPPIAIERPSGIVVDTLLDAGFTVIPIHPNAVKATRPRYRSHGAKSDASDAYLLADLLRTDGHRFAPLPAQSDDIRALRALVRGRDDVVAARTQPANQLRSLLASFWPGAAEVFADVDSPIALAFVERYATPESAHRLGPKRMAAFCAQHAYSGRRSAQDLLARLQQAPAGVCAEMEMEAKGELARSLARALSQLVEQIRLLSSRIEHHVESLDDGRIVMSFPRAGRICAAQILAELGSVRERFANEARLAAEAGIGPVTYPSGKSRTVTFRCACNHRLRAALTCLADNSRHASAWAAHVYNRARARGCHHPHAVRVLARAWVRVIWRAWTDRKPYDPTRHGAAQLLAKSAGG

SEQ ID NO: 341813 - protein, 338 aa, unidentified
MNQFTGNINTATFIGIDAHPTEHTALAMNRFEDQKGIFRFENTKEGIHQFLSWLPTIDKDQQNVIIGVEGGGNTRHALIAHLLCTYQHIYEVNPLYTKQRRTFGTRRDKSDPRDAKAIAEVVTRKLTELPRITAHDLSTTILSLKKIVWFYEEETVHGTAIQNQLHQLKREYLLSITPEEKAVLNLIIKQKEHEFKQTKKRKRMCEKQLLPLLAQQGGNLTSMKGISTILAAKIVAHSGGIERFHNYNGFIRYAGIAPQEKSSGKTKRHMRTKTGNRNLNTTLYLTALIQIRWNPKAKEYFEKKLKEGKTKKHALKCLMKRTACIVYGILKSGENYRG

SEQ ID NO: 341814 - protein, 405 aa, unidentified
MRQVFVGLDWAEDHHDVFVEDDTGKRLGGGRLPEGVEGVARFHELVAGHVDDPADVIVATETDRGLFIGALVAAGYTVLAVNPMSTSRYRERHSTSGAKSDPGDAKVLADLARTDAHNHRPVAGDSELAEAVKVLARAHQTMIWSRQRHTNQLRSTLREFYPAALEAFDDLAGRDALAVLAIAPTPTAGKLLSRSKIAAALRRGGRQRRIDERTVEIQTALRGPQLEASALVADAMGASVTALVAVIAEMQIQVDRLEAELADRFEQHPDAKVIRSLPGLGMTLGARVLAEFGDDPNRYADAKSRKNYSGMSPITRASGKHHVVLARYARNRRLADACYQWAFATLTASPGARLFYDQRRAAGDTHHRALRALANRLVGILHGCLRHHTIYDERTAWAHRLNLAA

SEQ ID NO: 341815 - protein, 386 aa, unidentified
MIVIGADTHKGSHALAAVDQGTGRVRGSREIKADDEGHLAGVRWARGLDAERVWAIEDCRHVSRRLEQALLAAGERVVRVAPHRMGATRKAEREPGKSDEIDALAVARAVVKDGVEQFPVAYLNEQAMEIRLLCDHRNDLIAERTRTVNRLRWHLLTLCPELERSLKRGALNTARELDRVDRRLRKLSAGARPRIVREQVSQLRSLNRQIDRLEAELRELVKVHRPELLAELGCGAVVAAILIGHTAGVKQFRKHSSFGLQTGTAPIPCSSGQRTQHRLNRGGDRQLNHALHIIAVTRAQRDPATQEYLARKEAEGKTKKGALRCLKRHLARRFYLLLAEPPADQQQTVEPESIPERELPAIAERPHPEREVKQISAAPSPMVCTT

SEQ ID NO: 341816 - protein, 418 aa, unidentified
MKHNKVKKIRNINKKTLIAALDIGKKVHYGYFRAPSGKDIQPFAFINTSHSFDKFWERLCKFKEKHMLEDIVVGFESTGPYAEPICQYLRNKSVQLVQINPMHTKRLKELTGNSPNKTDKKDPRVIADVISLGHSLTVIVPEGAAAHLRRLTQARERAMEHRTAMKNQLQHLVFVIFPELVHTIKPSTKTGMYLIKHFSDPKKLVFAGIKKLNDIIRKVSRGRLGTDRAVKLYNAAKNSVGITEGKKSILFEIAHLVSKIESESSYIEDLEKQMGEYLQKIPYSQSILSIKGIGNVTTAGLIGEVGDFRRFETASEVLKLAGLDLYEISSGAQQGRRRISKRGRALMRKLLYFAALNTTRKNGILHKPYQRHLAKGMTKIKALIAIARKLIGIIFALVRDHSNYIADYSSQLVFKKAA

SEQ ID NO: 341817 - protein, 485 aa, unidentified
MKQTKSSPCARAILAHGGQLSRKERRELARQVQSEQVTLQIVHSNAAGIDVGKNTHYVAVPPDRDAESVRYFDSCTDGLQQMVAWLKKCGITSVALQSTGVYWIALYDLLQEADFEVYLVNARYTKSLPGRKSDVQESQWLMKLHTYGLLPNSFRPPQEIRWLRSYWRQRQNHVRSAASCIHRMDKVLTEMNVRLSSAVTDLSGATGLAIIQAIVDGERDPHELAAYRDPRVKATQEEIARQLHGNWQADLLFRLKQELQGYRFYQTLIAECDQELAQLLRAFPDRSAGVALPEETRKNRRKKKRGNSPQFDLRQLLYVMSGVDLARIDGIDVITAMTVVAEAGYDMSPWPTADHFVSWLRLAPDNRISGDKIIGKARTPTQNRLSQALKMAASSLKASKTYLGAQFRRLRARRGPAIAVKAMAAKLARLVYNMLRHGMEYVDRGTEFYEQQQRERRLHALTKNAAQLGFQLVPTELSLAGTGTI

SEQ ID NO: 341818 - protein, 408 aa, unidentified
MGRAAEVMAPSSSTQTDGDCPVAQVNDLSRSLTAFDPISTLVVVVEMSEASWLVSGVVPGVERQPLKKLEPDATALLRLIERWRSEAIRAGRSINRIALAYEAGRDGFWLARWLIARGIEAHVIHSASVAVSRERKRAKTDRLDAAMLMRVFLGWLRGERGHCGMVVIPTMEEEAARRPSRERENLVNERSRITNRMKSALARLGIRGFKPHLRKAPERLAGLRTAEGTGLPANVIEEFRRDMARLALVREQISSIENTRAERLERAPDTGPHAMVRLLARVIGIGIETADMLVREILSRKLRDRRAVARYAGLTGSPDESGLKRREKGLAKAGNARVRRGLIQLAWRFLTFQKDSALAQWYRTRTEGPSGARKTTMIVALARKLLIALWRLVTIGEVPDGVELRPAA

SEQ ID NO: 341819 - protein, 405 aa, unidentified
MRRVIGIDVHRTFGEVVFWEDGRLRHAGGIDMTRTALEGFGKTLLASDEVVLEATGNSMAVSRVLAPFVARVTIANPLQVKAIAQAHVKTDKIDAGTLASLQAAGYLPQIWTPDAATERKRRMVARRYQVVRHRTRLKNEVHSILHAHLIPRCPHADLFNARGRAWLAAQQLPDDERAAIDRHVRELDRLAEDLALLDREIAQDAIEDSAVNRLMTITGVNLAVAAGIMAAIGDISRFNSPQKLVSYFGLNPRVRQSGLGAAHHGRISKIGRSHARAMLVEAAWAAAKAPGPLHAFFVRIRARRGHQIAAVAVARKLTVLCWHLLTKAEDYLWARPALVANKTRAMQLQAGHPQQKGSRRGPAYAYNIKALRDREMLIAAQAEQSYERFVSQWKPRRPKTGARAP

SEQ ID NO: 341820 - protein, 354 aa, unidentified
MPRTSQSASAALSAIGVDIGKDVFHIVGFDRAGKIALRRKIKRSALVETFEALPRCVVGLEACLSAHFVSRTLRQLGFEPRIIPAKYTKPFVKGQKNDYNDAEGIAEAAMRPNLKTVAEKSQEQLDLQALHRVRSRLVSRRTATINQIRAFLIEQGIAVRTGARALRNSLFAILKNRESEISPRMTSIIVGLYEDWISLDKRIESLTLEIEKISEVETNCERLMSVPGIGPMISTATVAAIGTGEAFDRGRDFGAWLGLVPRQYSTGGKPILGRISKQGNRYLRTLFVQAAHIILMRPKNWLKFGFGRWLEQASTRMHKNKLATALANKLARIAWSILRNGGTFGTHVRTAEAI

SEQ ID NO: 341821 - protein, 398 aa, unidentified
MSRIWAGIDSGKGHHHGLVVDADGKTLLSRRVANDEPELLKLIGDVLDLADGRQVTWAIDMTGGEPALLLALLINHGQEVRYMPGRLVNRASDGYRGEGKTDARDAYVIADQARMRRDLRPVRPGDEAAIELKLLTGRRADLVEDRTRAVNRLRGTLLSMFPALERALEVTNTGPLRLLTGCQTPAAIRRAGISRLTTWLANRKVRGARSLAEAAVEAAERQHTAVPGEKTIAKLVHTLAEEVMALNQQVSEMDTLIEGRFREHELADILLSVPGIGTVLGAEFLAAVGGGLEEFDSPDALAAFAGVAPAPRDSGKVSGNLHRPMNYHRRLQRVFYTSALVSVRCDPNSRKFYDRKRAEGKKHVQAVLALARRRVNVLWALIRERRCYQVAPPVTTAA

SEQ ID NO: 341822 - protein, 456 aa, unidentified
MARKRKSSKKKIGAPVLHCLNPNAAGVDVGATEIYIAVPVDRDPQPVRHFSTFTEDLHAVATWLKACKIETVAMESTGVYWIPLFQVLEARGFTVVLVNARHVKNVPGRKSDVSDCQWLQYLHTVGLLRGSFRPEQAVCTVRSILRHRDSLVQMASSHVQHMQKALDQMNLQLHHVINDITGLTGLTIIKAILAGERNPHTLAALRDRRVKATEDTIAKSLVGDYRREHLFTLSQSLTAFRHYQELIGACDYEIEQYLEAFESKVDPREGSLPESKNEQEPSDDASRFDLGSHLHRIFGVDLTRIPGINILTTQTLLAEIGPDLSRFGSAPSFTSWLGLCPDNRVSGGKVLSVKTRKVKNRAATALRMAAQSLHRSQSYLGHFYRRMRAKLGAPKAITATAHKLARIIYHMVTMGQAYDETVCARNEIQNRLRLEARLRKQAREMGFQLVLAKTSG

SEQ ID NO: 341823 - protein, 350 aa, unidentified
MARTSTISAVTAIGMDMGKNTLHMIGLDSRGAIVLREKVSRGCITSRLANLPPCLIGIEAGMATHYVARELAALGHDVKQVPPTYAKPFRQGHKNDFRDAHAVAEAVQRPTTRFVPIKTDEQLDLQALHRVRSRLVSERTAVINQIRGFLLEHGIIVRQGQRFLRQLLPDILAKRTDVLSPRMVRIVADLAGDWRQLDERIEAMTDEIEALAKSDDSCRRVMTVPGIGPIISSAMVAAIGSGVAFARGRDFSAWLGLVPKQMSTGDRTILGRISKRGNGYLRMLFMQAARVILIRPTNWPKHGFGAWLIRAAQRLHPNVLAAALANKLARIAWTVLVQERSYEARVTKAA

SEQ ID NO: 341824 - protein, 411 aa, unidentified
MRLFVGDDWAEDHHDVELMDERGRVLTRARLPEGVAGIARLHELIGEQLGEGADDAEVVIGTETDRGPWVAALVAAGYTVYGVNPLQASRYRERHGVSGAKSDRGDAHMLTDMVRTDSHQLRAVAGDSPGAEAVKVVARTHKTLIWERTRQVQRLRHQLREYFPAAVDAFADLDAPDALELLGKAPDPARAAKLTRAQISAALKRARRRDIPGKAAVIMAALRSAQLGQPPAVTSAYAVTVRSLVAVITVLNEQVKTLQGQVEADFGRHPDAEIYLSQPGLGPVLGARVLGEFGDDPDRYASGKARKNYAGTSPITRASGKRKIVAARFIRNNRLTDALMAQALSALGSSPGARALYDAERASGTEHNAALRKLANRLVGILHGCLKTRTLYDEATAWPHREKTPQSDIAA

SEQ ID NO: 341825 - protein, 338 aa, unidentified
MTCESFDITGNGLAQLIRVLSETGARIDRVGVECSAALGAPVVTALRAAGYDVREVQASRTNDRRRRRHRAKTDITDAQAIAAETLADPGLPPARKHSDTPTQAWETLRVLRAQRESLVLQRVRHLTEAEPVLCALPITVRDRLPTTSRVMAALAALSDLTLVGLPRADHARVQWLTAAHAAIHAITRQLKVIDQQIPALLDELGCTLTEIVGIGTVTAMTLLTEIGDPTRFQTEAQFGRWCGAAPVALSSGEGHGQPRRHRLDLAGNRQVNSVLHIVHVTQIRMHEPAQAFIARSLAAGKTKRAARRSHKRQLANVIIRRMWNDAASTPTALRTVAA

SEQ ID NO: 341826 - protein, 354 aa, unidentified
MKYYTSTTQFNCGIDLHARQMYVCVMDRDGKKLVHTNIRNNDFNFFLKLVAPYRHDLTVCAECMFGWYWLADACQEAGLNFVLAHALYLKAIHGGKNKNDRIDSEKITHLLRTNLIPPAYVYPAAKRPLRALLRQRILYVWRRSELLARIQSHQLAYNRPTLRQTRPNRDPWEEKLLAQEDNPIRQLALQNDLALIRHYDAQITLLEAQLQKLTKATAWRDYTLLQTVPGIGEHLGLTLLYEIGDIHRFPTVKDFLSYCRLVKGTVASAGKIKGLRGAKLGNAYLRWVFGEAAVIAKRDHEVMGPLAQRLETRLGNKFKANTVLAIKLARAVYFMLRDHTVFDPERLVAALTHK

SEQ ID NO: 341827 - protein, 461 aa, unidentified
MKRNRWKKGTPRPNISLLERINPDVAGIDCGATEHFVAVPVGRDPDPVQSFRTFTGDLQRLADWLEACGVRSVAMEATGVYWIPLYEILEARGFKVLLVNARHVKNVAGRKSDVLDCEWLRELHSVGLLRASFRPTEAITALRGYIRHRDTLVEIMSSTIQRMQKALVQMNVLLPQVVTDITGATGLAILHDIVTGKTDPQQLVLHRDPRCHASAEQFVTALTGNYRPEHVFALKQNLALFEYYQGMLSECDAAVESHLQRLVAQLEPLTTPLPPRRTKPQSHGKEPRFDIRSYLYRLTGTDLSQIDGLGPYQALRLISEIGTDMRRWPTEQHFTAWLTLAPQNKISGGRLLSSRTPASANRAAAMLRMVAMSLARTQTALGAFYRRLAARIGKAKAITATARKVAILIYRALKGEIQYEDPGPDAYNARQRSRLLRRLRKRAQALGFSLVAINTGELVPA

SEQ ID NO: 341828 - protein, 340 aa, unidentified
MNTKYYVGLDIAAETFVACVLQAPSRVVAQPRSFANETAGYDELEVWLRQQDVTPASAVLCMEATGVYGEGLAYHLSAHEWWLAVAPPLEVKRAFAPVGHKTDPVDSRQIGEYAARFHDQLHRFVPKKAVLEQVKVLLQLREQYVQQKTAHLNALQALRRKVTRTPLAEALHEQSISQLKQHITTIETEIAKLLDQDPDLRQQVGLLLTIPGVGLLLASHIVVLTATMRDPLNPKAIAAHLGICPYQHRSGASVRRRDASRHFGPSTIRKLLHLAARSRCTHYPASRHYYERKVAAGKPKRLVLNNMANRLLRVICAVLKTRQPFLPDYQAVPPRQFKTA

SEQ ID NO: 341829 - protein, 385 aa, unidentified
MRPFGEVAVSPFEVRHTDSELCELAKLLRSLPGETRVVMEATGNYHLPVAWLLNDSGFYVSVVNAMLVHGYGNNSLRRAKTDKKDAIKLANYGLDHWLALPRYVPEEDTRLMLKNCYRQYQQYSKVQTMLKNNLISLLDTAFPDANRLFSSPPRADGSEKWVDFVATFWHCECVCGSSEKVFVAKYQKWCKKLGYNFSEDKALDIYASACGHFGVMPKTDTTKLLVEQAVSLLRVTSTALASLKQEMQSLAASLPEYPVVMKIFGVGPALGPQLMAEIGDVRRFHSKKALVAFAGIDAPPYQSGQMDVYSRSISKRGSSSLRRTLFLVMGIYLQNAPPDEPIYQFMDRKRSEGKPYKVYMMASANKFLRIYYATVKAYLDALDEA

SEQ ID NO: 341830 - protein, 353 aa, unidentified
MITIGGDIHLKTSTFCVLNEQGQRLARQKVLNDPDTIKSFIVSFPGEKQFSIEATYNWQVFYELLKDAVDEFHLLHPKKLQAIIQSQAKSDNADADMLAELTWRGRLPEAYTSCAETRQFRHLLRARVKVAQQIASVKNQIHALINANIFYSQRPKNFKDLFCKRGLIYLQTVALPEKDRFLVDELLAEIQQLEKTKAQLQTYIEQAEFHTEDMELLSTVSGLKKSKLLKYIVASEIDNLARFRNARALVAYAGLIPRERSSGEKIRKGALRSDSNTFLRWALIEASLGAILSDKGLKAYYQDVRKRHNPSAARVACARKLLTAVYYVLRDRRPYYSAEQLPAASRAPSIAVS

SEQ ID NO: 341831 - protein, 366 aa, unidentified
MFRSNLPMCVSLMAKEALSGGTCLSTPEELATTIRIRAPQAVRIGLETGPLSTWHWHALKKMRFPVICIDARHAKAALSMQVNKTDRNDAFGLAQIMRTGWYREVGVKSLESHKVRAVLGARAQLVGVRTDIRNQIRGLLKVFGVVLERNSGKSFEARAGELAQGDGLLERCLQALLATLKTVSEQVGKLDRIAIDQAKQNPICRHLMSIPGVGPLTSVAFVTAVEDPGKFRKSRNVGAFFGLTPKRYQSGETDVSGCISKCGDPLVRSYLYEAANVLLTSCKKWSALKAWGLRIAKRSGMNKARVAVARKLAVIMHQMWTTGEEFRWSNKGNNVEAGLRNTGRSKLKRSVTELTVVLSLAGTKQR

SEQ ID NO: 341832 - protein, 413 aa, unidentified
MKKVCGLDVHKDNVFVCILSENGEKIQEKYGILTPDLDRLRDLLVSQGVGKVCMESTATYWMPIWRVLESDFELYLVNPYAIKQLPGRKSDVKDAEWIATCLMKDLIRGSYVPDLIIQQMRQYNRRIYDINNQSVRIESKMDALLQRCGIRLSNYVSNVDTKGYQEVVKKVIEGVTDAEELLKKVHGRTINKWGRDTLKASLTGVVTGVDRDILRQYKEELDQLKRHKEECQTKLTAMCKEHFPTQLANLQTMPGVDENSATQMMAEVGVDLRLFITAAMLVGWAGLKPRNDESNGKFKSKKTTHGNKYLRKLLIECAWGASRTKGCFYNKFSYHQTQVRKKKGKKVQVAIARKMLVAIWFILTTGCQYKDYVREVEQKTEEARDIAREAVRKAIKPKAGKKERQDAGQHPQS

SEQ ID NO: 341833 - protein, 428 aa, unidentified
MLKQNTEPDPAPDFAAFLAIDWADEKHAFCLQVVGQSKIETGTLEQKPEVLGPWLAKLRERLGGRPIAVGLEQSRGALIHALMAYDFLVLYPIHPTTVAKYREAFKSSGAKNDPLDAGQILEILTKHQDRLHRLNPDTVETRLLGRLVEDRRKAVNLRTTHVQALGANLKEYYPQALELTHDNLSSRLACDLLMKWPTFEDFQQAKPSTIKRFYYGHNVRSPEVIERALTLAQKSQALTTDPAIVESGRRLTQMYAQLLQALRPTIADYDQRIQRVFDAHPEAQLFSHLPGAGPVMTPRLLAFFGTDRSRYAAAFNVQSFTGIAPVTKSSGKSKVVYARAACPKFDRQTFHEFSRLSVTRCQWARNYVQYYTDKGKKYHTIIRALAYKWIRILFKCWQQRTPYNEDKYLETLKLRGSIFATWHLQKKS

SEQ ID NO: 341834 - protein, 342 aa, unidentified
MSIVYVGLDLGSSNFQQVALNHHGVSRVNRDFSTSEANLVKAFSDLKGEIHVHLEAGELAPWAAAVIAPLVTRVICSHPQSNAWIAKDADKCDRIDAYKLAELLRLNRFKEVHYAPDQPRRNFKQLVQHYDELTAQQARLKTKLKARLRMQGVIVTGERLFSATGRKEVLARVESRDLRTAIKQLYEVLDQSVAAQEQARLLMLRAAQAFREIKLMRTVPGVGPIGACRFSAYIHTPNRFGSKRKLWKYCRLSVSHRSSNGKPLRRPRLDRSGCGRLKDVSRKAFEVAVRSRQDNGFKRAYQRALETTHDATHARLTVQRKIVSTLRAMWLNQSPYCDELMR

SEQ ID NO: 341835 - protein, 343 aa, unidentified
MKDTMIGVDLAKNVFQLHAASMTGQLRFSRKLSREKFRSFMAGQPPAVVVMEACGSAHYWAREMVRLGHEVKLIAAQYVRPFVKRQKNDAADAEAIVIAAQRPEMRFVEPKTAEQQSRAILFRARERLVRQRTELINALRACLYEYGHIIPQGAHQIKRVAEILDTPNSDLPALMREECAELLEQIAEQTVRINARTTKIKALAVEADTARRLQTIPGVGPLTALAVEAFAPPMENFKCGRDFAAWLGLVPRQFSSGGKERLGRISKAGQADIRRLLIIGAMSRLNRLGRKSIPETSWLAHIAARKPRMLVAIALANKMARTIWALMTKNEDYRVPAQAAVVA

SEQ ID NO: 341836 - protein, 344 aa, unidentified
MTTSHYIGFDVHKKTISFCVKTAAGEIVEEGSTAAERGALRRWAAARPQPWRGAMEATLFSGWIYDTLKPYGEQLEMAHPAKMKAISAGKKKSDTLDARTIADLVRCNLLPACYVAPPRIRELRRLLRYRSLVVSEAVRMKNKMAGLLMETGALCVKEKLHGKKYFASLLEELEEVPESVIDLLRLSRGALEMFESTQKRLVRELLADPELTQSVERLMTIPAVGEITALTWALEVGDPQRFPSCSHAMSYCGLTAALQSSAGKQQRGPISKQRNRWLQTTLIEAAKLARDGIRNWPRCTPASWSVDIATAPRWQWRANSSPICWPSTKVVSPSNSACRRKCPH

SEQ ID NO: 341837 - protein, 358 aa, unidentified
MIVMKYYTSTTKFNCGIDLHAHQMYVCLMDRDGQKLVHTNIRNNDFAFFLKLVAPYRHDLTVCAECMFGWYWLADACQDAQIHFVLAHALYLKAIHGGKNKNDRIDSEKIAHLLRTNLIPPAYVYPAAKRPLRALLRQRILYVWRRSELLSRIQSHQLAHNRPPIRQTRPNRDPWEEGLLAQEDNPIRQLALQNDLALIRHYDTQIATLEVQLQKLTKAAAARDYSLLQTVPGIGEHLGLTLLYEIGDINRFPTVKDFVSYCRLVKGTVASAGKIKGLRGAKLGNAYLRWAFGEAAVIAKRDPEVIGPLAQRLEARMKGNKFKANTVLAIKLARAVYFMLKNHTVFDPLRLVAALTHK

SEQ ID NO: 341838 - protein, 348 aa, unidentified
MLHAGLDLSRRRVDYCLLDEGGERVEVGAAPADADGLGGLVRLIELRHGREPVSAAIESMNGARFVHDTLERCGWEVQIADAQRVKGLAPLACKTDRIDAWVLAELSRRDLVPAIWLPSFAQRGERERARWRMHLVKHRSSLKQRVHAQLMAFGHACPVSDLFGVRGRELLERLDFPDPWRGNVLACVALIDDLDQRIDDLERELRALGADHRYVPLLLTVPGVSWVLAYTIAAEIADITRFASPTKLCGYSGLCPRVYQSGDSDRRGPLAKNGPKYLRWALIVAATNAARHPLYRARYQHTKQRLGRQRGAKIAQVQLARTLTEAIWQMLTRNQPFAPAGAAFPLAA

SEQ ID NO: 341839 - protein, 408 aa, unidentified
MNAVGIDVSKGKSTVTIRRPGDVVLMSPCDIPHTQSAINALIEQIKSLDGETKACMEHTGRYYEPVANWLSDAGIFVSAVNPILIRDFGDDSLRTPKTDKADSKKIARYALDRWAKLKQYGSMDKTRNQLKTMNRQFGFYMDQKTAMKNNLISLLDQTYPGANGFFDSPARSDGSQKWVDFVMTFWHCDCICRVSEKVFTERYQKWCKRKGYHCSVEKALDIYASSCGHFTTLPKNDNTKLLIVTAAQQLLAGKTTLAALRAEMTRLASQLPEYETVRAMYGVGETTAAQLMAEIGDVRRFPHRSSIVGFAGIDPAVNQSGKHETQSTSTTKRGSPHLRKTLYQIVCTYLRKAPADEPVYQFLDKKRAEGKPYFVYMTAAQNKFLRIYYARVKECLETFDAHQKNTQG

SEQ ID NO: 341840 - protein, 285 aa, unidentified
MLIIGCDYHPSWQQICWMDTLTGETGERKLEHAQGEAEKYYRTLPSAALIGMESTGNCQWFTELMASLGHQLWIGDAARIRAAEVRQQKTDRRDAALLLKLLLEGRFPRIWTPSVEERDQRQLLLHRHKLVEMRVRVKNELQHLAMNRGITKGRRLWSKAGERVLCELPLAPWASRRREDLFRLRKMLDEQIAALDAAVKEVAERNDRARLLMTHPGVGPITSLAFVLTMGDVNRFPRGKQVGSYLGLIPREHSSGGKQRTRSISKQGNRFMRTLLVEAAQSVVR

SEQ ID NO: 341841 - protein, 419 aa, unidentified
MKENKTKKLGKVNGNTLIATVDIGKKMNFGYFRAPDGRDVKPFSFFNLRSGFEVFWTKLVEFQRGHNLEEIVVGFESTGPYAEPLLHFLSKQKVRLVQVNPMHTKRLKELTDNSPNKTDEKDPKVIADIIALGRALTLVVPEGPAAELRRLSQARERAIKNRTALSNQLQHLLFVIFPEFFWTMRDMKSKSVLHLVENCPSPESIVKIGVDALSVMLRKISRGKLGQGRAEQIFEAAQKSIGISEGKEGIVLEIIHLVSSIRNENSFIASLESSMEHYLEQVPYSHSILSIKGIGKVTVAGLIGEVGDFRKFTTISEVMKLAGLDLYEISSGQRKGQKRISKRGRSYLRKILFFAAINMVSGKGILHAQYRQMLDRGMPKMKALIAMSRKILRITFAIVRDNTIYVSNHQNTCQSRLAA

SEQ ID NO: 341842 - protein, 406 aa, unidentified
MAVMIGVDPHKASHTAVAIDDKEKPLGELRVRSSSGQVEQFLSWAAQWPERSWAVEGAGGLGYLLAQQLVSVGESVLDVQPKLGSRVRLLATGNINKNDPNDARSVAVAALRSKDLRPVVAEDHAAVLKLWSKRRRDLGSLRTQVVCRLHSVLCELVPGGHGKREITAAQAAQALASLGPIGAVQLARYELALDFLEDLHRIDSQMREVKKRLELAVKASGTSLTEVFGVGPYVAATVIGYVVDVSRFADRDHFASYNGTAPIEVSSGGHKVFRLSRRGNRRLNHAVHMAAVTQISHRHSEGRAYYDRKVKEGKTSKEALRCLKRRISDAIFAHLVADAKRRTMTVTAGPGGQKGNGSVSSAAGSHPERQLFGQATPGPVTTIRPTASTGDADGQEPPRKKSRKAS

SEQ ID NO: 341843 - protein, 346 aa, unidentified
MLYAGLDLARKRICFDARRPDGEIVDRGASPTGADGLDRLAQRLLAHDREVLAVVESMNGARFVHDQLELQGVEVQICDAERAKGLAPLACKTDKIDAGVLAELARRDLVPEIWLPDPGTRADRERARFRLHLVRKRTALKNRVHSTLITWGKPCPVSDLFGRQGRELLQRLSIPEPWRSTLQASLELIDALDGEITAQERDLRALGANHPYVPQLTTVPGIAWVLGFTIACEIGDIARFPSPKKLTGYTGLCPKVNQSGEHDWRGRMKKNGPKYLRWALIEAAQHAGRSAHYRDLYERTRKRHGPQRGAKVAAIVVARKLSSAIWHMLMNDESFAPASAAVTLAA

SEQ ID NO: 341844 - protein, 342 aa, unidentified
MSEVTIIGIDLAKRVFQLHGAREDGSVVFRKKLSRGQVLAFISQQPRCVVAMEACATAHGWGREFEKLGHDVRLIPPVYVKPFVKRQKNDAADAEAIVEAALRPTMRFVAVKTEDQQARAMLFRTRQMFVGQRTQMINALRGHLAEHGLVAATGTAQLKRLADAIEDSDTALPKGVRDLGQMYLAQIAGLNARVAELDQKMRCAAKEADVARRFQTMPGVGPITALAIETFAPDLATFRRGRDFAAWLGLVPKQHSTGGKARLGKTSKMGQRDIRTLLVSGAMAVLQAVERFGTPNNGWLTRMRARKPRMVVAIALANKMARGLWAMMTKQEDYRNPVATMA

SEQ ID NO: 341845 - protein, 341 aa, unidentified
MVEYVGLDVSMEETSVCVMDAAGEIVWEGKVATEPGALMRAVRRHARAAMKVGMETGPLSTWLWHALRDGGVPVVCLDARHAQAALSMRINKTDRNDAAGLAQLVRMGWYREVKVKRMAAHADGALLASRMLLVRQRCELENQIRGLLKNFGLKAKATKGRAFEQSVTALARKHPVLHDMVLALLAVWSTLRLQIAVLSRRIETTAMSDPVCRRLMTMGGVGKLTALAFRAAIDDPGRFRHSASVGAYLGLTPRRYASGEIDRMGRISRCGDALMRSYLYEAANVMLTRTRGSNPLKAWGLKLAKRAGWKKARVALARKMAVVLHRMWRDGTDFGAPKAAA

SEQ ID NO: 341846 - protein, 346 aa, unidentified
MIYIGMDISSKSFTVHAINERKEVVFKGEIEPTRAGLREMINRLKDQPKLIVFEAGNQLKWIALTLKKMKDVEVHVVHPNEIKWINQSSGKTDKIDARKLAYLARGDMLPRKVHIVEGKARELRELISARDRIQSKRIALINAIRGHLKQEGYKLPGKFFQNKKWREEMGKVRVGETLKLILKSYMSGIDSLKQAEEELTARILEVEGKDIDLLESIPGIGGLSSRVLVSAIDDVSRFEDKKAIGKYGALTPRIYQSGDVTHLGRINRDGRHEVRRVLLQCAHTVTRMKTYAVKPLKLFYEKILKRRGKKIAVVALARKLLTIAYGVLKTGTAYNPEVLGGASPTS

SEQ ID NO: 341847 - protein, 462 aa, unidentified
MKIRLGVDVACRAAHQASLADEQGRFLFVGHRFRTDPDELDTLWARLPNDAERIEVVREPTRNAWVALAAWFRRHGATVVMVPPEQSADLRDYYNKHTKTDRLDSKVLARLPLLHPEGLHREDSLGPGDELKRAVKIRSGLVHRRTACMARLDALLQILGPAWIAALGSDMTLTALRFLARYANPVQVKRLGKARLAAFFRRSSRQAWADERADAVIEAAATTLRLWGADGGELDFDALAADIAAEARLALTLTDEINGFDKRIGALYDKADPAGIVRSVPGAGRVCAPQILRRLGDPTRFANLAAVRSLAGLVPAADSSGQADRHRGPTKAGDCCLREALFIAADHARKVDPTLAVHYQRLMLAGKHHDSAVCTLAAVLLTRIAACLRAGTHYLLRDTDGRVITEAQGRAIVAERYTVPPEVRAARRKVTPHRHPRRNERNERAKTGVATRSKASPVPQPA

SEQ ID NO: 341848 - protein, 482 aa, unidentified
MKKKSIFPYQSQELDRLFEQAGSNAKVMCVPIDYAKKEHVVMFCNGHGDILRKPFPIKNSPEGLEYLTQQVLSSCRNRGIDPKHAFFGGEDVGSYAQNFINTLRSGGWIVAGVNANDAKKQRANAQASTDDLDLMGIASMLLNRRANCCPAQSGIYHNLRILTRHRKKVVELATEEKNRTHTIVDQVFPGFLNENNTGIIPFSNSSLRLMTDRFSPAQIRRRKRSKLIETLSKYGTTKPEVAADKLQSYAAQVLNTPKENLAALQVSLAHHVKIIKCLQESIEQMEKQMALCLAQTQGAFLTTIRGIGIVLASGVTAEIGDAAKQKPVANLVSYSGIIPRVKQTGGPEGKTRIGKVSKRCNRILKDHVVQSAHHMGLHGPEDLMADYKRRDANGQHADFGIGRRYVRMAMCLMRTSQIYIPNTLRRKGTNPEERAGYFLTLWPALRAKWAKVDALQAAFARNTPLARWRNMVQELYEIKLTL

SEQ ID NO: 341849 - protein, 387 aa, unidentified
MAQVNDLSRSLTAFDPISTLVVVVEMSKASWLVSGAVPGVERQPLKKLEPDATALLRLIERWRNEAVRAGRPISRIALAYEAGRDGFWLARWLIARGIEAHVIHSASVAVSRERKRAKTDRLDAAMLMRVFLGWLRGERGHCGMVAIPTMEEEDARRPSRERESLVDERSRITNRMKSALARLGIRGFKAHLRKAPERLAGLRTAEGTGLPANTIEEFRRDMARLALVREQISSIEKTRAERLERAPDTGPHAMVRLLARVIGIGIETADMLVREILSRKLRDRRAVARYAGLTGSPDESGLKRREKGLAKAGNARVRRGLIQLAWRFLMFQKNSALAQWYRTRTEGPSGARKTTMIAALARKLLIALWRLVTTGEVPDGVELRPAA

SEQ ID NO: 341850 - protein, 364 aa, unidentified
MIAYERSTLVNYEKYIGLDVHQATISVAVMDSTGKLIMESILETKASTILEFLGGLRGTLSVTFEEGTWAAWLYDLLKPHVAHVLACNPRKNAALNQGNRNDKIDARELANRLRLNDLKSVYHGENGIRMLRELARSYLTIVKDLTRVMNRLKALYRSWAIPCAGRDVYYTRHRSQWLAKIREAGPRRRAEQLYQQLDMLQHLRQQARRELLRESRKHSIIAKLRQIPALGPIRSALAVALIQTPHRFRSKRQLWKYCGLALETRISGEYVYVQGERRRSKKQLSIRGLNKDHNHDLKGLFKGAATRASVMPGPFQEFYQRSLAKGIKPTMVRLTLARKIAAITLTLWKKGESFDVQKLKSQAA

SEQ ID NO: 341851 - protein, 358 aa, unidentified
MAKHPLFDYTGQHIYVGIDTHNSNWRVSIFIEDFEHKTFTQNPDPDILVNYLQRNFPGATYHAAYEAGYCGFWIHEALTARGIDCIVINPADVPTKDKERRRKNNRIDARKLARSLKNGDLEPIYVPDRASLEDRSLIRSRRNAIKDQTRYKNRIKALLRFYGIKIPAQFEHRNWSGAFIKWLENVAFQRPTGKQSFQFYLDELKRFRHQVAELNRQIRQLAQEERYRDRVNLLKTIPGVGTITAMILLTELVEIARFKTADQLASYIGLIPGERSSGKEDDEHFTDITPRSHHYLRSILIECAWVAVRKDPALALCYNKLRYRMISQKAIIRIARKLLNRIRYVLKTNREYVLAVVQ

SEQ ID NO: 341852 - protein, 398 aa, unidentified
MLSIGIDVSKGKSTVCGMKPGGEIVYTPFGVQHTREGMSELVSLLRGSGEEVRVVLESTGSYHCPVVAALLENGIFVSVVNSLRMKRFCSQSIRRVKTDQIDAMQIALYGLAYWQELQPTRLPENTYRELQLLARQYYQMTSLLIKAKVDFNALCDQVLPGMQELMSDHAGRHKLSDFVLRYHHTAHILKMGETRFRKDYCKWAEKKGYRNHERMAALIFATAQNGIPVLPDAPSTQIVITEAIRVLHTVEASRDAILTQMQALAKTLPEYSLVREMPCIGDTLTPRLIAEIGDVRRFHSKRALIAYAGIDAPPYQSGKFSANNRHISKRGNRYLRKTGYEVMQSYVMHKPANDPIFTFIEKKRSEGKSGKLAMVAGLNKFLRVYYGKVTELYRSLPQ

SEQ ID NO: 341853 - protein, 355 aa, unidentified
MSQTANTAIAVIGIDIGKNSFHVVGHDARGAIVLRQKWSRGQVEARLANMPPCLIGMEACVGAHHLSRKLASLGHDARLMPAKYVRPYSKGQKNDFNDAEAIAEAVQRPTMKFVATKTAEQLDLQALHRVRERLVSQRTGIINQIRAFMLERGIAVRQGIGFLRTELPTILATRTDALSPRMLRVIEELAGDWRRLDQRIDGLSGEIEALARQDQACSRLMTVPGIGPIISSAMVAAIGTGDVFSKGRDFGAWLGLVPKQISTGDRTILGKISRRGNRYLRVLFVQAAWVVLVRIKNWERYGLKSWIEAAKRRLHHNVLAIALANKLARIAWAVLAKGRAFELTRTDDAGVVRPA

SEQ ID NO: 341854 - protein, 410 aa, unidentified
MELLHRRCCGLDVHKETVVACLRLVSDGKVTTEVRTFQTTTADLLRLSEWLAANECTHVAMEATGVYWKPVWHILDDGEFALVLANAAHVKNVPGRKTDVNDAMWLAELLALIRASFVPDAQTQEMRNLLRTRKQLVREQSSHVLRVQKTLEDANIKLDSVLTDLMGKSGRAIIEALIAGETNPVKLAGLADRRVKASPEEFREALRGRVTKHHRFLLRLHLNQIDALDAAMATLDAQVEANLGPFRTAVELIGSIPGIKNLGAHVIVSEIGIDMSRFPSAAHLISWACICPRNDESAGKRRSNRVRKGGTWLKTTLVQCAWAAVKKKDSYLQAQFYRIKARRGPKKAIMAVVASILTAIYHMLKDGTMYKDLGRNHFDRRSSDQQKTRLVKRLADLGYAVEIKPLAATA

SEQ ID NO: 341855 - protein, 338 aa, unidentified
MKITTVGLDLAKSVFTLHGVDEHGNAVIRKTVRRGKLLELFAQFPACVVGMEACSGAQHWARELRKLGHDPRIMAAEFVAPYRQGGKNDANDAAAICEAVSRPKMRFVAVKSVEQQAVLAVHRLRQGLVEERTALANRLRGLLTEYGVVVGTGLDRLRRALPEIVTSDADAIPSIAREVFTDAHEQLRELDARITAYDRRIAAFARASVPAKRLMKIEGVGPVTATALVASVGDANVFRNGRQFAAWLGLTPRQHSTGGKQRLGAITKHGDVYLRTLLIHGARAVLQVTPNRSDAKSRWVQSLRQRRPDNVAAVALAAKHARISWALLARGKDYEVAV

SEQ ID NO: 341856 - protein, 409 aa, unidentified
MEVLVDRGAGIDVHKKSVTVCVMTSEGRQVVKTLDRFSTFHSGLVAMREQLARRGVTHVAMEATGEYWKPVYEVLEGAFEVLVANAQHVKNVPGRKTDPEDAAWLARLLRHGLVRASFIPAQPIRDLRDLTRMRRKTIEMGARVENRVQKVLEACGIKLGSVVSDLFGMTGRAILTELAANRTDPAALAELAKGRLKSKKPELVLSLEGCFSAHDAALLKHQLDLHSQLEQRRAKIQQQLVTMSEPYAGLISRLDDIPGIDWDVAIEIIGEIGNDMSPWPDHHHFAAWAGLCPGNHESGGKRKAVSVRKGNPFLKSILVQAATTAVRTKGSYYQAKFNRLSKRRGYKRAIVAIAHSMLVAIYHMIRDDRQYQELGGDWFQKRSPESRAKSLMKQLQQLGYTVELRAIQA

SEQ ID NO: 341857 - protein, 369 aa, unidentified
MYKSPSCYFGYQGPDRISVCRPLKVLVKVTIHIINYKFMKISETVGIDVSKLVVDARIQSNQCFSQFENSSKGFKRLYEWALKNSDFPPDEMLFVFEHTGLYSHNLAVYFSELKVPFTIVPGLEIKRSLGITRGKDDRIDAAKIARYAYRLRDEIKPYELPSKQLMDIKNLLSLRDRMVRQRAGYKTSLKEQKRVYKSKGNHVLFNAQESLIKQLSKQIDAVDKEMIDIVCSNDQLQLIYKLITSIKSVGQQTALFMIAYTDGFTKFKDSRKFAAYCGIAPFPNSSGTSVRGKTKVSHLANKKIKSLFDLCAKNAIMHNSEMKKYYNLRVEQGKHKMCVINIIRNKLLSRIFAVVNRKTPYVDLLKYNT

SEQ ID NO: 341858 - protein, 354 aa, unidentified
MNSLRYIGMDVHRDTISVAVLDESGRLTMQSVLATRAGAVLDFIHGVRGTLQVTFEEGTHSAWLYDVLVRRVEKLVVCNPRKNALLKSGSKSDAIDARKLAELLRAGMLSAVYHGETSALEVQQMARSYSQLTEDTTRVMARLKAVFRGQAVSCAGKKLYGKRHREEYVEQLSGGLRRRAEHLYQELDALQPLRHEVRRELLVECRKHAAAQWLQSVPFLGPIRAALLIGRVQTPHRFRSKRQFWTYCGLGLETRDSGQYRMVNGQVERRRRPVLIRGLNWNHNHEMKNLFKSTATAASVRQGVWREFYLGLLDKGMRPEMARLTLARKIAAITLKIWKKGETFNAEHLKLQAA

SEQ ID NO: 341859 - protein, 614 aa, unidentified
MSNSTPLDRIGVGIDTARYGHRVSFLRPDHQPVAKPMTVLESRAGYQSLQQRLEYLHRQHPNAQFHVRIDAAGQYAANLEHFLRSLPLPITLSIGEPKRNKDYQKAHFPKRTTDDTESQAMARFAVVELPKATAPTSAAMTILREVAGRLQAKVKQSTQAINRLHNLVARVFPELANLTDDFAASWVLQLLDKYPTAQRIGQAHLASLQKIPYLAPELAEQVHLVAKQSVACLAGDVVEALMRDLVEQVRHTQRAEDHMRRLLKEAYDTLPASAHLQVVTVPGIGVATAAAIIAQTGDIDRFATPEHFVGYFGVFPEENTSGVDKFGKPVPPGTMRMSPKGNDLVRHYLWNAARSAVVHNPAISALFRRLRAKGKRGDTALGQCMRKMLHLVYAVWKTNRPFDEKHFTWEPSTTTTTATTATASANAAEGVAAAATTTADGSPTTGSAVAADASTVGTASVATNETAVGHKQDLPATEVVTTANPTVEPTPPVVKPPSSRSARPRVDFAFVREQVSMEQVLRHLGLFERMRGRGRQRRGVCPLHGGPDNTQPTLSVHLGKNVFQCFHADCGAQGNVLDLWAAVHKLPLYEAALLLADTFHLLRNREEEPVRGTT

SEQ ID NO: 341860 - protein, 399 aa, unidentified
MGEGMVAGIDWASEVHVACVMDGDGAVASRFSFTHDGAAIGAMAGRLRAAGVAGVAIERGDGPVVEELLSAGLAVFVVPSRQIKGLRTRYGSAGNKDDRFDAYVLADTLRTDGHRWKPLRPDTGPTRALRAACRSRKDLVETRVQVLGQLRANLELAFPGTIGLFTKLYSTISLAFLQRFPTAAKAAWLSPKRLASWLASVGYTGGVSAGILYDRLATAAPGLTGAEGEARGQITLALVRVIGALNTQIAALDAEIGRLFAAHPDRDIFASLPRSGTIRAATLLAEIGDCRQRFPTDDALAALAGACPSTRQSGKRTQAVFRWSCSKKLRAAVMDFANGSRMADPWAAAIYAAAIARGCRHPHAIRILARAWLRIIWRCWQDGAAFDPALHRSRQTATA

SEQ ID NO: 341861 - protein, 355 aa, unidentified
MNAIKYIGMDVHLATISIAVLDAQGKLMMEVTIATQAGALLDFIRGVSGTLNVTFEEGTSAHWLYTVLDPHVAKVVVCDPRQNPRRLGEKKSDRLDARKLAEWLRLGTLKPVYHGHSLGPALKELARSYRTLVSDTVRVMNRLKALYRARGIRCAGTRVYSPRFRDQWLEQLHEPGVRGRAERLYKQLDLLLPLRQEARAAMLAESRKHPAHKILCSIPSLGPVRVALLMALMQTPHRFRGKRQLWTYAGLALVTRTSADYQLVDGQVTRARKPALVLGLNANHNHTLKGIFKDAAASALAHPGPFKDFYTTRVAQGMEPELARLTLARKIAAITLTLWKKGECFNAEHLKTQAA

SEQ ID NO: 341862 - protein, 412 aa, unidentified
MLFIGDDWAEGHHDVVVQDEAGKTLARRRLPEGVDGLARFHEVVAFCLGEDGEPDAAQVMVVIETDRGPWVNALAAAGYRVFPVNPKQAARHKETVAVSGKKDDFFDAAGLADMGRTRRHQIRELAADSDVAEAVKIAARAHQKLIWERTRHLLRMRSALREYFPAALEAYADLTLAGADALELLGKAPEPASAARLTVTQITAALRRARRRGDLAQRARDIQAALRVPRLGQPAVIAEAYGASVQAGAAMITALNEQIKIMEARVSELFHRHPDAGIYLSQPGIGDITGARMLGEFGDAPGRYASAKARKNYAGTSPLTIQSGKKKTVHARYIRNRHLIDALHAQAFAALTASPGARAYYDELRAREIGHEAALRRVAGRLTGVLHGCVTTGREYDEATAWSHRDTPAQAA

SEQ ID NO: 341863 - protein, 404 aa, unidentified
MQECNAAMHRIETASSQVALSAASGKGAAKQYAAYIGLDVHKETIAVAVAEPGRGEAMYRGEIANTPKKVEKLIAQLSEAYDGGLLLLCYEAGPCGYGLYRQLIGSGHDCQVVAPSLIPKKAGERIKNDRRDALKLARLLRSGDLTAVWVPDREQERMRDLSRARDDLKAQERTARQQLNAFLLRHGQHWPKGKSRWTPAHENWLAGLKLDDPWQQVVLQTYIDAERAAGERVAQLTDQLMRALPEWSLAPVVASLVALRGIDKLAAIVLLAELGDISRFDSPKQLMAFLGLVPSEHSTGGRRRQGAITLTGNSHARRMLVESAWSYRFPARQTKHLKAKAANASPEAKRIAWKAQVRLCGRYRSMTRAGKNTKLVCVAIARELAGFLWDIVRREMPQPAQHGA

SEQ ID NO: 341864 - protein, 400 aa, unidentified
MHLTANISVPQKNFIAIDLHSDNAVICVRRNALNKAGELVGKNIWCGRVSIRDGLDSFVKALLPYCQDFDHVAVVESTYNWYCLADVFEERGWLLRIADPSTVSQANLKSSDDRTDAQYLAERLRVGSLKHYLPLSYSSRELRDLCRYRMAMVQDCASLKIKLINLYRNQLSKNLCVADLLERCQPHMQSNYRFDPDILEEFKDPNIRLRVAFQVSRIAMLEEMIEECNAEIQKQCKDQELVKLCKTIPGCDPVLSAVICTEIGTMQRFKSAGDFVSYCRLCSTSKLSNGKSKGLGNAKNGNAYLSWAFTEVAQYASRNPVIREILQRLLRKYGGLRVKAIRTLAAKIARVTFYVLKNRQPFNAAQCFGDELTKGIKKKLALKPLSKDDSVVLPIVAGLA

SEQ ID NO: 341865 - protein, 441 aa, unidentified
MEAVYRRCAGLDVHKDVIEVCVLPPAGQSGSPQRRRFATFTSDLIRLRMWLVSLKATEVAMESTGLYWVPVWRQLEGHIGKRLLCNPQQVKALAGRKSDRRDGQRIAEFLQDGRLDPSFVPPKEIQQLRELLRMRVSLVQEHNRLSNRVEKLLQSYGVKLSSVASDILGKTGQRILTALAAGQTDPDQLSWKAVGSLREKEAQLRRALRADFDEHSCWMLGVLLGQLKENEQWREQLEQRITEGMKPYEPIVIRLMTIPGVDRLTAWSMVAELGTDMSVFPDQRHCASWAGVCPGTNESAGKQHSTRTRRGNRYLRRILTQSAWATSRCKRGYLRAAFHRIAQRRGHKKAVVAIAHKILVAAYFIIRDQTTYLELGEDYFDLLHPERTARRLARRLERIGYQVTLTKAAATAPRSSEGQQPKKRGRPCQCAERGIDCKHKR

SEQ ID NO: 341866 - protein, 336 aa, unidentified
MASLACFVGLDYSDERVQVCLLDAQGKQLDNQCCGNDWQEIVRSVERHGRVAEAAIESCTGAANLAEELATRAGWSIHLAHPGYVQRMKQTPDKTDYQDAHLLADLVRVGYLPRVWLAPASVRDLRQLVRYRQQLVEQRRATKLRVRALLREHRCRPSMAVNPWTKAWRSWVESIAIGSLGRWVMDRHLLELQRLAKAIQEVEERLAQATADDAVVQRLRSQAGVGPVTAWVLRAEIGRFERFHTGKQLARFCGLSPRNASSGSRQADAGLINAASSMLRSVLIEVAHRLPRQDVRWAKFRGRLREGGKKGSVIAAAIANRWVRWLYHQMQTVAVA

SEQ ID NO: 341867 - protein, 342 aa, unidentified
MQITTIGLDIAKNVFQVHGIDATEKVVVRKQLRRGQVMKFFEALPPCLIGMEACATAHYWARELTKLGHEVGLMPAKDVKAYVKRNKNDAADAEAICEAVRRPTMRFVRAKSAEQQGRLMQHRTRDLLLRQQTQVINALRGHLAELGIVAAQGREGLKQLLAIIADEADERVPIDARASLIVLAAQLQALQTMIGSIEKRLVVQHRANEASKRLESVPGIGLIGASAIAATVTDPNAFRSGRDFAAWIGLVPRQDSTGGKQKLGPISKQGDRYLRRILVIGAIAVLRYAKQNPEKYPWLTQLLARRPFKVVAVALANKMARMAWALLAKGGTYRAPALATAA

SEQ ID NO: 341868 - protein, 367 aa, unidentified
MKKFSTAAAKARKRISSQKLTVGLDLGDRSSWYCVLDEAGGVLLEQRVSTSPKAVREVFSGMAGSRIALETGTHSPWVSRVLSAVGHEVIVAHARKVRLIGESRKKDDRLDAKTLARLARIDPQLLCPVKHRSAKAQADLTVIRARAGLVRARTALVNTARGLAKSYGERLRGCNPRNMNPKKSEELSPGLQTALQPLLAGLESLSEQIREYNERIEELAQESYPQVALLKQVKGVGTLIGLTFLLTLEDPHRFRKSRDVGCYLGLQPGRRNSGQSEPQMHISKEGDPYLRTLLVQGAQHILGPFGVDCDLRRWGLKLAERGGKSGKKRAIIATARKLAVLLHHLWVSGEAYEPLHNSQQSAMPAAA

SEQ ID NO: 341869 - protein, 416 aa, unidentified
MNAVGIDVSSRKSTVAVLRPLGEVVCLPFDVSHDADGLASLAEKLKALDGETRVVMEHTGRYYEAVAKALHEAGFFVCAVNPLLIKEYGANSLRRVKTDKADAVKIARYALDNWADLRDFTPMDAIRYDLKTLNRQFQLASKQRTASANNLIALLEQSFPGIRKCFDSPVRSDGTQKWVDFAHSFWHVDCVRKQPFPAFCERYRKWCKRHAYLFKLSNAEEVYALAKRAVVLTPKAKVVKVLVQEAANQLISISRSVEVYRAEMDRLAAMLPEYPVVMAMYGVGKSYGPQLMAEIGDVRRFERKQALVAFAGIDPMPNQSGDKNVRSNKSSKRGSPYLRKTLFNVIRTYLQCAPQDEPVFQFLNRKRAEGKPFYVYMLAAANKFLRRYYAKLRDYFASLDTLQPVAPIPTILKAAL

SEQ ID NO: 341870 - protein, 356 aa, unidentified
MKYYTSTTEFNCGIDLHARQMYVCVMDRQGKKLVHCNVKDNDFAFFLKLIEPYQHDLTVCCECMFGWYWLADACEQAGLHFVLAHALYLRAIHGGKNKNDRIDSEKLTHLLRCNLLPPAYVYPAQKRPMRALLRQRVCYVWRRTELLNRIASHQLAHNRRPVKCTTRHNRDPWEQKILSTETHPLRTLALQTDLAMVRHYDEQIQGLETKLVQLAKEHSARDFTLLLSVPGIGENLGLTILHEVGDIERFPTVKDFLSYCRLVKGTVASAGKIKGLRGSRLGNPYLRWAFGEAAIIAKRDHAVIGPLSQRLEAKMGGHKFKANTVVAIKLARAVYFMLKNKTVFDSDRLVAALSGK

SEQ ID NO: 341871 - protein, 403 aa, unidentified
MFYLGIDVSKKSCRYLLLNQEGQKTKSFSLDNTHEAFQNLLKRLEDLSIPKEDLLMGLEASGGFWENLYSFLKDNGFRVILLNPYHTNKFREALAKKAKTDDIDALVIAQLLRTGEYVQSQVAEELIQSLRELTKLRYELMTERKNFQRQVFSLLSIIFPELEKTALKNPFSVASMAILQRFPTAKDLAQAKPKQIEKIVRSIQGNNFNIEEIEKLIQTAQTSIYSGRAKEARATSLRILLRHVETLSSSIEELEAQIKQILSPQQPQDSFPGENLLTIPGVGDKTLAAVLSYLGADGSSFYSSTKAVGYVGYFPKIYQSGQTQRDNAICKRGPKLLRWALYMAAVASLKHNPEMRTLYHRKLSQGKTEKQALICVGKKLLQIMLAMLKSREPYNPAKVFVSC

SEQ ID NO: 341872 - protein, 343 aa, unidentified
MGEISMIGLDIAKNVFHVHGVDASGAPVLRRQLRHREVEQFFAKLPPMLVGIEACGSAHHWARVIGRSGHQVRLMPPGYVKPYVKRNKNDGRDAEGICEAVGRPTMRFVAVKSVEQQAALAVHNTRALLVRQRTAAGNALRGMLSELGIVAAQGTKGLLTLMQQLEQPSEEIPELMRNALLLLARQWQALDTAERALAQHITRAAKADREARRLMAVPTVGPMIASTVLAKVPDPHMFRSGRDFAAWIGITGRDCGTGGKHRVGRISKQGDRMLRTLLINGASAYLLHQKRRGVTDPWLRDLLARRPFKVAMVAMANKTARIIWALLVKGEDYRARVSVPAAA

SEQ ID NO: 341873 - protein, 343 aa, unidentified
MDHFAGLDVSVKETSICIVDETGRIVGEVKVASEPEALLQVLMNPAYHFKRIGLEAGPLSQWLFSALGEAGLPVICVETRHMQAVLKAQINKTDRNDARGIAQMMRVGLYRPVHVKTLRSQKLRMLLTHRKLLQSKAIAIDNDLRGTLRNFGLKVGMVGKVKFEARIKELVENFPDLAVLVEPLLVVRRVLREQLGILHRRLLAIVRDDDVCRRLMTTPGVGPVVALTYRATVDVPARFRNSKAVGAVFGLTPSKYQSGEINRTGAISRCGDEMMRMMLYEAAQSMLVHSARWSWLKAWAMKIARHRGMKKAIVALARRLAVIMHRIWVDGTEFRWTREVAAA

SEQ ID NO: 341874 - protein, 423 aa, unidentified
MEVMHRRVAGLDVHKETVVACVRVMAGRRPTRECRTFTTTTQGLLELLGWLTASRVTHVAMEATGVYWTPVWKILSEGDFTLIVANPAHIKQVPGRKTDLNDAMWIADLLACGLLKASFVPPEEIQELRSLMRTRKQLVREQTRHVQRIEKTLEEANIKLGTVLSDLMGASGRRMIEAMIAGERDPHRLAALAERSVKASPQALHDVLHGRLREHHRFLLQLHLRQWDALDAAIRQIDEQVAGHIARVDHEAADGQPPFRELIARLCAIPGVSVLSATAILAEIGRDMSRFPTAGHLIAWAGLCPGQNESAGKRKSSRLRKGAPWLKTMLVQCAWAAKRAKHSYYSAQFHRLCGRRGPQKAICAVAASILTAIYHMVQSGASYRDLGADYFDRRTPQAKAKRLVAQLAKLGFAAQLQPLAEAA

SEQ ID NO: 341875 - protein, 415 aa, unidentified
MNGEFRFYVGVDWATEQHQACITNSQGEVLEQRKIEHTGEGIIEFMAWMEALADGQVEGIAASIEVPRGPVVEAFLEHRWSVFSINPKQLDRFRDRHTVAGAKDDSRDAYVLADSLRTDQHCFRRLESDHPAIIRIRELSRSEESVGADLRRTINQLYQVLLRYYPQLLQLASMPDEPWIWALLEMAPTPARAAKLTAGRIRRLLAKYRIRRWSAEAIADVFRGPALPLSAGSVEAASEHALLLLPQLRLLSTMRKQVGDRMQELMDEVVTASGSEPETQLLRDISLLQSFPGIGRIVAGAFLAEASGPLQQRDYHAIRAHGGIAPVTRQSGKTRQVGMRYRCNTRLRNALYHWARTSVQHDPRSKQQYARLRATGGSHGRALRGVADRLLVVLIAMLKAGEPYDPKRRNVSEPA

SEQ ID NO: 341876 - protein, 342 aa, unidentified
MKIIGCDFHPSFQQIAMVDSATGEYTERKLNAAEAQPFYSELKGKAIVGMEACGNTLWFERMLAELGHELRLGDAAKIRALEVRKQKTDRRDAELLLQLLLEKRFPQLWVPSLEQRDLRQLLLHRHKQVALRRQVKNQLQHLALNQGVQQKRKLWSTAGRQRLEALPLTGWTARRREDLLRQLDDLDGCLAELDSAAQQEAAKNPMAQLLRTHPGVGPITALAFVLTLGRIERFDHSRQVVSYLGLNPAEHSSGGRQRLGRISKQGNPMLRSLLVEAGQSAARCVPELKRAYQRLKHRKHSAVAKVMVARKLAVRLYWIWKTQQPYAAARTQGSPSHPVVAG

SEQ ID NO: 341877 - protein, 337 aa, unidentified
MKYCGIDLHSNNSVVIVSDEEDRVVLSKRLPNDLGQIRAALEPHREDLAGVVIESTYNWYWLVDGLMDTGYQVHLAHPSAIKKYEGLKHSGDFADAAYLAHLLRLGLLAEGYVYPREERGARDLARKRLQLVRYRTAQILAIEGILMRQTGTRLKGEAVKRLTAEQVDEFAFAPDVSLAVQANRAVSQTLSQQIEALEKRLQQRVILRPEYRLLKTVPGIGEVLATTIMLETGTISRFTRVGNFSSYCRCVDSLKESNGKRKGEGNTRNGNKYLAWAFVEAANFALRCCPQARSFYDRKKSRSNRILALKALAHKLARACYHMLQDQKPFDVHLCFG

SEQ ID NO: 341878 - protein, 357 aa, unidentified
MWAGIDTHKDTLAVGVIDEVGRALAVREVANTTAGFVLLERLFAEHQVVRVGIEGSGNYGRAVAAHLVIAGGVEVVEVPPALTFRERGGAPGAGKTDPGDAVAIARITARELRLPPVRLTIGAAADLRALLDYRQQLIDERIRIANRVHVELGGLRPGYQSQLPSLIGRNRVATARRLLRGDTNTRAELTRRRLDRLSRLDVEIAALKTRIAVLVTASGTRLSSLFGVGPLVAARIMAEVVDVRRYRSPDAFAAANGTAPIPASSGRTVRHRLNRGGNRQLNKSLQIIAVTQLRGDTEGRRYYDRKRAAGKTRREAQRCLKRRLSDVVFHLLREDLHALEAQPQPTQTGQPSSSAAA

SEQ ID NO: 341879 - protein, 376 aa, unidentified
MLKYSLGIDVSAPTLACCLSSIDFSQHVQVVATSSFANSTSGWKALHNWIAKHRKQKDIPLVCILEATGVYYEGCALYLSNAQYYVSVVLPNKSKKYMESLGLKSKNDKIDARGLARMAAEQALDQWQPMSAFFFTLRTMTRQLERLQKTKTSLSNQLHATQISIYQVGVVTRQLTSLIRTLEKQMGSLEKAIANHLMSDPDIADKVAHLCSIKGVGLTTVAVMLAETNGFALMENIPQLVSYSGYDVVEDQSGKRIGKTKISKKGNARIRKALYFPAITTVNCQVSPFYELFHRTHSKHHIKMKSYVAVQKKLLILMYTLWKKNEPYKEMVPKKEDAESGKIMQPENKIKRKFPTRGREPVGKLLHEVTISFEME

SEQ ID NO: 341880 - protein, 363 aa, unidentified
MHYVNNTELSSHEETRCQFNGGTGAIKLGIDVHQDFYVVVMQEGGTNPKPPQRFQKQAFLHWAAKLKSQGTEVHAVYEACGFGFSLQRQLSALGVHCHVICPQKLDEQNRRVKTDGLDAKALCLKLDRFVEGNRSALALVRVPSEEEEQKRAIHRQREQLVKARKQLEAHGRSLLVNHGLEPVQNWWKPRTFAVLPAPQWMKELLQNSQPILFALQEKIAALTLQLQNAAAPKQPRGLGKMTSVIIDREIGDWRRFNNRRQIASYTGLCPGEYSSGNTRLQNCVTKHGNPRLRAALVELAWRLIRFQPNYKPIIKWKEVLRRGALATGAARKKAIVAVARQLAVDLWRIKTGRVSAATLGLIN

SEQ ID NO: 341881 - protein, 381 aa, unidentified
MNAPSARIGDCRVQANRQKKEVNNEMAVYVGIDVHKKYCQAALMNDNGRITHELRFDNNQQGATSLVDLAKSVDPQIKAVLEPSANFWIRIYDKLEDEGVEVKLSNPLRTKAIAEARIKTDRIDAKTLAFLLRGDLVAESYVPSRKNRERRALIRHRASLMRIRVDIKNRVHALLDKHELTHSYSDLFGKEGTEWLRSLQLPTPDHQILQSNLQVLETVNAEVRNADIQIAKDATTEDQAKLLMTMPGVDYYAAMVLLSEIGDVHRFNSDEKLVSWVGLAPQVHQSGETNWTGHITRKGSKRARWILGQCAQSARQHDPRMREFYERIERKHGHQKAIVAVARKMLAIMYVMLIRNEPYRGENPELTEQKHKRLDTLANSA

SEQ ID NO: 341882 - protein, 338 aa, unidentified
MKKKCFIGIDVSKHTLDTAFIIRHGDTLTDPVWKQFSNTHSGLKEMNRWLLEMKISLDQHIVIVIENTGIYHRLLWQYCSKLQVDLCIENAAQVKWSLGIARGKNDKVDSRRLALYAVRHADRLKPTPGLHNNIMALKDLLTLRTKLLVQSRSISTGFHELKNVSDTATMRTMQKLLRPAQDGLKESLKRVEEQIKAMVSKDKELSRIYMLLLTIPGIGHITAVMLMCCTNLFSLCSSGKQLACYCGVAPFDHQSGISIKGKSRVHRMANKELKRLLHLCALTVIRHKQEFKLYYERKKQEGKHPMCILNAIRNKIILRVFAVVKNERPYVNNCIQAA

SEQ ID NO: 341883 - protein, 368 aa, unidentified
MKQDKYIGMDVHQATTVVAVLDANGKVIWETIISTQAGEVIRLLESLSGPLHVTFEETTQAEWLYEVVRRHVGEVVVCDPRRNKLLSEGSKADKIDARRLAELLRVGMLRAVYHGQEGGTRKLKQLAAGYQTLCSDVQRTMARLKAIYRGRGIQTPGRAVYQAKQRQHWLGLLSDEGVRQRAAWLYEQLDQLQPLRRRARRAMLEESGKHRAVGLLRTIPQLGPIRSALIVAILDTPYRFRTRRQLWSYIGLAVVTHMSSEYEMQNGQVVRSRKPIATRGAESELQSDSEGRLHRRGDGRRPEGALSRLSAGIRRAGHAQRNGTADPGTEDRVDRVDDLEERRCVRSKETEWGDIAVSSGLPARRYCR

SEQ ID NO: 341884 - protein, 316 aa, unidentified
MSTSSAVWVGIDVGSVELVVHHRPAEVRLTIPNTPAGVRQLVRTLQTLTPDKIVAEATGGYERRLMRACRQAALPLAIINPRLARRFAESLGRLEKTDAVDAADLALYAERQQPACRPLPDDATLALQDLVTRRRQLVDMRAAEQNRRRQASPTVLADLTAHLRHLDTRIAHLDHQITEAIAAAPAWAASAAVLHTAKGAGPVLVATLLALVPELGTLTRRQIAKLIGVAPLARDSGKHRGRRQCWGGRSAVRSVLYMCMGSAIQHNPTIRELYQRLITKGKPEKVARIACLRKFLVRLNAMVRNQLPWQDIGQRS

SEQ ID NO: 341885 - protein, 376 aa, unidentified
MMDDSGKVVFKAFSFPNTSDGGHALFSKLASYSPCPDDFEIGMEATGHYWLSVYSFLFEKKFLLHVINPIQTDGWRRGTEIRKRKNDIIDSVLIADLIRYGQFVETRLADEDLFSLRSLTRFRTYLVESISDLKRKVVCVLDQVFPEYQSIFSDIFGKTSKEILLQFSSPIDFESVSSQTLAELLAKLSRKQVGPAKAAQLKAAASCSFGVTFAKSSFTFQLKALIEQIAFIEKQVKETETEIAGIMEKLESPITTITGIGNITGAAIISEIGDISKFDSPRKLVAFAGLDATVTQSGEFEAAHNVMSKRGSPYLRKAIFQAALVAAFKDPVLSAYYQKKRAEGKHHLTCIGAVARKMCNIIYAVVKNNQPYVPKA

SEQ ID NO: 341886 - protein, 450 aa, unidentified
MSQSQTLNVPSEFAAFIGLDWADRKHSWKLVAAGSVEGESGELNHTPEALQQWATDLHDRFAGAPVAIALEQRRGAVVFQLSKFPHLVVYPVHPTTAAKYRQAFFPSGTKNDPLDSALLLELLLQHRDRLRRLDPDTPATRLLQLLVEHRRKLVDEKTRLSNRLTAALKSYYPQPLQWFDDIDAPLGCAFLQRWPTLAQAQHSHPGTLRKFFVQHNCRSAERIRERIEGIHQATPAVTDTALLEAGGIIVSGIVRASQALSESIAAVDARLQGAVAEHPQAGIFAGLPGAGAVLLPRLIAAFGTRLDRFPSASKLQCHTGIAPVHSQTGNTEIVHMRRACPKFLRQTFVEFAAHSVAKSVWARAFLQNQLAQQKDYNVAIRALAFKWQRILHACWRNNTPYDEQRYLQTLQKRNSPLAKLSAIPKSAPTDPTAVGWKSVAGFHTLAMKNT

SEQ ID NO: 341887 - protein, 339 aa, unidentified
MRTLYAGIDLHSNNNVVVVTDEEDAVVYRKRLRNELGDVLNVLSPFEQNLAGVVVESTYNWYWLVDGLMAEGYGVHLANTGAIQQYSGLKYGDDESDARWLATLLHLGILPEGYIYPKEERPVRDLLRKRAYLVRQRTSNLLSIKNLFARNTGRHLSANGVKRLTEAEVDEMLPDADLALAVKSSVAVMHCIDVQIKTLEKVVLNRVHLREDFQRLLTVPGIGPILGLTIMLETGDISRFPTVGDFASYARCVGSAHISNGKKKGKGNTKNGNKYLGWAFIEAATFAARYDETIQRYYQRKKVKAHLMVAKKAVAHKLARACYCMLRDQTDFDVHKAFT

SEQ ID NO: 341888 - protein, 316 aa, unidentified
MEAIAIFVGIDVSKARLDVAVRPWGQSESVTNDEAGIKSLVKRLGEIQPALIVLEATGGVERQLTRALVNAELPVVVINPRQVRDFAKATGQLAKTDSIDALVLARFAEAVRPALRPLPDEVTLELRALIARRRQLTEMIVVERNRLGGASKTVRKRIDAHVRWLEAELQRADGDLDQSIRQSPIWQDKEDLLRSIPGIGPVISRTLLAELPELGGLNRKQIASLVGIAPLNRDSGTLRGRRAIWGGRASVRAALYMAALVASRRNSVISVFYKRLRTAGKAPKVALVACMRKLLTIINSMINHKTRWSENILQTS

SEQ ID NO: 341889 - protein, 346 aa, unidentified
MEHYVGLDVSLKLTSICVVDRAGKVEREGVVASAPEAIATFIKLHAPHVVRIGLETGATSTWLWTELDKMGLPIVCIDARHAKAVLKMQINKSDRNDAAGIARIMQCGWYKEVCVKDLDSHATKALLVSRALLVKVKRDIENQIRGLLKNLGLVIGRAKMNMFAVRAAQLAEDRSELFAAVDPLLKAREAIEQQIVDLDRKVLRLARNNAQVRRFMTAPGIGPVTALCFLATIDDPARFKRSRSVGAYAGLTTRRYASGEIDWTGRISKCGDKMLRGYLYEAANVLLTRVAKWSALKAWGIRLAKRSGLRKAKVAVARKLAVILHRMWIDGTEFKWSSKDAAGQPV

SEQ ID NO: 341890 - protein, 422 aa, unidentified
MSYCPVAGIDVSKRFSDMCILSPDNKIFAQEKIYHDETSINRANTLLQKAERLFFSKPVIVMESTSHYHLILFQFFSEHGYDVIVVNPLQSNSMKDFSIRKRKTDRVDAFKLAMMYRTKTLRPSQIPQTATRALRQLCRHRAELLNDVSSYKNRLTALLDQTFPGYDKVFSDVGGVTSCAVLVRFPTPTILLVEEESELVEVIAATSKSGYSFAKKKAGLLISAAQKAQTLGIHSCADETLIVCTIQMLRTLSESVLQIETAIDNLLAQIKEMRNNVSLLQSIPGIGSHSAALLLGEIGDISLFKKPKQLAAYFGLDPTERQSGSFRGTKNKLSKRGSSYARAALHMGIVNSICKRGKDSAANPVLLSYYEKKCKNKPAKVAQAASMHKLVFIIFAVLRDQKPFELKTPEQHAVEQGFVKAA

SEQ ID NO: 341891 - protein, 351 aa, unidentified
MMIIGVDYHPSFQTIAFLMEETGECGEQELNHSDGQAEKFYRDLKRRGICVRVGMEATGYSRWFERLLAELGFEVWMGDPAEIKAKRVKKQKFDREDARLILRLMRENNFPQIWVPGPENRDLRQLLWHRHRLVQMRTRIMNQLQALAMNEGYRWKKKLFSEQGRAQLEKLTLAPWASRRRQELLELLDRMNPTIEELTAAIEREARKRPEAMRLMTHPGVGPLTALAYVLIIGTPTRFQRGKQIGTYVGMIPCEESSARKQRLGHISKQGSSLLRFLLVEAAQAAARVHPDWRRRYIHLAMRRHKSIAKVAMGRKLAVRLYWMWRNGCEYSQSLEFGSYAGQLGIGNGEK

SEQ ID NO: 341892 - protein, 523 aa, unidentified
MLKCSTQQHRATTKERVGLMNTIRFIGLDVHANTIAVAVAEPNGEVRSIGMIPNREESVRRCMKKLGSPQELRVCYEAGPTGYVLYWQLTQLGIHCEVIAPSLIPVKPGDKVKTDRRDAMKLARCYRAGDLSPCWVPDAAHEALRDLIRAREAARKDQQRARRRLGTFLLRHRKRRPDSMKTAWSTHHMKWIKTAVHFDLPAQEATLNDYVHEVEHVKLRIARLDQAISEAIATAPERMRQVIYALQSLRGIAELGAVTLAAEVGEFSRFPGTKQLMGYSGLVSREYSTGRHRYQGSITKAGNAHLRRVLVEAAWAYQFRPWLGGYLLRRQANATAEVREIAWKAQHRLHSRYRTLLIAGKNKPQIVTAIGRELLGFVWNTTPKTKPKSAIGWLPELAAVEPATASTNEMLTERAAEVAVEGTMTRRILVPFMQCVSERVTNPRGTKPAHLVRGSSRRMIFMRLRPSNIRVINRRDECLDRHRCCSPLLDQQRSNGPPPTFFLTPLSISITQPKRKLHRAGTA

SEQ ID NO: 341893 - protein, 429 aa, unidentified
MKAVVERCAGIDVSKTRLNVCVLTGAADQDPEAELRLFGSFNAELEQLRDWLVEKGCTQVVMESTGSYWKPVYAALESSGIDVILANGEDVKARRGHKTDWKDCQFLANLLRHGMIRPSFIPPQAIRDLRDLTRRRRQLIGDATSERNRVQKVLEEANIKLGSVLSDVFGVSGQLMLEKLLDGEADVAAIANLAQRKARSKIPEIQQALEGHRLRDHHRGMLRLSLEHLAFLERQISAIDEEVLRLIQRENLQSAFQLLQSVPGVQEISAAALLAETGADMQVFPSEAQLSSWIGVAPGNRQSAGKNKSAAIARGNRWARTALVECAWAAAAKKDCHLKERFHRLSVKGRKSALIAIAHALAVIIHRTLTSGMPYHEPNQPIPDERKRQRLIRHYVRRLGRLGVAVHSLRPDTATHYRSSTDARTPTHT

SEQ ID NO: 341894 - protein, 432 aa, unidentified
MEDVREEPLFVQRVAGLDIAKAEAGVTIRMPSDTSAGRRQQETRTFGTTRRELLELADWLRSWGVTKAGMEATSDYWKPVFFLLESRGFDCDLYNAAQVRALPGRPKTDRADSIWLAKITERGMIASSFVPPEPIRRLRTRTRYRRHLTQARTAEKQRVEKLLEDGHLKLSSVISDIHGVSGRDMLDALAAGQRDPHALAAMARGKMRGKIRRLEEALECSFFTDEHAAVLAMMLAVIDHYTAQISQLTVTIEELAEPYLPQIGQPGAVPGIGMICAQDIIAEIGTDMAVFPTAAHLVSWAKWSPQVRQSAGKRKGSNATGRGNPYLGAALGEAGISAGNTQSFLGARYRKLTRRMPKKKALVATGNSMLTIIHALLSDPAAVYTDLGADYYEQRMHARRQARNHVKSLERLGYKVTIEAIDPATGELTAAS

SEQ ID NO: 341895 - protein, 353 aa, unidentified
MEHIAIDVGGRESQICVRRGDGTIVEERRCATGALKAQFARRAKGRVILETCAEGFAIADAALAHGHEVRVVPATLVRSLGVGSRGVKTDRRDAQVLSEVSCRIDLPSVHVPSLEARQRKAICGMREILVGCRTKLVNSVRGWLRTQGQRPRTGAVRTFPRRVRALYAREGTPVPSFVERQLTAIEQLTAQIIAAGAEVAELARTEPTCRRLMSAPGVGPVTAVRFVAALDQVDRFPDAHAVESYLGLVPGEHSSSDHRRRTTITKAGSPQLRWTLVQAALCARRRRTDDPLVAWSRQVERRRGRHIATIALARKLAGILYALWRDGSSYDPNHRDKNATPDTRLSGAPRQTR

SEQ ID NO: 341896 - protein, 393 aa, unidentified
MRFAGIDIASETHFVAAVDETGAVSVKATPFAEDVSGYAKLLGLLGPANQVLIAMEATGHYWKNLFAALAAQGYEIALINPLRTHRFAAEDLERTKTDAIDALGIARFAAQKRPAPTRLPDSATEELRELVRLRDRLMQDFGDRLRQLHRLVDLGFPEFTRYVKTLDSELATSILHDYPTAHAFRGISAKRLAQLRYDGRHKVGPELARELIDAAQRSVDQHHSEPYRIQVRYLCEDLDTLRRRLRSLDRDIDNKLAQHEVGSLLTSIDGVGSQTAARLIATLGDPAEFRNAAALASYVGVIPGIKQSGKSKKTRAALTPLGNARLRAALWMPTLTAVRRNPWLRAYYKSLRGRGKLPKVALVACMRKLLVAVYAVAKHRRPFVISRTEVATP

SEQ ID NO: 341897 - protein, 431 aa, unidentified
MEQKRHPYLSVGIDIGADFSLMAIALPTQEIIGKPYKILHSNNRSVQGAVERILSMEQAYELPARVYMESTGIYHLPLYHRLKNAGLDVYVLNPLVTHANQNINIRNIHNDKLDARRIALLGLRPDLKTSIVPADDVAAVKALLREYHAMKKETSMYICRLKNQLRQIFPQYLPLFSKVNGKASLEVLSHYPSPSAVLSAGADALAKLIQEASGKGRTMAEKKAEAILSAARESLSFGHGNSGITFLIGHYVEMIRILDEKTAAILKQIKRSVQEQPDSLLARQTRLLKSIPGAGFLTAVTIVCEIGDFRAFRRPKQLYSYFGLDPVVRQSGNSAGANLRISKRGSPYARRCFYILALQSVSLRKNGEPKNHVLRTYYLEKCKSKAKMTALGAIMHKLCNIVFAVLRDERPFVLISPQEHRQNYLSLPKAA

SEQ ID NO: 341898 - protein, 344 aa, unidentified
MTYYAGLDVSLRTVNICVIDDQGELVAETKLASDVQDIVAYLDELKLDIESISLEAGTLTQYLTYGLQSAGFEVICMEARQVKGALSAMRNKTDKHDARGIAQILRSGWYSRVHVKSMQSHHIRMLLSSRKAVLSKCVDLENEVRGLFKIFGIKLPPKLGHGAFDAAVRDIIEIDETLSHALLPLLDARLVLYRTFRVLDNRTRKMAHADPVCVRLMSVPGVGFITALTFKAGVDDPKRFKRSRTVGAHFGLTPRRFQSGELDIDGHISKCGDADVRSTLYTAANALLTRSSRWSPLKAWGMKLAKTRGHRRAVIAVARKLAVILHRVWIDDTQFRWGIEGARS

SEQ ID NO: 341899 - protein, 432 aa, unidentified
MDQIVERPGALDVHKASVTACVRVPGHEGGRVQEVREFKTTVRGLLGLRDWLAGHGVTTVAMEATGVYWKPLFAILEDDFELLLCNAAHVKNVPGRKTDVSDSQWLCKLLECGLLKASFVPPKTVRELRELTRRRKTLVRDRQREAGRLHKTLEDTGIKLDCVATDILGVSGRAMLKALIDGTRDPAVLAELARGRLRAKLPDLREALEGRFTIQHALLVGGILRHIDFLDAEIDALGTAIEAHIDAQSKQAREAKQAGEDAGAENPFDSAVQIACSLDGIQQRTAENLIGEFGTDMSRFATDKHFVSWAAQCPGNHESAGKRRSGRSRKGPEHLNRALNDAAMGAIRVKDGHFARKYRRVKARSCHGVALGAVKHSILIALYHMLKTGELYKPPTPNPDAERRARERATKRLLAQLEGLGHTVTLQGAAAA

SEQ ID NO: 341900 - protein, 451 aa, unidentified
MARPKPSRARRDISPTHQGAAGIDIGAKMHVAAVGPEQDPEPVRGFGTFTGDLHRLADWFKHCGVRTVAMESTGVYWIPIFEILDQRGFEVVLVNARDAKHVPGRKTDISDAQWLQRLHEYGLLRASFQPKGEIAILRSYLRQRERLLDYAASHIQHMQKALTQMNLQLHHVVTDVTGATGMTIIRAIIAGERNPETLASLRDRHCRASVETISKALVGNDREEHVFALTQAVELYDTYQAKIVGCDARIEAILKRLQKAASTPVSKPPPARSTKQQSNGLAFDVRGALHGLLGCDLTQIHGLGPYLALKLVGECGTDLSAWPTAKHFTSWLCLAPSNKISGGKVLSARTRRSGSRAAALLRLAAVAVGRTETALGAFYRRLSARVGKAKAVTATARKIATLFYNTLRHGMSYADPGASYYEERYRRRVLANLERRAKSFGYVLQEAPAPR

SEQ ID NO: 341901 - protein, 334 aa, unidentified
MHYIGIDFHKESTHVVVLNEAGRLLERTRIPTRREELVRFFGNRPEPAKAALEATRNWYWAYDTIEPLVEELKLASPPKIRIIAESTVKTDHIDAKVIADLLRSNFLPTCYVPDAETRQKRELLRHRAFLVQIRTKVKNRIHIILDKLGIEHPFDNLFSKRGLEFLRGLELPWAYQKELADSLEMLEFLNGKEKEQNKVIEKLCRESEEAALLMTIPGIAYHNALLIMSEIGDVNRFATGTKFCGYCGLVPTVHISDKTVRYGQMTQVGNKWLRWVFIEAAHIGRRKCLRFSRLYERVKVKRGPQVAIGAVAREMAVVSFYILKYRKPFRDAKW

SEQ ID NO: 341902 - protein, 348 aa, unidentified
MEHFAGLDVAIDETAVCVVDAAGEVVMRASVATDPETIAQILSPFAASLRRVGHEACSLSPWLQPGLKALGLPAVCLETRHVRAAMAAQRNKTDATDALGLAHLMRTGWFKTAHVKTDACYRVRQVLTQRRALKRKFLDLENTIRHSLKSFGVRLNKVGRGGFDAAVREACAEDPLTAELMDAMLEARAALWRQYLKLHAMVLRIVGADEFCRRLMEIPGVGPVTALTFVTAIDDPARFRRSRDVGAYFGLTSKRWQSGSSIDIQGRISKAGDAEVRRSLYEAASAMLTRFKGHTRLKAWGQKLAKRCHKKAVVAVARKLAVIMHAMWRDGTAYADAPASAIAARAAS

SEQ ID NO: 341903 - protein, 437 aa, unidentified
MTENINSSHTSDQSCEFVALIGLDWATEHHDFCLLDPTNNKTEFGRFDHSPEKIAEWVIGLVERFGQGKIAICLEQSRGPLIYALLGYENLVLFPVNPKTISKLRSALYPNEPKDDRLDAKLALKMLILHREVLRPLQPLDAESNKLNLLSERRRELVDLQADQSNRLQSFLKHSYPQAIEMIGTNPTSRMATAFLQRWPTLESLQQAKPQQLRKFYYKQNCRKEECIQKRLELAKNALPLTEDSAIIETYKLMVLGVVNIIIALNDTIDQIEEVLSEVVESHQDSHIFQSLKGAGPAFVPRMIGAFGTDRDRFPQASDIQCFSGIAPVTRQTGKAPAIVVKRWQCPRFLRQTFHEFAKCSVNFNGWAKCYYDDQRAKGKKKHVAYRALAYKWLRIIWKCWHDKVPYDEAKYIRALQKKGLKIYSHLQVEQQITKCE

SEQ ID NO: 341904 - protein, 375 aa, unidentified
MSKRNHLKERLNEKLQAISFSTLVVGIDIAKKNQWARFVDCRGIEHGKALKFENNKNGFEKILTIIYELCKNDGFKNAVVGMEPTGHYWKPLANYLIKKGLTVVLVNPYHTKKSKELDDNSQTKSDIKDALTIAKLVKDGRYFETYLPHDIYAELRSLTATRTGMLKRMKSIKNTIIAVLDEYFPEYESVFKCIFIGKASRHILKTCPLPVLIKELGEDGVLAEIKKAVKKTVGRKKAKQLLEAAQNSIGVDYGESATPFRIKQYMSELEMMEKQLTQIEEEMKKALEKTGLSEYLLSIPGSGVVSMASVLGELGDPLRFENPRQMSRMAGYNLIEDSSGKNKSGTRISKRGRKNLRCVLYKMALIMVAVNPEMK

SEQ ID NO: 341905 - protein, 356 aa, unidentified
MKSIGIDYHKRYSVLCIVDETGAELHMERIEHAFPERFEALLKAYTPCQVAFEATMNWGWLYENLENIPGIERIVMANPLHVRLISAAQVKTDKIDARKLAQLLRANLLPPSHIPDRVTRLRKEVLRQRTFWVRQRTKVRNRVHRLLGRQHGLAMPQVSDLFGKKGRTALSQLILAPPDDLLLRQQLEMLDVLKSHIRELESKITTDGANDPATGWLSTIPGIGPVLGNVIAAEIDGIERFDQSDRLCAYAGLIPSTSSSGDKTYHGRLVIGCNKWLRWALVEAAWVAVGCSPYFGGLYRRHRSRGKKANTAIMIVARRMCQIIYRMLKEQREYHPYNNSKNLPGRSHKCRTTQAA

SEQ ID NO: 341906 - protein, 332 aa, unidentified
MDLHGKNVLCSLTDENDKVVAERRLPTKLADVLGFLEPYRKSVINIIIDSTYNWYWLVDGLREEKYPVSLANPNAVKTYDGLKHGNDKGDARHLAHLSRLGVLPTGYIYPKEQRGLRDLLRRRMYLVQERTGLILSLQSLCERLNGGKIAAEKFKHMKPEALVEKIDAPYHRLGAIEYLEIVRRINQSIYRLETKVLHECEESRQFELLTTIPGIGRVLGMMIALESGPMNRFAGPGNYASYARTVNADRYSDGKKKGENNRKCGNKYLAWALVQAAHHLIQHCPEARSFYDRKKAKKNGAVATKALACKLARCIYHMLTEGEEFDVKKIFG

SEQ ID NO: 341907 - protein, 342 aa, unidentified
MKITTVGIDLAKNVIQVHGVDERGKAVLRKQLRRNQVAAFFANLPACLVGMEACGSAHHWARKLGSCGHTVKLMAPQFVKPYVKTNKNDTADAEAICEAVGRPNMRFVPMKNIEQQAVLSLHRARQGFVKARTAQANQIRGLLAEYGLVIPQGIGHITKRLPEIMEDGETDLPGAFRLLLQRLGDHLTELDRHVGELEMQIQTWHRESDASRKLARIPGIGPITASALVASIGDAKSFDNGRQLAAWLGLVARQHSSGGKPTLLGISKRGDTYLRTLLIHGARAVIRVAERKPSYEGSWLARLMDRRNKNVAAVALANKNARTVWALLAYDRNYEADYGTAK

SEQ ID NO: 341908 - protein, 395 aa, unidentified
MNYLVGIDIGKNNHFFCVMDKDTGELLVDPVSFSNNKEGFDFLINKLKPFSKNSILIGMEDTGHYHFALLKFLLSNAFTVALINPKTTDFTRKMQGGITKNDKLDTLTICDVLDTPERKKQYRITKVNSFDFYEQKQLTRHHHNLKEELNVYTNRLQKCIDIVFPEFNRLFKSKYGTVYMNLLKTFGSAEDIANTDIRTIRKCFDINGRGKRIALTPEQLKECAKSSIGISSTAEIIQIKHLVNQIELINKQIAETDKKIEEFSVKNNSPILSIPGISHFSGTSILAELGDISNYKKPSQIIKFAGVAPLHYESSQFTAQHTSITKKGSKYLRKTLYQIILPVINHNPIFKQYYELKISQGKGHRCAQGHCVRKLLRIIYHLLSTNQKFDPALLR

SEQ ID NO: 341909 - protein, 422 aa, unidentified
MNRTQRRCIGLDVHRDFAQVAIWQAGQVVQAGRFDATPEGVREFAAGLGPADEVALEATGNTWAIVTVLASRAGRVVVANPAKTRAIAEAKVKTDKVDAAILAQLLAADYLPAVWMPDAATSALRRQVLRRAHIVRQRTRLKNQVHAILHRNLVPRCPAADLFGIKGRSWLAAQDLPPDEGAAATALLRQLDFHAQELALIDADLGRVALGRPEVLRLMTIPGVDATVALSIVAAVVDFTRFRTPERLVSYLGLNPRVRQSGGQPASHGRITKAGPAHARGMLVEAAWCASKAPGPLRAFYQRVRARRGMQVAVVATARKLAVLCWHLIIKEEDYAFALPSLITHKRRKLELRAGAPPARGRKGRSASYSLKAVRAAERDLAAQGEAAYRTMVAAWQPTRPADKKVTGATASKGTRLIKPTG

SEQ ID NO: 341910 - protein, 341 aa, unidentified
MSDYSYFGGIDLAKNHFSLHVVDKKGKVILHKSVTRSKLLTTISNLPHMRIGLEACGGAHYWARTLNKLGHDTRIMAAKYVAPYRTKGKNDLNDAVAICEAVQRPATRFVPTKSPEQQAILSVHRMREHWVRERTAIMNRIRALLSEFGLVIPVGRSSLVKQVPLMLEDAENELPQLARVVLHDAYQHLDALNQRIADTEQTFESFAKISDNVQRIMKVRGIGPQTATAILASIGNGAQFDKSRDFSAWLGLVPKQYSTGGKPKLGRITKHGDKYLRTLLVHGARTVIANLGDKQDRLSQWCRNVLERRGMNRAVVALAAKNARIIWSLLHNQTEYKNYAA

SEQ ID NO: 341911 - protein, 340 aa, unidentified
MAIVAGFDVHRAQITFDALDTETGEIHRGRIRADREAVCAWVAGFAGRQVDVAVEACTGWLFVCEALAAAGAIAHLAEPAEASALRGKKRRAKTDRADARWLRTLLSEGRLPEAWIPPAHVREWRTRTRLRKTLVDERTSWLQRIQATLFHHGIANVPDQLLRANGRAFLRTLELPPAAGERIEIALAIIDEIDRQLIGLEREIGRLARRQPGCQALMRQYGIGPLTAPTILSELGDVSRLSASRKAVRCSGLDIGVHRSDRRSRAGRLARQGSPQLRWALYEAAQSACKPASPDRADYVALKARGLSHTRASMTIARKLARRCFHILRELGPDALAPVA

SEQ ID NO: 341912 - protein, 411 aa, unidentified
METIVRRCAGLDVHKESVVACARVIDDNGELQLSTQTFGTTMSDLLVLGDWLASHGVTLVGMESTGVFWKPVYMLLETEFECWLLNAQHLRNVPGRKTDVGDAAWIAQLVAHGLVRPSFVPPKEIRELREVTRYRKALIEDRTREAQRLHKIIEGSGIKLANVATDILGVSGRAMLNALIGGTHDPDILAELARGKLRKKLPALRKALSGWFSPTHRLLVGELLAHLEYIDESIERLSNDVATMIAPFARSIDLLDTIPGVNLRSAEVMISEIGVDMGRFGSAGRLVSWAGMCPGNNESAGKHFSGKTRKGSKWLRIALIESAKAASRTKDSYFAAQYARIKGRHGHQKATVAVAHSILVVAYHLLERGEPYNELGGDYFIERQQKDAYQRRLVKQLERMGYEVALTKHAA

SEQ ID NO: 341913 - protein, 419 aa, unidentified
MSFKILKNNCCGLDVHKTWIYACIGITDSFKRTEYKQARFSSFTKGLQELCLWLAKYNCIDVCMESTGKYWIPVFNVLEKNNIFVTLSHPKYTKPQKGNKTDRKDAKWICDLYMCGMVKPSFIPPADIRQLRDLVRYRFKLTCMITGEKNRAHNCLTVSNLKLDDVFSDIFGKSSRSITEQILQHPGEVFDVAPFVDSRCKTPIEEIQTAVDGAISHEQAVKLRQCLKHIDELEMHKAEIEREIFRLSQKYESVLDLIRTIPGFDKNPLTAIQVLSEIGADMSVFPTAKNLVSWAGCCPRNDQSSRKIKSTRISRAGSYFKPVLVQIANALIKSKKHPEFTTRYRRIKARRGHKKAIIAICRMILTAIWHILTDLKPYTPEGFLESRPVNKEKVLTISQALNLIKQRGYIIKDDVGPVT

SEQ ID NO: 341914 - protein, 356 aa, unidentified
MIYVGIDVAKDKHDCCILESEADKLYPVFTIPNNKAGFDELYEKIFTVTDDKTKIKVGLEATGHYSLNLLGSLIDKGLPTCVINPLHTNLYRKGLSLRKTKTDKVDARSIAMMLMTNKTLKPYSDTSYHSEELKSLTRYRFDKVQERAKLKSSVARLVNILFFRNWKNSFPSLHMASMYALLSQLPGASYITECHLTHLKNLLETASKGHYGRDMAITLRNTARDSIGSVIPAKSMELKHTIHLIEVMTEEIDEIEDSIKSIMDTCNSPIMTIPGISYRMGAMILAEIGDFTRFNYADQILAFAGLSPSTYQSGQLDSSYSHMEKRGSRYLRYALFNAAKFVCKWDENFELTSQRR

SEQ ID NO: 341915 - protein, 390 aa, unidentified
MFAGIDVASERHVLARLDGTGQPLGRPIGIDEDAGGYRMLLEALGPPPALVVMEATGHYWKNLFASLVAAGHDVVLLNPIVARRFQQAQLERTKTDAIDAAALARFGFEKRPAPSYIHDAAAESLRELVRHRDRLQQDFEDRVLQLHRLVDLGFPEFTRYVKGMHTMLATTLLSECPTAAAFARTPPRRLAKLRYDGRHRVGEDLAERLVEAAKRSVGQHHGSVYDLQVRHVCQDLDLWRRRLKELESDIGGLLDAHEVGRLLTSIDGIGPNSAARIIAIVGDPARFRSAGAFAAYVGVVPALRQSGKRTGTRAATGFGNAKLRSALWMTTLAAVRLNDWLRPFYERLRAAGKPPKLALIAAMRKLLHAVYSVAKNRRHFVPITEQARAA

SEQ ID NO: 341916 - protein, 486 aa, unidentified
MSTFERLNSGRMNRKQRRELARRVAASDPGLSIVHPHAAGIDVGNSSHFAAVPADRDPLPVREFGFWTAELHKMAEWLVACRIDTVALQSTGVYWIPVYDILEQHGLRVVLVNGQHTQNVPGRKTDVQECQWLMKLHTYGLLRDSFRLAQNLEGVRTVWRVRGRHVEEAARSVQHMQKALTKMNVQLANVISDVSGLTGQAIVGAILQGQRDPYKLAELSDPHIQASQEEIARSLEGTWREDVLFELQQAMDSYQFAHTQIRQCDAKLKAYLASLQSRVLPQPVVPAESKPLQPKTRKTRKQGANAPPMDLTAELVRICGVDLTSIDGINIISAMTIISEVGPDLHQFQDEDHFTSWLGLTGNENLSGGKRVKGPKRKVKNRLADVLRMGATSLLNSDSYLGARYRQLRRNAKIPAVAVKAMARHLAVLVYRLLTKGQAWVDRGAQLYQQQRQERELIMLREKARKQGLRRCQEFCVNGFRIWRFF

SEQ ID NO: 341917 - protein, 346 aa, unidentified
MTIMRIGLDTSKHVFQVHGVDEEEQPVLRRQLRRSEVEKFFKKQQPTRVGLEACGAAHHWARVLRGLGHEAVLLPPQYIKPYVKRGKNDAIDAAAICEAMSRPEMRYVPIKSQEEQAALMLLKVRDLLTKQRTMLVNAIRGHAAEFGVIGAKGPATIAALLQRIAEEAQLPALARDMLASLAGQLAAAEMRLATIEAKLVARYKADPRSRLLATIPGVGPVGAVSFTLKVPDATVFRSGRHFAAWLGITPREHSTAGRQRLGRISRQGDEGLRRLLVLGATAVIQQVVRRAEAADPRPGVGASPWLLQLLARKPKKLATIALASKMARIVWAMLVNGEIYRRPQAA

SEQ ID NO: 341918 - protein, 341 aa, unidentified
MEEVSTIGLDLAKNVFQVHGAQPDGSVAFRRKLTRAKLLPFLASTPKCIVAMEACASAHHFGREIAALGHEVRLIPPIYVKPFVKRQKNDMADAEAIAEAASRPTMRFVAVKSAEQQAAAMIFKTRDLLVRQRTQTINAVRGHLTEHGIIAPQGTAYLGRLTQALEDPEGRLPVPVAALCKLLIANVASLTEQISVLDQQIRAHARHSATACRLMTIPGVGAVCAMAMAALAPPPETFAKGRDFAAWLGLTPKQNSSGGKDRLGRTSKMGQRDVRRLLILGATSVVRWAARKGAPEGSWLARMLARKPRLLIAVALANRMARVAWALMAKTEVYRAEAAAA

SEQ ID NO: 341919 - protein, 455 aa, unidentified
MAKSRVQKRKVVVNALDQINPNAAGIDIGAEEIYVAVPPDRDEESVRCFGVFTEDLERLADWLKACRVDTVAMEATGVYWVPLYEILEKCGIRVFLVNARHLKNVSGRKTDVLDCQWLQQLHTYGLLQASFRPPEQIVAIRSLVRHREMLVQYRSAHVQHMQKALILMNLRLSNVLSDITGVTGMAILRAILAGERDPHKLAEFRDKRCAKSEEEIVKSLQGHYRPEQLFVLKQAVELFDYYAAQIQACDGALETLYCQFDPPENPGTPPPAPRSTARRKNQAHFDLAPALYRMTGVDLTPIDGVDALTIQKVLSEIGTNMSPWPTVKHFTSWLHLCPNNRITGGKVKQTGVQPTKNRATIALRIAATSLKNSDSALGAFFRRIRSRHGTPVAVTATAHKLARVIYFMLKEHKPYQDVGALSYEQAYHQRMVRNLHRQATKLGYRLEPATVMASA

SEQ ID NO: 341920 - protein, 304 aa, unidentified
MGHCSEIFVGIDVAKMRNAIAVADGERGGEVRFVGEVDASDDSMRRVVNRIAASCDRVHFCYEAGPTGYGLHRLITSLGHPCTVVAPSLIPRKPGDRVKTNRRDAIALARLLRAGELTAVWVPDAGHEAMRDLVRARAAAVETQRVHRQQVSGFMLKHGRILSRTKAWTMRYLRWLQEQKFDHPAHQIALQEMVEAVRISKERVQRLEAAIEEFVPTWSLAPVVRALQALRGVDLIVAVTFVTEISDLSRFESPRQLMGYLGLVPSERSTGDTVKRLSRSRPWPENTALMSAVNNLDARCRPLG

SEQ ID NO: 341921 - protein, 338 aa, unidentified
MKLYGAIDLHSNNNVTVLIDEQDQVVYQKRLPNDLPLIAQQLSGYQDRLQGIVVESTFNWYWLVDGLMDQGHRVHLANTAAIQQYEGLKYTDDHSDARWLAHILRLGVLPQGYIYPKEERAVRDLLRKRGQMVRQRTANLLSLQNLITRNTGSSIRSNRIKTLDSETVDALLPNPDLALAVKANLAMIQCADGQIDILERTVTDRVKLRAEFSFLKTVPGIGQILALTIMLETGDIKRFPTVGDYASYCRCVGSQKLSNGKKKGSGNTKNGNKYLAWAFVEVANFAIRYNARIKSFYQRKKAKSHGVLAIKAVAHKLCRACYYIMKDQVPFDVAKAFA

SEQ ID NO: 341922 - protein, 345 aa, unidentified
MNKPVTIFSSTLYCGIDVSSRSLAVALIEPDHAVYQHEFANSASGHKALLVWLGKHNAPLRVSLEATGIYSLDLALALDAQAWIELAVLNPKLVNLFAQTLRRSKTDAADAMVLAEYSQRMPFTAWQRPGVNALRLRTISRYVQSLVVDLAEVKNRLHTAEITSTTPRAVLVDLKQAHAAFERRLAKMRREAMKLIQDDAVLRERFALLVSIPGIAEVSALQILSELVLLPPGMTVRQWVAYSGLDPVHQVSGTSVHKPSHISRAGNRHLRHALYMPSLAAARFDPHMRAFYQALRARHKTGLQALMAVERKLLHAIYGIFKSGKPYDGKLLFPQIQLAVESVAG

SEQ ID NO: 341923 - protein, 347 aa, unidentified
MSQTQNAAIAVVGIDIGKNSFHIVGHDERGAIVLRQKWSRGQVEARFANMPPCLVGMEACVGAHHLSRKLNSLGHNARLMPAKYVRPYSRGQKNDFRDAEAIAEAVQRPTMKFVATKTAEQLDLQALHRVRERLVSQRTGIINQISAFLLERGIAVRQGQRFLRAELPRILAMPPDVLSPRMVRIIEDLAGDWRRLDERVESLSNEIETIARQDAGCERLMSVPGIGPIISSAMVAAIGAGDVFTKGRDFAAWLGLVPKQISTGDRTILGKLSRRGNRYLRVLFVQAAWVVLIKPKIWERHGLKPWIEAARKRLHHNVLAIALASKLARIAWSVLARGRAFEARKID

SEQ ID NO: 341924 - protein, 310 aa, unidentified
MAKAVEKVHIGIDISKDKLDIFIHESGKYLQINNNLRSIKEFFGKYHGRISLVVFEHTGVYSWNCVDGLRQLGIDYHAAHPLRVKSYIRGLGLLAKTDKIDAKALARYATENYVKKSRKSGKYQRKLHVLAVRRCRLRKNIEAEKNCLRQFGGVIGTKSFEKVIKPMEKEMLALEKNILEIIRSDHDLNKVFEAILSIKSIGKVTASLLLALIPELGSMNRNQVASLVGVAPINRDSGTKSGRRFIRGGRALARRTLYMSALVGAHKNSTLKEFYQRLLGKGKLKKQALTAVMRKLLNHINATAKTALQN

SEQ ID NO: 341925 - protein, 411 aa, unidentified
MDIVVARCAGLDVHKDTVVACVRTPGPDGRRAEQVRTFGTTTVELLALRDWLVAEEVTLVGMESTGVYWRCVYYVLEDALACWLANARHLRNVPGRKTDVQDAQWICQLVEHGLVRPSFVPPKPIRELRNLTRYRKAQIEERTREAQRLDKVLQDAGVKLSSVAGDILGRSGRDMLAALVRGTRDPEVLAELARGKLRAKLPALRQALRGRFGAHHGLLVGQILAKLDFLDEAIAQLSAEIDRVIAPFAVQVALLSTIPGVDKRTAEALIAEVGVDMARFGSAARLASWAGMCPGQHESAGKQRSGKTRKGPKWLGAHLTEAAKAAGRTKDTYLSAQYQRLRGRRGTAKATKAVGHQVLVAVYHILDRGVPYHDLGADWFVRRRPATQVRKLISQLNTLGYQVTLNPIQAA

SEQ ID NO: 341926 - protein, 381 aa, unidentified
MTQFAVSTSNEQSIYAALELSKNSWLLAIQVPGRDNPSLHPLPGGDADGLMAKLDAARDRVAKDTDQTPAVTLCYEAGYDGFWLARFLKQRDVTCQVMEPASLRVNRRARRVKTDRIDVENILHTLIAWCRGERHVCSMVVIPSVEEEYLRRCHRERDRLIRERTAHTNRIKGLLFGQGIRGINVKAHYKSLKPAELVTADGRPLPDRLGREITREIERLAQVQAQIVEIEYERDHPATSCAATERKRHDLLRLKGIGPSLSSTLAREVYYRRFANRRQVASYIGIAPSAYDSGEGHRSQGISKAGNRLARVAIVEAAWLWLRHQPDSALSQWFHDRTQGQKGRIRRIMIVALARKLAIALWRYLETGLIPEGAHLKSSVR

SEQ ID NO: 341927 - protein, 350 aa, unidentified
MDTNTPALASIGIDIGKEVFHIVGFGTNGKIAFRRKIKRLALVDTFKGLPSCVVGMEACLSAHFVSRALRQLGHQPRIIPSIYVKPFVKGQKNDYNDAEAIAEAALRPNLRTVREKTQDQLDLQALHRVRSRLVSRRTATINQIRAFLIEQGIAVRTGARALRNSLMAILENRQDEISPRMRGLIADLYEDWVGFDERIETIAGEIETIGEKEANCQRLMSIPGIGPLISTAVVAAIGTGEAFERGRDFGAWLGLVPRQYSTGGRSILGRISKRGSKYLRTLFIQAAKVILMRPHNWERFSFGAWLLNATPRLHRNKLATALANKLARIAWSILRNEKVFDVPRREAMAI

SEQ ID NO: 341928 - protein, 343 aa, unidentified
MSVTIGIDPHKSTHTAVAVDRDEHQIARLTLAADRHQTDRLLAWAEPLDADRVWAIESAAGLGRLLAQQLVAAGEHVVDVPPTLAARVRLLGSSKASKNDPNDALATAIAGLRHCGLRTVGRDGHTAILRLVADRHHDLVALRTQSACRLHVMLRELAAGGAPLRISAAHGIEFLELIDVGHDLVAAERKRLAHEHLADIRRIDAELAAIRDRIRDAVIASGTTLCELHGVGPVVAAIVLGHVHDIARFRTRAQFASYNGTAPIEASSANRERHRLNPRGNRHLNHAIHMIAVTQVAHDTPGRAYYLRRQAEGKTRKEALRALKRRISDAVWRQLQIDTRATS

SEQ ID NO: 341929 - protein, 402 aa, unidentified
MNCVGIDVSKGKSMIAVMRPFGEVVVSPFEVRHTASELSELARLLKNLDGETRVVMESTGNYHAPVAWLLHGAGLYVSVVNAMLVHDYGNNSLRRGKTDKKDAVKLANYGLDHWLTLPRYVPEEDTRLMLKTCYRQYQQYSKVQTMLKNNLISLLDTAFPDANRLFTSPPRTDGSEKWVDFVATFWHCECVCGLSKKAFTAKYQKWCRKHGYNFSQDKALDIYASACGRFGVMPKTNTAKLLVEQTISQLQTTSAALAALKQEMQSLAASLPEYPVVMGMFGVGPTLGPQLIAEIGDVRRFHSKKALVAFAGIDAPPYQSGQIDVRSRSISKRGSASLRRTLFLVMGVLLQCAPMDEPVYQFMNKKRSEGKPYRVYMMASANKFLRIYYASVKAYLDSLEHD

SEQ ID NO: 341930 - protein, 359 aa, unidentified
MRTSGKNIFEGQLTIGLDLGDRSSAYCVLNAAGEIVLEHKLATTPEAMKQVFGSLPRCRIAMETGTHSPWVSRLLMALGHEVIVGHAQKVRLITKSRRKDDRLDARTLARLARIDPELLSPVKHRSAQAQLHLTEIRARAALVSTRTALVNAARGLVKSYGERLRKCHTQQVGREMTRELSMGLREALKPLLQEVESLNERIKEYDRRIEKMAKEMYPETALLKQVKGVGDLIATGYVLTIEDPHRFRKSRDAGCFLGLQPGRRNSGESEPQMRISKEGDEYLRTLLVQGAHYILGPFGEDSDLRRWGQKLSARGGKNAKKRAVVAVARKLAVLLHRLWVSGEVYEPLRNSQKPMSTAA

SEQ ID NO: 341931 - protein, 335 aa, unidentified
MSDPLPPLGLDVAKVSFQAHLRWDGKSASHGFANSAGGFEQLEDWTTSLGVQQFHACLEATGTYSDALADYLCSHGHQISLVNAARVMAFRKSEGIRSKTDQQDAKVLALFCEQKRPALWRPAPAELQELTCLVRRRLEVQAMKQQEVNRLENSRWDEQTRQEIQAHIASLQTQLSTLTKRITRHLAAHASLQQASGLLVSLPGIAQLSAAHVLAEGIWPTNFQSAAQVVGYSGLAVKQERSGTSVHGQERIDRTGNAQLRKALYMPALVAMRIDADFARWVAGMRAAGKPNKVIIVAVMRKLLHLIYGVLKSQQPYDPRKAFPSHYQEEVPLAA

SEQ ID NO: 341932 - protein, 368 aa, unidentified
MSNRSHYKVGCDAHKHFSVFAVLDHRGRVVKRDRVDHEPGAIRTFLCRFPAGTPVALETVGNWYWIVDEIEAAGCVPHLAHAAKAKVMMGYVHKTDKLDAEGLGTLLHNGTLPSVWIPPSELRDERELPRTRMAFSKIRTKLKNRIHATLAKYALSLDTDSDIFAAKWRPGLKNLLRSLPEETYRCVEQELELLDLVQGHIDRLEARILERVRGTRTIQLIQSVPGPAEILSIVIDREVGSIDRFSCPKHFAGYAGTVPKTKSSAGKTHYGRMIKQANNYLKWAFIEAANVVVRQRHHPNWRNKYVVRLYERTRQRKGHAVAVGSIARYIAESTYSVLKKGEPYREPLAEHSAGRRSVVPPRQGRVRA

SEQ ID NO: 341933 - protein, 452 aa, unidentified
MTQSQPVFSETRRNVAGIDIAGNADHYVCGPRRDDGTPDIAHFGTTTAELHRMIAWLKDREVVSVALESTSVYWIPVADLLEANGIEAVLVDTREVRMVPGRKSDVKDCQWLQKLHSCGLLRGGFRPPENISAVRTLLREKESLVAMRAQCILQMQKSCDQMNIRIHHAVSDIDGKTGMDIIGAIVGGERNPVKLAGFRDRRCKKTEAQIAGHLTGTWRDEHLFTLGQAYRTLKFIDGRISEYDDKISSMYKAIAEGCGKPPPPPPPADIKPSAKDRRHAEEKRDLQRIAGFDMTAIPGIGYDTAAIIISELGTDFARFPTESHFASYIGLAPSLGKSAGKNVRQRKRCRNTSRAGRALRMAASTLYKSHTEIGAFFRSVARRTDRKTAVKATARRMAHMIYRGGRYGTAYLDKGAEAFEARSREKAVRAVKNLIKTHGINELELKSALAAT

SEQ ID NO: 341934 - protein, 331 aa, unidentified
MQIIGIDISKKRLHAAWLRDPEQERSRPKAADNTPEGHRHLLAWAERHSQCLPEQLCFILEATGVYHEALALFLHEAGAQVCVVNPYQVKEFARSRGIRTKNDRHDGHVLALFGRERRPRAWQPPPAEVRHLQSLLKRIEALDADRQRESNRLEKATVEQAPAPVRRSLQDMIDILEAEIVRLRRQLDDHIDAHPELKQQRALLESIPGVGPKLSTWFLALFATKRFRSAKQAAAFLGLIPVEYDSGTSVHRRPRLSKAGDGRWRARLYMPALVAIRCNSAIRDQFTRLTGAGKSKMSAIGAAMRKLVQIAFGVFNSQHPFQVDHAQPRMA

SEQ ID NO: 341935 - protein, 368 aa, unidentified
MKNVTTYVGIDAHKKDLFVAMLSGNAQTPVTWQLANEPRAVHRLVRKLERETPGPIRVFYEAGPCGYALQRQVTTSRVSCDVIAPALIPRKPGERVKTNRRDARKLAELGRAGLLTAVQPPTPEDEAVRDLARARDDGREDLQRCRHRLGKLLLRRGLHYAGRNWTRAHRQWIDGLAWTHAAERAVVDDYLLAIDHTEARLGELDARLAEIAETEPYREPVGWLRCFRGIDTLTAMLVLAELHDFRRFASAPALMAYLGLVPGEDSSGEKHRRGRITRTGNALVRRLLVEAAWHYQHRPGVGVALTRRRKGQPSRVIAIADKAQQRLCRRFRKLAAEHKPAPKIAVAIARELAGFLWAALQPPPATAN

SEQ ID NO: 341936 - protein, 353 aa, unidentified
MLTVGVDAHKRTHTCSAVDGIGRRLGVKTVPATTTGNATMLRWALSTFGPELTWGIEYVRNVSRRLEEELIRSGQRVVRVPTYLMARTRASARTRGKSDAIDATAVARAVLREPDLPVACHDSVSRELELLTERRETLVDQRTATVNRLQWRIHELDPSRSTEIKPLIFAKHRAPVAAWLADQPGLVAELARDELDDIARLTQTINAVEKRIVQQVRAHATHLLGIPGCGELTAAKIIAETANVTRFKSEAAFARYIGVAPLPYSSGSTDGHMRFTRSGNRQLNAAVHRIAVTQIRMAGPGRQYYDKRRTKGNSSSAALRLLKRRITRAVFSRLKADEADRRSQATADSPERR

SEQ ID NO: 341937 - protein, 439 aa, unidentified
MSTPSLPVLDPTAAAIDVGSEQLHVSIAGGPPKVFGTTTGQLYELRDYLLAQGVRSVAMEATGIYWLCPYEVLEKAGLQVVVVNGKYVKNLPGRKTDMKDCQWQATLHAHGLLKPGFVPPEHIRRLQDYIRLRTDHITLAGSHEQHMQKALDRMNLKIHEVISDLTGMSGLKMIQAIVAGERNPVALLALCDAQIQKNKAGRLRAALEGTWKEEHLFALRQAYELWQFYQKKIAECDQAIEKVLVVLAGPEDPKNPAPPPTKRGGVNAPQITGLHGMLWRLCGNKELTSLPGVADYVLLQLLAEVGTELAKNWQTEKHFTAWLGLAPGSRQSGKRRGNQKRGRNRAGRLFCVIARSVGRSVDKALGGFYRRLKGRRGGLVANLALARKLAELFWRLMVHGITYVEQGLKKYEEKVAQTEQHFLQKLARKYNMVLQPKAA

SEQ ID NO: 341938 - protein, 338 aa, unidentified
MNIVFLGIDLAKNVFQLCGLNQAGKPVYTKRTGRKELLQTLANIPACLIGIEASTGAFYWQREFEKLGHKVKVISPQYVKPFVRGQKNDGNDAQAIAVALRQPTMQFVPPKSPEQQDILALHRARQRIVNHRTATVCQIKGLLLDRGIPIGSAVSRARRAIPLILEDAENGLSSRMRRTIAELYDLFNDLGRRIHFFDKEIETVFRQSEACQRIAKVKGIGPKRATAVVAAIGKGTEFKNGRHFAAWLGLVPRQHSSGDRQVLMNMTKKGDKHLRTLFIHGARAVVRVATNNNDGHMNQWVNQLKERCGFNKTTVAVANKNARIIWSMLRNETGYQVV

SEQ ID NO: 341939 - protein, 382 aa, unidentified
MITMTRTSESKAPTVQLLLAFELGQRSWKLGFTTGMGQPPRFRQIPARAHEALANEIALAKKRLRLPTDAPVLSCYEAGREGFWLHRFLESQGVTNYVVDSSSIEVNRRSRRAKTDRLDLVGLLTLLARYVLGDRRAWRVVRVPTILEEDARHFPRTLEALTQDRTRLVNRLKSLLLTQGLSLSLNAQFANRLEEARLWDGNPLPLGLQERLLCTWTQLQSVGRQMRELTSRRVTRTATLPAGTSRALTKLLAIRAIGPIGASVLATEIFGWRRIHNGRELGALVGLVPAPYQSGETDHDLGISRAGNAHVRRVMVQLAWGWTWHQPNSALTRWYQLRFGGGGKRLRKIGIVALARKLLIALWRYLETGVVPDGARLKPMEV

SEQ ID NO: 341940 - protein, 354 aa, unidentified
MKYHTSTTEFNCGIDLHARQMYVCVMDRAGKKLVHTNIKNNDFAYFLKLVAPYRHDLTVCAECMFGWYWLADACAEAGLHFVLAHALYLKAIHGGKNKNDRIDSEKIAHLLRTNLIPPGYVYPAEKRPLRALLRQRLLYVWNRSELLARLQSHQLAYNRPTTRQTPYNREPWAEHLLASEPDPVRQLALQNDLALVGHYDVQLASLEKKLLQLTKQTAGRDFTLLQTVTGIGEYLGLTILLEIGDIARFPSVKDFLSYCRLVKGTVASAGQIKGLRGAKLGNPYLRWAFGEAAVVAKRDPLVIGPLAQRLEARLNNKFKANTVLAIKLARAVYFMLKTKTVFDPERLVAALSHN

SEQ ID NO: 341941 - protein, 404 aa, unidentified
MRRDNRGGRGRIARRLDHHDIIQRPATAIQTSVGAIFVSMELSRKTWLITTLLPGNGEKMSKYPVQAGNLAGLFDLFLKLREKSQEKTGQVWPIVTIQEAGLDGFRIHRSLEKEGIESYVVDASSISTPSRKRRVKTDRVDGEALLQVIMAYMRGEPRVCSMVQAPSPEEEDRRRIGRERKQLIAERVEHVNRIKGLLFSQGVADNEPLHKDRRRCLEELRTGDGWPLPKHMRDQIDRELDRLELLLKQIEAVEDERDMLISVETADDKASPVAMLLGIKGIGIEFANVLASECFVRQFDNRRQVASYAGLAPTPWQSGKVNREQGVSKAGNPRLRTMLIQMSWLWLRHQPNSALTQWYKARVAHNGGRGKREAITALARKLLVSLWKYVASGVVIAGAVMKEA

SEQ ID NO: 341942 - protein, 350 aa, unidentified
MEQGYHIGIDLHKRFSQVAVLNGDGEVLDNRRVDNDPPLLLQHLSPFPKETPVTLEATIGYEWMSDLLTENGFEVNLANPKKVRLIAEATIKTDKVDAVTLAQLERTNFLPAAYLPPPEVRDTRELLRHRIKLVNLRKGLKNRIHAVLAKRGVLFYPVKDIFGKTGREFLSSLQLPSIYRKEVDGYLSLIDQIDSLIKKREKDIKNQVVKENKEAQLLLTIPGISYFSALLLVSEIGDIKRFPSPKKLASYTGLTGTISESADKTYQGSLKKDSNKYVRWILIEAVDHAIKKDPGLFAFYRKISFRKGNNKARAAVAHKLLTSIYFMLKNNQIYQTRKPSGKPLLCHGRQ

SEQ ID NO: 341943 - protein, 343 aa, unidentified
MEDTIYDHYIAIDWAIKNMAIARMTKKSNKITAIDVPSDIEDLQAYLRSLKRTKILTIEETTTSQWLYAELKEYVDRILICDPNRNKLLCEGAKTDKIDATKLVQLLKAGLLKEVYHSTDKFLNLRRLVSGYEDLVKVGVRLKNQRYALLRACGKNGKEKAGIPIESRGDQFVLDSLDRQIEAYENEKEGYEREFEGLARKNVEIKHQRSLPGIGTINAVKIVARVVTPYRFPDKGHYLSYTGLIKLERTSGGRRYGQKNPRYSRQLKSVYKSGVLAAIKGNNPINDYYENLIQKESCPEYNARQKTCRRLAVLSLGVFKSGKKYQPFRRNNVGIRKEVASGL

SEQ ID NO: 341944 - protein, 367 aa, unidentified
MNNTIVQNEGAAALTVVGHQHGSTRATIKLGLDIHAKLYVVAAQYDHALPKPPRRFAPAEFVPWVESLLRAGHRVHVVYEACGFGFGLYRQLVAAGAHCCVIAPRKLDEQRTGVKTDPRDALTLCQRLSRYVEGNTRELAVIRVPTEEEERARHVSRQRERLVRHRQKLEAAGRGLLVGHSLPACTHWWKPQTWSRASKHWPAWVLAHLEVYRPALLALHEQIGALQAELEAAAPKELPRGLGKLTSVVVTREVCDWSRFRNRRQVSSYTGLCPGEQSSGGKRVQGSVTKQGNPRVRAALVECAWRLVRFQPQYPPVKKRLSVLAKGAKATGAQRKKAIVAVARHLAVDLWRLHTGQCSAAQLGLAA

SEQ ID NO: 341945 - protein, 419 aa, unidentified
MKVVYPTCCGIDVHKSFLVATIIKTEGITPSYKKKRFSTFNNEILSLRRWLLENDCRDVCMESTGKYWILVYNLLEDEINVVVASPKWVKAVKGNKDDTKDSKWIGDLFRLGLVPGSFIPPKEIRILREYTRYRYKLVSCKSSEKNRYQNSFTVCNVALDSVVSDMFGKSAGLITDYLIQTDNFDPEHCKSLLQRSLKKKGEAVIESIEGYKIAPAQKERMIMVKAHLDYIEKAIEMMDERIDKLVEPYEDCISLLCSIPGVDRRSAISIISEIGTDMNQFSDSKRLCCWAGLTPGNNESAGKKKSVRIARAGVYLKPALVQAAHAAVKSNESPYYKNKYERISKRRGKKRAIIAIARMILTAVFHMFKTGEAWNPSDLFKVDLPPVLAERQKQKAIQNAIRLLASQGIAVITESPPAA

SEQ ID NO: 341946 - protein, 387 aa, unidentified
MKSNTQNAKIEAITEKTLVLGIDVGSETHYARAFDYRGIEYSKKPFKFSNTEAGFVTFKEWILDLKERHEKDKVVPGMEPTGHYWFNLGKFLQDNEMKPVLVNPHHVKKSKELDDNNPTKNDRKDPKVIAGLVREGRYMIPYLPDGVYADLRTASNIRFQLQAELTRIQNRISRWFNIYFPEYKTVYGKPDAKSGMLILKAAPLPEDILTLGIDGVNQIWRDAKLRAVGKARAKTLIEAAEHSVGSKEGAVSARMEIRMLLEDYESRNTRLQEVMILIEELVRKIPMAEKLLEIKGVGIRTVSGFLAEVGDISRFNNPKELQKLAGLALVENSSGKHKGETTISRRGRKRLRYLLFEVAMSLVSKNQKFRELHNYYTTRRLNPLKKM

SEQ ID NO: 341947 - protein, 323 aa, unidentified
MQGKVSFQEDAMPVVYAGVDVSKEWLDVHLHPLGESRRFSNDKTGIRQLKRLLARHQPKSIVMEATGKFHRPAHRSLWLDGFAVAVVDPLRARMFARACGYLAKTDRLDARFLALLAESLRPPADTPPSPHIEALQELVNARSAAKCDITALQNRSKTATTALLRGELNRLVRRLEQHVERLDKEIERCVGEDPQLCRKAEILTSIPGIGRVTALALMAGMDELGSCSGKQAAMLAGLAPIANDSGARTGRRSIRAGRPAPRRALYMAALSARRYNPALARFADTLKAAGKPAKVILVAVTRKLLVLANCLLSHDRLWTPNPP

SEQ ID NO: 341948 - protein, 451 aa, unidentified
MSLEVVNPNAAGIDIGSKSHWVAIGQDAEDVREFGVYSDDNMEMCQWLHDNKIQNIAMESTGTYWQNLFSCLVSQGFDVILVNGRQTKNIKGKKTDIKDCQWIQKLHSLGLLSSSFLPDSTTDVIRTYSRHRQNLIKQSARTVLKVQKYLRLMNMRLDVVVKDIVGLTGTKIITAFISGETSGKKLAQNRHYNCRKPEEEIAKALQYNGRNDYLFALKQEWETYLHIQKQIELVDKEIKKLLEEIIDKDDNKKQHVADTKQHKRKNKSTIKGADINKLSYQYFEGIDLMRIEGVNDATIMAIISEIGLEGIKKFNSAKQFTAWLRLAPNNKISGGKILNHHIPKGSSRLKIAFRNAANAIGNLKEGHLADFFRCINYKKGRVTAINATARKLAVIIWNMLAKGVPYNPPTEYLFLDQKRKMKLVSRIKRNIAKFDLNPEDVGFCKELTFSN

SEQ ID NO: 341949 - protein, 320 aa, unidentified
MTQDGRIVGIDVSKAKVDGFIRSLRIGLSRPGTLEGQEQMIAWLRENGVAAAVMEASGGYERRWAKALRAAGIAVRVVDPKRVRHFAKSAGRLAKNDPIDAAMIAWFAETFPAAPSQLDDPDREALDLLVTARAALVKLLTQVGNYGEHRQPRTVQKAHGAITKTVRAQLAKLEAAITDAIAASETFAARAEIIESVPGLARQTAAGLIAWMPELGRVDGKVAAALVGAAPYDDDSGTHKGERHIKGGRQEIRTLLYMATLGAATRHNPIVKAYYQRLRAKGKPAKVALIACMRKLIVILNTMLARGQIWNPSPCPTAVV

SEQ ID NO: 341950 - protein, 277 aa, unidentified
MSIVTVGIDLAKNVFALHGIDQSGKAVFIKPKVVRGQLLETVANLPPCLIGMEACSGAHYWAREFSRFGHTVKLMAPKFVAPYRMSGKRGKNDAADAAAICEAVTRPNMRFVPVKDVDQQAILCLHRTRQGFIEERTALYNRLRGLISEFGIVLPQKVERLRREIGAHLEALPGWANRCVGDLLVHADRLNERIEEYDKAITQAARQDARSRQLMQLPGIGPTTASALVASLGGAHDFKNGRQLAAWAGLVPGQYSSGGKARLGRIEVPPVLAPRAF

SEQ ID NO: 341951 - protein, 315 aa, unidentified
MKHTLAQNVGVDISKDFLDVATSPAGEAIRFANDAKGHRALIKRLAAFEVIRVVFEATGAYHRLFERTLAEAGLPMVKVNPRQARRFAEASGQLAKTDRCDAAMLARMGAALELEPRPVVSQTTDELKELLGARDALIKDRVAALNRRKTALSALIKRQLAQRLRQIDAQIDAIDQQQKKLRSADSNVQERYQILTSIPGVGDVTANVLIVEMPELGQLEQGQAASLAGLAPIANDSGKSSRKRSIRGGRSRARQALYMPALNAVRFYPHCKAKYDAMIKAGKPKKVALVAIMRKLVILANALLRDSRKWSPQKA

SEQ ID NO: 341952 - protein, 340 aa, unidentified
MSSMQIGVDLAKSVFEVAVSKVPGRVHERRRLSRAALTAFFAARPPAEVLLEACGSAHHWGRELQRLGHTVRLLPAGDGARYRAGNKTDRADAKALLEAARNETISRVPVKSVEQQAVVALHRIRQGYLQTRTARINAVRGHLREFGCVIPVGAAQVLPRAYAALDQDAVPVLLRPALQTVLEEIAALETQAEAVRTELTRLAAQMPDVQLLFTVPGVGILTATALVAFVGDIHRFRSGRDFAAYLGLTPREHSSGPVRRLGAITKRGNSYVRMLLIHGARSALRAGTVTSHPDDLRTWARALADRKGHNVAAVALANKLARVCWRVWHDQRPFERREPR

SEQ ID NO: 341953 - protein, 419 aa, unidentified
MNNIETKKLRIVNEKTLIVAIDLGKTTPMGYCRCSQKRDIKSFEFSNNAEGFRKLWDRICWTKTAYHLEEVVVGFESTGAYGEPLVHYLRKKPVKLVQVNPLHTKRMKELEGNSPSKTDRKDPKVIADIIELGHALTVVIPEGAAAELRRLTQARERSVQRKTALLNQLQGLVFVIFPEFLQGMRDIKSRSARYLLRHYPTPQDLVECGAEALALILRQVSHGKLGRERAQALYEAARDSVGIGEGQKEIVFEIQEILSWIDSSEEFITKVEQEMGNRLEQIPYSPLLLSVKGIGEVTVAGLIGEIGDFRQFHTNPEILKLAGLDLFEISSGQHRGNRHISKRGRPLLRKLLFFAAINTVRKGGVMHALYQRYLERGMPKIKALVVIARKLLKILFALVRDHCRYIENYSTTETLKLAA

SEQ ID NO: 341954 - protein, 349 aa, unidentified
MNSTTVAVDLAKNVFELAVADSEGNIGERLRLNRARFSSFFVHRAPCRVLMEACGSAHYWARWIGAHGHAVQLLPAQYVRQYVRRNKTDRADAAALIEAARCAAIRTVPAKSLEQQQVLVLHRLRSQWMSTRHRYLNTLRGLLREFGIAVPLGVRVARTRIAHYLAQPPQELPAAIRPLLAQMLSEVKELEHHIEQIERDLTALTRADPVVQQLRQIPGIGLLSSTAIRAAVGDVERFPCGRSFASWLGLTPREYSSGERRRLGGISKRGDVYLRTLLVHGARSALLAAHRQQRTGRPLDHLRQWALQCERERGHNVATVALANRLARIVWATWKHARAFDGNWGCAAQ

SEQ ID NO: 341955 - protein, 464 aa, unidentified
MTAGKILWRNRKERKEWARRLQSEDPGLEVVHPHAAGIDIGNASHYVAVRPDRDPEPVRRFECFTADLHRLADWLKSCGVKTVAMQSTGVYWIPLYEILEERGLEVYLVNARHTKNLPGRKSDVQESQWLLKLHTYGLLSNSFHPPAETRVLRTYWRQRGEHVAGGATCILRMQKALTQMNVQLANVISDISGLTGQTIIRTIVAGERDPLTLAALSDPRVHASQEEIAKSLEGNWRPELLFVLQQELAMYDIYQKRITECDQRLQEHLASLTHSLPVQLPTTKAKTRKPAAKNAPRFDLSSELQRVTGVDLTRIDGIDVMVAQTLLSEVGLDTSRWKTESHFASWLGLCPDNRISGDKVLGRGTRRVVNRAATALRQAANTLIRSRSYLGAQYRRLRTKLGAPKAITAMAHRLARLVYRMLKYGQAYVDKGTEYYEERFRQQQIHLLPKKAAKLGLQVAEIQA

SEQ ID NO: 341956 - protein, 416 aa, unidentified
MEVLYKRCAGLDVHKDTVVACARLAQGDSARARMETVTFGTTTRALLELSDWLTKQEVTHVVMESTGVYWKPVWHVLEGEFELVLGNAAYLRNVPGRKSDVADAAWLADLLAHGLVRASFVPVAEQAEVRDLTRMRKQCVREQTRQVQRMQKVLEDANIKLDSVISNITGKSGRAMLLAIIGGETDPAKLAALADGRLKATPEALTEALRGKVTEHHRFMLKLHLDHYDAICRQVESIDARIEKSLEPIADSVARLQTMPGVSEVAASAIVAEIGVDMGKFPSAGHLLSWAGLVPRMDESAGKRRDTRTRKGNPALKTMLVQCAWSAVRTKKSYYKAKFHRIRARRGASKAIVAVAASMLTAAYHILRDGTEHKDLGVDYFDQHDQVKAVKRLERRIRELGYEVQVAKLPGAEHAV

SEQ ID NO: 341957 - protein, 322 aa, unidentified
MKNTIIGVDLAKHVIQICVVKNNKVISNKEIKANEFEAWLATSKKATVVFEACATSNYWKQTASKYGHDSRIISAKLVAKIRQHQKTDKNDALAVVQASQLVDIQFVQGKSFAQQELQSLMRMRELAVKQRRASKQQIMSLLLEFNIKSGPRLGSLKVIVDSVLEDAENGFCMPFREGLKLAWENYATINLALKAYDNLLAETLKLHPDCFKLMALEGVSTINAINLYISLGTDELGTFKSGRDAAACIGVTPIQHSSGGKTQLGSIGKNVKNSLLRSYLITGAMSVVSKVDKREPKTAKEQWLKQLIDRRGKKCAAVALAK

SEQ ID NO: 341958 - protein, 328 aa, unidentified
MLTPSGFMRTHTQKASAKELFEHLNKHYPNGSYHAAYETGFSGFSTYYALTELGIKCTVVHAADVPTTQKEKVSKSDPVDSKKLAKALMRGELGSVYIHSKDSLDDRALVRHRATIVKLSGGIKSRIKHLLYNNGVEYPEEYFRSNRHWTRSFITWLQNDVRLLSDTRVSLDLLIAEVLHYRERLLDVNRRLRSLARSDRYAEKYGILMSVPGIGSTIAMSLLTEIDDIGRFSNQRQFASFLGLVPMMSSSGDKEYVGEKTFRGNKFLGPKIVEASWIAIRHDAELSAKFGALCTRGMKSQEAIIRIARKLSNIIFSVLKSNRRYECR

SEQ ID NO: 341959 - protein, 401 aa, unidentified
MQQPILSIDVAKDKSVAAAFSAYGAIVRKPFPFSHSPQGVSSLLPLLDQLEEMTQQRPHVVLEATGNYSKPLVSFFSAKGYPVVVLNPLLTYQLKKKATRKVKTDPIDALRIAQAFYLEEVSPVQELDSKILELRALCRQHYQCMSLYGSVQLHFRSVLDLVFPGYDKAFQNLCNPTSLQLLTAYPTPKALLDASHADILSILLHNRRGLAWNQKKLTALLTLASESLPDPQASGAHLIGMKNYISLIQAHQAGLADIQKHMLQLASSFPEHVLLRSIPGVGPLTAATIQAEIGDIKRFPSVKQLTAFAGLDSSVYESGTFKANQNRISKRGSTYLRTALFQATVAGISKQVNGPRNEILSRYYQLKRSQGKLAKVATANKLLRMIFGVWSGNTPFNTSGK

SEQ ID NO: 341960 - protein, 376 aa, unidentified
MTSVATREKPAQELYVSLELGERKWKIACTPSMGQAPRLRQLDARDLAQLVVEIGSAKTRFGLPQDAPVYTCYEAGRDGFWLHRALAVCAIHNTVVDSASIEVDRRARRMKTDSLDAVKLVTMLIRYHNGEPRVWRVVRVPTQAEEDQRQLHRELAVLKRDRTALVCRIKSLLALQGVAGGPRAVVPEDIDALRMWNGGPLPKELAERLKRECERVASIDAQIHLLQRKRKHALRHCGGRAFTLIRKLMKLRGIGVESAWIYVMELFAWRQLKTVREVGAISGLTPAPYQSGEMNHELGITKAGNRHVRAIAVEIAWGWLQHQPQSELSHWYQRKFGHGGSALRRKGIVALARKLLVALWKYAEYDELPAGAALKA

SEQ ID NO: 341961 - protein, 387 aa, unidentified
MPQPNDLSRSLVALDQNSTIIAVLEMSQSSWLVAGMIPRIERQPRKKLEPSPERLLAVLRGWRDEAVRAGRTITRIALAFEAGRDGFWLARWLEARGVEAHVIHASSVAVSREHRRAKTDRLDTELLKRGFLGWLRGERGHCTMARVPTIAEEDAKRPNRERECLVGERTRIVNRIKSTLARLGIRNFKPTLRKASERLATVHTPEGMPLPPNTLAELQRDMARLGFVMSQIREIEVARQKRLEQQPETGPHAMVRLLARIVGVGVETADMLVHEVLSRPMRDRKAVARYAGLTGSPDESGAQRREQGLARAGNARVRRGMIQLAWRFLMFQKESALAVWYRTRTADSRIGTRKTMIVALARKLVIALWRFVTTGETMEGVILRPAG

SEQ ID NO: 341962 - protein, 409 aa, unidentified
MEIIHRICCGLDVHKKLVTACLIVDGKKEIRTFGTMTEDLLAMLDWLLKAGCQSVAMESTGSYWKPIYNLLEAAGFDKILVVNAQHIKAVPGRKTDVADAEWIADLFRHGLVRGSFIPNRPQRELRELVSYRRSLIEEQSREVNRLQKVLEGANIKLSSVVTDVTGKSGRAIIQAIINGNTNAEEMSGLAKGRLRSKMDLLEKSLNGPIGPHQRMMLEAQLRHIDFLEQQIERLSKEIEVRMRPFDEAIARLDEITGIGRISAEQILCVIGLDMNRFPTDKHLASWAALCPGNNESAGKRKSGKTRHGNRLLKTTLIQAVRSIAHTKDNYLSAMYHRLAARKGAKKAAVAVAHALLIIIYHMLKDGRRYRDLGANYYDGLNKQAVVKRAVKRLEALGYKVTVEPAASAA

SEQ ID NO: 341963 - protein, 342 aa, unidentified
MADIVKQTVGIDVAQDELVVSLGRMNHDTGTEIFASGTFSNSPKGLAELLKWTDKLATEGIRTSYVMEATGVYHEKLAYFLCDQGRDVSIVLPNKISNYFRTLEVRTVTDRTASQAICRFGLERKLELWQRPRKIFRDLKQLTRERDQLVIDRTALKNQLHAERTEAFPNQGSIKRITTRIQVINSHELEIRTEIAGLVRRDAELSRKIDAIATIPGVGKLTAVITLAETNGFEHIRNKRQLVSYAGLDVRLKESGTLVKGKPRISKKGNRHLRKAMHMPALAAMRFNELHRALFVRLVSKHGIKMKAAVAVQRKILELIYIIYKTEKAFDRDYQSPPKDGI

SEQ ID NO: 341964 - protein, 316 aa, unidentified
MSEPVYVGIDVAKASFEVAASGEAQTLSLGNDEAGHAELCQVLVPLAPRLILLEATGGHERLLALALAAAGLRVSVINPRQARDFARCTGKLAKTDRIDAQVLRGFAALLDAQGHEPRALLDAQQRELTALVTRRRQLVAMLVAERQRLALAHPKAKASILAIMDAIAAQLHDVDGQLREHVRAHHADLAKLLTSVKGVGPTTASTLLAQLPELGHLNRRQITSLVGLAPMNRDSGTLRGQRHIFGGRSDVRRVLYVAALVGTRFNPVLKAFYAKLLVAGKPKKVALVACMHKLLIILNAIARTKSPWRNEIAGIA

SEQ ID NO: 341965 - protein, 391 aa, unidentified
MREPIRMDVEANPTTRNGDKHMKATDKYVGLDVHQDTTVIAVADGGRVGEVRSYGTIPSDLQALGKVLGKLGAEGARLHVVYEAGPTGFVIYRRLKQMGIDCIVVAPSKTPQPKGVRLKTDRRDALQLARLHRAGELTGINVPDEVDESVRDLTRARADAVHDLTRAKQRLKAFLLRQGYRYPGKANWSEAHQRYLRKLTLPLPALRSVLEEQLLAIEQVTERVKRLDELIEVQVPQWRYYPAVQAVMCLRGFQLNAATVIVAELGDVRRFAHPKNVMAFLGLVPKEETTGNTRRLGSITKAGNAQARWCLIEAVQKALTPPKVSARLSLRQQGQPAVYKELAWKIQVRLHKRGWHLLQRGVMKAKVNVALARELAGFIWDLLRQVPAPEA

SEQ ID NO: 341966 - protein, 366 aa, unidentified
MNASTVAVDLAKSVFQLAVADQSGRVAETHRLTRAQFARWFDNRSVALVVMEACGSAHHWARTLIARGIAVKLLPPAYVRAYVRRNKTDAADAAALLEAARCSDMHPVPVKSVEQQALQGLHRIRSLWMSNRTSRINTLRGLCREFGLAVSVGSRLGVEQISRVLAEPKSPIPELIRSSMSLLIEEIRLLESRVAGVERELSALAKRSVACVQLMSIPGVGLLTATAMVAATSGKVTHFKDARAFASWFGLTPREFSSGNSRHLGGISKRGDRYLRMLMTHGARSVLRAATVAKHQGKTISGVRQWSLEVQSRSNHNKATCALANKFARICYATLRDGESYRDLSASNTRQRSDRKLARESFTMPH

SEQ ID NO: 341967 - protein, 456 aa, unidentified
MEKNNLNKEPGGFELINPDAAGIDISSREHYVAVPKDRDKDSVKKFGTFTEDLHQIAHWLKACRIKTVAMESTAVYWVQLFLVLEEYGFEVFLVNARHVKNVSGRKTDVKDCQWIQQLHSYGLLKNSFQPENQIRELRNYVRQRKKLIEDKSRYVQMQQKSLEQMNIKLHIVISDINGKTGKAIVSKIIEGERRPDELARYTDPRIKATREVIIKSLRGNWRNDQIFILKQAFESGAFIDQQIIELDKQIEKVITAISEKFGKPVHEDTNPKKSKNSYKNKLNFDNKKYLKCLYGVDITKMEGIDEITGLSLLAEIGVDIKNKFSTEKQFQAWLNVVPNNKITGGKLKSSRVMKKKNKAGQIFRNAAFTLFNSKGYFGQYLRSRKAKDGSQEAIIATASKMARVFYKIVTERVEYSEEILYLSNEKYLKKKLLKMKATIENIENVISSNVARYAFS

SEQ ID NO: 341968 - protein, 402 aa, unidentified
MNAVGIDVSKGKSMVAIMRPFGEIVSTPFEIKHTASDIHSLVELINSVEGESRIVMEHTGRYYEVLAHQLSEANLFVSAINPKLIKDFDNDSLRKVKSDKADAVKIARYALDKWQNLKQYNVMDELRNQLKTMNRQFGFYMKHKTAMKNNLIGILDQTYPGVNTYFDSPARSDGSQKWVDFASTYWHVDCVRKMSLNAFIDHYQNWCKRKKYNFSQSKAEEIYGKAKELVPVLPKDAITKLIIKQAVDQLNSASTTVESLRTLMNETASKLPEYPVIMAMKGVGTSLGPQLMAEIGDVSRFTHKSAITAFAGVDPGVNESGSYEQKSVPTSKRGSSDLRKTLFQVMDVLIKTHPQDDPVYQFLDKKRAQGKPYYVYMTAGANKFLRIYYGRVKEYLSSLPES

SEQ ID NO: 341969 - protein, 421 aa, unidentified
MPYKIAAIDIHKKVLMVVVAAVADEVLDAVGAAVEFESRTFGTGAQERRHLVSWLKERQVHEVVMESTAQYWKPIWLDLEPHFGKLHLAQAQSNRAPKGRKNDFRDAKRLGRRLLAGELMLSFVPEPEQRLWRLMTRGRLQLVRDRVRLQNQLEALLEEARIKLSSVVSDLLGSSGRRILKALSEGETDPEKLAELGDDRLRCSKEELVDALRGPAEAGHLELLKLHLERLELLDAQIDQLSAKAAEALKPHQDAVVRLAEVPGLGVQSAQPLIAEIGVDAGTFSSAREFASWVGVCPGDNISAEENHSSRSPKGNRYVRRALVEAAHAAVKSKRSHFEGVFRKFLPKLGYKGAIWVVAHRLAKLIWKILHDGIQYREQGDEINPRAKQRRAQKLSQALRKLGYAVTLTAINPEPAIGSAG

SEQ ID NO: 341970 - protein, 444 aa, unidentified
MALSGMILIREVADAPVIMGISKSAGLKFPCGEVRIVNPLFVGIDVSSKSNVAYLMNPDGSKHSIFSVQNNLGGAKLLSERIVSALSSMRLNDVVIGLEATSIYGNSLVYALREDGSLGRFQRKIHVLNPKQVKKFKESYPDLPKNDFVDAFVIADHLRFGRIAKEVYMDDYRYQALRTLTRARFDVIQNLTREKQRFANYLFLKCSGMAQDKNIPNTSATAIALMEHFETVDDLANADLDELTAFIAKTGRGRFADPDVVAKAIQTAAKGYYRLPKTVNDTVNQAMSVSIASMRALKEQVKVLDKAIEQQFEIIPNTLTSIPGIGKVYSAGIIAEIGDIHRFNSQASVAKFAGLVWHKNQSGGFEAEHSQMIKSGNRYLRYYLLEAANSVRRCDSEFRRYYDLKFKEVNKFQHKRALVLTARKLVRLVFRLLKDNRLYIPPEG

SEQ ID NO: 341971 - protein, 412 aa, unidentified
MEGETVIAGVDTHKDVHVLCLLDGLGRKIWSGSFGADPEGYDRLAEAIGDPGSCMVVGVEGTASYGAGLTRRLAELGYNVVEVLRPKRDKARPGEGKSDPLDAERAARKAASGRGCSVPKSQDGWVEAVRQLYVARRLAVATSTSCVACAKSMLTTAPGALRERFRGRERPKDLMPLLARGRKAGDALEESVLASLRSVAAVWKEARSQVESLDERIRALLEANAPALLGIEGCGTTTAAALVVAAGDNPGRLKGEAAFSMLCGVSPIPASSGKTERHRLNRGGNRQANWALYEIAIKRMAYDERTRRYVARRTSEGKSRREAVRCLKRYIAREVYRVLMDPNPDGAAPEGPELAKMRKAMRVTQKQAAAGLGMSAASLGHLEHGRRRSTKLERRYYELLCELERTLPQTAS

SEQ ID NO: 341972 - protein, 478 aa, unidentified
MGVNTYNRLLVSVLPSEAGVPRRVLMDTRHRVGAGLEVHTDPVVACVRRLDDRGQAHQPVKPLGTTPPDLLALLDGRLEQPVPIVALASTGVYGKPVFNLLEGPVEVLLVNPAPVKKVPGRTTDVKDGQGIAQRRQHGLLQASCVPPRPIRELRDLTRQRTQRVGEKARGSNRIQKVLEDATLKLGSVAAEVRGVRGRDRLRSRLAGVDRAEALANLARGRLPDKLPQLRKALTGRVTQPPRFLVGMHLDPLTHLEARLGRLDQRIPQERDKDRPPEPPQPPPPGVAAATASAEKPGMPADGEESAAPGSGRRGRWPSLGLLVTIPGINRRTAEVVRAEIGSDRSRFATPPPLASWAGLCPGNNERAGKRRSGRTRHGNRWLRSILVQAAWAASHTRATYRSAPSRRLACRRGKKKALGAVAPTLLGMCSEVLRKGEAYQERGADYLDRLEPARRTKHLVRHLEKLGHKVTLEPQTAA

SEQ ID NO: 341973 - protein, 339 aa, unidentified
MELIAGIDLHSDNGYYGIINEEGERVFRKRLPNHLPTILSALRPFQAHLKSIVVESTYNWYWLVDGLMENGYEAHLANPAGIEQYDGLKHGDDKTDAFFLAELMRLRILPEGYIYPKEERPVRDLLRRRMMLVQQRTSHILSFQGLMSRQTGTGISCDHVKKLGEEDVQGLLGEEYVVLAGRTNIATIRFLTEKIRVLEWAVLKRVKLKPEYEKLMTVPGIGIILALTIMLETGDIQRFPGPGNYASYCRCVKAKRISNSKKKKKKGNQKNGNKYLSWAYVEAANFAKRHCPEAKRFFQRKMAKANQVLATKALACKLAKACYFIMRDRVDFDTKKIFG

SEQ ID NO: 341974 - protein, 351 aa, unidentified
MTMVGGLDVHRQQITFDYVDDDGLVHWGQIRPATRKTLRGWLAEHCPDGNGEFALEGCTGWRYVSEELAAAGLGVHLGDPAEIAVLRGPKKRAKTDRADAKLLRTLLLEGRFPESWIPPAHVAEIRSLGRLYYTLMDERRAWQQRIHAQLFHQGCPPIKALLSASGRDALARAPLSAAGRQYVDTALRRIDELSAEIEPLRTQLANFARRQQGCQALQRHYGIGWLCAAIIWAEIGDTRRFTSSDQLVRFAGLDITVYSSDSKRSPGHLSRQGSPELRWAAFEAAKCAARRGSPDYAYYHRQAAKHDGHNGKNPTLAVERKILRRCYHTLRDLGDAALALPDTRPQQEVAA

SEQ ID NO: 341975 - protein, 348 aa, unidentified
MNTTTIGLDIAKNCFQVHGVDAHGKTTLQRQLRRAQVLTFFANLPACLIGIEACGSAHHWARKLGGLGHQVKLMPAQFVKAYVKANKNDARDAEAICEAVARPNMRFVAVKTVAQQELLMLHRVRQRLVMERTAKANQLRGLLGEFGIVVPQGLHRLRRVMPEILADAENGLSCRLRERFSHLFSHLRELDASISEWERQIVAWHRESPLSQRLDKIPGIGPLGASALVASIGDIRTFKSGRQLAAWLGLVPRQDSSGGKTRLLGISKRGDRYLRTLLILGARSVLRQMQRHPARAAQSWLERLTARSHPHIAAVALANKSARIAWALLAHEREYQADYRRRVALAAA

SEQ ID NO: 341976 - protein, 412 aa, unidentified
MDVMHRIIVGLDVHLAVVVATLRVQRGRKVTRERRQFGTTVPELLKLLDWLVEAGCPVAIIESSGVYWKPVFNILEGGLDVWLVNAYHAKAVAGYKTDQIDADRLAELGAHGLLRPSFIPPAPIRELREITRYRKSLVQAKTSEINRAEKVLEAANIKLSTVVSDILGASGRAMMRALIAGERDPVTLAALAKGSLRGKTEELIPALTGRFMAGHGFLLTQILDHIEYLEERIDTISEEVARLCEPFHEAVDLLMTIPGVGPMTAQVIVAEVGLDMSRFPSAHHLASWAGVCPGNHETAGKRRSGRTRKGNRWLRGALAEAGWAASRTRGSEYQALFRRLAFARGKGKKKARVAVSHAMLIAIWHILKDMTPYHALTPPQRTNSDPQKITQTLVKRLEKQGFTVTLERTKAA

SEQ ID NO: 341977 - protein, 421 aa, unidentified
MQVLYERCAGVDIGKDVIAVAVRLPGDGPDGRKTIKRMFETFYGVLRECARWLTDHGVTHVAMEATGIYSMPVYHALLAHGEFEQVLVCNAGQVKNVPGRKTDLSDAEWLAHLLECGLLRGSFIPSAEIKAARDVIRYRTKLTESRTSELSRLGNVLQDAGIKADSVASSITTKSVRAMVEALIDGERRPTVLAELARGRMRSKIPDLQRALEGRFDDHHALMCRLHLEHLDHLDAMIAKLDSQVEQMMRPFQPQRELIVSIPGFGVRASAAIVSEIGADPAAWFPSAEQLASWAGLCPGNHESAGKRRHGRRRKGNQHLQPVLVECAWAAVRTDGYLREFYRRQVRKFGGFRSPAAKQKAIVAVAHKLIVILWHVLATGRPYQDLGADYFTTRIDPEKERRRLVAKLEAQGFKVTLEPAA

SEQ ID NO: 341978 - protein, 387 aa, unidentified
MARKRTLSTLDTSIAYEAVGLDLAKEDTAIAAFGPDHEGPYLIDRMPYDKLYELLADMAPTLVAMEPCSGAHQIAEQIQELGHEVMMISGRHVQAWVKDHCNGQKTDLNDAFAILNLAYDRWLTPIRGKTREECRLLALQSSYRQLKGQRTKTMVHVKATLHAWGFPIRTGSFNQKALHELIDANREAFGDEVVETLHLMINRVHDLDHDIATVLKLLTEATQRDPRASLLRSIPGFGVLTTSRWCAVVGDIARFDTPKQTMAFIGLVPNNRITGHHTETSSGREARGQGKMSKRGDKMLRSLCILGAGALCLMVRNDRLPDCPFVASIKERLASPRPWFKVLVYVAAKLVRIATALLKYGETFSFKKAGISKAVLKQWELEQAKAA

SEQ ID NO: 341979 - protein, 345 aa, unidentified
MEITTIGLDVAKNVFQVHGVSATGDVIVRKTLRRAQLLPFFAKLPPCLVGVEACGTSHHWARELIGLGHKVRLMPPSYVKPYVKRGKNDAVDAEAICEAVTRPTMRFVAVKSREQQSALSLHRVRNLLVGQRTQLVNMMRSMLAEFGIAIPEGLEKALSMARQLVDGEVETGLPAEATMIVAMLSQQAIDTHARLREIDKTLSALQRSDDVARRLSTIPGIGPVGATAFSASVTDPHQFRSGRQFAAWLGLTPLQKSSGGKDRLGRITKMGDKYLRKLLVIGATALVRYAKYKPDSADPRLLTLLARKPVRVATVAMANKMARIIWALMTRGETYQARHKPVLLG

SEQ ID NO: 341980 - protein, 483 aa, unidentified
MEKACGLDVHKNSVFACILDEQGKKILEKRFETLTPDLDKLRETLVEHGCGRVAMESTSIYWMPIWRVFESDFSQTLVNPYFVKQLPGRKSDQKDAAWIAECLQKDSLKSSFVADNTLQQMRLYTRQHNRLTKSRVRLEQQVDNQLQRCNIRFSNYVSNQGQNVSQRKVIKDLIAGERDPVELCAKVHGRTTNKHGKEVITAALTGFVQKADIEMLRQCMEQIELIEKQQAACLTLLEELAGEHYAKEISLLCSIPGIEKLSALCILAEIGADMSYFQKATHLVGWAGLRPRNDETSEKIRNRKILHGNKYLRQILVQTAWGASRSNKTFLGKKYNLLKKRMKPQKALIAIARKILVIIYNVLNTKQPFDPKRNFHVDEALIEEKTEKSEKNCNNADSAQSAETKTVTTSPKKQTKKQVDKEASEQKVCSVKTTSAKKAVKVEKDADCQKSKKIVDKTQAQNTQCAEKKSAVGRKKKLLADKA

SEQ ID NO: 341981 - protein, 343 aa, unidentified
MEHYAGIDVSLKDSSVCVVDSSGKIVRETKVASEPEALLRHFADLGFAVSRIGLEAGPLSQWLREGLVGAGFEVVLLETRHVKAALSAMTVKTDRKDARGIAQLLRMGWYRPVHAKSADAQEVRALLVGRKLLQSKLLDVELSIRGILRGYGLKVGEVSRGRFEARIRELTEGQTMLETVIGAMLQARASLWNEFTRLHREMLKIARADQVCRRLMSAPGVGALVAITYRSAVDDPARFAKSRTVGAYFGLTPKKYQSGETDIDGGISRVGDAMVRTALYEAAHIILTRATRFSVMKRWAMDVAKRRGMKRAKVALARKLATVLHRMWVDASEFRWSKDTVTA

SEQ ID NO: 341982 - protein, 377 aa, unidentified
MKKVRCVGLDVHADTIAVAVAEPGGEVRSLGQIPNRPESIRKLMKKLGPPEPLRVCYEAGPTGYVIYWQLTALGVQCEVVAPTLVPTKAGDRVKTDRRDAEKLARSYRAGDLTAVWVPDAAHEALRDLVRAREAAKKDQLRARHRLGKFLLRHGRRPAIAMTPWTQRHLTWVKQAVHFEQPAQEATLLDYLHEVEHVAGRIEGLERAIDEAVRTVPARMRAVIDALQALRGIALVSAVTIVAEVGELSRFTRAPQVMGYTGLGTREDSSGPRTRRGGITKTGNAHLRRIVIEAAWAYRHRPAVGGALRKRQVTLSEEVKAIAWKAQHRLHGRYRKLLGRGKCQQQVVTAVGRELLGFIWAIGIVVETRHRQSQGIAA

SEQ ID NO: 341983 - protein, 329 aa, unidentified
MSKTDFVGIDVSAKELVVARLGEPNLKIFANDRRGHKALIKNLTRNNASVRVCLEATGIYSLDVAMALSRARGIEVMVANPRAVKDFAGAMMSRSKTDALDAVVLAEYAARMPFVPYVPCSAAALKLRGISRRIEALGKLMTAEKNRLHADEATQTGETAGDIKVHIRFLKKRIEVLRERAVKLIREDVELIQKYDFLVSITGIARISAIQILWELAMLPDDMNKRQWTAHAGLDPRHFDSGTSIHRRARISKAGNGHLRKALYMPALVAIRRESHVGAYYDHLIEADKKPLQAIVAVMRKLLCAIWGMFSSQRAFDGSRFFAGEIVSA

SEQ ID NO: 341984 - protein, 340 aa, unidentified
MKFVGVDLHKQTISVCVMVEEGRKRKVEQRRSLRCADVAGIRRFFEELGGFQVVVEATSSYEWFLLLVEDLADRCVLAHPKKLRVIAESKHKSDKIDAQVLAEFLLLDMIPEAYRPSPRVRQHRVLVRHRDAVQRQITGVKCKLRHKASFYNADIASLFTVRGLAYLAKLAMSHADRFECQSLRDQLQFLQQQLKAVDQELRTFAETAPVAEREARAILASVPEVGPVTTDVILSEAGDVRRFRGAKRIVAYAGLDPGIRESAGKGKQLSISKEGSRLLRWALIETAWRLVRKTARWRQLFERLWTTTGHKKKAIVGVARRLLCVLFAMLRDGRAYRLAA

SEQ ID NO: 341985 - protein, 420 aa, unidentified
MTRRDDNRIIRIVHPICCGLDVHKESVSACIIFPDDKGEEQSDVKIFGTFTDDLIRLRAWLAEHKCPVVAMESTGVYWRPVHNVLEDSVTVVLANARDMHNVSGRKTDIGDSKWIAGLLRHGLLKSSFIPPQDVRQWRDLTRLRKKYVYTVGDYKQRTHRLFESANIKIDSVVSDLFGVTGRNLMQLLVADRELTLSAIQTCVRGKLKGKEEELFRSIQGFFTDHHRFVLKMLLSTIATLEAQIEALDLQIRGAMKEHDALLDRMKQAPGIADVASREILAEIGSALDSFPKDTALVAWCGLCPGNNESAGKRKSGRSPVRKHHLKTIMIDVAWAAVKKKGSYFKDKYYRLKARRGAKRAIVAIAHRILLGWGAYHVIKDGADFRDLGGDYLTLRNKSQKVFHLRKQALAMGFDLVPQAV

SEQ ID NO: 341986 - protein, 382 aa, unidentified
MMAMTRIPESNRPSDCLLLAFELGQRAWKLGFAVGMGQRPRLCQIPAGAVSALENQIARAKRRFGLPAEAPVVSCYEAGRDGFWLHRYLLAHGITNHVADSSSIEVNRRARRAKSDRLDLGGLLSLLARYVQGDRRVWRVVRVPTVDEEDARQLPRTLETVTADRTRLINRLKGLLVTQGVSMRIGKDFLEQLETVRLWDGTPMPAGLRERLARDWAQLQNVETQLREAKAGLTLRQPDAVTPTGRALAQLQTLRAIGPIGSWTLATEIFGWRQIRNGRQLGALVGLVPSPYQSGETHYEQGITRAGNKHVRRIMVQLAWRWLYYQPDSALSKWYQHRFAGNGTRMRRIGIVALARKLLVALWRYLETGVVPEGAHLKAAEV

SEQ ID NO: 341987 - protein, 328 aa, unidentified
MGIDLAKRVFALHGVDAGGRVVLRSIVRREQLLEAMAKLPPCVVGMEAGSGAHDWARQLQRLGHTPKLMAAKFVSPYRRKGKNDGNDAEAICEAVSRPGMRFVPVKSLEQQALLSLHRVRQGFIVERTAIINRLRGLLAEFGVVLPVRAVVVRREACKAAESLPALGRRAIEDLLAHLRTLDERIVGYDRELEQQARQCEPARRLMKIRGIGALSALAIVATVGNARDFRSGRQFAAWLGLTPRQHSSGGKTRLGHITKRGDAYLRCLLVQGARSVLHTASRHADGMSRWAQTLEARRGYHRTLVAIASKNARIAWALLSRNEVLRPA

SEQ ID NO: 341988 - protein, 315 aa, unidentified
MEQPATTPSFVGIDVSKDRLDVHLRPAGQAFTIARDSKALEQLVTDLRALAPALIVVEATGGFELTVAAALAGAGLPLAVVNPRQIRDFARATGRLAKTDALDAQIIALFAERIRPEPRPLADADSQTLAELVTRRRQVIEMIGIESNRLHQARDLRVQRTIKATLKTLEAQLARLDREINDTVKGSPAWRAADDLLTSVPGVGTITSFTLIADLPELGQLDRRRIAALVGVAPINRDSGQMRGRRTIAGGRTDVRNALYMAALSAIRWNPVISEHYQSLVERGRPKKVALVACMRRLLGILNAIIRTKTPWQCA

SEQ ID NO: 341989 - protein, 342 aa, unidentified
MEYGAIDLHMRRSEIRIEDEDGRVVVARRIDTTREQFEQVFAGRPRLRILIESATESEWVAQCLERVGHEVIVVDPNYLPMYGQRNRRVKTDKRDVAALTAACRTGTYRPASRVSAAQRGRRQELRVRRHLVQIRTRTISLIRALLRQEGLRLPRGTSETVSARLDRVTLSAALQTAVAPLRELLTQLQTTLDTVEEQVEAAAIDDATAQRLMTAPGVGPIVALTYLAVLATPTRFGGDARRASAFLGLVPREDSSSERHHKGRITKTGPPELRSLLIQASWAIWRGRTADGAALRTWAHTLAARRGRRIAIVALARRLSRIVFAMWRDGTEFQSHTRAIAA

SEQ ID NO: 341990 - protein, 403 aa, unidentified
MNNVAGIDVSKGKSMVSVLRPFGEVVAKPFSIGHTGSELKELADYLKSLDGETRVVMEHTGRYYEPVARFLHNEGVFVSAVNPKLIKDYGNNTLRKVKTDKADSRKIARYGIDNWAELRQHTPMDTIRMQLKTLNRQQSLYTKTKTMMKNNLIALLDQTYPGVNALFDSPVREDGSQKWVDFATAFWHVDCVRNMSLTAFAERYRKWCKRHGYNFCQSKAVEVHAGAQDLIAMLPRDALTKTMVRQAIDALNAVSASLERLKAEMQALAAQLPEYPVVMAMHGVGDSLGPQLMAELGDVTRFTHRNAITAFAGVDPGANQSGTHEAKSTRVSKSGPPELRRALFLVMDCLLKTMPQDDSVYRFMDKKRAEGKPYLVYMTAGANKFLRIYYGRVKEYLASLKEN

SEQ ID NO: 341991 - protein, 354 aa, unidentified
MRRYGIIGGQHDDVLKLLKKLQAAHPGMALKCCYEAGPRGYPLGRCIRQHGAECIIVAPSKVPRQPGDRVKTDRRDADQLARLLRAGELTGIYVPDPPDEAVRDLIRARYQVHKQQHRARQQLKMFLLRQNIRYAGTKPWTQKHLNFLATVKLPFAEQQFVFQEMVNVITEAGQRLARYEKQIERVVAGWRWQPVVKALMSLRGVALLTGATLVAELGDLHRFETAPQLMSYLGLCPGEHTSGTTRQQGGITKLGNGLARKAMIEAAWNNSRAPRVSRTVLARQAGLPKAVTEAAWNAQTRLHQRYKHLTGVGRKKSQVAAAALGRELAGFVWAIGRMVQPHAAPVAAGKEKAA

SEQ ID NO: 341992 - protein, 369 aa, unidentified
MAKNGTLAKIRELQPSFQTTTDQITIGIDLGDRFSHCCVLGPDGRILTEGRLRSTPETMARHFQGLPPSRIAIEVGTHSRWLSQLLTKWGHEVIVANPRNLRMIADSIRKSDQVDAHMLARLARVDPKLLSPIVHRKQESYPDIIQLKARDLLVKNRTRLMNAVRGVLKSAGLRLSPCGTSCFPSKAAMCISDELKPSLTPLLETISHLNKQIYSLDKSIESTAHNRYPETIRLRQISGVGPITALQYVLTIGDPNRFTHSRDVPAYLGLTPRRHQSGSVEQQLRISKAGNKQLRSLLVQCAQYLLGRFGPDSDLKRWGTRMFERGGKNSKKRAIVAVARKLAVLLHRLWVTGDTYHPLYNVGAATLAS

SEQ ID NO: 341993 - protein, 347 aa, unidentified
MRFYTKQHPFYCGIDLHARSMYVCLVSHDGASVLHRNMKAAPEPFLKAIAPYRDGLVVAVECIFTWYWLADLCAAEGIAFVLGHALYMKAIHGGKAKNDKIDSHKIAVLLRGGMLPQAYVYPAPMRATRDLLRRRTHLMRKRAELLAHVQNTNSQYNLPEIGKKIAYKANRDGVAERFADPAVHKSIEVDLALSTYYDQLLGDVELAIVKAAKHHDANTLYLLQTVPGIGKILSLVLLYEIHDIDRFPTVQDFVSYCRLVKCAKASAGKRLGTSGKKIGNAHLKWAFSEAAALFLRNNPAGQKYLARLEKKHDKGKALTILAHKLARAVYYMLKRQTAFDMDQFLHS

SEQ ID NO: 341994 - protein, 385 aa, unidentified
MKPNSQMTLDKYFRQCVGIDISKDKFTACLYMYDMASDAGCCTESIDFPNNRTGFNQMVKWSRKESQKGFPLVYLMEPTGSYYEPLAYHLHKIGQTLYVVLPNKARKFCEYEGIKTKTDAMDARCLALMGCKNRKLRPWEPPLPIYRELRQLTRLRADLVKMQTQMLNHMESIDHMEDVAPEVRKSYEKLLDTIEKQLEKNEKDIAAKLAQDKELETKVKRIATAKGIRVGTVTCIVAETQGFHLISNRKQLTSFAGLDVKARQSGKDDPRHHITKKGNAHIRAALYMPALSAAHCNRQMAQAYGRICAKHPDVKMIGVTAIMRKMLLLVYSLWKSGEEYDETRDNTHTPRKKEPQPTNSPEDCLKPNAEPPDWNAADKEGNPPF

SEQ ID NO: 341995 - protein, 342 aa, unidentified
MKKSLFIGIDFSKKTFDVSVVHQNNLQALDYQQFENSKEGCDALYKWIKVITQEPCENWLFCGEHTGLYSVCLSEFLVKKGLFLWLENPLQIKQSTGIKREKNDRKDSREIALYAYRFQDKARAYQLPGKALKSLELLLSFRERLLSNKQTLLVSSTELRRVMQRDSTARFIYEQSQKDVERLNKEIKEVEKRILKEIESDDSLHENYKLVSSIKGVALINTASILVATQNFTRFDNSRQFACYSGMAPFGKQSGTSVNAKPRVSRLADKKIKSLLTQAARCAINYDPNIRQYYERKRSEGKDNWLIINNIRNKMIHRIFAIVRNKQLYQVEYRNQLDKKVA

SEQ ID NO: 341996 - protein, 357 aa, unidentified
MSIVGGLDIHRKQLTFDWVDEQNDKWERGRISPADREHLADWLTRFDPTVSGPVAFAMEGCTGWRYIAEEMNRAGVTAHLAEPAETSARRGPKRRAKTDKADAKLLRELLATGRLPECYIPPGQVLEWRAMLELYQDLRTEHTGWAQRIQSVCFHQGATAPGQAGIVRGDRARLQAIVDEQLSIVGRLQVNTALAMMDVLAEHLERLRRRLLSTARGVKGTRALMHDIYGVGPLSSLALCAWLGGADRFSSSRKAVRFVGLDITVHSSDGKRSPGRLSRQGPEVLRWLLFEAAKTSARSCAPGYSYYTQVKDRYDANRACLSQARRIVRQSAHILTELGDDAFTVVAQPAAPTTIAR

SEQ ID NO: 341997 - protein, 352 aa, unidentified
MMVFGVDPHKQSHTAVAADGLGRRQAHKTVRARREGHRELIAWARELAPDGRRRAVEDVRHVASGLVRELLAAGEEVVFVPTRLMAGMRSGGRERGKSDPIDALANPRAALREDVFLPAARLNGQVLDVRRLSDHRDDLVTARTRTISRLRWLVHDLDPALAPAPRTLSRTRKARRQLETGLRALPASAGRRIALSLLAAVTALTGEIAGLDEDLTALITRLCPELLAVCGIGVVSAARILGETGDIRRFRSPAAYARHNGTAPIPASSGTRDTHRLNRGGNRQVNAAIYRAALVQARCHDGARALLDRRAATIRETRKAALRVLKRHLSDVIYRALQADAWRLDHPQQHAA

SEQ ID NO: 341998 - protein, 326 aa, unidentified
MEQELHFIGIDVSKAKLDVDVLRPDGRHRSKKFANTLKGHDELLRWLNSHNMAPAHVCMEATSTYMEDVAAHLSDAGFTVSIINPVLGKAFAQSEGLRSKTDAVDARMLAEFCRQKRPAAWEAPHPVERALRALVLRHQSLTDMHTQELNRLETAREVQRPSIDAHLLWLHAEIKRIEQQIKELTDDDPDMKHRRKLLESIPGIGEKTSAVLLAFTGLKDRFGQARQFAAFAGLTPRRHESGSSVRGMSRMSKAGHVSLRRALYMPAMVAVSKTEWGRAFRERLAGNGKKGKVIIGAMMRKLAQVAYGMLKSGEPFDASRHVVITA

SEQ ID NO: 341999 - protein, 409 aa, unidentified
MDQLIERCCGLDVHRDTVVACVRGPGPNGRRQHEVRTFGTTAVELLALRDWLEAHAVTDVAMESTGVYWKPVFYVLEEAFTCLLVNAAHIKQVPGRKTDVKDCMWIAQCLEHGLLRGSFVPPAPIRELRDLTRHRKVLIQERTRAANRLHKLLEDAGIKLASVATNILGVSGRAMLEALVHGTTDPAVLADLARGKLRKKLPALRQALAGRFRPHHAFLVSQLLAHVDYLDEAITTMSEEVEERLAPFAAQLTQLDTIPGINTRTAEVIIAELGVDMSCFPSDRHLASWAGICPGNNESAGKHQSGKTRKGNRWLRMTLIEAAGAAIRTKDSALGARYRRVMRHRGHKKAVVAVAHAMLRAVYHLLAEGTTYREPGADYSDRHHTHRVTRRAIQLLERQGYRVVLEPAA

SEQ ID NO: 342000 - protein, 407 aa, unidentified
MVDTTAIDLFLGLDLGKEFHHAHGRTEDGRTVHDKRLPNTEPKLLELFTRLVAKFGTVLVIVDQVANIGALPLTVARAAGCRVAYLPGLSMRRAADLHPGEAKTDARDAFVIAETARTMPHTLRAVDRDDEVLAELTMLTGYDNDLAGEVNRATNRLRGLLSQIHPSLERVLGPRLAYPYVQALLQRHGSPARLRKLGRARCEALLKAHGSRKAHHLSTEIFDALAEQTLVVPGTEASALIVPGLAAQLAAAHTQRRQAEQEIAALLEALPLFHLLTSLPGLGVRTTAAVIVAIGDGTGFPTAGHLASYAGLAPATKSSGTSIRGEHAPHRGNRLLKRALFQAAFAAIGCKADLSSRIYYDRQRARGKTHTQAILRLARQRVNVIHAMIRTGALYEARTPGDVDLAA

SEQ ID NO: 342001 - protein, 314 aa, unidentified
MNPTPIYVGIDVAKDRLDVAQRPGTEAWSVSNDNRGIADLVARLKTLRPALAVLEATGGIELPLVGALAAVGLPVVVVNPRQTREFARATGRLAKTDAIDAQVLARFAEAVRPALRPLPDAATRQLTGLVTRRRQVIEMLTAEKNRLRTAAPAVRDHIKEHILWLERSLSDLDSELGQAIRSSDIWRTQDDLLQSAPGVGPVLSTTLLAELPELGSLNRKEIAALVGVAPLNRDSGTLRGRRTVWGGRSQVRAALYMAALVATRFNPVIRAFYQRLQTAGKPKKVALTACMRKLLTILNAMMRHQAPWRICSTS

SEQ ID NO: 342002 - protein, 370 aa, unidentified
MEETITFVGLDVHKNSIAVAVADGGLAGEVRYLGVIDNTPKALDRLIARLKRPGRVLRFCYEAGPCGYGVYRHLQGQGYACMVVAPSLIPRRPGERVKTDRRDATTQARLLRAGELTAVWVPDADHEAMRDLVRTRAAAMRARHRARQQLSGFLLRHGRVRSGKNWTLAHRRWLSTVRFDHPAQQIVLQDLIDAVDDADARCARLVAQIVELVPQWSMAPVVEALQAMRGVALIVAVTLVAEVGDLSRFDNPRQLMAYLGLVPSEHSSGPRVRRGAITKAGNGEARRVLIEGAWTYRLQARVSRSLLDRLQGLPKPVREIAWKAQVRLCARYRRLSAAGKPQPVVTTAIAREMLGFAWAIARHVQPRTTN

SEQ ID NO: 342003 - protein, 348 aa, unidentified
MNATRKAVIGVDTAKSVFQVYTVEQATGEVINKPIKRAQFLQWFANRPPCLIGMEACGGSQHWARKLQELGHEVKLMSGKMVKAFVIGNKNDAADARAIYLAAQQPEVKAVAIKTEAQQAVLAMHRIRQQLVKMRTAQMNALRGLLAEYGEVFGTGRKAFDAGIKAALERLAERLPMPLIDTLRDQWSELARLDDRIARIESSLLTWMRQDRAANAIFAIPGVGLLTATAVVAAMGDAKAFRSGREFAAWLGLIPGQTGSGGKVRLLGMSKRGDTYLRTLLIHGARAVLRRPKTLSPWLQQLSQRRPLNVVIAALANKMARTIWAVLAHDRAYDKDHVSMRPDTAVAA

SEQ ID NO: 342004 - protein, 354 aa, unidentified
MFQKLNTAIAVIGIDIGKNSFHVVGLDHRGAIVLRQKWSRGQVETRLANIPLCLIGMEACVGAHHLSRRLKGLGHDARLMPAKYVRPYSKGQKNDFRDAEAIAEAVQRPTMRFVATKSAEQLDLQALHRVRERLVSQRTGVINQIRAFLLERGVAVRQGLRFLRAELPDILATRTEVLSPRMARVIEDLTGDWRRLDERIEGLSTEITAIAHQDAACNRLMTVPGVGPIISSAMVAAIGTGDVFSKGRDFGAWLGLVPKQISTGDRTILGKISRRGNRYLRVLFVQAAWVVLIKPKTWERYGLKPWIEAAKKRLHHNVLAIALANKLARIAWAVLNKERNFEYISTDKMTSRPA

SEQ ID NO: 342005 - protein, 347 aa, unidentified
MLHAGLDLSRKRLDYCLLDGRGERVEVGAVPPDGDGLVGFVRRVEERHGQAVRAAIESMNGARFVHDTLERLGWEVEIADAARVKGLAPLACKTDRIDAWVLAELSRRELVPAVWLPSFQVRQERERARWRLFLVRKRSSLKHRVHAQLLAFGHACPVSDLFGASGRQLLARLEFPEPWRSNVLAAVSMINDLDREISEIEKELRALGADHRYIPLLITVPGIAWVLGYTIAAEIGDIERFASPTKLAGYTGLCPRVYQSGQSDRRGPLSHAGPKYLRWALMEAAVHACRHEGYRDRYQRNKQRLGKQRGAKVAQVDIARRLSEAIRQMLTRNQPFAPAGATHALAA

SEQ ID NO: 342006 - protein, 399 aa, unidentified
MGEFTGHRAGVETSASWAAVKGRETPERYSAYVGLDVHKDTIAVAVAYPGRAEPVYRAEIAHRAKAVKKLVSELYELTGGGLLRFCYEAGPCGYGLYRQLLGMGVDCEVVAPSRIPRAPGERVKTDRRDALKLARLLRSGDLSSVWVPDEEQEAMRDFSRCRLDFKSQELKARQQLNAFVLRHGHRWPSKKTRWTQAHYSWLESLKLAHPWQQVVMQEYIEAVRAASARVRELTAQLMAALPQWSLAPVVDSLIALRGIDKVAAVTLLAELGDISRFDSPKQLMGYLGLVPSERSSGRRRRQGAITLTGNAHARRMLVESAWSYRFPARQTMHLKRKAKSASEEARAIAWRAQKRLCGRYRHLSWAGKSTKVVTVAIARELVGFLWDIVCHEMPKVRAA

SEQ ID NO: 342007 - protein, 401 aa, unidentified
MVSDFKKGRYNLMKIFVGIDIAKLNHFAAAISSDGEILLEPFKFTNDADGFQLLVSKLESFDKNSIIIGLESTAHYGDNLVRYLVAEFYQVCVLNPIKTCQMRKNNVRKTKTDKVDTFVIVKTLMMQDDLRFITFFDLDMMDLKALGRFRQKTIKQRTRLKIQLTTYVDQVFPEIQYFFKSGLHQHAVYALLKEAPSPKEIASMHMTHLANLLKVNSHGHFTKEQAKELRVLAQKSVGANDSAISIQITQTIQQIELLDSQLEKIEAEMTDIMKFNDSVIMTIPGIGYINGGMILGEIGDIHRFSNPNKLLAFAGLDPSVYQSGNFQAKTTRMSKRGSRVLRYALVNAAWNVVRNNATFKAYYDAKRAEGRSHYNALGHCAGKLVRVIWKMLTDEVEFNLE

SEQ ID NO: 342008 - protein, 419 aa, unidentified
MSDQSPTPENFAAFVGIDWADREHAVCMIADGQETFESLPHSAEEIAQWAALLDRRFGGRKIAVALEQSRGGLVHALMQFPHLVIFPINPKQSARYREVFAPSGAKSDPADAKAIARLLVEHHRHLRAWKPDDPRIRELDRLCQLRRKVVENRRKTVQQLVGTLKVYFPEAIDLLKNLQSDWALEVLGRWPSLQELQRTHPKTLGKYFRKKSRSDEDGDDPVKAIRALKPMITDKAVIHANALLVQTLVGMIRLLNKSVAQFEEAINGLFNQHEDAALFQSLPGAGDAMAPRLLSALGSDRERFNSAEEVQAYCGIAPVTRSSGRSHTVKRRFACNKYLRQTFHEFAAHARRWSPWSKAFYNYQRAKGKGHHAALRALAYKWLRIIYRMWKTRQPYDEPHYIDQLERKQSPILKFLKTT

SEQ ID NO: 342009 - protein, 356 aa, unidentified
MNKSSKLNFEGQQIYVGMDVHKRSWSVSIFTDTFEHKTFTQPPEVSTLVNYLKRNFPGASYKSVYEAGYCGFWIHDRLQEHGVQCIVVNPADVPTKDKERTKKTDRVDCRKLARSLRSGEIEGIYVPCRPKVEDRSLIRTRYSMVKKQTRCKNQIKSLLQFYGIQIPEELVNSHWSKRFITWIEAIRMERASGNIALKVHLEELNTMRKLIADITRSIRTLASSEEYQHNVHLLKTVPGISTLTAMTLLTELYEISRFKNFDKLCSYVGLIPDTDSSGETDRKTGITSRRNAQLRCILIESSWVAVRKDPALLMSFTTLCKKMPKNNAIVRIARKLLNRIRYVLKNQQEYVPAVVQ

SEQ ID NO: 342010 - protein, 343 aa, unidentified
MGEVSTIGLDIAKSVFQVHGVDAAGQVVIRRQLKRRYVLAFFERLPPCLVGIEACASSHHWSRELKVLGHTVKLMPPAYVKPYVKRQKNDATDAEAICEAVTRSTMRFVATKTPEQQSCLMLHRTRHLFIRQQTAVINVIRAHLAEFGIVAPIGRKGVEALLDVVANPTDKRVPVIARACLAALGAQLRRLKEQILEFDRMIVTWHRSQETSKRLDAIPGVGPVLATALVASIADPKAFRSGRNFSAWIGLVPKQHSSGGKDRLGSISKQGDRYLRSLFVAGALAVIRYAKIHGTEHRPWLTALLARRPSKVAAIALANKIARMVWVLMARGERYKEPIALAA

SEQ ID NO: 342011 - protein, 405 aa, unidentified
MLEAIVKRVAGLDVHKMVIVATILLTQEDGETRKETREFGTFRKHRRQLARWLKRCSIELVVMESTGIFWKSIFETLETAAIKTYVVNARHVKNVPGRKTDIMDSEWLATLARAGLLKPSFIPPKDLRELRLIGRHRMKLHGMLAGEKNRLHKILDDAGIRLGGVVSDINGVSAREMVAGLIENKPVEELVRCARGRLKAKMKELHDSLSEPISERHKFLLRKIHAHIQVLENEIQEMDDYLFKAMTPYQEQWGILQTLPGVDKFSSAMLLIEIGTDMEQFGSSGQLASWAGMCPGNNESAGKRKSGRARKGNRSVRRVLCEVANAARKTNSQFKGKYQSLVIRRGHKRTIIALGHKVLRVIYSMLKNNQPYWDPGIDYEALTVRRNAPRWLRALNKYGYLPTEA

SEQ ID NO: 342012 - protein, 331 aa, unidentified
MFPVGIDVSKNTLDLCMLYDGIKGRIKTRNIQNNRHSVENILRWLRLQHCSPEDVHVVMEATGVYHERLATELHDAGFRVSLANPHRSREFARGMGIMTKTDKVDAYMLACYAFLKKPHRWEPPAPEIRYLGALLRRRDVLLGDALREENRLEKYLSTDTPADIISSCRRMAQLLREEVSNIERQIKAHIKASPALRRDYTLLTSIKSVGPLLGMHMLVVLRSHNFASAEQAAAFLGVVPIEKRSGTSVRRRPRMSKIGPPQLRAKLYMSALCGKIYNKRMRNIYDEMCLRGKPKMVAIGALMRKLVHWCYGVLKTGTVFNDEDLKPVLST

SEQ ID NO: 342013 - protein, 355 aa, unidentified
MSSEKYIGLDVHQATICVAVMDAKGKVVMESILETKATTILEFLAGLRGTLSVTFEEGTWAAWLYDLLKPHVANLVVCNPRKNALLKHGNKSDKIDARKLANLLRLNDLEPVYHGETGVRMLRELARSYLTMVKDVSRVMSRLKAIYRSWAIPCAGRDVYYTRHRGEWLGKIPEAGCRRRAEQLYQQLDMLQPLRQQARRELLAESRKHTITAKLRQIPSLGPIRSALAVALIQTPHRFRTKRQLWTYSGLGLETRDSGEYHYVEGQVRRRKKQVFIRGLNKDHNHDLKGLFKAAATRASVRPGPFQDFYQRSLAKGIQPTMARLTLARKIAAITLTLWKKGENFDAEKLKAQAA

SEQ ID NO: 342014 - protein, 353 aa, unidentified
MKRIVKQAVGIDVAQDELVVCMGRMYEDLTLELYSHKTFGNTAKGFELLTNWVSKLSNADVELIYVMEATGVYHESLAYYLSDRGDRLSIVLPNKISNYSRTLDVKTVTDKTASEAITRFGLERKLDNWEPPKGVYRSLRQLTRERDQVVVTRTIAKNQLHAEEAEAYPNKKSIARTKKLIAFLDKQEQEIKEELAQMIKEDEEVKRIVVLLCSLPGIGLLTAATILGETNGFDLIRNKRQLASYAGLDVKEKQSGTSVKGKPRISKKGNRYLRKAMHLPALTAIRHDERFKAIFARIVSKHGIKMKAAVAIQRKLLEIAYTLYKRQEKYDSQYLNKSEDKIAVEITELSIKN

SEQ ID NO: 342015 - protein, 318 aa, unidentified
MNISVGIDVAKDWLDVAEWPDGAAWRVPNDEPSIASLVERLRQREPAVVVLEATGGLECPLVAALAAAQLPVVVVNPRQVRDFARATGRLAKTDAIDAQVLAQFGEAVEPRPRPLPDQATQELAALVTRRRQLVQMLTAEKNRLRIAARPVRRDIQQHIRWLERRLDDLDGDLRKTIQASPLWRDRDQVLQSAPGVGFVSSSTLLASLPELGRLNHKEIAALVGVAPLNRDSGTFRGRRTVWGGRADVRAVLYMATLVASRHNPVVKAFYERLVAAGKPKKVALTACMRKLLTILNAMIRNHASWQITNPTLAQQDSC

SEQ ID NO: 342016 - protein, 330 aa, unidentified
MSEQQVADALGRQLGERTVAATSDGHMLALEWAAQWPVRRFAVEDCRHVTRRLEGDLLRAGERLVRVPTKLMSGARRSSREGGKSDPIDALAVARAALREPDLPAAQLDGPQRQLRLLVDHRDDLVRERTRVQSRLRWHLHEIDPGLEVRSRGLRSRCVVDAVERHLEGFEGTVVEIARELVERVRQLNRRARELEQQITILVARIAPSLLGIAGCGALSAAKIVGETAGASRFRSRSAYARWNGTAPQPVWSGNTTRFRLSRGGNRQVNSALHRIAVTQARLDSPGREYIAQRMESGKTRTEALRLLRRRLSDVVFRTLLADETGLALT

SEQ ID NO: 342017 - protein, 457 aa, unidentified
MRTLGIDLAVAAAHKAIVVDANGKFVPPTMSFHTRWDDIERVVARAREGVTPDCPLRAVLEPTGMAWYPVSVALDQLGVILYMVNGQKAHDLRRFYSRHSSSDRISARVLAKMPFVDEESLYRLEIPSDTQLACQRGCKELDRLQTRITAIKNRLRDTDRFTWPGLEGIFKNIYSPTARLFRETWYDPARVVAAGTEEVQSTFEALSGQEDDLKWVNYLVKLAAEVIQLYGPASPDYASLREEVSREQKQLAYLEARLKAVWRGTVRPLYRQLHPSRHLETLLGVGERGAAVFASFIGRAGRFPDNRHFRGWHGMIPDSRQSGAAESKGLHISQAGPDLVKKFGFLDADVGRKYDPQIAVIYHDQMMNKGKHHTQAVCACATHLLDRVYVILKEDRPYELRDVDGTPVTREQARAIIAERYTVPDEVRKRNNRRARKERAERRMERKQKQRESRRRR

SEQ ID NO: 342018 - protein, 361 aa, unidentified
MKKHSNSPKKNEPTSKRAKSRGPVQRNPKEVLAELLGKLREKLDSKVVAASAGEEDQRRELRPNLDRLTVGVDLGDQWSHYCILGLEGGTLAEGQLRTTQQDIADFFEGLNAARVVVEVGTHSAWVREVICSYGHEVVVANPRLMEGSKRRKRKNDRIDANKLARLGRVDPQSLHPMQHRSSEVRQDLVILRARDALVAARTELINATRGLVKSMGARLPKCSSPSFAQKVEEAVPAEIQEALLPLVRMTAALSDSIQGYDEKIEKLGREKYGHTALLRQVKGVGPITALAYVLTLENPERFAKSRDVGPYLGLVPKQEDSGESPPQLGISKAGDTMVRRLLVGSAQYILGPFGPDTDLRR

SEQ ID NO: 342019 - protein, 555 aa, unidentified
MVENAAESHTSGAPEKMAGHHFRGEKPPRLSCYKYTHNRQACKPYKAVETHVVAVPRCTVVSGQIDLKTGGAGGDPDEKAKTPKVTGLAKTLGKEKGGMGRKGKRTVGLEEAHPFTGMSQVNPKAAGVDIGAVEIVVCVSGDENTQMVRAFGNYTVDLQAIGRWLKEYQIETVAMESTGVYWIPLFEELERQGFECLLISSRSLRRVAGRKSDITDAQWIQTLHSYGLLESSFRPQAELIALRTLLRHRSQLVEHRSPHILHMQKALLQMNVQLSQAVTDITGVTGQTIIRAILTGVRDPQELAAMREPGCKKSAEEIGKALTGTWREEHLFILKQSMEMFDFYTRQIQACDEEIERVYGLTRPDWETGEVKPLGQRKRSAHSKNRPHNPESIRKHLKRISGVDLSVVDGFGVSLAQTVIMEVGTDMSKFPSEKHFCSWLGLAPKHEISGGKVLKNKTLKTKNRAGQAFRMAAQSVKQADCVFGVTYRRLKARLGPAQATVATAHALARVVYRMLKYKLEYETISVEEYEKKYQEQQLKYMRKKAAKLGYQLVPA

SEQ ID NO: 342020 - protein, 411 aa, unidentified
MDKVYDICCGIDVHKKLIVACLRNGNKHEVREFGATTRELLEMADWLKENGCQMAAMESTASYWKPLYNILESSDLSAMVVNARHMKAVPGRKTDVKDAEWIADLLQHGLLQPSYIPDRDQRELRELVRYRKSLVGERTRELNRLQKMLEGANIKLSGTVSDINGKSARSILEYLLTGKSIDEAKYDEMYEKKIIAHNLKASKEQIIDDLNGVMTPLQRRMMKELLSHLDELNVHIRNLDDEIDNFMKPEEKQASQAIQDVTGIGNTSAQAIISVIGTDMSRFKTDAHISSWAGLCPGDNQSAGKRKSGKTRKGNTLLRTTLVTCAHAAVKHKTSYFYAQFMRISAHRGKKRAYVAVAHSILIAIYHILKDGVVFKDLGADYYNQFNKERKINAYLKKLKALGWEAPVVAA

SEQ ID NO: 342021 - protein, 343 aa, unidentified
MTISILGIDIAKNTFQLHGADHSGKTVYKKRLARRELAAHVTNLPPCTIVMEACGGSNYWARVFQSSGHSVKLIGAQFVKPFVKTNKNDANDAQAIVEAASRPSMHFVPIKKVEQQDIQTIHRIRTRVVKNRTALINEIRGLCLEYGVVLTPGAARVKSSLCVAIADGDNELTPLSRESMQDLYDELVDVECRLKKLDNKIRQLCRQNENCQRILKIPGVGELTATAIVAAVPDPKEFRNGRHLSAWLGLVPRQSSSGDKRTLLGISKPGDRYLRTLLIHGARAVLSHYKHKDNDYTHWVGRKKATLSHNKAAVALANKNARIIWSMLNSGEEFSYGASATAA

SEQ ID NO: 342022 - protein, 416 aa, unidentified
METLVERGCGLDVHQATVVACLLVVCQDGKVQKQLRTFATTTRELLSLRQWLGSEGCTHVAMESTGVYWKPIYAVLEGEELEIIVANAQPVKKVPGRKTDVKDAEWLAEWLCHGLLRSSFIPPVPIRELRDLTRYRRKLVEARWAERNRLLKLLESANIKLASVATDVFGVSGRRMLEALIEGTANLSEMAQLAKGKLRNKIPQLELALEGRLQEHHGFLLRLQQNRLDAMEADLAVLEQRIQQRLQPYASQVALLQEIPGVELTLATVIIAELGVDMTVFQSVSQMASWAGVCPGNNESAGKRKSSRIPKGNVYLKTALVEAANAAARAKGTYLRDKFYRLKARRGYKRAVVAIAHKILVSIYHMLSQNVSYNDLGDLYLDRLNAHPLTRNLVHRLERLGFQVTLTPQQNTAHAA

SEQ ID NO: 342023 - protein, 410 aa, unidentified
MTDATIAQTEPVLVAIDIAKARHEVLIAVPGRKRRRRLTVLNQLDEFNRLISTLSEYDRPVRAAFEATGNYHRALAYRLGVAGFDVKLVSSVALARTREALNNSWDKNDPKDAQVILHMMLIGNEQFYHDPMLSGTNDLQELSKTHDIVSRSKTELWHRVLTHYLPLYWPEADRFHRSSRSDWFFAFLERYPSPHFISAMDQEAFIADAWDVVGRKVSKERLLADIYQTAKFSVGLPIAPDSDAARMFRLVLGEGRGLIAKRNEIEDRAVELLKTNDDYQLLTSIPGIGPINALTILAEAGDLRRFRHHRQFLKFCGMDLATIQSGTFRGQTKLSKYGNARLRRTLWMAGQVAIMQKTNSFRDKFERYIAKDRQNTHLRRKAYTAIAAKMARTVHGIINRGEPYRPFFEG

SEQ ID NO: 342024 - protein, 281 aa, unidentified
MELLKCGVGIDMAMQKFDVCFSVIDTEQRVTIKATHKFENNPKGFSLFLDWVKKHNKQPVPVMFLVEASGVYHEQLAWYLFGHNQSVSVILPNKAKRYKESLGFKSKTDKLDAKALAQMVCEQRLKLWQPASKNLYQLRTITRQIERITYHITAFQNQLHALEHGMYREKTVEKMIAKNIALLEKQKEKLVIVVETMIKKDSVLNERFEQISVIKGFGLLAFAVLVAETDGFALIENQSQLVSYAGYDVVENQSGKHTGKTKISKKGNAHIRRSLFYRLLM

SEQ ID NO: 342025 - protein, 501 aa, unidentified
MARLLQLSPRPESLYLPTWALMFRKIGEPMKGKKKQTNQKKRTDRRTGQTRQNRQNVAGLPTLRTNVAGMDLGSEEHWVCAPALDGAGREIASFGGTTAELLRLAAWLKERKVESVAMESTGVYWIAPHEVLEGQGLQVLLVDTRRLAEVPGRDKKSDPSDCEWIQKLHSCGLLRGAFRPREEVCMLRTMVRDKGNLTAESGDWVRRMQKSLDQMNVRLHRAVSDINGVTGMAILRAIVNGERDPEKLAQLRDPRCSNSQEEIAEQLRGHWREDHLFSLKQALTMYNAVQERIAAYDEEILRRLGTMERESVRGTAVPPVKNPNKARSIRKRGEEPMREALYRMSGVDLTSIDAIGVETVQVVLSEYGADLSGFDTEGHFVSHLRLIPHKPTSAGKPLKKKRRNSASTRVAAALRMAATSMRNSQTALGAYYRHISQRIGGDVAVFATARKLAILIYRLLRWGQAYVDEGAEAYERRYQQNRLLALKSRAKQLGYELVQTA

SEQ ID NO: 342026 - protein, 331 aa, unidentified
MNVCVGLDIGSRTSIVGVRKDGRPAGQWDIAQTPAGRKAAVKKLQALKPKSIVMEATGIYYLDLALELHAADLPVSVINPKSFHNFAKLMLVNSKTDSIDAQLLSEYGERMTPRLWTPPSSVQLELRALGRHINRLVGHRTRAKNELHALQATATTVSMLIEDQEEAIATLDNRIERFRKAGRELIAQCPTLNRQYKQLLAGPGMGEVSALAALAELTTLPQMLKSSQVARHAGLDVRQTQSGTSIDKPGRLGKSGNAYLRAAMYMPALTAVRCDPYAKAFYESLVSRGKKKMQAIAAVMRKYLTGIWACMRGDEPFDTAKLFSSEHLRKA

SEQ ID NO: 342027 - protein, 385 aa, unidentified
MPNEMLQTNDTNTPATLTIRLLVAMEMSLKSWRLVMAPEGGIRKRVKTVEAGNYLALEQAVAEVRDRFKLPVQTPLVFCYEAGRDGFYPYRRLTEVGHEVWVIDSASIEVSRRKKQAKSDGIDGEKLAELMQRKVRGERKALRIVRVPPLTVEDERLLPREREILLEDLGRLRNQIESILFTHGYRDIPKTAPGLKAWVAERSELTPHLQERLGREMARLALLETQLQTVEKAMAFKTQQEQSAGIAAVARALMQLCGIGLIGAWVLSSEIFGWRKFRNRREVGAVLGLTPTPYSSGQDEREQGISKAGNRRARWILVELSWLWLRYQPRSALTQWFITRFSGGGKRMRRIGIVALARRLAIALWRYVDQGVMPAGATLKKAVKA

SEQ ID NO: 342028 - protein, 435 aa, unidentified
MSEIKKINPYVGAIDIGAEKIFVCANDEGYKVFGCFTEEFRKAAAYLKENKSSSVAMEATGVYWIPLKDILEEEGLTVDLVRAGDAKQLPGRNKTDGEDCQWIRTLYQRGLLRPCIIPEATIRELRTYMRMRQDHIEMAAQHIQHMQKAFTLMNLRLPQVLSQIIGASGRRIIEAILSGERDAEALVLLCDRQVLKNKREDVVRSLEGNYKEEYLFMLAQAYKAWNFYNNLIAECDVQIGEWLNKSNNGKAPLEEISKAKPIRHHKPAIEDFHEKMLLLNEGKDISQLPGFTDYRAIQVIAEVGQDMSKWKNEKHFTSWLGLAPKKHASGKMKRHQRGKANTKAGQLFKEAAFALLKSKHIALGSFARRLRASKGPAIAIKATARKLAIMYYNVLTKGIEYVEQGIEKYEKQAKETEIMKLTRWAHKMGYSLSAT

SEQ ID NO: 342029 - protein, 343 aa, unidentified
MQAVTTIGLDIAKSVFQIHGVDAAGNVIVRRQLKRRYVLPFFQKLPPCLVGIEACASSHHWSRELQALGHTVRLMPPAYVKPYVKRQKNDAADAEAICEAVTRANMRFVATKTPEQQSCLMLHRTRHLFIRQQTSVINAIRAHLAELGIVAPVGRNGVEELLGVIADPSDKRVPEIARACLAALGAHLRVLKAQILEFDRMINAWHRSNETSKRLDEIPGVGPALATALVASVADPKAFRSGRNFSAWIGLVPKQHSSGGKDKLGSISKQGDRYLRSLFTAGALAVIRYAKIHGTKHRPWLTALLARRPTKVAAIALANKIARMAWAMMAKGERYKEPVALAA

SEQ ID NO: 342030 - protein, 356 aa, unidentified
MEEYIAFDSHKHYTLAERERVKSGRVWQERIEHHPGAIRAYLRSCRPGGAVAVEALGSWYWIVQEIEQAGFRALLVHPRKAKLMMGMLNKTDKLDVHGLNRLQRNRTLPTVWIAPGPLRDLRELTRTRMVMARQRARLKNRLGSALAKYGLAVEDWSDPYGVGARATLEALLGRLPEQTAWTSRMLLEQLDFVQGQIVAHEQRLAACLEQTPAMRLQRTVPGFGPILSSVVVLEMGDAERFPDAEHFASYAGTTPRVHASGDKRRYGKLRPDVNRYLKWAFVEAGNAIVRHHGSAPDRHVSRLYVRLKLRKGGAKAVGALARHLAEATYHVQKGRQPYRDPALRRVGKEGLSASMP

SEQ ID NO: 342031 - protein, 380 aa, unidentified
MPSLKKWGERPDAGYHVLGLDVHKATISVAVARGERGGEVRNWGSVPHRADHIRKLVEKLAAGGARLQFCYEAGPCGYGLHRQLVEMGHDCVVVAPSLIPTKAGDRVKTDRRDAVMLAKLHRAGELTAVWVPDTAHEAMRDLIRARATAMRVTGKARQHLQGFLLRHGRVYPGKKGWTGAYRRWLATVHFQYPAQQIVFQDYVDAASDAEARVERLTGQIADLLPSWTLAPVVEAIQAMRGVAFIVAVTVVAEVGDFQRFDTPRQLMAYLGLTPSEHSSGASVRRGGITKAGSGLARRALIEGAWSYRMQARVSPKLHARLEALPRAARDIAWKGQLRMCLRYRHLVAAGKAKVVVITAIAREMVGFIWAIARAVSTVPV

SEQ ID NO: 342032 - protein, 418 aa, unidentified
MVRTAMPPRLRPRAREHRSCKRCLHWMRRGDRLRWDEKASLPLRSTVRSPNQVTGSRPNRRLAMKKDSVTRQVTGIDQGDRFSHLCVLDARGEVVERSRIPTTPAAYRKRFGGRRARGRVILEVGPHSPWSSRLLESLGHEVIVANARRVKLIAKADRKTDRVDAETLARLGRVDPNLLAPIEHGGEAAQRDRALLRVREGLVRSRTRLIQQARGLVKALGERLPSAAAAAFPRRVREAGLESLFPGLDVLLEMVEILSSRIRELDREVERACQERHPVTAQLRQVPGVGPITALAYVLKVEDPTRFAKSREVGPFLALVPRERSSGESRPELGIPPRGDAMLRRLLVQASHYILGPFGPDTDLRRFGLALAEQGGKRAKKRAVIAVARKLAVLLHRLWVSGERYQPLRLAGSETLAA

SEQ ID NO: 342033 - protein, 339 aa, unidentified
MNATTFGLDLAKRVMQVHWVETGTGEICRRQLKRGQVLEFFARRAPAVIAMEACGSAHYWGRKLTALGHQVRLIAAQFVRPFVKTNKTDAADAQAIWEAAQRPGMRWVALKSEGQQAVLMLHRMRRQLVEMRTMQVNQLRGLLYEFGAELPPGRQAGLARIPDELAKLESVLPAMVIDTVREQLARVQGLDKDVAEIERRLAAWKKDDVASQRLLDIPGVGLLTATAAVATIGEARAFKSGREFAAFVGLVPRQSGTGGRVKLLGISKRGDVYLRTLLIHGARSVITHGKQHDAWLTRLLARRPFNAAVVALANKMARTIWALLAHERTYRKDYAAQAA

SEQ ID NO: 342034 - protein, 344 aa, unidentified
MNYHTALDVSLRSVSICIIDEDGVIRFEDKVVSEVEEIVACLKRFSPEIRSVGFEAGTLTQYLSYGLQAAGYEVICMEARQVSAALSAMRNKTDKNDARGIAQILRSGWYSRVYVKSMKSHLIRVLLTSRRTVLEKCVDIENETRGLIRLLGIKLPGTVSHGAFDELVRPMVQTDAALATALIPQLDARLALYATYLKLDSQVTAMARKDAICQRLMTVPGVGPITALTFKAGVDDPTRFKHSRTVAAHFGLTPRRFQSGEMDNSGHISRAGDADVRSALYVAAHSLVCRSEHWTYLKAWGMRLSKSKGHRKAVIAVARKLAVILHRMWIDNTDFRYNSTEVTT

SEQ ID NO: 342035 - protein, 412 aa, unidentified
MARVIGMDVHRDFAQVVVLDGDQLRHFGRVRLDKDSLTTFADRLMADDEVVLEATGNTFAIVRVLRHKVRRVAVANPLQVRLIAHAKIKTDKIDAAALAQLHASGFLPEIWVPDPETEALRRQFTRRSQLVRHRTRLKNEVHAILNANLIGRCPVTDLFAATGRKWLAEQDRPIADRDAIDRGFREIDRVGNDLAALDRGLAAQSIDDKRLHHLMTITGIDVVSGLGLLATIGDHTRFASSEKLVSYLGLNPSVRQSGSGPARHGRITKRGANQARALLVEAAWAAARVPGPLRSFFMRVMSRRGSQVAAVATARKLAAIIWHVLNRQEDYVFARPSLVARKRRSAELRAGKPRQRGRRGIAAGYYCAETRAEERERLENAERAYERVVSGWRQAGPGSRPTNPSPESNTST

SEQ ID NO: 342036 - protein, 352 aa, unidentified
MDTQSTASIPKLYVGIDIHKRSWKIHCSTDLFAGKSFTMPPVPEQLFQYVNKHFQGYEVSTAYEAGCCGYYAHRSFKSYGWKSLVVNPADIHRKGKERYTKTDKIDAQLISRELKDDRLESIVVPDKKREELRSLFRRRNDLVKDMRRIKSMIKMQLLYFGIKEPEEFDNDHWSHNFRDWLDNLSFEFDTARETLNSRMRSFRFIDQELRQVTNELRAYCRKHYKKDYYLLKSIPGIGGIVAVGILSELGDLRRFNSLKHLAGYVGLAPGMHQSGANSKAMGMNPRSNRLIRSYFVEASWQAIRTDPVMQAYYRTHIGKDVKKIIVKIAHKLLSRTLAVIKTETPYEIGVIE

SEQ ID NO: 342037 - protein, 429 aa, unidentified
MEEVDEVELVVQRVAALDLGKATLEACMRVPHPSKPGRRMQEIRGYATTTATLLEMAIWLRQWGIERVVMESTSDYWKGVYYLLEAEGFDCWLVNAREVKNVPGRAKTDRADAVWLAKVAERGMCRPSLVHPPPIRRLRDLTRYRRALVADRSREMQRVEKLLEDAQIKISSVLSDIHGVSGRAMMEALIAGQRDPRSLARLAKGLARKKTDRLEEALRGFFTDHHATILQMMLDNIDRIGAQIAALDARIAEAIGPFSRQGSRLADIPGVNTVAAAELIAEIGVDMTRFPSPAHLVSWAKFCPQIHQSAGKSRSKARGKGNPWLAGTVGRIVFSASHTDTFLGARYRRLARRRGKPKAIVAVGNSVLTVVYHLLSDADLDFCELGPAHYESRINKHRRARDLATQLQALTGQHIVIRDGKAIITDNAA

SEQ ID NO: 342038 - protein, 352 aa, unidentified
MKVYIGVDFHARQQTVSYLTTEDGELHQCTLDHQKDDLSGFYRQFSGDVVVGMEASGYIEWFEEMLMEMGHEVWVGDSAEIRRRARRRQKNDKRDSLLILDLMVKGEFPKVHRQTTESRQVLKQLRYRHRLVKIRTIAKNNVQALALSAGLLAKRQYTSKWRQELRRLEREPMLGEQAKQLVKIIEEVTIEIKRVEQWLKKQAEADPRVMLLQTHPGIGLLTSLVLVHTLWPVERFRNGRKVTAYLGMDPVEDSSADRIRIGSISKQGSRLARYLVIEAASTAAKSDKGLKCFYRRLMSRQGKPKAKVAVGRKLLVRCFIMLRDQIDYEEFLRRGVEVRSSRLASGPECLNP

SEQ ID NO: 342039 - protein, 394 aa, unidentified
MKLIGIDIGKNKHFFCVMDQQTGEIISQPVSFSNDKEGFDFLVQKIKSYPKDSILIGMEDTGHYHFALLKYLLNLQYTVALINPKTTDFNRKMQGGITKNDKLDTINICDVLDTPERKKQYRITKVNSFDLYEQKQLTRHHHNLKEEENVYKNRLQKCIDIVFPEFNKLFNSKYGIVYMNILKMFGSAENIANTDIRTIRKCFEIEGRGNRISLTPERLKECARSSIGISSSAEVIQIKHLTAQIELIEEQLTEIDKKIEEFSIQNNSPILSIPGISHFSGTSILAELGDISNYSKPSQIIKFAGVAPLHYESSQFNAQHTAITKKGSKYLRKTLYQIILPVIRHNPVFNKYYQLKISQGKGHRCAQGHCVRKLLRIIYHLLKTNQQFDPQLLR

SEQ ID NO: 342040 - protein, 346 aa, unidentified
MLYAGLDLSRKRLDFHLLDADGGTVEVGAAPPDADGLRGLTERIDRHGAPIRAAIESMNGARFVHDRLELAGWQVEIADAQKVKGLAPLACKTDRIDAWVLAELARRELVPAIWLPDPTVRGERERARWRLHLVRHRSSLKQRVHAVLLAHGKPCPLSDLFGVRGRQLLARLDLPEPWQGTLEASLRLIDELDREIGDCERELRRLGADHRYVPLLLTGPGIGWVLAYTIAAELGDINRFPTPRKLTGYTGLCPRVYQSGERDLRGPLAKQGPRYLRWALVEAATHACTHPAYRERYQQTKTRIGKQRGAKVAQIDLARRLSEAIWHMLTREQPFAPKGATDPLAA

SEQ ID NO: 342041 - protein, 354 aa, unidentified
MAREPLGQMIGGIDTHKHEHVAAVIDDLGRIQGVASFPTTRHGYRKLLAWMQSHGELFAVGVEGCGSWGAGIARYLTARNVRVIEVNRPNRQNRRRRGKSDTVDAEAAARAVLSGEATVTPKSGDGPVEALRQLRVARNGAMKSRTAAANQLHSLIDTAPEAMREQLIGLTLRKKIAVIERWRPGTTHTPEAAAKRALVSVARRWRALDLETRELDRHLHTILRSIAAPLLARHGVGYETAGQLLVTAGDNPDRLHSEASYAALCASSPVNASSGKTKRHRLNRGGDRHANSALWTIVLTRMSNHPPTRAYVARRTAEGLSKREIIRCLKRYVAREVFPLVRNIVNEHDTPLAA

SEQ ID NO: 342042 - protein, 457 aa, unidentified
MSQTKRSCKSRGLSPVHPAAAAIDIGAALHVAAVGPDRDKEPVRTFQTFTDDLHRLADWFAQCGIRTVVMESTGVYWIPVFEILEQRGFEVMVVNARDAKHVPGRKTDVSDAQWLQRLHEYGLLRASFRPEAEIAGLRTYLRQRERLLDYAAAHIQHMQKALMQMNLQLHHVVSDITGVTGMTIIRAIVAGERDPNVLASHRDRRCHASVEMVCQALVGNYREEHVFALTQALELYEVYQTKVTACDEQIEAILKRLKKNAPPPASKLLPVRQRTHQPNAPAFDARGALHAILGVDLTQINGLGPYLALKLVGECGTNLAAWPTAKHFTSWLGLAPHNKISGGKVLSSKTRRTSNRAASLLRLAAGTVGRTDTALGAFYRRLSARVGKAKAITATARKIAVLFYNTLRHGMAYADPGATYYEDRYRQRVLNNLQRRAKSLGFVLREAGLDTARADVS

SEQ ID NO: 342043 - protein, 383 aa, unidentified
MKKHTTAKKSQKVLTKTDKNWIRRMAARQRLTIGLDLGDRTSRYCILDETGAIVSENSLPTTKGGFDSLFGKMPCSRVAMEVGTHSSWVSRHLAAVGHEVIVANAHEVQLITKSVRKNDRVDARKLARLARIDPELLSPIRHRGEQAQADLAIIRARAEVVECRTGLINSARGSVKPLGERLKACDADQVKEALADGLSQAAQQIIRPMLKIVEAISEQIAEYDRQIEAMAKRYPETELLTQVYGVGTLIALTFVLTIEDAQRFAHSRDVGCYLGLQPKQRESGDSQPELGISKAGDRLLRSYLVQAAHCMLRKGAPDSDLRAWGIAKAHSGGKRAKRRAIVGMARKLAVLLHRLWAAGEVYDPLYNRKAVQAAAQRKRKVAA

SEQ ID NO: 342044 - protein, 349 aa, unidentified
MKHYIGMDVSLELTAVCVVNCDGEVIAEAKVLSEPDALVAHLHALKADIVRVGLEAGPLSQWLHAGLVSAGFDAVLLETRHVKAALSAMTVKTDRRDARGIAQLLRMGWYRPVHVKTLPAQEARAMLVARKQLIGKLVDIELSIRGLLRNFGLKVGKVTRKEFEGRIRDLAQGQPSLELITDAMLTARNVLLCQFTRLHNAILQIVRKDDVCARLMSIPGVGALTALTFRTAIDDPIRVAKSRDVGLLFGLTPRRYQSGETDVMGRISKAGDRMVRAALYEAANSMLTRSQRMSALKAWALDVARRRGHKRALVALARKLAVVMHRMWLEGTAFQWSRSRAPEMAPETV

SEQ ID NO: 342045 - protein, 403 aa, unidentified
MFYCGIDIAKYKHEATVIDGAGAALLDSISFANSKEGCEKLLALFQRLEISKDDLLIGMEATGHYWLSVYGYLLEQGFEVKVINPIQSEAFRKMYIRQTKNDRKDSFIIAQIMRFGQFSATNLSEEVIVAMRQLSRYRLALVDACGDCKRRVIALLDQVFPEYDTLFSDTFGVTSKEVLSQYPTPEDLLSVSTQKLSGLLEKASHGRFGKEKAEQLKAAAASSFGVSFAKDAFAFQIRQLIEQLEFLEGQITELEEQISSLLKQTGSYITTIPGIGDTLGAIILSEIGDIHRFDAPNKLVAFAGLDVRVTQSGEFTGTRQKISKRGSPYLRRAIWLAASRAAFCDPILSEYYQSLRARGKHHLTAIGAVSRKLCNTIYTILKENRPWQPVPPRDKKVSNHTEQ

SEQ ID NO: 342046 - protein, 432 aa, unidentified
MSQFLNDFVVGIDVSSEFSIVAMLAPTGELIRKPFRIDHNPVGFRKLLDILKKEEERLKRKPIYFVESTGIFHLPLFFFLKSNDLRGFVLNPLCVHSTKNFDLRKVKNDNKDSEAIARLAKYQDVKVSMMPEPQILVLRMMTREYYAVSDMLTEMKNRLCTDLYLLFPGFLNVFSGPFGKTALAVLKSYPSPRAIRDADTDVLTLLISKTSRKSSEWASNKVALLRDCAQLASSMPSEFSLLDTKIKFHIDGIEHMQASLNGIEAQVHTMIKSSQFPATARRNVELLDEIPGVGFFTAATLIAEIGDFSLFNSPKALTAFFGLDPSVNQSGKFNGDRNKISKRGTRIGRRVLFTVAMASIRRTRNGKEINPVLRDFYASKCVSKKKKVALVAVMHKLLHYIFAVLRDQKPFEFRKPEDHQSWRKTKLQRAVA

SEQ ID NO: 342047 - protein, 424 aa, unidentified
MNNTQNKKIAQVSDGTLVIGVDVGSNTHYARAIMARGYEVSKKPFDFENTRDGFDRFVSWANHLAAVYQLKKIFVAIEPTGHYWFNLADYLKAYDVTLVMVAPQHVKHSKEMDDNTQMKNDQKDPLVIARLVAEGRYMIPYIPEDVYAELRSAFNRRCDLVEALTRNTNRMIRWFDMYFPEYRTVYGKGDAISGLLILKRAPLPSDILKLGVDGIRRIWREAKLRGVGINRARKLVAAAESSIGLKGGEAIRQELWQHMEAHELFKKQLGDIMQMIDGLIAKIPGADRLLKVPGAGIVTVAGFLSEVGDISRFTDPKQIQKLAGLAVVENSSGKRKGKPGISRRGRSRLRWVLFQLAMTTVKSNKEMKAYHLYYTTRKNDPLKKMQSLMAIAGKMTRIFYGILKNGTEYDPAIVMKDFKKEVAV

SEQ ID NO: 342048 - protein, 392 aa, unidentified
MFYVGIDIAKQNHEASVINIEGNLLCESLSFSNTEQGCQKLTKMLERFGATKENTVIGMEATGHYWLSVYSYLLNLRYNLKVINPIQSEAFRKMYIRQTKNDSIDSFVIAQIMRFGQFSSTTLSDENIIALKQLSRYRLSLVDECSDWKRKVIALLDQVFPEYASLFSDTFGVTSKEILLKYPTPEDMLAVSTKKLTSLLEKSSRGRFKTEKANEIQDSAKNSFGVKFAKDAFAFQIKQMIAQIIFIEVQLDELEKEISKLLKETNQVITTIIGIGEVLGGIIVGEIGDISRFDSAPKLVAFAGLDVTVSQSGQFLGTQNKISKRGSPYLRRAIWTAATRAAFADPALSIYYQSLRARGKHHLTAIGAVARKMCNIIFAVLRDNKPYTPAIS

SEQ ID NO: 342049 - protein, 419 aa, unidentified
MSFKILKFNCCGLDVHKTWIYACVGITDSNNRTEYKQARFSSFTNGLNELCDWLAKYNCNDVCMESTGKYWIPVFNILEQHHIWVTLSHPKYTKPLKGNKTDRKDAKWICDLYMCGMVKPSFIPPADIRELRDLVRYRFKLTCMITGEKNRAHNCLTVSNLKLDDVFSDIFGKSSRSITEQILQHPGETFDVSPFVDGRCKTPIEEIQAAVDGAISKEQAVKLRQCLNHIDELEMHKAEIEREIFRLSDKYESVLNLIRTVPGFDKNPLTAIQVLSEIGGDMSVFPTAKNLVSWAGCCPRNDQSNQKIKSTRISRAGSYFKPVLVQVANALSKSKKHPEFLTRYRRIKARRGHKKAIIAICRMILTAIWHILTDLKPYTSEGFLESRPVNKSKVLTTSQALNLMKQRGYIIKDDVVAVT

SEQ ID NO: 342050 - protein, 345 aa, unidentified
MSQIIRIGMDTSKYIFQLHGVDASEQVVLRKRLSRKAMLEFFAKLPPTVVVIEACGAAHHLARELGRLGHTVKLIAPQLVKPYVPRNKNDGRDAEGLCEAASRPRMRYVPVKTADQQAALMLLGVREQLVARRTQLSNTIRSHAAEFGLITAKGLDKLAAFLAAISRDEGVPVLARELFAMLARQYEQVQVELKAVEAKLLAWHRADATSRRLAQIPGIGPVTAAALVMKAPDPHAFRSGRLFAAWLGLTPKDHSTAGKTRLGKITRAGDERLRQLLVVGATSVVKMAKTKDRGPGWLIELLKRKTPKLAAVALANKMARIAWKLMTTGESYDRARIDTQKAVAT

SEQ ID NO: 342051 - protein, 340 aa, unidentified
MSEITRISIDTSKSVFTLHGVNAAGGAVLRRNLRRQEVVPFFEKLPPVEVAMEACGGSHHWARALQAMGHRVRLIPAQYVKPFVKRAKNDRNDAEAISEAAARPGMQTVAVKSAEMQAQAMLLSVQELLVRQRTQLVNALRGHAAELGLVAPVGDKGFAALRAEVAKNATLPAAAAEALRMLGSEIDRVEARLAQIAARMMAQHKASADSRRLAAIPGVGLVSALNFSLRVDATEFKSGRHFAAWLGLVPRECSTAGKQRMGGISRAGNERLRQLLVLGATAVVQHTKPGRPGVSAWLLKLLERKPRKVAAVALANKMARVIWAMLTSGQKYRPATLAAA

SEQ ID NO: 342052 - protein, 368 aa, unidentified
MKQQTSAATETKIKGRNIIDFTGKTIYVGIDVHEKDYQVAKVFDGICLGNHRMAASHQMLIDHLNSRYPGATFKCVYESCAWGFTLQRALNSAGIECIVVHAADVSSSDKEKKRKTDKVDALKLARNLASGDLTGIHVPDEDLQKERNLIRFRKKLVGDLNRSKNRLKSLLKYQGIKIPEHLEKKNNWSYNFMNWVEQEANKDVLLKDTLLLMLEEIKFLRQLLLKTERALRKLMKERHNEKATLLMTAPGIGRTIAMQFVLEVGDIKRFHSFDALNDLIGFCPDTDSSGDMQRDRGITSRRHKQLRSALIEAAWTAIRIDPALMDAYQKLTKRMQGKYAIIRIARKLLRRMRTMLLTGQPYQIGVAA

SEQ ID NO: 342053 - protein, 345 aa, unidentified
MKKSNLFAIDIAKNVFQVAHLVGKKVKSNRAMSRNRLKTLLAESEPSRVAMESCGSASYWARLAQSYGHDVTLLSPRFVKAFRVGQKTDANDALAIATALDAPSARPCMVLSEELQALQALDRIRTILEKTKRQLANQIRGLLLEFGIVIEQGEAAFHRRIPEILEDVDEQLPPLLRAGIAHSYETYEALHEQKEARDVELKKYVQANADCRRLMALEGVGHISALGLLVRLRGGDYDSGRNAAACIGLTPVQHSSGEKVRMGRIAKQQGSTLRSCLFLGARSVVCNLKRREPTSEKERWLKQLIERRGIKCAAIALANKTVRTAAAMLRNGNDYQPQPLAANAA

SEQ ID NO: 342054 - protein, 343 aa, unidentified
MVVIGVDAHKRTHTLVAVDELGRMLGERTVAATSDGHLQAVQWAARWPGARFALEDCRHLTRRLEGDLLRAGFAVVRVHTRLMAAARRGGRQRGKSDPIDALAVAHAALREPDLPVACLDGPARTVKLLSDHRQDLVAERTRLCNRLRWHLHELDPGLDVPSRGLRRYHVLDGLAARLAVMDGVVARIAAGLVARCRELTGQVNALERELGTLVRRLAPALLAIPGCGVLSAAVIIGETATASRFRSRDAYARFTGTAPIPVWSGNTVRVRLNRGGNRAVNCALHMIAVTQARGIGPGKDYIAKQLAAGKTTTEALRLLRRQLSDTVFRALLADEHRQAHRTA

SEQ ID NO: 342055 - protein, 404 aa, unidentified
MRVNVGVDLHKTQFTVCVKGLGEDRFAVYPTTKEGYEAFLERAAIWKECGMEVKAAVESTGNTRHFKNRLEEAGIGVTVINTLRFKVVNESVKKTDKHDAGTIAEFLEKDMLPQSHLCGRKSEQMRRLLKARATLVRAQVVMKNQIHALLTAEGFEDVKGALQSKRRRKRTLDTLKQCENGLAAQTLMEIIDQLDENVNLAEKELRELAKDDKAVELLMGIPGCGEVCAWTIMAYTDDIRRFASAKKYASYAGLAPWVQNSNETVHHGKITKRGPEQLRTALVQVVMGMRRMKEKTLRWRLMERHETLKRNKGSGKAIIATARKIAVIIWNMLTEEADFEVGKMTDRNLAETSESMKKSVRTNEEIQVKEVTRNTGNAKQIVNRNEKKVIKKTGVARKRNEKAG

SEQ ID NO: 342056 - protein, 406 aa, unidentified
MRSIALDVHRDFCEVAIKDGTEVRSAGRIKTSAEELELFAQSLAPDDQVALEASGPALQIKRLIEPHVGRVVIANTRKLRAIAEAKVKTDKVDARTLCELLAAGFLPEVFGPDEQTRALRRRLARRAALVRQRTRAKNELHAVLARNLKGRPPMTDVFGVRGRAWLEALPLPADERQTVAGCLRQVDFLDREVGLVERELAKTALASAEIRRLMTVPGVNLVSAATFWATVGDVGRFATPRKLVSYVGLDPRVRQSGESPARHGRISKQGSPAARHMLCEAAWIVVRTPGPLRAFYQRVRARRGAQIALVATARKLCVLFWQLLTKEEDYAFGRPSLTRHKLRRLELIAGDPPRRGRRSGSAASKREQRHERELSERFELAYRRLTDDWQPKPKRSGAGATRGRAS

SEQ ID NO: 342057 - protein, 416 aa, unidentified
MNAVGIDVSSRKSTVAVLRPLGEVVCLPFDVTHDIAGLASLAEKLKAIDGETRVVMEHTGRYYEAVAKALHEAGLFVCAVNPLLIKEYGANSLRRVKTDKADAIKIARYALDNWADLRDFTPMDAIRYDLKTLNRQFQLASKQRTASANNLIALLEQSFPGIRKCFDSPVRSDGTQKWVDFAHSFWHVDCVRKQPFAAFCERYRKWCKRHAYLFKLSNAEEVYALAKRAVVLTPKSKVVKVLVQEAANQLISISRSVEVYRAEMDRLAAMLPEYPVVMAMYGVGKSYGPQLMAEIGDVRRFERKQALVAFAGIDPMPNQSGDKNVRSNKSSKRGSPYLRKTLFNVIRTYLQCAPQDEPVFQFLNRKRAEGKPFYVYMLAAANKFLRRYYAKLRDYFASLDTLQPVAPIPTILKATL

SEQ ID NO: 342058 - protein, 340 aa, unidentified
MQITTIGLDLAKNVFQVHGVNRHGKVELRKQLKREQVAAFFANLPPCLIGMEACSGAHHWARKLQALGHTVRLMAPQFVKPYVKSNKNDVADAEAICEAVARPSMRFVPVKNIEQQAVLSLHRVRQGFVKARTAQANQIRGLLGEYGLIVPQGISYIAQRVPALIEDASIELPGSFRLLIDRLLEHLKLLHRQVEEIEVQIKAWHRASDASRRLEKVPGIGPLTATAMVASVGDAKNFDNGRQFAAWLGVVPRQHSSGGKPTLLGMSKRGDAYLRTMLIHGARSVIYRATQRADAESWLVKLTTRRNKNIAAVALANMTARTIWALLAHDREFRADYAPA

SEQ ID NO: 342059 - protein, 320 aa, unidentified
MKTSDNVSVTVGIDVSKLNLDLHVSSGLYDSFRNDGSGFSDIKKLLSKFTVSLILLESTGGYENGIVCYLQRLGYDVVVVNPRFARDFARSLGRLAKTDKVDAELLSQFATVINSRVDRARFVRPLTDETRRHLADMVSRRRQLVDLITVERQRKSVSSQYASESIDAVISYLRSQLERVDADISAHVSLYYSDLSDLLTSFKGVGSATVGVLLGEVPELGKLNRRQISALIGVAPFNRDSGQMRGRRRISGGRSLVRNSLYMPTLSAIRFNPVIRDFYERLLKSGKSRKVAQVACMRRMVCILNAMLRDGSRFEPVMGN

SEQ ID NO: 342060 - protein, 345 aa, unidentified
MKIVGCDLHTRYQQIAMLDEETGELVERRLEHGNGEAKEFYTHLAGPVRVGIEATGHTRWFEQLLAELGHELWMGDAARIRAAEVRKQKTDARDAALLLDLLLSGRFPRIWRPAREERDLRHLLWHRQKLVWMRNAVGNQLHALAMGEGLCRKKQLFTKKGRCELEALKLDKWAGRQRQELLRLLDQLDASLAQFNQAVNEQAAANGDAVRLMTHPGVGPVTSLAFVLIVGPAARFERSKQLVSYLGLNPCEHSSGGKQKLGAISKQGNSMLRGLLVEAGHTAARMDPELRQDYQRLRLRRGGSVAKVAIARKLAVRMYWMLRRQVNYTQLVRTQGSSRATLVQQ

SEQ ID NO: 342061 - protein, 337 aa, unidentified
MEYFAGLDVSMEETHICVLDREGVLIREGKTATSPKAISDFLAVGPECKGVVFETGRMAPMLYHGLVELGISVQCIESRQAYQALKSLAGHKTDRNDARGLAHLARTGFYKPTHVKSLSAHAVRSLIAARKKLVGQRVTIDNQIRGLVVVFGVRLPRALSPAFKDAALAVSDGVPGLHAALCGLFAAREAILTAVAAIDGDIKKMTRRSKVCQRLMTVPGVGPITALAFAAAIDDPHRFKKSRDVGAYLGLVPQRHQSGEIDYTGSISKRGDVKVRTLLYEAANVMLTRYAAPLKLKSWALAIAARSTMRKARVALARRLAIILHAIMRDQTNFKAA

SEQ ID NO: 342062 - protein, 346 aa, unidentified
MNNSVVAFAPCGIEVSQLTLVVALRAHDHDEALREFPNTSEGHQAVLRFFERAAGPVRVALESTGLYGLDLALCLHQARVAVMVANPRAVRHFATALMQRSKNDQLDAAVLREFAARMPFQSWRPPSAVALKLVAVARRLEALTDMMAAEKNRRHAASLSEALPAIIRRDLQRSIQTQQRAIDRLTRAAQEFILADLELARRYELLLSIPGFGATSTVHILAELTLLPAGMDVRQWVAYAGLDPHEYTSGTSVHKKVRISKAGNRHLRRALYMPALVAVQHEPHLRAYYEHLQARGKTKMQALVATMRKLLHAIFGMFKHDQLFDGTKTCAFALVSTPEPVPQEVV

SEQ ID NO: 342063 - protein, 376 aa, unidentified
MLYVGIDVAKNKHDVTALNVPGKTVLKPLTFSNNKAGFELLDLSLRQLNQDCLIALENTGHYAFNLLNFLHEQGYKVYTYNPLLIKEFAKSLSLRKTKTDKKDAHGIALKLLSDPNREQFQHDNRQVELKILARHIHRLKKKQSDWKVQYTRCLDIIFPELDKIVGKHSEYTYQLLTRYPNPQKRIEAGFDKLIEIKRLTASKIQDILSVAPRSIGTTSPAREFEIIEIIKHYKRLIDKAETCVNDLMAEFNSVITTVTGIGGRLGAVILAEIRNIHAFDNPAQLQAFAGLDSSIYQSGQIDLAGRMIKRGSPHLRWALIQAAKACARFSPAFKAYLKTKLEQGKHYNVAIIHLAKKLIRTLFYILKKSCHLTNKK

SEQ ID NO: 342064 - protein, 485 aa, unidentified
MKEATLIRSVGIDLSRTGSHQVRCLDEQAKPCDSFSFDSTLEGLEKFEKRVFSNSDTPTIIFEPTGLAWIPMAVYLRARHPECQMVKARLQKVAALRRYLRSYTKSDRVDGVTLAKMPFIDAEQLDEAYLPPAEYHSLQRLTRQRERLMKSITVRKNRIGSIVNGYLPGLRKAFSDEWSDRARLFYRQRLNPFTGVRDGKSALDTFLLSVKAKGAQTESHRVYQACQKLAEFYEKSKAAGMINEDFFDDLQDEIACELRLMETEEAEVERVSVRIEELYGHLHPSDYLRSIPGIGVRTAQVFLAIIGDPHRFRSQSAFANWTGVVPGARQSAGTEGKGLRMTKAGPSMMKRALFQAGDIARRYDPQLAHLYYREMVHHGKTHLQAMGAVMSHLGARIMAVLREGRPYELRDSQGKLLTKKEAMELIRSAYKVPEETRQARRRRKPNEGRLTSRRTREAAKAPKSGPIIPPPKTVYCGEELQSVAN

SEQ ID NO: 342065 - protein, 387 aa, unidentified
MPRPDNSRRSLTALEQESTLIAVVELSRSSWLVAGLVPGLGRHPLKKLEPDEEALLRLLQRWRDEAAGAGRAVTRVAVAFEAGRDGFWLARWLRARDVEAHVIHPSSVPVPREHRRAKTDRLDTELLKRAFLGWLRGEPDHCSMAAVPTLEEEDARRPNREREGLVGERTRIVNRMKSHLARLGIRGFKPTLRKAPERLGALRTPEGAPLPPNTAAELRRDMARLRVVAEQIKEIEAARLEQLEREPGPRPHAMVRLLARVVGIGIETADMLVHEVLSRDLRDRRAVARYAGLTGAPDESGAKRREKGLAKAGNARVRRGMIQLAWRFLLFQKDSALARWYRARTEGARGGMRKTLIVALARKLLIALWRLVTTGETPEGLVLRPVG

SEQ ID NO: 342066 - protein, 517 aa, unidentified
MKKAQLDPAGEPEVVIANRAEPGPFPQRRQYAMAKHRESTFERLQKGQSLNRHQKRELAERLNSADPGFEVVNRHAAGIDIGNESHYVAVPVGRDAQPVREFGSWTADLERMAQWLKACGIESVVMQSTGVYWMAVYEILQSHGFQVHLVDARGSKNLPGRKSDVQECQWLLRLHTYGLLRSCFLPPESIRPLRTAWRLRDQHVKEAGRCVQHMQRALTEMNVQLHNAISDLSGVTGQAIVRALLAGERDPVRLAALRDRRIQASSEELVHSLRGNWKEEALFELQQAVEAYDFYGQQIAQCDGRLQQYLAALPSRESVPQPPADAAPGSRPARKRRLPSKLVKRKGNEPPFDIESEQRRILGVDATTIDGIEVMTVQTVLAEVGPDLSAWKTERHWSSWLNLAPKRDVSGGRVIRHTREHRTNRVGNAFRMGAQSLLRSHSYLGARFRYLRAKLGAIKAVKAMARVLACLFYRLLTQGQTWVDRGTAEFELRRQQREFAALRRKAQDFGMKLVPTA

SEQ ID NO: 342067 - protein, 354 aa, unidentified
MKGAFENSRVIVQRKEVFIGVDVHKVSWHVTARAGGEEVFNGGIPGQYHPLRKLLDRFEACQIKVAYEAGPCGFWLHDKLVEDGIEVTVVPPSLIPVESGNKVKTDKRDSRKLARLLQSGLLKKVYVLTEEDRIDRELVRTRRQVLEHRNDVARQIKSKLLFHGITSPFSSKTWSQGYLRWLKGLTFEREVLRISFDVLIELYDYLTTELVKLRKRIMELSQSDKYRDKVKLLKGVPGIGTLIAMEILVELADIERFARADELASYMGLTPSEFSTGEYVHQGRITRCGNKRVRTCLVEASWILIQKDPWMRSKYDRLKGIKGGKRAIIAIARNLIIRIRRILLNNEPYVVGVC

SEQ ID NO: 342068 - protein, 504 aa, unidentified
MRRVGIDIALRAAHKAAVYEDGERLGRPFSVAQTKEGVDELVRRATDGTSEPVEFVMEPTGLAWLPLAAELSRRGHRVYLPKPAKTHALRKFLAQHTKTDAIDACTAALVRHVDQRATELRVPSAAQTTLRLMVKQRSRLVVDAAKEKSRIFTWVLLANPHVGRSLGQDPTSKLANAFLRERLDPLDVLAHGKPALRRFVEKHARGAVKDQQLEMLWQACERACALFDALRLGGKLPFDYVELQLLVDQALDHIAFLETQIAKLDTRIAATYRQLDPTRLLEREVPGFGATIASAVEAFAGDVERFGSVKRYAAFFGLVPRTKQTGMAGEKPRQALTKGGQNLLKKYMFLAAETARRHDPELAATYERALARGKHHYSAVIIVAHKLVRRVYALLKARAAGAADIRYQMRRPDGTAISPEQARAVIAELFPTKAAKDARKRAPQTARQMGTLSQDTGSSEDAAKAVVAVVPTPSLPDLDHARKILAISPPANPSPQAKNLLDRT

SEQ ID NO: 342069 - protein, 310 aa, unidentified
MSSAVVGLDVSKAHIDVAVLPADRRWRVANDEAGHTALATALAAVQPGCIVVEATGGYETAVVTALALVPLPVAVVNPRHVRDFAKALGRLAKTDAIDAWVLARFGEAVAPLPRPLDDAATADLTALVQRRRQLVEMLVAEKNRRGLARAAVRRGLDAHIAWLERQVAAAEADIATRIRQSPVWRSREQLLRSVPGVGPATASLLLTSLPELGTLSHRQLAALVGVAPFNCDSGRHAGLRVIWGGRADVRAGLYMAALAGIRCNPVLRTFYRRLRAAGKRAKVAHVAVMHKLLTILNAILKHERPWTLPT

SEQ ID NO: 342070 - protein, 350 aa, unidentified
MSMLADRAEYVIGVDTHRDSHTVAVCTPAGAVIWETTVAADVRGYERLWRFALERATGRRVWAIEGTGSFGAGLTSFLLEQGEWVVEVDRPARPARRDGAKSDRLDAARAAREALTRQHLAQPRRRGDREALRVLLATRQGAILARTQAVGQLKGLIINAPEQLRQQLRGLTTNEQLRRCARLRTSPSHSPEHRATIIALRSTARRALTLTAEAAQLESELDQLVQSLAPTLLAEPGVGVITAAQLLSAWSHPGRFRSEAAFASLAGTAPIPASSGKTIRHRLNRGGDRQLNRALHTIAISRLAHHPETKRYAARRSAEGKTPREIRRCLKRHLARRLYRLLETSTTITT

SEQ ID NO: 342071 - protein, 337 aa, unidentified
MEQIIRIGLDTSKQVFQLHGVNASEQPVLRLRLRRIELVRYFESHPPVQIGIEACGAAHHWARVLRSFGHEVRLLPPQYVKPYVKRGKNDAADAEAICEAMSRPTMRFVPVKTAENQAALMLHGARELLIKQRTMLINAIRGYAAEFGLTAAAGVARIGTLMDTISANEKVPELARQIFAGLAQQLRTLEAQIRALEKRLMAWHRDNELSRRLATIPGIGPITATALTMKVPEPNMHRSSRHFAAWVGLTPKDHSTAGRQRLGIITRAGDETLRSLLVNGAMAVIQKAKPGRASPWLLALLARKPKKLAAVALANKMARTAWVVMTRGEVYRRPVAA

SEQ ID NO: 342072 - protein, 371 aa, unidentified
MQQFIGIDLHTNKFTCSYRDETTPADQKKGKRTETFELTAPGLADFYRTLTPDTHVLVEATTPTFAFVRLVRPLVKEIIVANTYELKQISLARVNTDKIDANILSRIIKMQVMSGEQAVSPVAVPPGEIQELRGLFQTYRLYRKQTTQMKNRIHSLLKEKLYGFTQEEIFDKRSREKIRSLESGTALSFQINDLLELLDVLEAHLESVKDEIQFRAEPYMKEIRILTSMKGVSVFIAAAVVADIISVDRFKNSKMFTSYLRSAPRVSNSNTSVSIRGTNKKGRKLAATLLTQSLRHVLAGSPKLNRWYTRLAEYKKAGLVRTGLRRKVLAEMYQMLKKGEYHYGRDPLKHEAKLRLYKKFLDKRKILLESA

SEQ ID NO: 342073 - protein, 457 aa, unidentified
MNKKNQKAPSIEGFDMINPDAAGIDIGSKIHYVCVPKERDEVRIKSFGCFTEDINKMASWLKKCRVRSVAMESTGVYWIPVYQILEQEGFEVNLINAQHVKGVPGRKKTDVEDCSWLQKLHSYGLLKASFRPNDQICVLRSYIRHRARLIENASTHVLRMQKALTEMNMQLHNVISDLTGVTGTAIITAILAGERDPVELAKLRNEGIKSSEDVIAKSLQGNYREEQLFILRQEFESYQFYQNQIQALDKVIETCYQTFGKQENREPLKTKKKRKPKHTPPFDLRERLYVLTGVDFTAIPGLNELTVQTILSEIGTDMSKWDTEKHFTSWLGLSPTNKISGAKVLSSRTRKIKNSAANAFRTAALAAGKTQTAMGAFMRRIKSKAGAPKAITATARKIACLFYRLLKFGKDYVEQGIESYEKKYEANLVGKLEKLAKRLGYDLVEKPEKQLAGAIVS

SEQ ID NO: 342074 - protein, 442 aa, unidentified
MLVVAMPTSPSYWVEEERENAMAKVIIGVDPHKLSATIEVVDRRERLLGSGRFSTDQAGYTAMRTFAKAWPERVWAVEGSNGAGRPLAQRLLEAGEHVVDVPAKLAARVRLFDTGHNRKTDARDAHSIAVVAVRTRTLRVLAADGELEGLRMLCDRREELTRLRVQTVNRLQRLLAELIPGQGQKDLTALQAKAILATVRPRDIAGKTRRRIAVEELADLVAVEAKMKKATAELKTIVLARGSRLMDIHGVGPVVAARILADVGDITRFADRNRFASWTGTAPLDASSGEQNRHRLSRAGNRRMNHMLHIAAVTQIRLDTEGRAYYSRKRAAGKKPLEAMRCLKRRLSDVVYRQLVADAERAAMTASSGEAGTGPGGHCGATQESSAVDLPPHIDTSDQPLPGPAHPTLPATKPHANPCAASAPRRSRRRVGAHSAAPKPTS

SEQ ID NO: 342075 - protein, 343 aa, unidentified
MQTITTIGLDIAKSVFQVHGVADAGQVVIRRQLKRRSVLAFFQKLPPCLVGIEACASAHHWSRELQALGHKVRLIPPAYVKPYVKRQKNDAADAEAICEAVTRANMRFVPTKTAEQQSGLVLHRTRHLFIRQQTAVINAIRAHLAEFGIVAPVGRHGVEELLNVLADPNDKRVPEIARACLSALGAQLRRIKEQVLEFDQLIRAWHRSGEMSMRLDEAPGVGPVLATAVVATVADPKSFRSGRNFSAWIGIVPKQHSSGGKNRLGNISKQGDRYLRGLFVAGALAVIRYAKIHGTKHRPWLTALLARRPTKVAAIALANKLARMVWAMMVKGERYKEPVALAA

SEQ ID NO: 342076 - protein, 377 aa, unidentified
MSNVRFIGLDVHAETIAVAAAEPAGEVRSLGVIPNRIESIRKLVKKLGPVEQLRVCYEAGPTGYVVYWQLTALGVTCEVVAPTLVPVKAGDRVKTDRRDALKLARSYRAGDLTPVWVPDAPHEALRDLVRAREAAKKDQLRARHRLGKFLLRHGRRPPTAMQAWTQAHLTWVKSAVRFDQAAQEATLLDYIHEVDHVAARIGRLEAAIDTAVQAAPARMRAVIDALQALRGIALVTAVTIVAEVGHLSRFAKPRQLMGYSGAVASEHSSGERTRRGGITKAGNAHLRRVIVEAAWAYRHRPAVGAALRKRQGPASAEVKEIAWKAQHRLHARYRALSGRGKCKQQVITAIGRELLGFIWAIGVHVESRTADGHPIAA

SEQ ID NO: 342077 - protein, 312 aa, unidentified
MNTEIFVGVDISKEHLDVAFGPDQAPQRFPYTPEGVNRLLAHLQALSPTLIVLEATGGLEADLMDALSRAGLPFSRVNPRRVRDFARASGVLAKTDGLDARILAEFGQKMRPPVTVLPDEHTRHLEILVARRRQLVEMRAIEEHHWRTAPETARPYIRKHLEWLDAEIATLEREIADWVNQTPLAETVEILDSAPGVALVGAATLVAEVPEIGRLNRKKIAALVGVAPYNRDSGTQRRQRRVTGGRQAAREVLYMLTIAGIRCNPVLRTFYQRLRAAGKPPKVAIVACMRKLLTILNAMVRDRRKWCLELAG

SEQ ID NO: 342078 - protein, 408 aa, unidentified
MEILHPRCAGLDVHKDTVVAAVRCVSEPAHRETRTFGTTTKELLELSDWLSSHDCTHVAMEATGIYWKPIWHLLEGQFELVLANAQHIRNVPGRKTDVNDAMWIAELLAHGLIRGSFVPPAHVQELRDLTRTRKQLVREMSQHTLRIQKVLEDANIKVASVLSSVVGKSGRAMLEALIAGETAPEKLADLAQGTARKKRAELIEALRGHVTPHHRGMLKLHLQLIDALQSAMDEVDAAVGKALEPIQARAAKLTTMPGISDIASSVIVAEIGTDMSRFPTAGHLVSWARLCPRNDESAGKRRTTRISKGANWLKTTLVTAAWSAVRKKDSYLRAQFLRLKARRGAKKAIIAVAASMLTACYYMLRDDVAYQDLGAEHFDRRDKGKTIGRLVKRLRDLGCEVDLRPAAA

SEQ ID NO: 342079 - protein, 411 aa, unidentified
MRVIYERCAAVDVHKKTAVTTVMITQADGSVQEHVRTFSTMTADLLALDDWLRSHRVEVVAMESTGVFWRPVFNILEEGRTIILVNAQHMKAVPGRKTDVKDSQWLADLLRHGLLKASFIPPKPIRELRDLLRYRKTLVQERAQEINRLQKVLETANVKLAAVATDVLGKSGRAMLEALLGGEQDAEVLAELARGRLRAKLPELRKALDGRLQPHHRILITRILAHIDFLEESLVQRQTEIEQYLVPFEEAMTLVQGVTGIGETAAAGIIAEIGTDMSRFASDKHLASWAGVCPGNKQSGGKRLSGHSTKGNVYLRAILCEVAWAIAHTKDNSLSAFFHRMARRHGKQKAILALAHKVLVIIYHILRTKKPYADLGAEYFAQQDRGRIQRHHIHRLEQLGYTVTLTPKEAA

SEQ ID NO: 342080 - protein, 364 aa, unidentified
MDELTHRGLDVHKDTIAVAVLRSGTTTCDERVIPNTPEAVRKLFARYPDRSVLRTCYEAGPTGYDTQRLISSLGIACDVIAPSLIPRRSGVRVKTDRSDARNLARLHRAGELTAVRVPMPAEEALRDLVRAREDLKNDRRIARQRIRSFLLRYGKRYPSPGARWSFRFEVWMRALRFDEPASQAAFDHLVSAYSVRDAQLAAIDKQIEEATLCDPLADAVARLRAFRGIDTLTAVTLLTETCDFQRFATAGSFMAFTGLVPSEHSSGASRHQGSITKTGNAHVRRVLVEAAWAYRHRPAVRGAHAKRLEGQSPEVAAYSWAAQCRLNSTYRKLAARKGPNKAVVAVARELSGFVWGAMTERMAV

SEQ ID NO: 342081 - protein, 454 aa, unidentified
MRLEDRPVLEPNAAGIDVGAREMFVAVPADRDANPVRVFATFTEDLERLVDWLMECGVTTVAMESTGVYWIPLYDLLEQRGIRPCLANVRHMKNVPGRRTDWHECQWLQFLHSVGLLRAAFRPQEDICAVRTLLRHRAELVQAASQHVQHMHKALTQMNLQLHHVISDITGVTGLAIVDAILDGQREAAELAKLRNSRIKADQETIRKSLVGNWRLEHLFTLRQSRELYRTYQQRIVECDLEIEKLLPGFEPRVNPAEKPLPPDQKQNRAGNKRRKKNGHPNPHFDLRTEAYKLFGVDVTQIPGLEENALPLFSEVGRDMTRWPTAGHFASWLSLCPDNDISGGKILWRGMRNVKNRAGHLFRFAASSLHHSSTPLGNYLRRMKAKLGPSAAITATAHKIAIIFYTMVRNQVEYDGTIWAARDATRVQRLQIKLKRQAKQFGFELVPIEHPPAA

SEQ ID NO: 342082 - protein, 366 aa, unidentified
MQYIAFDSHKRYTWARVERGDRVEIVREDRIEHRRGDIRRFLRRCEPGSPVAVEATGNWYAIVDEIEAAGNVPRLVHPRKAKLLMGAMNKSDKLDARGINQLQRNGTLPTVWIPPAELRDKRDLYRTRMVLSRHRTRLKNRIQASLAKYMLTVEGASDVFGPRAEPELQAHIAQLPPQTRYATERLLETLRGVEAEIKRFEIRMQEAFAETPEVKLARTLPGVGFILGTVIAHEIGDVTRFPRPEQLASYAGTAPRLHSSGGKTRFGGLRRDVNRYLKWALIEAANVVCLHRGHWADRHVARLYARIAERRGHPKAIGAVARHLAEAAYWVLTKREPYRAPAPPAPTERQKVHEKNLNSAVSSTRG

SEQ ID NO: 342083 - protein, 414 aa, unidentified
MDVVHPRCAGVDVSKRDAKVCVRVAGAGRAKARSTVTTWGSVTNQVLALRDHLIGEEVTLVVMEATSDYWKPFYYLLEDGPFEVMLVNARHVKNLPGRKTDVSDAAWLADLGAHGLVRGSFVPPAPIRQLRDLTRARTMITRDRAREIQRLEKLLEDAGIKLSSVASDISGVSSRLMLAALIEGERDPVVLADLAKRRLRSKIPELTEALTGRFGEHHAFLARVHLDLIDQHTSAIDELTARIEEVIEPFRGARDLIVTIPGISTSVADVIIAETGADMTRFPSAGHLASWAGTCPGSNESAGRIKSTHTRPGNPYLKGALGIAAMSAARSKGTYLSARYRRIATRRGPVKAIVAIEHTMLIAIWNMLDTGTLYCDPGDDFYTRLNPDKAKTRALDQLRKMGYDVTLNPIAAAG

SEQ ID NO: 342084 - protein, 323 aa, unidentified
MNSHHMQNINVGVDIGKSQLDIFIRPLDIFLTVANDTKGIRDAINKIKIYKPQRIVVEATGRLEMPFILACSEAKLPFVIANPMHVKRFAGAIGRRAKNDRLDAELIAHYAEAIKPKLTELKPEKIRLMSDLVTRRNQLLTMQTMEKNRHQILSKTLVSTIKPILTALKNQITKIELKIQKLIEECTEYQSKNIILQSMPGIGKIAAASIISNMPELGYITSKQAASLIGVAPMTKESGAYKGKRVIQGGRAQVRTVLYMAMMSAMQCNPVFKATYQRLLGQGKPKKVAIIACVRKMVVILNSMLRDGVMWDENTGKNKLLTP

SEQ ID NO: 342085 - protein, 330 aa, unidentified
MEKTLHFIGADLAKKSIDLVIHGLKSHLKIENNSAGFSQALGWLKANQIPLAQAIVVMEHTGLYSYCFENFLFEKNIQFSKVSSLDIKLSIGVTRGKSDRIDATRIARYGSENALRLTLATPMVKALERLKILSSSRDNLVRVRAGLMNSTEELRNIGTGSADLALGAQLKVITCLNEQILALDQEMECIIKSEEKININYQLIKTIKGIGPVVARNTIIKTHNFERFTNARKFACFCGIAPFEHTSGTSIKGRTRVNHLADKEMKCLLDLAAKSAITCDPELKEYYQRRLEMGKPKMATINIVRNKLVGRIFAVVKRQSPFVVCKKVAA

SEQ ID NO: 342086 - protein, 350 aa, unidentified
MNVNHYIGFDVHKKSVSYCVKTADGQIVEEGKLRATHDVLRQWAGERTEPWRGAMEATLFSGWIYDTLRPFAAELQMGHPALMKAIAASKKKNDKLDARKIADMVRCDLLPVCYVAPAEIRELRRMLRYRNLVVGQATRLKNKMSGLLMEVGAEYNKERLHGKQYFTQLLDTVAEVPDSVKDLLRLSRGAMETFETTQQQLLARLRKDPRLARRVMLLESIRGVGEVTALTWALEVGDAHRFSSVAHAVSYCGLTSALVSSADKQQRGPLSKQRNAHLQTVLIEAAKLAPRWNPQLAALHARELARGNRNRATLAVARKLVAYLLAVDKSGQPFEVRNPLVAETEAQEVA

SEQ ID NO: 342087 - protein, 412 aa, unidentified
MEVVHNRCAGLDVHKETVVACVMIRERGKLQKEIRTFRTMTSDLLVLNDWLQAKGVTHVAMESTGVYWKPIFNLLEGNFDVLLINAAHIKTVPGRKTDVKDSEWIADLLAHGLVRGSFIPPQDIRDLRDLTRYRKSLTDERVREVNRLQKILETANIKLSSVATDVMGVSGRAMLAALIAGNTDPEALADLAKGRLRKKLSLLREALQGRFRPHHQFMLEKILSHLDYLDEVIEELSKEIEDHITPFFQEIQLLDTIPGVDQKVAEAIIAEIGVDMSRFPSDRHLASWAGLCPGNNESAGKRKSGKTRKGDRWLKRSLIEASLAVSRSKDTYLSALYHRVARRRGAKKAAVAVAHAITVIAHNMIAKKLPYHEFGADYFDRLNETYIKHSFIKRLESLGYEVTLKPLTPSVA

SEQ ID NO: 342088 - protein, 399 aa, unidentified
MLEQAWAGVDVGKEHHHCVVIDAEGRRLLSRRVANDEAVLLALISDVTGLAGQVRWAVDISTGEAALLLALLAAHDQQVSYLSGHQVNRAAGGYRGSGKTDAKDAAIIADQARMRRDLAPIRVSEEVIVELRMLVARRRDLQSDRVRAVNRLHETLLTISPALEKALDLTNQGPLILLTGYQTPAAIGQLGVTELREWLRARKVRRAGELATRAVAAANAQQIALPGEALAAHLAVQLAEGVIALDEQIKHTDKLIEGRFHRHHAAPVILSMPGIGILLGAEFLAAIGGDTAAFATPDRLAGYAGLAPAPRDSGRISGNLYRPKRYNRQLQRVFYTSALISIRCCPESRTFYDRKRAEGKRHNQAVLALARRRVNVLWALLRDHRPYQASPSVSTAAAA

SEQ ID NO: 342089 - protein, 346 aa, unidentified
MEHIGIDLGAKHSHIVVMTATGEVALRRRVPTRELPRWLEQRESSRVVMEACTQSPAIARVALVSGHQTVVVPGSLVRALGVGARGIKTDDRDAEVLARASVRNQELPSVHLRGEVSRSRRELIAARAALVKTRRSLALSVKSWLRGRLIMLPGKANTVRFCAAVRNVALGEPEGLPVAIDLLLVTFEHLCGQIAKLDEMIAELVDSDPTCIELMQIPGVGPQVSLAFTTHLDDPRRFANADQLASYLALVPGEATTGGKVVRTSTLKAGPLYLKALLVQAAWSLWRTRPDEPMVVWARSIAEKRGKRIAIVALARKLATVMWAMWKHGTSYDPSRTSRSDAGVTH

SEQ ID NO: 342090 - protein, 411 aa, unidentified
MDVFCGIDWAEDHHDIALVDRDGGLLARARIGDNAAGLARLLELLAENGDSPDDPVPVAIETPRGLLVACLRATGRKVYPVNPMATARYRDRHSVAGRKSDHGDALVLANILRTDLHAHRPLPADSELAQAIAVLARAQQDAVWDRITAHNKLRSHLREYYPGFLAAFAAAQGGITRPEARAILAAAPAPADAAKLTLAQLRALLRKAGRSRRIDAEAARLRDALRKGQMRQLPLVEQAMGRQSLALLRQLDAACHSADDLEQAATESFNLHPDAGIITSFPGIGPLTGARVLAETGDDRSRFTDAKGLKAYAGAAPVTRASGKTRSVTRRRVKNNRLAQAGYIWAFSALTASPGARAHYDRRRGNGDRHAAAQRNLFGRLLGCLHHCLATGQHYNEKTAFPNQAAGPAAA

SEQ ID NO: 342091 - protein, 340 aa, unidentified
MNATTYGLDVAKRVFQMYWVDAQTGEIVNRRFGRDELIRFLAQRPAGRVALEACGSGHWWARKIKAVGHEVVLLHAKFIRPFVQTNKTDAADARAIWTAVQQPEMRTVAAKTEDQQAMLALHRMRSLLVKFRTMQVNQLRGLLYEFGATFRAGRVAGLAEVRARMAELAEALPGTMVCGLQDQLQRIDALEQDIDRLERQIGTWQNQEAACRAIAEVPGIGKLTATALVATMGDAKTFKSGREFASFLGLVPRQSGTGGKIRLGSISKRGDPYLRTLLIHGARSVLCHAKVPTPWQTGIQARRPANVAAVALAHKMARTAWAILARGQAYQRNYVSVKPA

SEQ ID NO: 342092 - protein, 352 aa, unidentified
MEQFIGCDAHKNFSVFVAVNEKGRAGEAFRVLHDRLLYREFLARLPAHSEIAIEASQNYNWLVDEMERAGHRPKLCNPLEAKRRMGLTNKTDKLDARGLAILLRNGTLPEVWIPPSDLRDQRELLRLRIFLVRLRTRVKNRIHGTLSRHNVHVPGADLFGAGPRRELAGRLGELPQHSREAIDQELATLDFLETQIEAAEERLETIMEVSAEADLLQTLPCVGPILSMVMMLEIGAIARFPTAAHLASYAGLVPRVHSSGGHTRMGQVGANVNRNLKWAFVETANLIVINQRRLAGTHVVRLYQRIKRAKNHQKAAMAVARHLAEAAWWMLTKLEVYREPKGSQKALSSTHG

SEQ ID NO: 342093 - protein, 420 aa, unidentified
MNDSPQWQQYQAFGALDWGSQTHSVIVIDAAGKVMEDFAIEHSALGWKQFRQKLQVYGSIPFAIETSQGAAVEQLLEAGMIVYPLNPNRAQAYRQRKAPSGVKDDRLDAWSFADALRVDGHGWKALQPEQPLTKELRLLCRDEVSLIEQRTALIQQLRQALAEYYPAALEAFEDWTSVSAWMFLQRFPTADSLAQAGRRQWQKFLHSRRLWGSDQGPRRMEIFAHATELAGSEPTVKAKSLLALSLVQMLFAVQKQLELYRQRIEELFARHPDHDLFGSLPGAGSKLAPRLLSEIGDDRQRFEADAQALQCFGGTAPVTIRSGKDRTYWPVHQRQACNKHLRHALHLFAEQSLSRCVWAHIYYQHHRQKNQSHANALRRLAHRWLKIIHKMWLDRSPYNAELHHRNQLQHGSWIFQFQKS

SEQ ID NO: 342094 - protein, 422 aa, unidentified
MAGSSTGFTCENGKVAWVTATDVVWVGIDAGKSSHHAAAVDAAGKRLWSVKVANGQRPIEELIARAAGSGAELRWAVDLVSPAAALLLAILLSSGQKVVYVPGRVVHGMAGVFRGEGKTDAKDARVIADTARMRGDLAELTATGELVVELTRLTSYRADVMADWVRGINRLRDLLTSIFPALEASFDYSTRSALILLTGFSAPAEVRAAGTEGLASYLRENGAWAKGIDAMAATAVRAAQQQTVALPGEATTALLVKKLARQLLDVDREVKDTDKLITSRFRDHPQARIIESLPGMGPILGAQFLVATDGRPLEAFAGPGRLASYAGLVPVPRDSGRVTGNYHRPKRFHRPLRNVFYMMALSSLRAEGPSKVFYQRKRDENKRHVQALLALARRMVDVLWALLRDNRAYSPTPPSQVTAIAA

SEQ ID NO: 342095 - protein, 344 aa, unidentified
MSKVSTIGLDIAKSVFQVHGVDVAGAVVIRKRVSRAKVLEYFGELPPCLVGIEACPSAHHWGRELQALGHMVRLIPPSYVKAYLKRSKNDANDAAAICEAVTRPSMRFVPIKTKEQQTALMLHRTRQLLVRQRTMLSNALRGHLAELGIVSAKGRNGTAELLRIITDGADSRVSPAIRGILDVLARQYGAIGTEIASIDKSIMALHRGCEASRRLAEIPGIGPIGATALVAEIGDWKTFSSGRCLAAWIGLVPKQHTSGGKDRLGSITKQGNRYLRWLLVVGAMAVIRYARKHGTERRPWLGRLMERRPTKVAAVALANKIARMAWAIMVRGERYKEPKLLLAA

SEQ ID NO: 342096 - protein, 345 aa, unidentified
MIEDNVVVGVDAHTDTHDAAALDDRGRLLGTRTFQADPAGYRQLLAWARGFGPVAAVGVESTGSYAAGLVRYLRAKDLCVLEVNQPHAHTRRRRGKSDPIDAEMAARHVLGERAVVIAKDTTGIVESIRQLRVARDGAVKARSAALNALTGVIVSAPDELRHQLTGPKTTRGRASLCARLRPDQARLHEPAHAAKAAPRTTALLAVSTGHAGQLLVTAGQNIGRLASDASFAALCGASPIPVSTGRTDRHRLNYSGDRNTNRALHMIAGWRLRYCQRTRAYAQRRTEEGKTKKEIIRCLKRYIAREVYHALQADLNPDAAHHRRPDPIVSIACGAGPIGRTVRST

SEQ ID NO: 342097 - protein, 404 aa, unidentified
MIFVGDDWAEDHHDVYLMDADGARLASRRLPEGLTGIGALHELIADHVGEPSQVVIGIETDRGLWLQALGVSGYQVFAVNPLAVARYRERHQVSGAKSDAGDAKVLADLVRTDRHNHRSLAGDSPEAEAIKVLARAHQNLIWARTRHTNMLRSALREYYPAALNAFDDLHDRDALAVLSRAPTPAEGTRLSLSKIRSALKHAGRQRNIDARAHEIAVALRTEQLAAPATVTVAFAATTRATVGIIGELNRQITDLETQLATHFETHPDADIYLSLPGLGVILGARVLGEFGDDPNRYTTAKSRKNYAGTSPLTVASGKKCAVLARRVRNRRLYDAIDHWALGAINHSTGARAFYDQHRAAGDLHHQALRALGNRLVGILHGCLRHHTTYNEHTAWAHRQTAQAA

SEQ ID NO: 342098 - protein, 351 aa, unidentified
MEQIIKQAVGIDCAKSELVVCIRYLDSALQPHFKATAAFTNDHAGFDKLNNWVIANKDAQAPLQFIVEATGVYHEKLCCYLTSQKYNISVVLPVRAANFMRTLSVKTINDKVSADALAIMGLEKKLDNWQIPNPQLNLLKQLSRERTELLEDTTSIKNQIHALNSSAFIPQTTLKRLQSRIEMAQAQLKDIEQEMKELINSDTYLKERFENVCSIKGVGLITAIIIVAETDGFNLIRNQRQLVSYAGLDIIKKQSGTSINTPGKISHRGNVHIRRALHFPALAAKRFDSNMQEIYGRLLSKHNVKMKAAVAIQRKLLVLIYTIWKKNEPYNPKYLEQSKETALTELAHGRS

SEQ ID NO: 342099 - protein, 404 aa, unidentified
MAGDDGHQIFLGLDIGKTAHYAVGINRDGQTVYSKPVANDEGALRLLVRWARAHQAVVIVDQPGGTAALLLKLCWDATIGIGYLPGLAMARARDFYAGDSKTDPKDAFVLADIARAHPNRVVWLQETSAARAQLELLSSYDGDLRGDANRLTNRIRALLATYWPALERALGDRLDTIGGTALLARYPSAPQLRHAGARRIVKLLRATHRVHEPEAWAEQLLVAAKAQTVVVAGAETAAELLAELAEQLHRVLDRRQRLEKEIERAFFNLPEASIVKSLPGIGPRLGARILIEIGDIRQFRTSAQLAAYAGLGPTPHQSGTSIRGNRPTRFGNHRLKNAFYLAALSSLQHPPSRVYYDRKREQGKRHTQALLCLARRRVDVLHAMLTTNTHYQAPAPQPNLESAA

SEQ ID NO: 342100 - protein, 345 aa, unidentified
MVVLGADLHKRSHTIVVIDATGRQLAEKTIAATDAGHLELRLWAAQWPERTWGLEDCRHLSRRLDAELVRAGEAVVRVSPKLMAGARRSGREPGKSDPIDALAVARAVLREPDLPVATLDGADRQVRLLVDHREDLVGERTRHEQRLRWFLVELAIAEPAPRSLGRAVVQAALGAALAGRTEPVARFARDLLVRIIELSATIGVLEHEIEVLVRDSAPTLLALPGCGALTAAKIIGEAAGISRFRSKEAFARHNGSAPVPVWSGNVVRHRLNRGGNRQLNLALHRIAITQIRLSGLGKAYLDHRLAAGDSRTEAIRALRRRLSDEVFRRLRADEAAGSAGLAVAA

SEQ ID NO: 342101 - protein, 304 aa, unidentified
MFGIGIDVSKDRLDVAVHEQQFRHFSNSKRGFEALVRWLQKWPAKQVVLEASGGYEQAALDALHEAGLPMVRINPGRARSFAKATGQLAKTDRIDAMVLAQMAHLLKHTRYTPVAPWQRKLAEFSLRRRHLVQMRSSEKQRMRAFSEPVLQVMMNSQLEYLDEQIRVLDKAIAEQLRNQPSWNSLVEMKGVSTVVMTTLACELPELGKLSGKAISALVGVAPMNRESGSWQGHRRITGGRAVVRQALYMAALSACRYEPQLRNFFKSLKAKGKPGKVALVAVMRKMLVILNARKRDAEAMMASA

SEQ ID NO: 342102 - protein, 430 aa, unidentified
MKSNTQNAKIEAITETTLVLGIDVGSETHYARAFDFRGMEYSKKPFKFSNNEAGFMTFKAWILNIKEKHGKDKVVPGMEPTGHYWFNLGKFLQDNEMKPVLVNPHHVKKSKELDDNNPTKNDRKDPKVIAGLVREGRYMIPYLPDGVYADLRTASNMRFQLQAELTRIQNRISRWFNIYFPEYKTVYGQPDAKSGMMILKIAPLPEDILTLGIDGVNQIWRNAKLRAVGKARAKTLIEAAEHSVGSKEGALSARMEIRMLLEDYESRNARLQEVMALIEELVKQIPMAEKLLEIKGVGIKTVSGFLAEVGDISRFDNPKELQKLAGLALVENSSGKHKGKTTISRRGRKRLRYLLFEVAMSLVAKNPEFRELHVYYTTRKRNPLKKMQSLMAVATKLIRVFYAMLTKGVDYDPKKMISDIKRPAVYLQAA

SEQ ID NO: 342103 - protein, 358 aa, unidentified
MSVYLGVDFHARTQTVCWCDTSDGLIHQRTLDHEHDDVRGFYRQFAVPAVVGLEATGYARWFHRLLEALGHRLLVGDAYVIRKCALRRQKNDRRDAELLLDLLLHGDFPAVHIPPIASQAVLRLLRYRQRLVEIQTKLRNGVQALALNHQLRLGPKLWSKQGQQQLLALALDNTDVLQREHSLELLQQIRTRIRAIEKELTSRAEQDARVRLLRTHPGVGLLTSLVVVHTLEPVTRFDRARRVAAYCGLDPCESSSGETVRMGHISKQGNRLLRHLLVEAAQRAVHSKADADLRNFYFRLIARKKNAAVSITAVARKLVLRLRLYRMLRENIDYTEFRRRGREARCARKSASPPSGDC

SEQ ID NO: 342104 - protein, 433 aa, unidentified
MPQLWAGIDAGKTEHHCVVIDADGSKLLSRRFTNRESEILALLGDVAELPGGTDVAWATDLNHGGTGLLQAVLSAHGQPLHYISGRVVHHASGAYRGEAKTDAKDAAVIADLARVRRDVALMRQTDEATAELRLLTARREDLVHDRTRAVNRLRAMLVHYFPSLEAAGFNYAVTRGPLVLLTRYATPAAIRRMGESGLAAWLKGQGCWKSAAIAKTAVDAARQQTTAVVGEAAAARLLARSARDLLRIRDELAEIDAEIAAALEGSEPAELLITIPGFGRRLAADFLAAAGADLTVFETPDRLASFAGLAPVPRDSGKVSGNHHRPRRYDRLLLNACFQAAFIAARTCPVSRAFYERKRAEGKSHKQALIALARRRINVIWAVLRDHTRYDPTGARLPASIPSIPARQIDPVRSPAVVPTVSRSESSLVSASR

SEQ ID NO: 342105 - protein, 317 aa, unidentified
MAKHSIKCAGIDIGKRKLEVALDGCAERLVVDNTADGHRKLADWLREHRVKRVGMEASGGYERAVVAELRRQKFVVVVFQPAQVRAYANFQGQRAKNDKIDAGLIAACTAAVAKVHQPPDPRLGLLADHLTMIDQIAEDVATIKNRLESCRDQRISQVWKEEIVRLKKREKTELKSLVADIRRHGDLAERLDLIDSVDGVGLPTSVAILVRMPEIGRISREQAAALVGLAPYDDDSGDFVGVRHIAGGRERLRRALYTAALPASFRWNAQLIALYKRLIAKGKRHKVALVACARKLLTFVNAVVARGIPWTAEPRTA

SEQ ID NO: 342106 - protein, 338 aa, unidentified
MDKSAECGIDVSAKQLWVVLRRQGACEAERSFANTAAGHKELKRYLVRAAERVRICLESTGLYGLDVALYLQADPRLEVMVANPRAVKDFAKALLQRSKSDPLDAWVLAEYAGRMPFRAWQPPSLAALAVTALTRRIHALTETATREKNRLHALAVTDTTIKILVTELKRSLQWIERSQARLTREARRIIAGEAGLERRFQLLLSLPGVGETSALQLLGELALLPADADVRQWVAYAGLDPCERSSGSSLRKRPRISKVGNRHLRRALYMPALTAACHDQAFAAYYGALQERGKCKMVALVAVMRKLLHATFGMFKHDALFDGSRVFARPAAAIGAAA

SEQ ID NO: 342107 - protein, 438 aa, unidentified
MITVGIDIASKKFDVATFDGKKFKHFVFEQSYDGFNKFLLKVVKHIKDEYMIAMEATGTYHIPLKQFLNKRGIDILVLHPYSLKNFMRAFSHSKTDKIDAKNIAKAVYLLSDYVIKSSEPEDLVLELRNLLRARKSIVKTFTALQVRLKDDLKLYMPELLKHFLDMKSPVLLKLLSRYPTLKSIMKHKRKVINLLASTKKWNKEKALDVINDLKHSIGIEHDTSAIIIKSKVELIKNHMEQIEILEKEIQRISNELLNTLDINEINTVPDNSDSNNNSNNNSDKNNNNNDNDNNKIENKYIQAYKAITSIPGSGELVTPFTIISEVGDITRFKTKKHFVSYIGLDPTVSQSGKYKRNKKISKKGNKHLRHIFTLWAERVLKLMPEYRKKYHDLIKRGKHKKVAEIAIARKLAELVYTLWTNNTVFDYKYFRSRILKNA

SEQ ID NO: 342108 - protein, 320 aa, unidentified
MPQNGRIVGLDVAKSKADGCIRSLQLRLSQPSTPEGRAAMVAWLRTHDVATAVMEASGGYERGWAEALREAGIGVRIVDPKRVRHFAKSAGCLAKNDAIDAAMIAWFAETFPDTSALPHDPDREELDALVTARKALVDLVTQIKNPGEHRQPRPVRRAYAAILRNVTTQLARLEAAIAAKLAATARFTARAEIIESVPGLATQTVAGVIAWLPELGQISNKAAGALLGAAPYDDDSGKRKGERHIKGGRQEIRNLLYMATLGAATKHNPVLKAYYHRLRAKGKPAKVALIACMRKLIVILNTMLARGEKWDPARCQHSPA

SEQ ID NO: 342109 - protein, 408 aa, unidentified
MEILYPCCAGLDVHKDLVVACARAVVGASVRHDTAEFATTTRGLLTLADWLKQHRCTHVAMEATGVYWKQVWHVLEGSFEQLLVNPAHARNVPGRKSDVTDAHWLADLLAHGLIRPSFVPPARIQELRDLTRTRKQLVRQVGRHTQRIQKTLEDANLKLTGVISDLLGTSGRAILKALIAGETDPERLLEHTTGRLEAPRERLLEGLRGVVTDHHRFMLRLHLRQIESLEAGIAQLERQIERLLRPFRERVERLATIPGVSDTVAQVLVAEIGLDMARFPTSGHLVSWAGLCPRMDESAGKRRSTRVRHGAPWLKTTLVTAAWAAASSRDTYLRAQFQRLKTRRGPKKAVVAVAASILTAAYFILRDGVDYRELGTGYFDHRDRARVLRRLSRSIEALGYRVEVHRVA

SEQ ID NO: 342110 - protein, 388 aa, unidentified
MSKPFDLSKSLAVLDQDSTLIVVIELSQSSWLVAARAPGLARDPLKKLPPDPEQLFKLIDRWREESRRAGRVVRRVCVAFEAGRDGFWLARLLRQHDIEVHVIHPTSIPVKRDHRRAKTDRLDTELLMRAFLGWLRGEPDHCNMAAIPTLAEEDAKRPTRERESRVNTRSRIVNRMKGALARLGIRGFNPKLRKAAEKLEELRTGAGEPLPPNTLAELRRDMAQLRFVADQIKQIEKAREARLEKAPREGAHPMVLMLASIKGVGLETAEMLVVEVLSRKLRDRRAVARYGGLTGSPDESGSRSREKGLARAGNARVRRGMIQLAWRFLMFQKESALAKWFEARTANGPSGVRKTMIVALARKLLIDLWRFVEEGIVLAGVELFDSMA

SEQ ID NO: 342111 - protein, 310 aa, unidentified
MEITVGIDVSKARLDVHVHPLGESFAVANDEAGVEALAGQLGQLEGLVSIGLEASGRYERLALANLAAAGLPVIVLNPAQVRNYAAALGQKAKTDPIDARVIALFLAAVQPEPRPLPDAQTAELEALMTRRRQLVGMLVAERARRAAARPGRVRTSLARVVTTLEQELRDLDGDIDTTVRGTPVWRDKEDLLASVPGIGKTIARTLLAELPELGRLNPKQIAALAGLAPFTRQSGKWRGKSFISGGRAAVRAALFMGALVASRFNPTLKAFRDRLVAAGKPKLVAIIATARKLLTILNAIIRDRKPWKPA

SEQ ID NO: 342112 - protein, 425 aa, unidentified
MSITQNEKISQVKEETLVVGVDISSEEHFARVFDWRGKEVAKIFKFCSDKDGFADFAGWMEKVKFQTGKTEILVGAEPTAEYWFTLAEYLKAEKIKFVFVSPMHVKRTKELDDNHPSKTDRKDPKTIAKLVIEGRYLEPYIPEDIYAELRVMNNNRMRVQKELNAIKNRIARWFVIYFPEYRKVFADWGCESSMVLLQKAPLPCDIQRLDAESINQLWREKKLRAVGMKRAKAIYDMAQISVGVTRGENAARFEIKMWLEDYSRKSEQLQSILATLQTLITQIPYVEKLLAIKGIGMLTVASFAAEVGDLRRFRSPKQIQKLAGYAIRENSSGKYKGRSAISKRGRKRLRQALFQVIMPMIRSNAEFRELYRYYTTRGKNPLKGKQAVVALACKLIRIFWVILKTGVDYNSAKLIADIVRERPAA

SEQ ID NO: 342113 - protein, 414 aa, unidentified
MLKIVYPICCGMDVHKSFIVACIASTNEQGVTTYKSKRFSTFTGNLRRCAAWLATNNCKDVCMESTGKYWIPIYNILEPTCNIVLAHPKYVKAIRGKKTDKRDAKWIADIFKHDLVAGSFIPPADIRQLRDLFRYRWKLTSFTTGEKNRAQNCLTVSNFKLDDVFSDVFGKAASAITARILENPTEKITDVSSFRTKRLKATDEEILAAVDGEMCEEQAEKLRIIRSHMDSLELCKLNLESLILATAEKYLPQLDLVMTVPGIQSFAAIGIISEIGVDMSVFPTSKHLCSWAGLTPQNNESAGKKKTTRISRAGAYIKPLLVQCALNAIRAKKFPEVRNRYLALKKRRGHKKAIIAIARMLLTAIYNMLKKNEPYNPELYRKGDRPPAHREVSVEEAIFILQRQGYLVTAPPPT

SEQ ID NO: 342114 - protein, 362 aa, unidentified
MNDMTMVGLDVHARMTLAASLELATGELRFRRLSGPPRSAVDYLQQLPGPVIATYEAGPVGYGLAREAAACGIEVRVCAPGLIARKPGDRIKTDRRDAERLVRLLAAGDLSFVRIPTVEEEQFRDLARCREAARADLMRARHRLSKFLLRREIEYDGPGGSWSERHWKWLRGIEFNDHASQAVFNDYLTAVGSLEQRRSGLDAQIAIAAPRSPWALTIAALRCLRGIDTVSAYGLCCEIGDFHRFEHPTVLTAFLGIVPCEHSSGESIKRGPITKAGSPHARRLLVEAAHHYRHRPAIGVALARRQRGQDPRACEIGWRCQQRLHHQWQRLRVERRKPANVTVIALARELTCFVWEVGQLQP

SEQ ID NO: 342115 - protein, 348 aa, unidentified
MRSLGTIPNRSESIRKLIKKLGPAEKLRACYEAGPTGYVVYWLLAELGVHCDVVAPTLVPVKAGDRVKTDRRDAEKLARCYRSGDLTAVWVPDEGSEALRDLVRAREAAKQDELRARHRLGKFLLRSGQRPPSGVKPWTRAYLIWVAQLRFTQIAREATRQDYLHEVEHMRERVTRLEQAITEAVKLASPALQQVINDLQALRGIAEISAVTIAAELGQVSRFDSARQLMGYCGTVPSEDSSGKRTRRGSITKTGNAHLRRIVVEAAWSYRRPPCIWYGLRKRQESISEEAKEIAWKAQHRLHKRYMKLGAAGKDQRKIVTAVARELLGFIWAIGTRAETVAGQRLAA

SEQ ID NO: 342116 - protein, 341 aa, unidentified
MEHCGIDVHVKSSQVTVVDDEGEVLERATLPTTRTALERWFGGRPAMRILLEASGSSPWVSRVLKGCGHRVGVVDPRRVRMVAESTLKTDRIDADTLAELARLRMRLRTLVWQRSEESQLQRGHLRVRRALVEARARFIVTIRGLLRSFGVRVASCRADRFAARCEATTMRPELADIVAPLLAAIRDLDERIAVMDTVVEQVGQGHAAAASFQEIPGVGPVVALGYVLSIEDPSRFRRSRDVPGYLGLRPRLRASADLVRRGRITKEGDPDVRRLLVQAAHAHLRSRTDTALKRWAEGLIPRIGKRKAIVALARKLAVLMHRLWLTGEVYQSFPEEVAKAA

SEQ ID NO: 342117 - protein, 408 aa, unidentified
MDRLIERCCGLDVHKTSIAACVRIPGPEGERVQHVRTFGTTTVQLLALRDWLEAHGVTHVAMESTGVYWKPVYYLLEDRFECLLVNAAHLKHVPGRKTDVQDCVWIAQVLEHGLLRGSFVPPPLIRDLRDLTRYRASLGEERSRQANRLHKFLQDAGLKLSSVASDILGVSGRAMLEALVHGTTDPAVLADLARGKLRRKLPALREALAGHFRAHHGFLVGQLLAHLDFLDESLETLNGRIDEMLAPFAETLDRLDGIPGFSRHTAEDVVAEIGLDMAVFPSDGHLASWAGLCPGQNESAGKRRSGRTRKGNRWLRRTLVHAAHAASRTKDCAFAARYRRLARRSEKKAIVAVAHALLVTVYHMLTRGTPYQELGANYYTRQNLDRLRRRAIQTLESQGYRVTLERVA

SEQ ID NO: 342118 - protein, 328 aa, unidentified
MKKYSEVFIGFDTAKTKHAVAIAEDGRNGEIRYLGEIDSSPATVEKVIGKLAERYAKLHVCYEAGPTGYGLYRQVKALGHECAVVAPSLIPRKSGERIKTNRRDAVTLARSLRAGDLTSVWVPDVIHEAVRDLSRAREAAGEDVRKKRQQLLSFLLRHGRTFSGRKYKSLAHRRWLAEQKFEHPAQQIVFQDAIDVIEDGAARLRRLEEQLLAITPSWSMAPVVAAYQAMRGVSFIVAVTFVAEIGDVRRFDNPRQLMAFLGLIPSERSTGETVRRGGLTLAGNRRARRVLVEGAWTYRYPARVSETLRARLAPATGWCWYDPSRLPT

SEQ ID NO: 342119 - protein, 318 aa, unidentified
MDKNFIGIDVAKDSMEVTAYNSKEHWAYANDESGLAKLTARMKRLSPSLIVLEATGGYEVSVAAELQSKGFPVAVVNPRLIREFARSVGILAKTDVLDAKVIARYAATVQPTPRALPTEETRRLGAIMMRRRQIVAMLTAEKNRLHQADPSVKPGIKEHISWLEKKLDDTNKELGQMVENSPEWKEKSDIIQSVPGVGPNLAVTILTDFPELGALNRKQTAALSGVAPFNRDSGTLRGRRMIWGGRNIVRTATYMSTFVAIRFNPLLKAFFEHLISAGKPFKVAVVACMRKLLCILNAMLKNRTYWNYIDHQLIGPCH

SEQ ID NO: 342120 - protein, 344 aa, unidentified
MTYYTGIDVSLRSVSICVVDDKGEVCLEAKVAAEIDAIVDRLRRFSSEVKSVGFEAGTLTQYLTYGLQAAGFEVICLEARQVSVTLSAMRNKTDRNDARGLAQILRTGWYSRVHVKSLHSHQVRALLASRKAILKKCVDLENELRGLLKVFGIRLPSRVGHGSFDAELRETVSTDEMLACALVPLLDARTVLYKTYLKLDNAVKGLVRVDPICRRLMSIPGVGPVTALTFKAAVDDPTRFKSSRTVAAHFGLTPRRFQSGEVDNSGHISRAGDADVRSALYVAAHSLLTRNAQWSTLKAWGVRLAKTRGHRRAVIAVARKLAVILHRMWIDGSEFRWGAVATPA

SEQ ID NO: 342121 - protein, 457 aa, unidentified
MNRKRTKSKLDRAMPMVHPNAAAIDVGATMHMAAVRADRTPEPVRSFGTFTTDLHRLVNWFKECGVETVVMESTSVYWIPIFELLDARGFTVFLVNARDAKHVPGRKTDVSDAQWLQRLHSYGLLRASFRPKGQIAELRAYVRQRERLLEYAASHIQHMQKALTEMNLQLHHVVADITGATGQRIIRAILAGEHDPKALAHLRDYRCHASAETIEKALTGSYRAEHLFALEQALALFDAYHEKVSACDVRIEAVLKELSIGRGRGSGSLPSSRRRTDQTNAMAFDVRAALFALLGKDVTQINGLGPYLSLKLIAECGDDLSAWPSAKHFTSWLCLAPSNKISGGKVLSSRTRRSGCRAAALLRLAAVTVGRTDTALGAFYRRLSARIGKAKAVTATARKIAVLFYNAVRHGMEYVDPGASFYETRYRARVVDNLHRRAKAFGFVLQPAEPTSSVAVS

SEQ ID NO: 342122 - protein, 362 aa, unidentified
MFRPHTLYIRIRIVRKVSEPAFAMKDQDVTDVIRRKQQTAMRYIGIDVSKATFVVAYSSDKGGEIRTFNNTTTGIKQFIGALPKDGSIHGVMEATGNYSALLLYMLNVAGITVSMENPLKVKNFAKAMLSTIKTDKSDARLITLYGEKMNPRPFKVQGEAILRLRQKRTVIRQLTKQITAMSNLRGSLACLPVPDKGATHTVDETIKFLEKKRDRLQSELTDLVEVEFSRQLALLTTIKGIGITLATALIITTGGFTYFQNAKQVSRYLGICPTYEQSGTSVNIRGHINRNGDAYTRGLLYVAAWTASRFNTKCGETYTRLRQNGKPGKLAMIAVANKLVRQAFAVVTHDKEYVDGFVSNRP

SEQ ID NO: 342123 - protein, 372 aa, unidentified
MGHHSEAFIGIDTSKLRNAVAIAEGGRKGDVRYLGEFDTTEVATRKLVTKLAAKYDKLTFCYEAGPTGYGLYRLLKKLGHECFVVAPSLVPKKPGDRVKTNRRDGVNLAKLLRAGELTAVWVPDERHEAMRDLSRARQAAQRDLRGKRQQIMSLMLRLGRNYPGKKTWGPAHLNWLMRQKLEHREQRIAFEELMESVRQESERVERLEQAIREAVPEWSLAEVVTALQAARGIDLIVAVTVLAEIGDLSRFGNPRELMGFLGLVPSERSTGESVKRGGITKAGNGRARRVLVEAAWSYRHPPRVSGEKQAKVAAAPRRVREIAWKAQTRLCGRFRSLIRKGKRPTVVATAIARELSAFIWAINREVMTRRQA

SEQ ID NO: 342124 - protein, 340 aa, unidentified
MKLTAVGVDVAKRVFQLHWVEAETGEIISKQIKRAAFLEHFVNRAPCLIGMEACGGAQHWARRLIEMGHQVRLMPGKAVKAFVSGNKNDVADARAIWTAVQQSSVKSVAVKSEAQQAVLALHRMRQQLIKFRTMQSNGLRGLLTEYGEVMAVGRAALNKAMTDVLARLSERLPAALVHTLREQWSRLGDLDEQIAEIERRLSAWMKQDRSCRKIAEIPGVGLLTATAAVATMGDAKAFKSGREFAAWLGLVPGQVGTGGKVRLLGISKRGDTYLRTLLIHGARAVLTHAKEPGPWVEQISKRRPPNVVTVALANKMARTIWALLAHDRSYERSYVSVKPA

SEQ ID NO: 342125 - protein, 423 aa, unidentified
MSYRIAGIDVHKKMLAVVVSDVEIDGEYQFERVRYSSSPEHLRFLAEWLITQQVEEVVMESTAQYWKPVWEALEQYWKPICQGREGAGPMTGTLHLAQAQSNRGRRGRKKDFPDAERLVKRLVADELVLSFVPDTEQRLWRTVTRRKYQLTRNHVRLQNQLEGLLEECHIKLSSLVSDLLGASARRMLKALADGETNPVALAAMADKNLRATQAQLCDALGACTELKPIYRRLLKMFLEELHFIDQQISKLDQELASLLSRHHDAVVHLAEVPGLGVDSAQQIIAEVGAGAATFPSAKQLSSWVGACPGEEESAEVSKSHRSPKGNRHMRRILNQAANAAAKSKGTIFEIVYRRLVSRLGHNQTIGAIAHRLCRLIWIILHRGVRYEERGPSVSAKTRRHRTNRMIRELRSLGYRIEPLVATA

SEQ ID NO: 342126 - protein, 320 aa, unidentified
MAMQVQPTWIGVDVSKATLDICSTDTGDVLTLPNEGKAIRQWLKRLSGPVFLTLEATNLFHLELATQAYARRVTVYLVNGYRLSKYREGIGARAKTDRSDARLLRRYGMHEHADLRAWAPPPKGYTTLQRLLHRRAVLVQARTTLRQSLTGMPELKTSVAALLRKMNHLDHLLIKRLQRILVELGWNQQARRCRAIEGIGPITSIALTTTFHRGAFASADAFIAFLGMDVRVRDSGTMRGRRKLTKRGDPEIRRLLYMAAMTACRSSTWKPFYERMLARGLSTTQALVALARKLARIAFALLKTGSTYQPKAPGEACPST

SEQ ID NO: 342127 - protein, 431 aa, unidentified
MNYNQNKKIAQITSQTLIIGVDIAKFKHVARAQDFRGMEFGSPCQFENTKEGIGHFLKWITEIKKEQRMDKVMVGMEPTGHYWFNLAHILKENGIKFVAVNPLHVKKSKELDDNSPTKNDVKDAKVIAQLVKDGRYAEPTIPQGVYAELRVAKKIRDLLTEGLQTVQGQVHNWIDRYFPEFLKVFKKWEGKAALQFLKLYALPHEIAEFTEEEMLVHLRKSVSRSVGLNKIRELKQAASKSIGLRQGAEMARLELKTILAKYELIQSQFEELDTKIDGLLDEIPGVPQMLAIKGVGRDTIAGFFAEVGDLGEYNHPRQIIKLAGLSLKENTSGKHKGKTTITKRGRKKLRALLFRVCMILVAKNSAFKALHAYYTQRPDNPLKKMQSLIALCNKLIRILFSIGKKQFEFNEDKMLKDIPHLALAEKTEMAA

SEQ ID NO: 342128 - protein, 341 aa, unidentified
MGNIKLLGIDIAKNIFHLHGIDEKGKKVFQKKVNRDKFLETLINLDCEIIVMEACGGANHWARQLKKYNRCVKLISPQFVKPFLKSNKNDWKDAEAICEAASRPNMVFVEPLTEERQDIQSIHRVRQGLIDMRTACGNRIRGLLAEYGHIAPMGMYKLTTLLPEILEHEQGHLTPLIKIILSQELETLKSLSQNIQEYDRMLETICKNTPLCQKLLKIPGIGVINASILFVKLGSGLSFNNGRHFAAYLGLVPKQHSSGGKNTLLGLSKRGDAYVRKNLIHAGRSILRVAVGKKDHLSEWAVKLCCKKKNNVVIAALANKLARIAWAIAKNNTEFVAKAIA

SEQ ID NO: 342129 - protein, 395 aa, unidentified
MSKDGRKNRPLLVNYFTIICFQTKAIMSSQLLNYSLGLDCSSDDFKVCFLNFDTEQTYKVKSSRKFDNRPGCFKELVDWTEKRRKDKSVPLRITMEVTGVYHERLAYYLHETGYEISIVAPNKAKHYLRSLGHKTKTDKMDALGLARMGAEQRLEKWQPSSKQMLKLKRMTRHRAALQKQITMTSNQLHALNRAAGDNQEVMDMKRALLDFLRQQVKQTDKQLEAILAQDEQVSQKVRAIAASLDGVGELTVMSLVAETDGFKHFSSEAQLTSYCGYDVVANQSGKTNGKTKISKQGNTHIRRALFMPAFNVVRYETGKFPALYERVHQRTKIKMKGYVAVQRKLLCLIYTLWKNDTVFEENYGEAQSQDVQQEQTADLNIGQCRAGAPLSGVAA

SEQ ID NO: 342130 - protein, 397 aa, unidentified
MRMPDNVASAGVDVHYKFSTVAFVNDRGRTVARWRLDHRDREALAEALACWPKVPTVMEASFGWGWLSDMMIDEHGIDVHLSNCHKVEQMRQARGWVKTNDKDADLQGLLPAEATNWWEVWRAPKSVRDLREWMRHRSDLVKLQTTTKNRIHAIFHRHGVFHDFSDLFGGGGRRFLADLSAGRDKQSGYLSGGATEALQGELRVLDALREELARIAKVLRKKLERTDLARWLISVPGFGLILAHVVMAEVGDLGRFRSSRALASYSLLAPRSFDTGEPTPGRAPVGRHLGQRGNRVLQWAFIEAAHGAVRHGGVWREIFDRVTDGGKRDRGQGYIAVARKLVDVVYAVWRDGRKYQERPAAGSSAHGADGSSKSKSSSKRSARPGTGRPCRPMVVAG

SEQ ID NO: 342131 - protein, 456 aa, unidentified
MEQKKEKKVFNIIHPDAAGIDVSSEDYYVAVPDDRDAEPVRKFGCFTQNLHEIADWLQKCGITSVAMESTSVYWTQLFIVLQDYGLEVFLVNAHQIKNVSGKKTDVEDCQWIQQLHTYGLLTNSFQPDNITRELRAYVRQRKNLTEDASKEVLRIQKSLTLMNIKLDIVISDIMGKSGKNIIEAILNGERNPEELIKLTDTRLKASKEDLLKSLEADWRQEYLFTLKQNYELHHFYQMKITECDDQIKSLFEAYPRCEYQRKEGNDMFNPFKKKKKYKQKTDLVFDPDGYLKEIYGIDVTKIPGFSSLTAVTILSETGSDLKNKFPTKKQFLSWLNLVPNNRKTAGKVISSKIKKKKNKAGQSFRLAANALKNSKCPLGDYFRKVKSRDGHGRAVIATSHKLASIFYTLVTTKSEFNYDTYLKSNKINIERHLNRLNRRVIDLKSQLLQLSELQSV

SEQ ID NO: 342132 - protein, 356 aa, unidentified
MSQITTVGVDLAKEVIVVCAGDAQGRSVYFKQFSFAGFAEWAAKLAPCAFGMEACSSAHHWARFLSEHGHMAKLMAAEFVAPFRKSQGAKNDRNDAQAILTAVRQPDMRFVTVKSVDQQAMLAWHRARAGFGEERKALLNRTRGLLAEFGVWLGRSSAVLIRHLPQLAQDERLPARFRPILANALSHLRNIEQCIADCDAEIHNHVRHSEQAQRIQALTGIGPQTASALIATVSNPRDFKNGRQMAAWSGLVPRQNSSGGKQRLGVITKRGDSYLRGLLTQGARSTLQVALKREPLKRSRLEQWIIDLHGRVGYHKTLVAIANKHVRIIWAILANGESYDPNAWRRHAPTRSAVAA

SEQ ID NO: 342133 - protein, 343 aa, unidentified
MQTITTIGLDIAKSVFQVHGVDAAGQVVIRRQLKRRSVLAFFQKLPPCLVGIEACASSHYWSRELQAFGHSVRLMPPAYVKPYVKRQKNDMADAEAICEAVTRANMRFVPTKTPEQQSCLMLHRTRHLFIRQQTAVINSIRAHLAEFGIVAPVGRRGVTELLHVVADPSDKRVSEIARACLAALGTQLFALKEQILEFDRMILAWHRSNQTSKRLHYIPGVGPMLATALVASVADPRTFRSGRNFSAWIGLVPKQHSSGGKERLGSISKQGDRYLRSLFVAGALAVIRYAKIHGTKHRPWLTALLARKPVKVAAIALANKIARMAWAMMAKGERYKEPIALAR

SEQ ID NO: 342134 - protein, 442 aa, unidentified
MGRRCIGLDVHREFAQIAVWEDGRVRQAGQIALTAEALGVFVDSLGPEDEVAIEATCNTHAIVRLIEPHVKRVVVSNPQKTRAIAEAKVKTDKVDAEVLCQLLAADYLPSVWVADQATQALRRQVARRAHIVRQRTRLKNQVQSILHRNLIPRCPAADLFGIKGRVWLGRQPLPPDEELAVRALLRQLDFHAQELRIIDAELGRVALASPEVKRLMTIPGVDATIALSIVAAVGEFRRFRTPEQLVSYLGLNPRVKQSGGQPASHGRITKQGRAHARGMLVEAAWVAVKTPGPLRAFFERVRSRRGMQIAVVATARKLACLCWTMIERGEDYAFARPSLTEKKLRKLELRAGMPSHRGRKGKSAGYNLKDVRRRERELAEQAERSYRQLVADWQAKTPKPKVGVAAANGTRLKRPSAGQAARQASVPEPALRSGVDHTLSKA

SEQ ID NO: 342135 - protein, 351 aa, unidentified
MLQKTNAVAVRTIGIDTGKNTLHLIGLDQQGTIVLREKLARGRIGRRLANASPCLIGIEAGMATHYVARELLALGHDVRQVPPAYAKPFRQGHKNDFRDAYAIAEAVLRPSTRCVPVKTDDQLDLQALHRVRSRLVGQRTAVINQIRSFLLERGIAVRQGPRFLRQQLPEILAKRTDVLSPRMIGIIEDLSGDWRRLDERIERVTEEIEQLAHGSESCRQLMTVPGIGPLIASAMVAAIANGAAFAKGRDFAAWLGLVPKQMSTGDRTILGHISKRGNRYLRTLFMQGARVILLRPANWARHSFGPWLRAAAKRLHHNVLATALANKLARIAWTVLAQRRNYETRVVTEAA

SEQ ID NO: 342136 - protein, 350 aa, unidentified
MTMVGGLDVHRQQITFDYVDSDGLVRWGQIRPATRKTLRAWLAEHCPDGAGEFALEGCTGWRYVSEELAAAGVGVHLGDPAEIAALRGPKKRAKTDRADARLLRTLLLEGRFPESWIPPAHVVEMRTLGRLYYRLMDERRAWQQRIHAQLFHQGCPPVATLLSAAGRDTLGRAELSVAGRQYVETALRRIDELTDQIDPLRTQLVNFAQHQTGCRALQRHYGIGWLCAVIIWAEVGDVRRFRSSDQPVRFAGLDVTVYSSDAKRSPGHLSRQGSPELRWAAFEAAKSAARRGSPDYGYYHELAAKHDHKNGKNPTLAVERKILRRCYHTLRALGDAALAVPSPQGQEVAA

SEQ ID NO: 342137 - protein, 356 aa, unidentified
MTSNIKYIGMDVHKESISACVRNSVGKVVMECLIETKASMILQFIDGLRGDLQVTFEEGTSAAWLYDLLKPHVTKLAVCDPRKNKSMREGNQNDKIDARRLAELLRLDHLTPVYHGEHGLRTLKELARSYLTITKDLGRVMNRLKAVYRSWAIPCAGKEVYAPRHRAEWLGKISESGVRRRAEFYYQQLDALRVLRQEARRDLLAESKKHKAWKRLCGIPSIGPIRAAVLLGILQTPHRFRSKRPLWNYGGLAIEMHSSADHRRVDGQLQRSRKNAWVRGLNRNCNHDLKNLFKGAAAVASSKPGPFQEFYTALVAKGMRPEMARLTLARKIATIVLIVWKKGVCFDANHLKPQTA

SEQ ID NO: 342138 - protein, 343 aa, unidentified
MKYMGIDYHKQYFVATIMDEKGKVIKKERVSTDRNSIRSYFKKAGSVGEIKAVLEACYGWEYFYDEVDELVDELIMAHPLETRLIAEARIKTDSIDSETLAHLLRADLIPRAYAPSAETRDQKNLLRYRSSLTAMKVRIKNMIHALLTRNHIEDRDFLGLSDKFVKRGIAYMRTVELKGNDTAILHNYLDLLEETEEKIKSAESRIRVVCRRDEICRLLDSIPGIGYILAVTIRYEIDDIERFVSSGKLCSYAGLVPSTYSSGNRTYQGKITKQGNKWLRWAMIEAAQRAPLSDMYLKAFYTRVCKKGKKIARVAVARKLLEIIYRIWTERREYYRKPVTVAL

SEQ ID NO: 342139 - protein, 351 aa, unidentified
MIIIGVDYHPSDQYIAFVDTETGEYVERQLNHGDREAEMFYRGLAAQGVSVRVGMEATGYSRWFERLLAELGIEVWIGDAAEIKTKRVRKQKTDREDARLMLRLMRENNFPRIWVPSPENRDLRQLLWHRHRLVQMRTRIMNQLQALAMNEGQRRKKKLWNEQGRAQLEKLPLATWASRRRKDLLELLDRMNPTIEELTRAIEQEAKKWPEVLRLMTHPGVGPLTALAFVLIIGTPERFKCGKQIGSYVGLIPCEDSSAGHQRLGHITKQGSSLLRFLLGEAALAAARWDADWRRRYVHLAMRRQRNIAKVAMARRLAVRMYWMWRNSWEYSEWVKFGSHAGQLGIRHGVN

SEQ ID NO: 342140 - protein, 482 aa, unidentified
MKKKNIYVNQSQELLSMFEEAGNNEKIMCVPIDYAKKDHVVMFCNGYGHILRKPFSVKNSPEGIAYLTEQVSRSCSHRRIDPKHVFFGGEDVGSYAENFANTLRSGGWIVAGVNAHDAKEQRANIQASTDRLDLMGIASMLLNRRANCAPAQSGIYRNLRTLVRHRRNLVSMSTEEKNRIHTVVDRLFPGFLDEKKTGILPFSKSSLYLMENRFSPLQIRRRKRHKLIEVLHRYGTSKPEDTSARLQEHAACVLNTPDEYIFTLQLSLVQHVKHFRCLQDSINQLENEIAVWLAQTQGAFLTTVRGIGIVLAAGVSAETGDPYKQKPLNNLVSYSGIIPRVKQTGGSEGKTRTGKVAKRCNRILKDYVVQSALHMGLHGPEDLMADYKRREAAGQHADFGIGRRYLRMAMCLMRTSQIYMPQQLRNTKVKPEERAGYYLITWPYLRNKWNKAGALEAAFKNDRPLGQWRNMVQELYEIKLKL

SEQ ID NO: 342141 - protein, 366 aa, unidentified
MKKISTVQVFGNEVFKEQKLTIGVDLGDRWSFYCVLDEAGKIILEQKVATTPEAMKQTFGKIPRSLIALETGTHSPWVSRLLTELGHEVIVAHAQKVELITKSNRKDDRHDARTLARLARIDPELLGPVRHRSAKAQIHLTVIRARAELVSARTALVNAARGLVKSFGQRLPKCGTYQVNEKLAEGLSAELRDVLGPLLREVESLNERIKEYDERMEKIAKEVYPEVALLQQVKGVGTQIALTYVLTIEDPYRFPKSRQVGCFLGLRPGRRNSGESEPQKKISKEGDRYLRTMMVQGAHYILGPFGEDSDLRRWGRKLAERGGKNAKKRAVVAVARKLAVLLHRLWVSGEVYEPLRNSQKAMRAVA

SEQ ID NO: 342142 - protein, 358 aa, unidentified
MQRNKKTFKGQNIYIGIDVHKKNWQVAVITESGYTERLSTAADAKALFKFLKSHYPDGNYRAVYESGFSGFATHYALSDLGVSCVVAHAADIPSSQYELTMKSDRIDAEKLARALRAGLVRGIYVRPKDNLDDRGVLRIRKTIQIQVGGYKTRIKHLLHSNGVELPERFSRSGTHWSRAFIAWLREDVRLLSDTRRSLELLLLQVETLRANLLEATRRVRALSMTDRYREDCALLMGIPGIGLTVAMTILTEVCDIGRFGNERQFASYLGLVPTSHSSGERVSHGEMTFRGNKHIGPLLVEASWVLIVRDRELGRMYTEYRWRMAGQKAIIKIARKLSNIIFAVLKTRKAYEPYRRDA

SEQ ID NO: 342143 - protein, 481 aa, unidentified
MARKSKESVGNKVPSKMNRKERKDFARRLWSADPGLTAMHPNAAGIDVGNREHYAAVPPDRDPMPVRSFACFTEDLQRLVAWLKQCGITTVALQSTGVYWIPLYDVLEEAGLEVYLVNARHTKNLPGRKSDVQESQWLMKLHTYGLLNRSFRPASEIRVLRAYWRQRAEHVQAAATSIQRMQKALTEMNLQLSNVISDLSGATGMRILRAIHEGERDRSKLAALRDYRIRASEEQIAKSLEGNWRPELLFVLGQELDTYDTYQRKIAECDVEVEKHLHSLTGNSGGECEAQPSPSESSKKGKQYKARGNAPVFDLSRELQRITGVDLTRIDGVDVMTAQTVISEVGVDMSRWKTEAHFASWLGLCPSQEISGGKVLKKGTRRVVNRAATALRIAASTLIKSQSYLGAQYRRFRTRLGAPKAITAMAHKLARLVYRMLKYGLQFVDKGVTEYQTKFREIQLRQLTKKASELGFQLTEIKQLA

SEQ ID NO: 342144 - protein, 350 aa, unidentified
MMIIGADYHPGFQQIAYVDTETGELQERRLEHPEEAEKFYRELATQGKKVRVGMEASGHARWFERLLAELNFELWIGDAAEIRTKRVRKPKTDRQDAQLILKLMLEDRFPRIWVPSWENRDLRQLLWHRHRMVQARTRIMNQLQAVALNEGLRAKKRLWREAGREQLAALRLAPWARRRRQELLELLDQLNPIIGELTKAVEEEAKKCPEAQRLMTHPGVGPLTALAFVLVIGMAERFGCGKQIASYLGLVPEEDSSGERRRLGHISKQGNSLLRFLLVEAAQVTVRSNQEWRSKFFHLAMRRGRKIAKVAMAPRLAIRLYWMWRKQWNYEQFTKFGAHAGQPGNPHGVR

SEQ ID NO: 342145 - protein, 361 aa, unidentified
MTDLRLWVGLDLGSYRSSICVLNAVGEVQREALAETTLEAIQSVLSDFPKEAISLIGVEAGSGHNLVRKLRAAQYPVAIFEARAASKILALNRNKTDRNDAKGLAEIARLARDAVPRVHLKGVECQRLRAQLALRQQLVRQRVAIEGALRSMFEQHGGKFGSIRSDIGFRTAVSRELERVESEENLDLSVDVEPLAALGEATRHYLTSLNAKFRTLASEHPVCSNFITIPGVGPICALSFYSLIEDPHRFGSAADVGAYLGLTPRIHSSGTMSKRCGISRMGNRMTRSHLVMAARVILGLSHQETALRSWGRTLVARIGHRRAQVAVARKLAILMLSMWRSGQPFSSSPAPAPESSCGSMR

SEQ ID NO: 342146 - protein, 356 aa, unidentified
MSYDVKYIGMDVHKEAIVIAVQNESGKLVMESVIETKASSILQFLHGLRGELHVTWEEGTWAAWLYDLLQPHVQHIVVCNPRRNALLKEGSKSDKVDAHKLAELLRSGMLRPVYHGENGLRTLRELGRSYQTISKDLTRVMNRLKALYRGWGIPCAGTQVYAARCREEWLSKIPQAGVRRRAELLYQQLDGLQALRRDVRPEFLAESRKHKAAKLLRQIPCIGPVRAARLIALMQTPHRFRSKRQLWTYSGLGIETHDSAQYRFVSGQLQRAKKPQQVRGLNRNHNHEMKEIFKSAATRASGGRGPFHDFYAALLAKGMKPEMARLTLARKIAAITLILWKKEERFDVEQLKTQAA

SEQ ID NO: 342147 - protein, 336 aa, unidentified
MDTETGEFQEKRLAHREEAETFYRAVGGQKVRVGMEASGHARWFERLLAELQFELWIGDAAEIQSKRVRKQKTDRQDAQLILRLMLKDDFPRIWVPSWENRDVRQLLWHRHRMVEMRTRIMNQLQALALNEGLRCRKRLWREHGRQQLESFRLAPWASRRRRDLLELLDRLNPTIAELSQAIEQEAEKYPQAQRLMTHPGVGPLTALAFVLIIGKAERFQCGKQIASYLGLVPLEKSSGNRRRLGHITKQGSSMVRFLLVEAAQVTVRSLPEWRKKYAHLMMRRGRKIAKVAMARRLAVALYWMWRKGWNYEPSKSSVRTRASSEQAMVCSKTPSN

SEQ ID NO: 342148 - protein, 338 aa, unidentified
MTLYGGIDLHANNSVVVLLDDQDRVVYQKRLSNYLEQIVQQLAPYQGALKGLVVESTYNWYWLVDGLMEAGYRVHLANTAAIQQYSGLKYSDDKSDARWLAHLLRLGVLPEGYIYPKAERAVRDLLRKRGQLVEQRTANLLSIQTLVARNTGTSMSGNRIKQLQRDDVAGLMPEAERALAVESNLVVMRCLTDQIAIVERTVKERVKLRPAFRQLLTVSGIGDILALTIMLETGEIGRFAQVGNFASYCRCVDSQKLSNGKRKGQGNTKNGNRYLAWAFVEAANFAVRYNPQIQRYYQRKKEKTNGVVAIKAVAHKLARACYYVMRDQVPFETAKAFG

SEQ ID NO: 342149 - protein, 341 aa, unidentified
MEQFIGLDVSLKDTFISVREGGARIWRGKCPSDPKLIVEVIRKRAPSVKRVMLETGSLSVWFYHALKQEDLPTICIDARHAKAALDMAPNKTDANDADGLAHLAEVGFYREVRVKSFESMLTRTLVAARNQMLRTTTQLSNQIRGLMKTFGLVVPKSAGRVFEGHVRSLLASNAGLEQIILPVLEAWRGIRARASELSKQLIASARASEQCQLLSSIPGVGAVTASSFVAAIEDPENFRKSRSVGAWIGLTTRRYQSGEVDYDGHISRRGDSHLRGLLYEAAVVILTRTTADSALRIWGLKLKEKIGFKRAAVAVARKLAVIMHTMLRTGELFDRSVPAEA

SEQ ID NO: 342150 - protein, 381 aa, unidentified
MTTKATRNTQAKTSEGPLFMAFELSEKTWKLGFTTGPGQKPRERNVTARDQERVLDEIAQAKRRLGLPETALVVSCYEAGREGFWLHRFLEAHGITNHVVDSSAIEVSRRQRRAKSDGLDVRKLLSMLIRYHEGERQVWQVVNVPSVEAEDQRHLHRDLETLKQERGDTTRRIKGLLSSQGLRVENLTRLPEQLDALRLWDGSPIPPGLRQRVLRVYAHHQFLSEQIAAVEAERGTQLQDSNDASIEKVRQLMLLKGIGINGAWLLVMEFFAWRGFKNRREVGGLAGLTPTPYQSGESAREQGITKAGNPHVRWMITELAWGWLRFQPQSALSVWFRERYGSGGKRLRRIGIVAVARKVLIALWRFLETGELPEGAALKTR

SEQ ID NO: 342151 - protein, 346 aa, unidentified
MMIIGCDFHPSWQQIAWLDSETGETGERKLVHASGDAKAFYEQLAAPAWIGMEATGNSQWFIELVQDLGHELWIGDAAQIRASYVRKQKTDKRDAAHILKLVVEGRFPRLWTPDGEQRDLRQLVLHRHKLVEIRSRVKNELQHLSLNKGMQRKAKLWSEAGQKLLRELPLKPWAACRRADLLGLLALLNQQIGTLDQAVQQAADQHPQAKLLMTQPGVGPNTALAFVLTMGDVSRFPRGKQVASYLGLIPREESSGGRQKLGAISKQGNRLLRSLLVEAAQIAVRFDPGLRKQYLHRCHQKPKGVAKVAAARKLAVRLYWMLRTEKPYPEIVRIESSPRVALVGAS

SEQ ID NO: 342152 - protein, 346 aa, unidentified
MKITTVGIDLAKVVFQIHGVDSRGKPAVRRQLKRSEMSGYFANLEPCVIGMEACGSAHHWARKLQEFGHTVKLMSAQFVKPYVKTNKNDVADAEAICEAVSRPTMRYVPVKTVEQQAILSVHRARTGFVKARTAQANQIRGLLSEFGIVISQGIHSIVKRVPEILEDGENGLPGTMRNLLRRLTENLKEMDRQVDELEKQIQVWHRENEASRRLAEIPGVGPITASAMVATVGKAREFKNGRQLAAWMGLVPKQNSSGGKQNLLGISKRGDTYLRTLLIHGARSVIRCVEKNTDGGNWLRKLMARRNKNVAAVALANKNARTIWALLAHDQRYRRDYMPQAMVAAM

SEQ ID NO: 342153 - protein, 341 aa, unidentified
MSIITVGIDLAKNVFAVHGVDDNGKPALVKPKVSREHLLPLIAQLPPCVIGMEACSGAHHWARQFRQHGHTVKLMAPKFVTPYRMSGKRGKNDAADAAAICEAVTRPAMRFVPVKEEHQQVILALHRTRTGFVEERTATYNRLRGLISEFGIVCPQKIANLRRALMDHLEDLPGYVNQCVGDLLAHADSLDARIAEYDRIIAKAARDDARSKRLMSLPGIGPNTASAMLASIGGGHDFKNGRQVAAWIGLTPGQYSSGGTARLGRITKAGDKYLRSLLVMGAKAVLSGLGDKQDRFSRWARSLVERRGYWKAVVAIAAKNARLAWAVLRFGEDFRLKAAAD

SEQ ID NO: 342154 - protein, 318 aa, unidentified
MQKPNDLNQSRIVLKQDSTLIAVIEMSLSSWLVAGIVPGVERQPLKKLAVDESVLLKLLNRWREEAEKAGRKIERIAVAFEAGRDGFWLARWLRARGIEAHVIHASSVAVSREHRRAKTDRLDTELLKRAFLGWLRGEREHCKMVAIPTIEDEDAKRPNRERESLAGERTRIVNRMKAALSRLGIRGFNPKLKKAAERLKDLRTPEDQPIPPNTLAELRRDMERRRLVSDQIRQIEHARLERIEHAPSDRPHAMVRLLARVIGIGIETADMLVQEVLSRNMRDRRAVARYAGLTGSPDESGTKRREKGLARSGNARVR

SEQ ID NO: 342155 - protein, 328 aa, unidentified
MILGIDISKAYFDVTVRMGPGQKTHRQFTNDEPGIAALLAWLKRQGVSDLHVCMEATNLYWEAVAEQIHEQGYTVSVVGCPRGAARIKGFAQTQLRRNKTDKQDSDVIADFCAALKPAAWQPPSPTQRKLRALERHREALQKTLTQQKNRLASSKDPDVIRSLQRVIDTLQQEIEQLNQQIAAEIAQHEALATQKALLLSIQGIGERTAHKLMTEMYDLAMYENAHAAAADAGVTPAHHESGATIRRPARLSKVGKAAVRGALYWPAITAIRYNPVVRTLAQRLERQNKPAKVIIAAAMRKLIHLAYGVLKHKRPFDPNWGAQPVPAT

SEQ ID NO: 342156 - protein, 420 aa, unidentified
MPSQPSDFAAVIGLDWADRKHDICLLETGQLSPEFSVLEHDPVAIDAWAARLRKRFAGRPIAVCVELARGPIVSALLEYDFFVIFPINPAMLAKYRRAFSPSRAKDDPKDAFLALDLFRHHFDRLSPLRRESTAMRALQRLVHDRRTLVDDRCRLINRLTYALKEYFPQVLRWFRDKHTEVFIDFVTRWPTLDAAKRAHRDTMVEFFHAHNVRHGKTTERRLDAIKAARPLTSDPAVIEPNRLMADSLLMQIAALSRAIARFDAGIADRCAELPDFKIFASLPGAGAALAPRLLAAFGENRERFPNAAAVQKCAGIAPVVERSGNRSWTHWRFIAAKFLRQSFIEWVGETVPHSFWAKAFYESRRAKEIPHQVILRALAFKWIRIIWRCWYDRQPYDEARYLLALQKRHSPIIAHAAQSN

SEQ ID NO: 342157 - protein, 339 aa, unidentified
MNSQLKQPKPDVFAGIDVGAEELVLVIRKNDKPFNPQKFANTPSDRTRLVNKLVKLPNLTVCLEATGIYHFDLSLALHDKGVQLMVLNPKVSHNFAKVLMNNSKTDSIDANTLAQYAERMAFVAWTRPSNEKIALRSFSRRLHALTKQKAAAHNHLHALTATTETPNAVLKDAKLAISQLEKRIDRLTADTLLLISKHPELDRILHLLIGIKGIAETSAIALMGELLLLPPNLSHRQWVKFAGLDPCAFESGKSVHKKTRLAKSGNAHIRAALYMPALSAKQHDPYVKAYFEHLVDNGKLPIQAVCAVMRKLLHAIHGMLKHNQPFDNTRFYDIPLHEN

SEQ ID NO: 342158 - protein, 428 aa, unidentified
MPNFISVGIDVGADFSFMSLALPNQTFAGKPFKIVHNNPDSLERAVLTIREAEELHSMKIRIVMESTGIYHYPLFCYLSDKGFDVVVINPIITKNSTNMNIRKVANDKSSSKNLALIGLKPDLKVSIMPSDVVLDLRNLVREYYYLMDSRSAYVNKLTGLLKVAFPRYIGIFSKVTVKTSLALLEKYPSPSDFLSARKSSVVNIINKTARFGEAYADKQYKAIMEAAESARVFGHFVPSNSTQIRLCISFIKKYDEEIAGVLSLMHNFVDDHADETFVKQIRLLETIPGAGFLSAVTVICEIGDFSVFKSPKQLFAYFGLDPAVKQSGNFTGNQVKMSKRGSSVARRAIHTIALTGIGLTRSGAANNPVLRDYYLRKCQSKPKMVALGAVMHKVCKTVFAVLRDNEAFTLITPEQHVQNYEHRLPSAA

SEQ ID NO: 342159 - protein, 342 aa, unidentified
MTIVAGFDVHRRQITFDALDTDTGEITRGRIDATPAAVERWTARFEGREVQVALEACTGWLFVSRALERAGAVPHLAEPVETSALRGRKRRAKTDREDARWLRTLLGEGRLPESWIPPEHVRGWRSRARLRKTLVDERTQWLQRVQATLFHHGISGAPAELRSAAGREFLQGLELPADARERIEIALAMVDSLDGQLRPLESELRKLARRQTGCRALMVQFGMGELTALMTLCELGDVQRLSASRKAVRMAGIDIGVHRSDRRSRVGKLNRQGSPHLRWALYEAALSATRPKSPDHEDYLALKARGLTHTRASLTIARKLARRSFHILRELGPAALEPIATT

SEQ ID NO: 342160 - protein, 400 aa, unidentified
MLSIGIDVSKGKSTVCGMKPGGEIVYAPFEVQHTREGMSELVSLLRSSGEEVRAVLESTGSYHCPVVAALLENGIFVSVVNSLRMKRFCSQSIRKVKTDRIDAMQIALYGLAYWQELQPARLPEDTYRELQLLARQYYQMTSLLIKAKVDFNAICDQVLPGMQELMNDHAGRHKLSDFVLRYRHTTHILEMGETRFRKDYCKWAEKKGYRNCERMAALIFATAQNGIPVLPNAPSTQIVITEAIRVLHTVEASRDAILTQMQALAKTLPEYSLVREMPCIGDTLAPRLIAEIGDVRRFHSKRALIAYAGIDAPPYQSGKFCANNRHISKRGNRYLRKTGYEVMQSYVMHKPANDPIFTFIEKKRSEGKCGKLAMVAGLNKFLRIYYGKVTELYRSLPAIE

SEQ ID NO: 342161 - protein, 342 aa, unidentified
MDHFAGLDVSVKQTSICIVDDTGKIVREVKVASEPQALLKVLGNQAYRFKRIGLEAGPLSQWLFSALAEAELPVVCVETRHMQAVLKAQINKTDRNDARGIAQMIRAGIYRPVHVKTLRSQKLRMLLTHRKLLQSKAIAIENDLRGTLRNFGLKVGMVGKVRFESRIQELVENFSDLAVLVEPLLIVRRALREQIVILHRRLLAIVRDDEVCRRLMTTPGVGPVVALTYRATVDVPARFRKSKSVGAVFGLTCSRYQSGEIDWSGRISRCGDEMMRVMLYEAAQSMLRSKKWSWLKAWAMQIARRRGMKKAIVALARRLAVIMHRIWVDGTEFRWTRDVAAA

SEQ ID NO: 342162 - protein, 350 aa, unidentified
MSVNHPNKQLILGVDTHLDLHVAVLINTLGQVICTAEFATNSTGYVKLLRWCQSFGHLTKAGVEGTGTYGAGLSRFLSNHQITVYEVNRPNRARRRLRGKSDPIDAENAARAVLADEAKAIPKTQNGSVEAMRFLLIARRSAVKARTQAINQIRAILITAPDDIRLKYLKSSQSACIEGCANMTAMDGSILLETLSISLNLLAKRWLNLTEELRKIDKNLKKITRTTAPTLMSQYGVGSYVAATLLVTAGDNPERLKKESSFAALCGVSPIEASSGKTVRHRLNRGGSRIANNAIWTITLIRMRSDPCTQQYIARRTKEGMSLKEIQRCLKRYIIRGLFPIILNDLSLSA

SEQ ID NO: 342163 - protein, 419 aa, unidentified
MRNGNTKKIKRISEETLLVTIDMGKVKHTGYYRFPDGDEGKIFEFSNSRNGFEDMWQRVCHAKRSRNLTEIVVGFESTGPYAEPLLHFLRKRNVRLVQVNPFHTKRLKELQGNSPSKTDQKDPKVIADIIELGHALTVIIPEGTAAELRRLTQARERGIQRRSMLMSQVQDLVFLIFPEFMPVMKDITIKSTQYLLKRYPRPQDVVETGVKLLTQSLKKVSRGKLGKERAEALYQAAEASVGLREGQESIVIEIKEIISVIENIERFVKELEKHMSKHLKDIPYSRFILSIKGIGEITTAGLIGEIGDFREYSTISEVIKHAGLDLFEISSGKHKGTRRISKRGRPLLRKLLFFASINVVRKGGILHKQYLQHLDKGMPKIKALIAISRKLLSIIFALVRDHSVYIAQYSEIQQLKEAA

SEQ ID NO: 342164 - protein, 343 aa, unidentified
MNEVTTIGVDLAKNVFQVHGVDASGQVVVRRQLRRSQVLPFFEKQAACVVGLEACATAHHWAREIAKLGHDVRLMPARYVKPYVKRNKNDTADAEAICEAVARPTMRFVAVKTEEQQAVLMLHRTRQLFVRQRTTLINAIRAHMAEFGIVAGVGRNGVERLLRLIDDGADERVPRVARECLQALRAQLVLVKRQILEADRRILAWHRSHELSRRLETIPGVGPLIATALVASIPDPHAFGSARDVPAWIGLVPKQNSTGGKERLGSISKAGNRYLRSLLVVGALSVIRRAKQVGYTRRAWLAELMGRRPVKVAAVALANKIARIAWALMVSGTRYREPALQVV

SEQ ID NO: 342165 - protein, 403 aa, unidentified
MNSVGIDISKGRSMIAVMRPFGEVVISPFEVRHTDSELSELARQLKSLDGETRVVMEATGNYHTPVAKLLHDTGLYVSVVNAKLVHGYGNNDLRRVKTDKKDSVKLANYGLDRWLTLTRYVPEEDTRLLLKNCYRQYRQYSKVQTVLKNNLISLLDTVFPNVNRLFSSPIRGDGSEKWVDFVAEFWHCRCVSEKSQKAFTNKYQRWCRKHGYNFSEAKAHTIHAEACGHIDVIPKSETTKLLVEQAVAQLRATSAALAALKHEMQALASMLPEYPVVMDMFGVGPTLGPQLMAEIGDVRRFYSKKALVAYAGLDAPPNDSGDVIGRHKSMSKVGASSLRRTLFLVMSVYLQNAPLDEPVFRFMDKKRAEGKPYRVYMMASANKFLRIYYATVKAYLESLEQTA

SEQ ID NO: 342166 - protein, 402 aa, unidentified
MNAVGIDVSKGKSMVAIMRPFGEIVSTPFEIKHTTSDIHSLVELINSVEGESRIVMEHTGRYYEVLAHQLSEANLFVSTINPKLIKDFDNDSLRKVKSDKADAVKIARYALDKWQNLKQYSVMDELRNQLKTMNRQFGFYMKHKTAMKNNLISILDQTYPGVNTYFDSPARSDGSQKWVDFASTYWHVDCVRKMSLNAFIDHYQNWCKRKKYNFSQSKAEEIYGKAKELVPVLSKDAITKLIIKQAVDQLNSASTTVESLRTLMNETASKLPEYPVVMAMKGVGTSLGPQLIAEIGDVSRFTHKSAITAFAGVDPGVNESGTYEQKSVPTSKRGSADLRKTLFQVMDVLIKMMPQDDPVYQFLDKKRSQGKPYYVYMTAGANKFIRIYYGRVKEYLASLPES

SEQ ID NO: 342167 - protein, 351 aa, unidentified
MPRKTDSAVVRTIGIDTGKNILHLVGLDEKGVVVLREKVSRSRIAARLVNVPPCLVGIEAGMATHYMARELVALGHAVKQVPPAFAKPFRQGHKNDFRDAHAVAEAVQRPSTRCVPIKTDDQLDLQALHRVRSRLVGDRTAVINQLRGFLLEHGIAVRQGHRFLRQQLPQILATRADVLSPRMIRIIGDLVEDWAHLDERIETVTDEIEGLARTDVSCGRLMTVPGIGPIIASAMVAAIGDGAAFAKGRDFAAWLGLVPRQMSTGDRTILGRITKRGNRYLRMLFIQGARAIQLHPASWAKHSFGPWLTAAARRLHCNVLTVALANKLARIALTVLVQARNYETRIEPAAA

SEQ ID NO: 342168 - protein, 340 aa, unidentified
MNKSTTIGIDLAKTVFFVVVLDQRGKQARRKKLRRSELLPFLANYPEAMIAMEACSGAHYWAREMESLGHVVELLPAQHIKGYLRGQKNDYNDAEAIAEAAQHGRIRTVAVKSVEQQLDQSLHRLRQALVAEQTRLVNRARALCAEHGLIMPEGKHRFRHSLVALLEDAENGLPWRLRELLGRQYQLFLGLEDELAWYEREIKKQAAENETCQRLMSIPGYGPIVSSAFYGWMGSGQQFRSGRDVAAALGLVPKQYSTGGRAVLGGISKRGDKHLRALLVHGARAVARYAKRHDDRLSRWVCNLIERRGYNKAVVALANKLARIGWAVVTKEQAYAAIPA

SEQ ID NO: 342169 - protein, 414 aa, unidentified
MDTIFENVAGLDVHRKTIVACVRRSQPQGGIVEQVRTFGTMTGDLLGLSDWLEKAGVTHVAMESTGVLWKPVWNILDGRFELLLVNPRELKQAPGRKSDVNDSQWIAHLLQCGLLRSSFVPSRPQRELRDLTRQRTQLIREQTRIANRIHKTLEDANIKLGAVASDILGKSGRAMLDAIVAGERNPRKLAELAEGRLRGKIPQLKQALRGHLNEHHVFLLQTLLSHLDFLEQQIAAFSQRIAVCLSPFLNPEQMRRLDAIPGMNCRTIENVVAEIGTDMSRFPDAEHLSSWAGMCPGNEESAGKRVRHRTTKGNSWLRCALTEAAWAASHTKHSYLGAQYRRFAARRGRKRALTAVGHTLLVIVYHMLKTEDSYKDLGPDFFDKLKPEQYRRYLVKRLESLGFDVELKPKDAAA

SEQ ID NO: 342170 - protein, 360 aa, unidentified
MAQVRTWVGLDVHAAKVVAAIADSGSGELAVQRMGGHTEQVAEFCASLPAPVRVAYEAGPTGFGLARALAARGIQCTVAAPGKIERPAQDRVKTDRRDAERLARLLMIGGLHPVRVPSPAEEAMRDLVRAREDVRGDLMRARHRVAKLLLRHDLRFEGNNWTQRHLDWLGRVELPEPVAQSVLLDGIGAIEALLVRRESLESQMASLVEGSPWERQVAHLRCLRGIDTLSALGLCAEVGDFERFARPAQLMSYLGLVPSENSSGEKRRQGAITKSGSRHARRLLVEAAWHYRRAPRKGRELRRRQEGQPQAVCAISWKAQQRLHRSWVRLDSERGKRRTLCAVAVARELTGFCWAVATAD

SEQ ID NO: 342171 - protein, 320 aa, unidentified
MMAQVDLVVVGIDVAKDKVDACIRSLPLRQTCPSTAQGQRKLVAWLRKHKVNKAVMEASGGYEREWVRVLHQAGIEVRIVDPKRVRSFALSAGRLAKNDAIDAEMIAWFAETFSEAPSPTHDAAHEELQALVKARKGLLDLKTRLQNQNEHAAPGPVQRAYARILKSLAAEIAKLEAAIAVKIKATPDFAERAEIIESVPGLAETTSATIIAGMPELGQVSNKISPALLGAAPYDDDSGHRRGERHIKGGRRWLRNAIYMPCLGAATQNNPVLKAFYRRLIAKGKEPKVALIACMRKLIVILNTMIARRQKWDPSRYALN

SEQ ID NO: 342172 - protein, 340 aa, unidentified
MFKNFVGIDVSKSKFDLALIKGQDKDHVIQGVFDNTLKGIKSMNNFLEREHKVQLSETLFCMEFTGVYGYPLTDFFVKKDCHVWIEMPVNIIRSLGLQRGKNDRVDAHRIALYAYKNRDDVRLWKPQREAILKLRDLLALRDRLITAQKSLQMPINEKISMGDKKGAEILRKGCQKSMSSLENEIGQIDKNLDDIIKEDPQLKELFQLATSVPGIGKLTALFMICFTNEFSMYTNPKQLACYCGVAPFEHSSGSSIRGRTRVSHMANKVLKRMLHMGAMSVISRDPELREYYQRKVAQGKNKMLVINAVRNKIIHRLCAVIKRGYEYQSENIFKERLVLS

SEQ ID NO: 342173 - protein, 421 aa, unidentified
MRGIRGKRVKMVKEGTLLVTIDIGMTSNTGYCTTVDGRDTKPFKFGNTREGLDVFWSMLLTSKNRFCCSEVVVGYESTGPYAEPLVHYLMDKPVTIVQVNPMHTKRIKELNDNSPLKTDDKDPRVIADVLRLGHALSVVVPEGDAAYLRRLNNARERHVGERTALLNQLQQLVFLIFPEFKTVFKDVTVKTARHILKNYTTPERIGTLHKDELGEEIRKRSMGKFGVRQAELLISLARDTIGIKEGVAGIVLDIHHILVQLEAVNGFIAEIETEMAKALERIPCSMRILSMKGLGVVTVAGLIGEVGDFSKFRTQSEIMKLAGLDLYEISSGKRKGQKRISKRGRSLLRKILYNAAVGTIRKNGIMCTQYEKLIGRGMKRTPALIVIAKKLLRIIHAMLRDDRDYIRNYESPKRVVIKKAA

SEQ ID NO: 342174 - protein, 525 aa, unidentified
MPYHVSRPSRRAHRKSNPNKRQSLQKPNGVISPRVQKVGGEKFAIVCVDPAKHRSEWMMADYFGNLHIEPRTLDHRRAFFNLAVEQIREAQQLHDIQDMIVVVERTGTYYLAPKRAFANAGFDTRVVHPFATKQYRMPADPGNKTDETDLYAQHRAAVAGFGLCEFELESPYRELQLRARHRRNLVEKAAALACQIREHLHLAMPGYANLFDRLFERPTALALAHHCDSPARLLELGQAKLRKYLRKNKVRHQVRTIDKVLAWASQTVNDPIQDGPMHHAIWTDLHDLYTHFQRQISIVEQHLAVDLVQTPYVRLLAIPGINVVSAADLAGEMGPMKRYANANAITGRAGLYPSRYQSDETDIDSGPIIRQANRRLRCALMRIADNLACHCSYYRGQAGMDEARGVDKRSSRVRIAKRFSRLALACVAGDEPMRHPCFQSPDSILEKLRKFHHEHRSSIERTLADLETAVGQLPGHTQDHEAKIVADILQQHANHRRGASAIGDLLPAVLARLGIDTTKERRDRS

SEQ ID NO: 342175 - protein, 413 aa, unidentified
MSSKLNTAIAVVGIDIGKNSFHVVGLDKRGAIVLRQKWSRGQVEARFANMPPCLIGMEACVGAHHLSRKLQALGHDARLMPAKYVRPYSKGQKNDFRDAEATAEAVQRPTMRFVATKSADQLDLQALHRVRERLVGQRTGIINQIRAFLLERGVAVRQGLRFLRAELPTILATRTDVLSPRMLHIIEGLADDWRRLDERIEALSSEIGALACADPGCERLMTVPGIGPIISSAMVAAIGNGAVFAKGRDFGACLGLVPKQISTGDRTILGAISRRGNRYLRALFVQAAWVVLVRIKDWDRYGLKAWIDAAKKRLHHNVLAIALANKLARIAWAVLNRGPRVRMREDARDGVPTCMSVAQCSEPSRPSPAGGRTERPVLTALCAVPRSNCGPGRRNGPNGTNKGTAPKRKIAIM

SEQ ID NO: 342176 - protein, 338 aa, unidentified
MKPIMIGLDLAKSVFQVHGVDEAGRVVVRRQLRRGQVEGFFAKLAPAVIGMEACGGAHHWARRLQGLGHEVRLMPAAYVKPYVKRNKTDGRDAEAICEAMQRPTMRFVAVKRVEQQGVAALHRTRALLVRQRTMAANALRAAFAEFGVVAAPGLRGVRELIAQLPAAAIPADAGQALLVLARHWEALGADIQALETRIVQAVRADEAARRLMAIPGLGPISASAILAAVPDARLFRSGRGFAAWLGLTPRQNNSGGKRRAGGISKQGERYIRSLLILGASAHLRQERSRGVKDPWLRGLLARRPVKVAAVARAAKTARVVWALLAKGERYRAPAQLAA

SEQ ID NO: 342177 - protein, 424 aa, unidentified
MNQQIPEKFAACIGIDWGDEAHYVSLLAADGQQVEHHKLEHKPAALAQWLSDLQRRFPGQQLAVALEQSRGALVYALMSHQFLVLYPVNPKALAKFRETFYLSGAKDDPVDSDLLLELLTLHRNRLRAWQPDDELTRTITLMVEHRRRLVNMQTRLTNQLSSLLKLYFPQALPWAGDLATVQACDFLQRWPTLAKLQQTTATKLRQFYRAHGCRKPLVIEARLEQIPTALPLTTDGAVITASVVMVQALTAQLRPLLASLKQLDKQIAELFATHDDQEIFSSFPGAGPVLAPRLLVAFGTNRERFSSAQEMQQLSGIAPVIERSGKSCFIHRRFACPKFLRQSFHEFAAQSLRWCPWARLYYHQQRQRGSAHHTAVRSLAFRWIRIIYRCWQTRELYNEDFYQQALHKRGSALARQLLPPEVPA

SEQ ID NO: 342178 - protein, 368 aa, unidentified
MESQTQSIGKLYSQKEKVSYKNVNIYAGIDAHLKSWKVTIMTEHLVYKTFSQDPKPELLYEHLVKNYPGGIYHSAYEAGFCGYWIHNRLTALGINSIVANPADIPTTDKEKVQKEDARDSRKIAKSLMNKDLKPIYVPTIKTLADRSLMRARATLVKELTRNKNRTKSFLHFYGIEIPERFSGQTVWSKAFVNWLNSIELPEKTGRDALDTYIKASVDTRASLLRILRLIRALSETPEYKEQVILLRSIPGIALITAMTLLTELENIHRFESFDRLCAFIGFIPSTSSSGDWDGTGDITRRGHSVLRKTIIESTWMAIRRDPALAKSYHDYCKRMEANKAIVRVAKKLLNRIKFVLKNKQAYELAVVK

SEQ ID NO: 342179 - protein, 410 aa, unidentified
MNAAGIDVSKGKSMVSVMRPFGEVVAKPFTVRHTGSELKELADYLKSLDGETRIIMEHTGRYYEPVAQFLHDAGLYVSAVNPKLIKDYGNNSLRKVKTDKADSRKIAKYGLDNWVELRQYVSMDKIRYQLKTLNRQCNLYGKTKTMMKNNLIALLDQTYPGVNDLFDSPVREDGTQKWVDFAASFWHLECVKNMSLDAFTGRYRKWCKRNKYNFSSDKAAEIYAGVQDQIAMLPKDALTKLMIRQAINALNAVSATLEKLKAEMLELSSQLPEYPVVMEMRGVGDSLGPQLMAEIGDVMRFARRSAITSFAGVDPGADQSGGHEAKSVPTSKSGPPELRKALFLVMDHLIQTKPLDDPAYQFMDKKRAEGKPYLVYMTAGANKFLRIYYGRVKEYLTKLEQPLAPNPEQH

SEQ ID NO: 342180 - protein, 346 aa, unidentified
MTIVETRAITGGVDTHADVHVAAALDPVGGLLGVREFPASPAGYAGLLGWLGGFGTIALAGIEGTGSYGAGLARHIAAAGVRVVEVDRADRQDRRRQGKSDPLDAVSAARAAQSGRARGAPKGRDGAVEAIRALMVAKRSAAGERTRTINQARALILTGPDDLRARFAQQAPAALVAGIASLRPRPGDVAGHATRVALREPGRRAAFLDGQLERLDELIVPLVSARAPGLLALYGIGPNTAALLLIAAGDHPGRLRSEAAWAHLCAAAPIPASSGKVTRHRLNPGGDRQANHALWRIVFTRMGSDAATRAYVERRAKEGKSKAEIIRCLKRYVARQVYPYLRPGAG

SEQ ID NO: 342181 - protein, 411 aa, unidentified
MKMAGIDVHKKVLMVVVIETTSPEEKPERRRFTTLPGDLSRLSSWLRAQDVQEAVMESTAQYWRTVWLELEPHMLLHLAHAFSNRAPRGRKHDFKDAERLVRRLFADELILSFVPNGEQRIWRNLTRMKMQLTRDRIRLQSQMECLLEEMRIKLSSVVTDLLGASGLRILRALAAGETEAKRLAALGDNRLKCTEEQLLDALTGSSQPMHREMLALQLERLQLLDTQIAKLNNLIAQGMKPHQEAVMRLAEVPGLGVDSAQQIIAEVGAQAGTFSSAAELTSWVGTCPGKDESAEQNHSSRSAKGNKYLRRVLNQAAHAAVKKRGSYFQVVFRRLLPRLGYQSAIWAIAHRLCRVVWKILHEGARFIEKGSEPDAQTKKKRARMLVQALRRLGYDVAITATHLATQNAMQV

SEQ ID NO: 342182 - protein, 428 aa, unidentified
MNCNTQNAKIASITEKTLIVGIDVGSVTHYARAFDWRNYEYTKKPLEFSNTEEGFLTFKAWVEDIAEKHGKTAVIPGMEPTGHYWFALGKFLQDCGMKPVHVNPHHVKKSKELDDNNPNKNDRKDPKTIAALVNEGRFSYPYIPTGIYAEIRNLSNLRFQTQEELTRIKNRIARWFSIYFPEYQDVYGDLKAVSGRMILKVAPLPEDIRRLGAEGVNLIWRDAKLRGAGMKRAKTLVTAAEHSVGSKEAPEAARIELRNLLSDMDVYALRLGELLQSIEEKLKEIPYMDKLMGIKGIGLVTVSGFIAEVGDIGRFDNPKQLQKLAGYAIVANYSGKHNGESRISYRGRKRLRYVLYEAAISLIGKNPEFREIHEYYRTRKENPLKKMQSVVAVACKILRIFYKILTTGVAYDAEKLMGDIKRPQLQTA

SEQ ID NO: 342183 - protein, 370 aa, unidentified
MLDTTTFVGLDVHARSIKAVSLDVMTGEVRAATFGYDAGAVAEWVRSVDPGARCVYESGVTGFDLQKRLSGLGVDCVVGAVSKMIKPSADRRRKNDRNDAEFLARMLSVGNVVEVWVPDDECEAARDLTRALEDARDDLSRSKQRLSKFLLRHGLVFDERTPTGRRKGNWTRAHWSWIESIRFAERADEEVLAYYVDAVRRAAEEKARLEGLVEGEARKPRWRRRVDSLRCLKGVDTASAADLVFEAGEFSRFRNARSFAAWVGLTPSEHSSGESDRRGAITKAGNKHLRKTLVEAAWHYLTCSGRPKDLAKGQAPDRGARRHAAKGVRRLVERREALLARGVHGSKANVATARELACWVWAVGLMAEEA

SEQ ID NO: 342184 - protein, 349 aa, unidentified
MEQNELILGVDTHLDTHVGAVISDTGRLLGTLSVTTNTAGYLDLLTWANSFGPLRRAGVEGTGTYGAGLARVLRDHGIEVLEVNRPDRAMRRSKGKSDPTDAENAARAVLAGRATAIPKEQSGAAEAMRAVSVARRSAVKAKTQAINQLRALLVSAPQEIRERLLKAKTAECVEGCARLRSLGKTPMLQTLTTTLRLLAKRWLTLAEELKALDAMLDSLTSQHARRVRERFGVGPQTAAVLVAVAGDNPERLKNEAALAALCGTSPLQASSGKTVRHRLNRGGDRSANNALWTIAMVRMRSDPRTRAYVERRTKEGMSNKEIHRCLKRYIVRELYPLILADLADSTAAA

SEQ ID NO: 342185 - protein, 343 aa, unidentified
MQIVRIGLDLAKNVFEVCGVDMRDSVVLRKTLRRDAVPQFFAELPPCFIGIEACSSSHYWAKVFTDLGHQVRLIAPQFVTPYVKSNKNDRNDAEAICEAISRPSMGFVPPKSSEQLEIQAVHRIRQRLVSSRTRLVNQIRGLLAEHGVVIGRDISRLRRALSQIVEGSERALGGLIQELASDIHQELAALDERISSYDRRIRNVFRANEMCQRIGKIEGIGPITATALVAAVGDQSCFKNGRQFAAWLGLVPKQRSSGGKSRLFGISKRGDRYLRTLLIHGARAVLGKAGGKQDARSVWINRMRERRHPNVVAVAIANKNARIVWSILSKNEDYRGLETPQAV

SEQ ID NO: 342186 - protein, 358 aa, unidentified
MKHNNTNTQKSSSTKTAAKAKIIKLGIDVHADSFSVVRQIDNDTPPPAQKFTPEGFVKWVAKQLPAAEKVHRCYEAGPFGYSLHRQLLRMGVQNVVVRPQNWDELGRKVKTDRIDALALVQRLDRYVQGNRHALAVIAVPTPEQEQARGLGRHRQQLVQERQTHEAQGRSFLLYHGRRVQGQWWQPFAWEVLQQELEPWQCRILENFRAQILLADQPLAQVEKQVVAEAVSPAKGFGALTCQLLGREVLDWKRFANRRQVASLTGMCPSVHASGGHSRQGSITKHGNPRIRRLLVELAWRVVRFQPNYPPVQKWRPQLDNKRARGGRKKAAVAIGRHLAIDLWRMETGRSTAAQLHLT

SEQ ID NO: 342187 - protein, 315 aa, unidentified
MEKANPPPVFVGIDVAKDRLDVHVLPSGEALAFSNDDAGVSRITTLLAGLPAALVVLEATGGYEARLAADLAAAGLPVAVVNPRQVRDFARATGRLAKTDRIDAALLALFAERIRPEPRPMPDAQAQALAELVARRRQVVEMIVMEGNRRRCARNPKVRAAIDATLAVLRAQLAGLDGDVESAVRTSPLWRATEDLLRSVPGIGGVTARTLIADLPELGHLDRRRLAALVGVAPVNRDSGQQRGYRAIAGGRASLRNALFMATLVAVRRNAVLKAHYDALVARGRPKKVALIACIRRLLGILNALVRTKTPWQPA

SEQ ID NO: 342188 - protein, 358 aa, unidentified
MAVIEGVCRIVGGVDTHKDLHVAAIVDEQDRVIGTRSFATTRQGYRQMLAWMRSFGELQRIGIESTGSYGAGLLRFMQQAKVTVLEVTTPDKQDRRRRGKNDDLDAQNAAHAAFAGQRTVTPRSRDGMIESLRVLMACRKTAVSARRVALQMIHNTIVCAPDGLRDQLRSLTRMQLVRTLASWRPDLTAYRDLDSAYRIGLKSLARRYLELHDEIADLDAMIAAIVDELAPNLVARNSIGHTGAAQLLLTAGDNPERLRSEASFASLCGVSPVPASSGRTVRHRLNRGGDRAANSALHIIAIGRLRTDQRTKDYVARRLAEGHSKLDAIRALKRYLAREVFTLITQRRKEINATRIAA

SEQ ID NO: 342189 - protein, 430 aa, unidentified
MTRMKPMPIDAALVAIDVSKNRNDVLIEVPGRHRRRRLVVPNTRVEHDHFIALLNELGCPVVAGFEATRNYHRPLAYRLLEAGFELRLVSSVALARTREALHNGWDKNDPKDAQVILHMLKIGATQTYLDPICAGINDIQELSKTHEIVSKAKTELWHRLLTHYLPLYFPEAARFAGNSRSDWFLAFLEAFPTPASIAMYEKNAFIDAAWDVVGKKVSKAQLLGDIYETAQSSIGLPVELDSSAIVMFRMVIAEGRSLIRQRDEIERHADFVLRDNPDYRRLRQIPGIGPIIAMTILAEAGDLRRFRHHRQFLKFCGLDLATHQSGQFRGQTRLSKFGNARLRRAFWMAAQVAIRQRDNNFRAKFERYIAKDRDNADLKRKALTAITAKMARITHAVIKTGTDYRPFIEEPIPSGRTSIRTGREGASATL

SEQ ID NO: 342190 - protein, 322 aa, unidentified
MQIIGIDVAKATFDIALPLGQGKFRTRAKRANTASGWEELLAWRRKHAPDAAVGMEATGIYHEALARHLVQAGVTVYVVNPARIKAYGASELLRTKTDRTDAKLIARFFQASQLDGRLVPYVPPTPSELTLRALVRRLDDLKQMRQMELNRRESASEVVIAGIDTHVQALDEQIREIEQAITDHIDNDPDLRGRRDLLTSIPGIADTTSAHLLARLGDLRQYSDVGQIVAHAGLNPAQRQSGKFEGKVRISRIGDATLRAKLYMPALVAKRHNPVLAAFAERLAARGKPPKLILCAVMRKLLHLIWGVLRSGKPFDPQHAVA

SEQ ID NO: 342191 - protein, 480 aa, unidentified
MAEKTARESDKTQRLTRKQRKELGRRIWSEHPGLDVVHRDAAGIDIGSREHYVAVGPDRDAEPVRMFGCFTADLQRMAGWLKECGIATVVMQSTGVYWIPVYDVLEQNGFDVWLVNARETRNLPGRKSDVQESQWLLKLHTYGLLRKSFRPAQDIRALRTCWRERAEYVQQAGTCIQRMQKALTEMNVQLSTVLSDLSGVTGMRILRAIAAGERDGMRLAEFRDPNVKASKEIIAQSLEGTWVPEQLAIVKRQLADWDHLQQQIAACDVDLQAMMKKLPDAKTEPKPPSPDPTGPRKRRRKNGRSSSNEPKFDLSAELKRVAGVDLTRIDGIKVLTIQTIITEAGLDMSKWATEDHFVSWIGFSPRNDVSGGKILKKKTRRVVSRLATALRMAATTLRKSESYLGAQFRRLRARLGAPKAITAMGAKLARLVYRMLKYGQEYVDKGTEHYNTRYREQQIKLLQKKAAQHGFTLVPQPLPA

SEQ ID NO: 342192 - protein, 387 aa, unidentified
MYFVGIDISKFKHDCAIVDEFGDVITPSWSFQNDREGFSLLKELLDALDGEKKIGLEATGHYGQNLKLFLENNDFSFMEFNPLLINRFVHSKSLRKTKTDSIDALMIAQYLMTVEYKPYPPSFYTFEKLKSLTRFRDSLIRQRSRQLVELTNILDKVFPEFKPFFKGRFSATALYILSHYASPEKISNMNSKSYEPLRHLSRGRFSMVDFVELKTLARNTVGSTSDYLLQEMEITIDIYNQLQSKAEEIELQIHDCVLDLAPPMLTIPGIGAASAAVILSEFGDLSKFNNPSKLLSFAGMEPGYFQSGTSESTGKMVKHGSSHLRYAMMNCAQTVINNEPTFAAYYAKKRAEGKEHRVALTHVAKKLLRVIYTLQTKELSYNPDLVR

SEQ ID NO: 342193 - protein, 348 aa, unidentified
MAHFVGLDVSVKETSVCVVDDAGKVILEQKVPTEPADIIALLTSLGVSYGRIGIEAGPLSQWLVSVLITAELPVICVETRHMKALLTAQQINKTDRNDARGIAQMMRVGLFKPVHVKTLVAQEQRMLLTSRKLLQRKLLDLESDLRGTLRNFGLRVGVVSGSRYEARVRELVAGFPGLAAIAEPLLNVRRVMRQQFAVLHKMLLDTVRGDLVCRRLMTAPGVGAVVALTYRATIDQPQRFVHSRAVGAHVGLTPKRYQSGEIDYDGRVSKCGDALLRTMLYEAAQVLLTHGNRWSWLKAWGMRVAQRRGIRRAIVAVARRLAVVLHRMWVDGSEFRWSKDSVAVPAVA

SEQ ID NO: 342194 - protein, 389 aa, unidentified
MKIYVGIDIAKLNHFAAAISSDGEIILEPFKFTNDADGFQLLVSKLESFDKDSIIIGLESTAHYGDNLVRYLVAEFYQVCVLNPIKTCQMRKNNIRKTKTDKVDTFVIAKTLMMQDDLRFITFFDLDMMDLKALGRFRQKAIKQRTRLKIQLTTYVDQVFPEIQYFFKSGLHQHAVYALLKEAPSPKEIASMHMTHLANLLKVNSHGHFTKEQAKELRVLAQKSVGANDSAISIQITQTIQQIELLDSQLEKIEAEMTDIMRFNDSVIMTIPGIGYINGGMILGEIGDIHRFSNPNKLLAFAGLDPSVYQSGNFQAKTTRMSKRGSRVLRYALVNAAWNVVRNNATFKAYYDAKRAEGRSHYNALGHCAGKLVRVIWKMLTDEVEFNLE

SEQ ID NO: 342195 - protein, 358 aa, unidentified
MKESYFIGLDIAKNIFQVFTADGKGREISNKKLIRSAMTRYFAQLPESVVGIEACGTAHHWARTLTAFGHTVKLINPQRAKAFLGSRNKTDAADAKAICEALMHPGTTFIRAKSLEEQDIDHLLARRELLVQNRTQVINQIRAFLCERGIAIPQGRHNFMKNLPQIIAEKWGEFSGKFQAILTDNYSDYLDLDKKIAKLDKMIQVEATNTAPCKRLIQLSGIGPQTALALFAHVGNATHFKNGRQMSAYLGLTPREHSSGGKQRLLGISKRGNVRLRTLLLLGARAAILGIGRRRRGGDGQPVRLSYLDKWIMGMVERIGLFKAAVAFANKLCRIAWALLARGEEFNPMRLYRLEKVA

SEQ ID NO: 342196 - protein, 340 aa, unidentified
MKLYGAIDLHSTNNVTVVIDEQDRVVYQKRLPNDLALILNELSVYQAELQGIVVESTYNWYWLVDGLMAEGYKVHLANTAAIQQYNGLKYTDDNSDARWLAHLLRLGVLRQGYIYPRADRPVRDLLRKRSQMVRQRTTNLLSIQNLLTRNTGSSLNANRVKGLDVQQVDELLPDGDLALAVKANLSVMSSADEQTKILERTVIERVQLRPQFCFLKTVPGIGKILSLTIMLETGDIRRFASVGNYASYCRCVGSQKISNSKKKGKGNTKNGNKYLAWAFVEAAHFAIQFNSKIKSFYQRKKAKTKGVVAIKAVAHKLCRASYYIMRDRVPFNITKAFGQN

SEQ ID NO: 342197 - protein, 349 aa, unidentified
MLAAELDYVVGVDTHRDRHTLAVVAAPSGGVVAERSVGASARGYAQAVRFAEKHAPGARVWAVEGAGHYGAGLARHLSRRGETVIEGGRGPRDERRLRGKDDPLDAIRAARAALASDTLALPRMGQRREALRLLLVARRGAIEVRRRALVQLRSVIVTAPNQLRAELQALPERRLLDRCSGFRRSRSSPVDELATKLVLRTLARRIEAATTEANELECEILGHVRALAPRLLDERGVGPIVAADVIVAWSHAGRVRSEAAFARLAGVAPVPASSGQTIRHRLSRGGDRQLNRALHTVVLQRRLHDPTTQAYIERRVAEGKTRREATRLLKRYLARHLYRLLQQTEPLIT

SEQ ID NO: 342198 - protein, 364 aa, unidentified
MDVHLRSTTVCALDAETGEAVARRFRGNPWGEVAEWMSGFPGPSLAAYESGYLGFAPQRELSALGVDCVVAAVSKVPRSAADLSSKNDRNDAARMAKAILSHDITPVWVPSPEIEGLRDLAGAHDAATARLAAAKQRLLAFLARRGYAYGGTTPAGNPRKYWTYGFLRWLDGIHPADDGGIRALAALRNEVEAADETREAVLAEYRAAVAAGPLSAEVEALQSIKGCGFALAAAFAAEVGDFSRFRSGRQVTAYFGLAPKQRSSADSVRLGGISGAGNALVRKLAVEGSWCYAQAGHQPKLMPKGSGVPLEIRMHGRKGSERLLRRREEMLERGMPQAKANAATAAELVRWLWALGAMCREAGE

SEQ ID NO: 342199 - protein, 354 aa, unidentified
MSQKLNTAIAVIGIDIGKNSFHVVGLDDRGAIALRQKWSRGQVETRLANIPPCLIGMEACVGAHHLSRRLRMLGHDAKLMPAKYVRPYSKGQKNDFRDAEAIAEAVQRPTMKFVATKTPEQLDLEALHRVRERLVSQRTGIINQIRAFLLERGIAIRQGLRFLRAELPQILATRTDVLSARMLRAIEELASDWRRLDERIEGLSTEIEALARQDMACQRLMTVPGIGPIISSAMVAAIGNGAVFSKGRDFGAWLGLVPRQISTGDRTILGKISRRGNRYLRVLLVQAAWVVLIRPKTWERHGLKPWIEAAKKRLHHNVLAIALANKLARIAWAVLSKEREFEYARTDEMTSRSA

SEQ ID NO: 342200 - protein, 336 aa, unidentified
MKLIKQNVGVDISKQTFDATFAEMKENQDVLYKGYRKFDNSSDGIKKFSEWCNKLKNEDQELHITMEATGVYYESLAYRMKDKIGMVVHVVLPNNVKKYSESLNSTVKTDKVDSKLLSLFGVERKLRVFKPMSDIYIKLRKLSREKEQLVNERTMVMNQKHAETYSENPLKKTITRYNQRIKYLKKQILMVEIDIKSLVDKDEFLSSKVSKIETIPGIGFNTIVGVIAETGGFENITSIKQLTSYSGMDVMIKESGQWIGRSRISKKGNSHIRRLMYMPTLSLVRHSSTFKNNYERIIEGKEYKMKGIIAMQRKALGLIYTLWKNDAVYDENYIGK

SEQ ID NO: 342201 - protein, 357 aa, unidentified
MCILTANGEKIEDVFGTLTPELDRLRDTLVSHGVGKVAMESTSIYWVPIWRILECDFDVKLVNPYFIRQLPGRKTDIKDAQWIATVLQKELIKGSYIPDSKIQELRQYSRRIFHLTRRKQQAESAIDLTLQRCNIRLSNYVSDIGCKSMRKVVNALICGETDSEVLALLVHKRIRNKHCHEVIKSSLTGIVSSSDRDMLKMSLEEVELYDRQLLECKEKMRIICEGHYAEELEILQTTPGIKEESAMRIIAEIGVDMKAFLTASALVGWAGLRPRNDQSAGKIKGRKTLHGNKYLRVMLTQCAWGACRTQTSKFYSRYHTLKKRMNHNKALMANARKLLVVIWNLLAKKQPYMPLVN

SEQ ID NO: 342202 - protein, 320 aa, unidentified
MTTVYKRFIGVDVASRKLDLFDSVSTEHQMIDNTPEAINAWMKHLRRKRVKTIVVMEATGGYESNLVDALHEADIDCSVCNPAQVRSFAKGIGLIEKNDPIDARMIARFGEVVTPKLREKPSPEERKLKALVHRRDQVLSQQSAERNRLAQARDEEVREVIQEALDFYKRQIVGIEKKIASVIDASGPMSERSALLSSCPGVGTATVAMFLAELPELGSLNRGQIAKLVGVAPIVRDSGQKEGKRSTFAGRSLVRKVLYMAALVATRHNSIMKAFYQRLLAKGKPPKVAIVAVMRKLLVTLNVMVREGTPWREPTLDPAA

SEQ ID NO: 342203 - protein, 371 aa, unidentified
MKQQTKSSNITVGLDLGDRRHRFCALDERGEVVEEGSICNERDSLRKLAGRYHGALGVMEAGVHSPWISRFLEALGWRVVVSNPRKVRAIYQHERKSDQRDALMLARIGRMDLALLYPVRHGTAEAQQDLLRIKLRDSLVRARVAVINSVRFTLKSLGYTVRNPSSARFHKVVMEEVPESVREIITPSVQALAELTARIKMLELEINTLAQMKYPQSAQLQQIPGVGPITALYFVLKIEDPNRFAHVRDVGAYAGLCPRRDQSGESDPQLRISKRGDAYLRRLLVSAAHYILGPFGPQSALRAYGLMLAADGTARAKKRATVAVARKLAVLLLSLWKSQQPYQPFPGACLNGEQEDRRSGTIALHRMEATD

SEQ ID NO: 342204 - protein, 369 aa, unidentified
MSTHKYVGLDVHKDTVTIAIADGRREGEVRLYGEVSNDLEAIDRVLRKLRADGSTLHVVYEAGPTGFVLYRRMRQWNLECIVVAPSKTPQEKGGRQKSDQRDALQLARLHRAGELKGIHVPEEADEAIRDLTRARADAVDDLRRAKQRLKGFLLRHGYRYKGKANWSEAHQRYLRELVLPLPALKAVVEEALVTITQATERIARLEALIEVQVPQWRMYPAVQALMCLRGFQLTAAAVLVAELGDIHRFAHPRHLMAFLGLIPRQRSSGEKLRLSGITKMGNAHARWILVEAVQHALLPPKVSSHLAVRQEGQRTEYRTIAWKAQVRLHQRGWHLLQRGLMKAKVLIALARELCGFVWDLLRAVPIPAN

SEQ ID NO: 342205 - protein, 372 aa, unidentified
MTSMTSTSPDVTPAAIHVTVGVDTHSDIHHAAVIDAVGRPLADSGFPTTPAGYEQLLVWARGHGQVSAFGVEGTGAYGAGLARHLRAAGQVVIEVDRPDRTTRRQRGKSDPIDAYAAAAAVLRGTASGTPKTRDGQVEAIRTLRVARRSAIKARTQAINQLKALVLTGPAELRQALAGQSSRELLETCRRLRANRGLAELADPVTAATKLTLRRLARRITALREEIDDIDTELRPLVAATAPALLAVYGVGTEVAAQLLITAGDNPERLRSEAAFAQLCGTAPLPASSGRTTRHRLNRGGDRHANYALHIIALVRLSAHQPTRDYAARRRTQGLSNLEIIRCLIGQVSGGGRGRAPAVARGRVGGWPRCLAR

SEQ ID NO: 342206 - protein, 402 aa, unidentified
MNAVGIDVSKGKSMVAIMRPFGEIVSTPFEIKHTSSDINSLVKLIKSIEGESRIVMEHTGRYYEVLAHQLSEANLFVSAINPKLIKDFDNDSLRKVKTDKADSVKIARYALDKWQNLKQYSVMDELRNQLKTMNRQFGFYMKHKTAMKNNLIGILDQTYPGVNTYFDSPARSDGSQKWVDFASTYWHVDCVRKMSLNAFIDHYQNWCKRKKYNFSQSKAEEIYGKAKELVPVLPKDDITKLIIKQAVNQLNSASTTVESLRTLMNETASKLPEYPIVMAMKGVGASLGPQLMAEIGDVSRFTHKGAITAFAGVDPGVNESGSYEQKSVPTSKRGSSDLRKTLFQVMDVLIKTHPQDDPVYQFLDKKRAQKKPYYVYMTAGANKFLRIYYGRVKEYLSSLPES

SEQ ID NO: 342207 - protein, 338 aa, unidentified
MKLFGAIDLHSNNNVTVLIDERDEVVYRKRLPNDLRLIIEQLSPYQSTLEGIVVESTYNWYWLVDGLMEKEHRVHLANTAAIQQYEGLKYTDDDSDARWLAHLLRLGVLPQGYIYPKQERAVRDLLRKRSQLVHQKTANLLSVQNLYTRNTGSSLSANRIKKLTLEQVDGLFTMGDVGLAVKANLSVMRCLEAEIKSLEQVVKERVKLKPAFRYLLTVSGIGQTLALTIMLETGDIRRFPRVGNFASYCRCVGSEKLSNGKRKGKGNTKNGNKYLSWAFVEAANFAIRYEPLIARFYQRKKAKTHGVVAIKAVAHKLSRACYYVMRDEVPFDVGRAFA

SEQ ID NO: 342208 - protein, 366 aa, unidentified
MKKTSTVRVNGNMIFKGHKLTIGVDLGDRWSNYCVLDEAGEILLEQKLATTPEGMKQTFERIPRSLIAMETGTHSPWVSRLLKELGHEVLVAHAQKVELISKSTRKDDRHDARTLARLARIDPELLGPVRHRSAKAQIHLTVIRARAALVSARTALVNAARGLVKSYGQRLPKCGTQQVSRELGAKLNAELREVLEPLLKEIESLNERIKEYDERMEKIAKESYPHVELLKQVKGVGTQIALTYVLTLDDPHRFPKSREVGCFLGLRPGRRDSGQSQPQMHISKEGDPYLRTMLVQGAHYILGPFGEDSDLRRWGLRLAERGGKNAKKRAVVAVARKLAVLLHRLWVSAEVYEPLRNSQKAMRAVA

SEQ ID NO: 342209 - protein, 390 aa, unidentified
MLYIGIDISKYKHDCIVIDESGVVIRNVFSFDNSRTGFDQFMEMYRSLDPTEIKKIGFEATGHYQDNFKVYLERSGIEFMQLNSLLVHKFKNSQTLRGVKTDKTDARLIANYLSSIEFKPYPKISYHTLALRSLCKRHFDLINERTKYLIRITNFLDRTFPEFKEFIKGNIKSKTCMYILHNYAIPNKIMNINIQSYENLKKESHGHFSVAKFTELRELAKNTVGFSYETDLFEIKSLLRVYDTLQDEISLVENEITTIMSKINSHIPTIFGIGKVSAATIIAEIEDITRFDNPNKLLAFAGLDPRIYQSGTQEFKGRMNKKGSVVLRRVLMNSAESILIYNPAFYSYYRKKRDEGKSHRVAISHVARKLVRIIYKLETEHIDFDLSFVK

SEQ ID NO: 342210 - protein, 383 aa, unidentified
MKSVCGLDVHKDSVYLCILSEFGELIEKVFGVLTYQLEEMRDLMLHHHVVEVSMESTSVYWIPIWRVLSPHFKLNLANPYFIKQLPGRKSDVKDAQWIAECTMKELIRGSFVPPETIQQLRQYDRRIFDLNEEIVRKLSKLDAVLQRCNIRLSNYVSNVDSKSYKAVVRAISQGITDPEELVKLIHGRIIKHHGMDVITASLKGVVSLAEIDMISQLRDELDMAEAHKEKCQARMLEICEREFPEELKRLQTIPGIKERAATSLIAEIGTDMNKFETANHLASWSGLKPRNDESNKKIKSRSITHGNVYLRKTIIECAWAASRTKGCFFSRFSYHQTQVRKKNKMKVLVAVARKMLIAVWHVLHDNTIYIDFTTDRKTSRTKG

SEQ ID NO: 342211 - protein, 376 aa, unidentified
MEHNSEAFIGIDTSKLKNAIAIAEGGRDGEVRYLGEIETTDAATRKLVKKLATKYRKVTFCYEAGPTGYGLYRLIKSLGHECSVVAPSLIPKKPGDRVKTNRRDAVGLAKNLRAGELTAVWVPDMRHEAMRDLSRAREAAVDDLKSKRQQISSLLLRLGLHYPGEKTWGKSHRNWLASLKLDQREQRIVLEELFGAERQAQERVDRLASAIIDAVPEWSLAKIVTALKAVRGIDLVAAVTIMAELGDLSRFASPRELMAFLGLVPSESSTGDSVKRGGITKAGNRRARRILVESAWSYRYPPRISRDKLAKVAAAPEPVRAIAWKAQTRLSSRFRALIKRGKRPTIVATAIARELCGFIWAIHRAVTAPGGRQLVS

SEQ ID NO: 342212 - protein, 373 aa, unidentified
MKKVRFLGLDVHAETIAVAVAEPDGEVRPLGIIPNREESVRKLVKKLGPAEQLQACYEAGPTGYVLYWQLTALGVKCEVVAPSLVPVKAGDRVKTDRRDATKLARSYRAGDLTAVWVPNEEHEALRDLVRAREAAKQDQLRARHRLSKFLLRHGRRVPTGIKVWTQRYQDWVKEQVHFEQPAQEYTLLDYLHEVEHMSARIRRLEQAIGEAVKLAPAGMQEVIQALQALRGIAQISAVTIVAELGEISRFEQARQLMGYSGAVSSEHSSGRRIQHGPITKTGNAHLRRIAMEAAWAYRHRPTIGAGLRKRQEGLSEDVKEIAWKAQHRLHKRYRNLVAAGKEKQKVVTAVGRELLGFIWAIGVQVERNSKRVA

SEQ ID NO: 342213 - protein, 338 aa, unidentified
MTQFTYFVGVDIASATFTACIGTSPWQVLVKPETFENHEEGFASFLGWLKESHLPPEKTVVCMEATGVYSEGLAYFLSATGYAVAVEPPLKVQRKFPSPGPKNEARDSQNIAEYACRYVDQLSRWQPRPQILEQIKVLLTTRQQFSVQVTAHKNALHALGRKKVSSPLAQHVQEETIHQLTQHLQALDGEIRRLIDSDPTFRQSVLLLLTIPGVGLQLAAHLLILTQYSLDPRELAAFVGICPYEHESGTSVYRQPTSRHYGPPVIRKLLYLAACSIRTHRQEFKHYFLRKTAEGKPNKVVLNNLQNKLLKIACAVLRSQKPFIPNYVSVNPRLLKNA

SEQ ID NO: 342214 - protein, 338 aa, unidentified
MKLYAGIDLHSTNSYVALLNEDGELKYKKRLPNDLQIILHELSSFNDIESVVVESTYNWYWLVDGLQHSGYRVRLANTNAVKQYDGLKHTNDKTDACWLAELNRLKILPEGYIYPKEERSTRDLLRKRMQLVQQQTLNLLSIQTIIERNSSKRISGNKIKVLTEEELKIYLPLDNVRLAAASNLAILNCLQYQIDIVEKAILSQVKGNSNYIRLQSVNGIGKILALTILLETGDIQRFKQVGNYSSYCRCVDSEKISNGKKKGVNNRKNGNKYLGWAYVEAANFAIRHNEIIKRYYQKKSSKKNRTVAIKTIAHKLARACFYIIRDGVDFDVNLAFKK

SEQ ID NO: 342215 - protein, 404 aa, unidentified
MFNAVGIDVSKGKSTVSVLQPGGTVVKKPFNVVHSSRSLNDLSRFILHLDGQTRVVMECTGRYHEPILHALHDAGIFVSAVNPHLIKNFGNNSIRKVKSDPADSRKIARYALDNWASLRQYSDMDTTRTQLKTLNSQMDFFTKQKVAARTNLISLMDMTYPGVNSLFSSPARDDGSEKWLDYAESFWHVDCVRKIGLKAFTERYQAFCKRNGYNFQPGKPEELYLASKELVAVYPKDKVYKDLIMTGIEQLKSTTRHVEHIRHEMDALASTLPEYETVLSMRGVGKTLGPQLMAEIGDITNYTHREALTAFAGVDPGVNESGSFRSKSNPASKCGSSRLRKTLFLIMTSLLQTSPADDRVYQFLDRKRSEGKPYLVYMTAGANKFLRIYYGKVKACIASQSKAE

SEQ ID NO: 342216 - protein, 338 aa, unidentified
MKKYIGMDAHSSICVFSVVDEKGTEVNQAKIATNGLLLVEYIRSIKGSKKLVFEECELSAWLFETLHGEVDELIVCNPTRNQQYKKAKTDKLDAQNLARLLRGGFLTPVYHDGSKTEWLRALMSGYQDVVDTGVSVKNRYKSLFRKAGLPARGTKLYDDSSLLEDLPRPDQRFVGHSFYRLLEALEKEREQYVAAIGKLGRTFPEIKLLKGIPGIGDISAAKIIAQVISVQRFKDKHKFLSYCGLVRHRMESGGHVYGSRRGWGNRTLKCVFKMAAKSVLTGENELRAHYDELRAKGTSDKSARNAVSRKLAAITLSILKTRRPYDETRILSQAEQAG

SEQ ID NO: 342217 - protein, 346 aa, unidentified
MLYAGLDLSRQRLDVHVLDEDGRTVEVTAVRPEAGALRALAARVLRHGHEVSGAIESMTGARFVHDTLERWGWEVEIADAAKVKGIAPLAAKTDRIDAWVLAELARLDLVPAIWLPGPLVRSERERARFRLHLSHHRTALKNRIHATLMTFGQPVPMADLFGDKGRELLAALALPEPWTATLTTSLAMIDELDARIDACEAELRALGADHSSIPLLLTVPGVGWVLAYTIASEIGDIARFASPKKLTGYTGLCPLVRQSGNRDVRGPLAKNGPRYLRWALIEAATHAARHPAYQFRYERTKQRLGRQRGAKVARVELARKLAEAIWYVLTKNEPFAPAGPTMLLVA

SEQ ID NO: 342218 - protein, 341 aa, unidentified
MSIKRILVNTIDTDLEYEVIGIDLAKNCVSAILLTTDGEIFGIDRLDYQELEKSAQELSPTIFAMEPCTEMNYMVQKLEDWGHHCIVISGKNVKDYVESHFSNQKTDLNDAQALAFLTKDTQLRTVKAKDPEQLKYASLTTLREQYVKQYRQTMVSLKGICQVWGLSISKGISGKARLKDMIENHAAFPAELRTALVGMVAHAQAVQKDLKSVTKILEELAKKDKTCQLIQTVPGLGTICSCRLRATVGDIQRFKHPKDFPAYYGLVPRSMATGHNEKKGKITHRRDKTMRSLMVQRAGIVINQATKGNLNSKQLTKWILKKQKEKMPWGKLVCAVTAKLL

SEQ ID NO: 342219 - protein, 315 aa, unidentified
MANLKKSKTAINVGVDVGKFVLDVYIYEKQIHWQDENTDAGIKRILKRLAHYQVTRLVMEATGRYEFDLAQVAYEKKIPVCIVKPLRVRRFAGAIEQLAKTDKIDAALIAEYAATIKPTVTPQKSKNLLAIKDLIGRRRQLMTMRTQEMNRLQNMPKNLTVSYKRFIRYFDQEIERIEKRLAKHVEDQSEWTEKKEILKSAPGVGDTLVYTVLADLPEIGTLDRKQVSALVGVAPINRDSGKLKGKRRIKGGRHTVRTILYMATLSAIQCNPVIKAFYQQLVAQGKHKKVAITACMRKFITMLNAMVRDRCEWAY

SEQ ID NO: 342220 - protein, 326 aa, unidentified
MEHELHYIGIDTAKEKLDVDVLRPDGRHRTKKFANTTKGHDELVSWLKGHKIDHAHICIEATGTYIEPVAECLYDAGYIVSVINPALGKAFAQSEGLRNKTDTVDARMLAEFCRQKRPAAWEAPHPLERALRALVVRHQALTDMHTQELNRTETAREVQRPSIDAHLLWLEAELKRLEKQIKDLTDDDPDMKHRRKLLESIPGIGEKTSAVLLAYIGLKDRFAHARQFAAFAGLTPRRYESGSSVRGASRMSKAGHVSLRRALYMPAMVATSKTEWGRAFRDRLAANGKKGKVILGAMMRKLAQVAYGVLKSGVPFDASRHNPVAA

SEQ ID NO: 342221 - protein, 491 aa, unidentified
MKSIFQRANPAILELFQKAGDPAKVLCIPIDYAKRQHTALACNGAGLQLRGPFNLHNNPAGVAFVEEVVAGLCRKHAIRREHVFFGGEDCSSFSFNFAHALVQMGWLGIGINARDAAGERQNLVASTDKLDLLGIASVLINKKWGRTLAAECSLARVLRDLTHHRDSLVKARTASALRIHHLADQLLPGYLDEKQSGLTPFTKPSLWVMSRGLAPRQIQARKTDALADKLRRLMVRQPEEKARKLKELARTALPPPPELCATLQTNLGHEVSVYAHLDGCIHELEQDIARRLAATPGALLTSVPGIAPTLASGLYAEMGDPARDRGLVRLVSYAGIVARLKQTGGPDQEARTCGRSRRACVPLKRRTMDIALKMGRYGDPELKADYERRVNAGQDPRLTLGRRMLRICRHLLRSGEFFLPPSVRAAADPDVRRQYIARAWDKMLVKWRDAAAIQQAFAPGAPLERCRVAFNEIYGLNLSKSSPYTGRLDVK

SEQ ID NO: 342222 - protein, 379 aa, unidentified
MDVLFKRCAGLDVHSESIVACVLIENDNNDLTKEIETFGTLTKDLFHLLKWLESHGVTHVAMESTGIYWKPVFNILEDFFDITLANAQRIKNVPGRKTDVSDAEWIAKLLRHGLIEKSFVPPEDIRQLRDLTRYRKKLINNITAEKNRIQKVLEASNIKLATVISDVFGASGRRLLEHLISEGYIDEADVGQKIHKRMAHKKKQITDSLFGTLNDHQLFLIKHSWEHIVYLEKSIREIDERMDQILINYQEEIELLDSIPGINRETAAVLIAEMGVNMEQFPTAQHLASWAGLAPGNHESAGKRKSTKTVKGNPHIKSALCEAAWAASRSRNTLLSVKYWSIASRRGKKKALIAIGRRMLSIAYRILIDKAPYKELLTN

SEQ ID NO: 342223 - protein, 352 aa, unidentified
MERYIGGDVHQASVTFVVLSATGRQLREDVIETNGRALVGYLKQLAGSLHLCIEEGEWSNWLFEILSPHVAEFVVYRQQWRPGPKSDAIDARGLAEKLRKGEIKSPVYKTTAYRELREAARVYTKLTRDAARVKCRIKSVYRSRGLPYKGSEVFKDEKRQRHIKRLPAFLRGPVTLLGEELDQLSALKGLAEQQMIKASHQLKISRILETAPGMGPVRVAQMIPIVVTPHRFRTKRQFWSYCGFAIVTRSSSDWVRENKQWIKSKKVIQTRGLSFNHNRMLKMIFKGAATTVIAHSGSNPLRSGYDRQLDNGTKPNLAKLTVARKVAAIVLAMWKNEEKYDAERLVAAQATG

SEQ ID NO: 342224 - protein, 340 aa, unidentified
MNVTTYGLDVAKRVFQLYWVDATTGEIVNRRFGRDELIAFLAQRPAGRVALEACGSGHWWARQIKSLGHQVVLLHAKYIRPFVQTNKTDAADAKAIWTASRQPGMRTVAAKTEDQQAMLSLHRMRAQLVKFRTMQVNQLRGLLYEFGITFRAGRLAGLAEIRRRMTELEVTLPERVLKSLQDQLKRIDALEQEIDELEKPMGAWQKQEAACRAITEIPGIGRLTATALVAMIGDAKTFKSGREFASYLGLVPRQSGTGGKIRLGSISKRGDPYLRTLLIHGARSVLSHAKAPSDWQKQIQARRPANVAAVAMANKMARTAWAILAHGRAYQQDYVSVKPA

SEQ ID NO: 342225 - protein, 331 aa, unidentified
MFPVGIDVSKNTLDLCMLYDGIKGRIKTRNIQNNRHSVENILRWLRLQYCSPEDVHVVMEATGVYHERLATELHDAGFRVSLANPRRTREFARGMGIMTKTDKVDAYMLACYAFLKKPHRWEPPAPEIRYLGALLRRRDVLLGDALREENRLEKYLSTDTPADIISSCRRMAQLLREEVGNIERQIKAHIKASPALRRDYTLLTSIKSVGPQLGMHMLVVLRSHNFASAEQAAAFLGVVPIEKRSGTSVRSRPRMSKIGPPQLRAKLYMSALCGKIYNKRMRNIYDEMCLRGKPKMVATGALMRKLVHWCYGVLKTGTVFNDEDLKPVLST

SEQ ID NO: 342226 - protein, 315 aa, unidentified
MSQDTFIGVDVSNKWLDVYVQPQGTSYRFANDEEGIQELVSMAKELEPDNVVMEATGGLERAVGASLSVAGVKASIVNPRQVRDFARATGKLAKTDAIDAQVIAHFAQVVNPQTRPVVDEQAEELSAILSRRSQLTGMLTAEKNRLKRAPRVVRMRLKAHIAFLEKELKRVDKDLDEAIKGSSLWKEKESILKSIPGIGPVVSTTLITSLPELGKVSDKEVAALVGVAPFNRDSGAYRGRRKVWGGRARVRSALYMATLAATRHNPVIKPHYHKLLAGGKARKVALVACMRRLLVIANAMLRKGTHWDQSLHRTA

SEQ ID NO: 342227 - protein, 358 aa, unidentified
MQRNKISFKGQKIFVGIDVHARTWEVAVLTESGFAKRYSQASSAKVLFDFLSRNFPDGEYHAVYESGFSGFSTYYALKEYNIDCVVTHAADVPTTQYEEVMKTDKVDALKLARSLRADEIRPIYIRERENIDDRSVLRIRKTIQKQLGGYKSRVKHMLHCNGVEMPERFAKPGTHWSRGFIKWLKEDVTLLSPTRKSLDLLIMQVETLRSTLLTATREVRKLALLDRYKDNYELLRGIPGIGTIVAMSILTEIYDVTRFKNEKQFASYLGLIPTSHSSGDKESHGEKTFRGNKQLGPMIIETCWIAISRDYGLGQAYVAYKRKMNPQEAIIKIARKMSNIIFSVLKNKRTYEPYHWEI

SEQ ID NO: 342228 - protein, 355 aa, unidentified
MDNVKYIGMDVHKEAISIAVLNFSGKLVMECTIETKASTILDFLKGLRGSLHVTFEEGTWAAWLYDLIKPHVTELVVCNPRRNALLKEGSKSDRIDARKLAELLRSNMVRAVYHGEHGVRTLRELARSYLTISTDLIRVMTRVKAIYRSWGIPCRGKQVYAERYRAEWLGKIQEAGVRRRAEFYYQQFAALRVLRQEVRRELLAEAQQHDAWKLLREIPFIGPIRAALLIALIQTPHRFRTKRQLWTYSGFGIETHSSAEQRFVQGELQRAKRPASIRGLNRNHNHELKNVFKSAATVAAAKAGPFKEFYDALVAKGIRPEMARLTLARKMAAITLIVWKKGVRFDAQHLKPQTA

SEQ ID NO: 342229 - protein, 351 aa, unidentified
MLIIGCDLHTRYQVIALLNSETGELVTRRLQHENGEAGAFYASLPAPAQVGIEATGYTQWFERLMAELNYELWVGDAAQIRARAVRRQKTDSRDAEHLLELLSTQRFPRLWIPSPEQRDLRQLLKHRHKLVTMVTTLKNQLHFLAMSQGLCRKSKLWSERGREELESLSLGPWARRRRQELLALLDQLQPQIAELDVAVAQAAAADPAAVDLMTQKGVGPVTALAFVLTLGPVERFQNSRQVVSYLGLNPREHSSGGRQRLGGISKQGNPMMRWLLVEAAQTAVRFDPELRRKYQPLKFRRGGSVAKVALARRLAVRLYWRLRQRKAETQPVRMPGSSGSAVVLPRAGSRH

SEQ ID NO: 342230 - protein, 441 aa, unidentified
MLNHILFKAKSRLRTYGNVEIQDRDNAVNNFEEVLSMEVIYVRCCGIDVHKKSIVACLMVGRKKETRTFGTMTEDIMSLSEWLSENNCEAIAMESTGVYWKPVYNVLELLGWDLIVANARHIKTVPGRKTDVKDAEWIANLVKHGLINPSFIQDRDQRETKEMVRYRKSLVEERSREMNRLEKVLEGANIKLSSVISELTGMSGRNLLHGLINETLNKETIVDMVHHSMRGKTDELLRACQGMLSETQKVLVKAMLAHIDDMTRRIEDMDNFLDGKLKEYDETLKKLQDIPGVGDRSAQVIISEIGIDMSRFPSAKHLASWVGLCPGNNESAGKKFSGKTGKGNKTLKTTLIQCAQMASKSKDSFFKAQYDRLVVRRGSKRAKVAVAHSMLIAIYHMLKNQTSFRDMGVDYYIQFNPEKKINYHLSKLNKLGWAPPIGVTA

SEQ ID NO: 342231 - protein, 367 aa, unidentified
MTSVALSAGPIHLGLDTSKDAILVGILRPDEVSPDAEKIFNDEASIRRLIDRFADRGMLRVCYEAGPTGFGLYRLLASMGVACDVVAPSLVPRSPGDRVKTDRRDCRRLARLHRAGELTAIRVPTEAEEAVRDLCRARADLVTDRTRTRHRLSKFLLRHDRIWRDGDAWTVKHEQWLLGQRFDEAALRATYGHYRAMLVARDAELAAIEADLAHWYTHGPFVDAVARLGAYRGIAQLGALSIASEVGDWRRFATARAFMGFTGLVPSEYSSGQSVHRGHITKAGNAHLRTQLIESAWAYQHRPTLGVQLRARHRGATPATVARSWAAQQRLCARFRRLSARKNSRNVVTVAVARELAGFLWAEMTTD

SEQ ID NO: 342232 - protein, 375 aa, unidentified
MTELEPARSGHVVIGVDTHKHIHVAAVMDSIGGILATLTISTDTAGFRQLLEWASGFGKIIAFGIEGTGSYGAGLTSFMRRHGHKVVEVSRPHRRLRRRNGKSDSLDAENAARAVLAGFATAVPKSADGDVEMIRELKVAHDTAVRDRTGTMITLKAMLVHATEDLRRETAKKTQKMVARHCAALRPRGLETPEDANRHALRSIAKRWIALNEEIKELEAQIEHLVLQRAPHLLDEFGIGVDTAAEILIVAGDNPERIRSEAAFAKLAGISPVPTGSARPHRERDDQREAPDQPRRTTATERCDLPDRDRQDEISRAHDRVRRSPHRRRQEQTRHHPLPETLRDPRGLPPRQDRPANRRSHELTTIGASTPSPRP

SEQ ID NO: 342233 - protein, 435 aa, unidentified
MRVLYKRVGGLDVHKKTVVACRMRVTEESRIEWETKTFSTMTVDLLKLHDWLSEWEVEQVALESTAEYWKPVFNILEDEFEVVLVNAQHVKKVPGRKTDAKDAEWLAELMLHGLLKASFIPAKPQRVLRELTRYRTTLVRERARIVNRVEKLLESTNIKLSSVVTDVMGVSAKAMLRELVGGADDPQALAQLAKGRLRKKMKELEAALRGKVDEHHRFILAQQLGHIDFLDEQIEAMSQQISHHLAQMAAPPPAGDDEGSDTSTSSEPLSWNQAVELLDTIPGVDQRTAEVILAEIGLDMSQFPTADDLASWAGFAPGNHQSGGKRYSGRTTKGNRPIGAALNQAAWAASRTKDTWFKARYHRLVPRRGKKRTIVALGRSMLVSIWHMLSRQEPYHDLGYDYYDQRRKDNKVSYFTKQLAKLGFVVNLDPAPTAA

SEQ ID NO: 342234 - protein, 423 aa, unidentified
MEVMYHRVAGLDVHKETVVACVRVTVGRKTTRECRTFATTTEGLLALLAWLTQSRCTHVAMEATGVYWKPVWNILSDGDLSLILANAAHVKQVPGRKTDMNDAMWIADLLACGLIKASFVPEADIQELRSLMRTRKQLVREQTRQVQRLEKTLEEANIKLGAVISDLMGVSGRRMIEAMIAGECDPQRLAALAERNLKASPKALRDALHGRLREHHRFLLKLHLQQWDALDRAIRQIDRQVAGQIDRMDTKVADGPPPFRELIRRLSAIPGVSRLSATAILAEIGRDMSRFPTAGHLVAWAGLCPGQNESAGKRRSSRLRKGAPWLKTMLVQSAWAAKRAKDSYYRAQFHRLCSRRGPQKAICAVAASILTAIYHMLKSGLPHRDLGADYFDRRSPQAKVKRLVTQLAKLGFAAQLEPLPAAA

SEQ ID NO: 342235 - protein, 370 aa, unidentified
MRIIGCDLHARQQTLAMLDTTTEEVVNLTLLHEGNSVREFYSQLPPPVLVGIEATGPMQWFLKLMEELGIECRVGHPAQIRAAEPRKQKHDRRDADLILKLLAENRFPAIWLPNQELLDLRTLLLHRHQWVRMRVRMQNALQAIALANGLRRGPSLWSYDGQAKIAFLPLLPHAAYRRNRLQAMYKTMESEIASLNKQVAEQAGNRPGAQRLMTHPGVGPVTALATEVFLGDPQRFADSKALASYVGIIPQEYSSGGQQRLGGVTKQGSPLLRFLWGEAGAHAARHDPELKRFYRRKLVHKGLGKARVAVARKLGIRLWIMLRDEIDYQEFCRRGQIQQKTVRPVAGMPETGNGAKSHRPSDEATRLPES

SEQ ID NO: 342236 - protein, 377 aa, unidentified
MKRIKFVGLDVHAETITVAVAEQEGEVRALGVIPNRVESIRKLVKKLGPVGQLRFCYEAGPTGYAVYWQLTALGAKCEVIAPTLVPVKTGDRVKTDRRDSLKLARNYRAGELTSVWVPDAAHEALRDLVRAREAAKKDQLRARHRLIKYLLRHGRRPPTGVKPWTLNYLSWVKHEVHFEPMAQEATLLDYLNEVEHAELRIARLNLAIEEAVKLTPPKMRAVIAALQALRGVAQVTAVTIVAEVGEVSRFTGARQLMGYGGIVASEHSSGESTWRGGITKTGNAHLRRVVVEAAWAYRHRPSVGETLRKRQAVVSEEIREIAWKAQHRLHTRYQKLMARGKEKEKVVTAIGRELLGFIWAIGVKAEAAQEKTERRAA

SEQ ID NO: 342237 - protein, 316 aa, unidentified
MSTPNSPFVGIDVGKSQLDAAVHENSATHSFPYTPDGLVQLLAWIQDVSPTLVAVEATGGYERALVHFLSEAGIKVAVVSPKQVLDFAKAHNQKAKTDKLDAHNIAFFAATMKPRAFTPPALTQEKLMALVTRRRQIAHMIISEKNRLLQASQDIKPRIQDHIDWLEEEEKEIQDQMRDLISSDPDMREKMDILSSAKGIGEVSAFTMLAELPEMGIIGGKQISALLGVAPFNRDSGKMKGKRRTKGGRYNARSAFYMATLSAIRFNPVIKRFYERLLSQGKEKKVALVACMRKFIVILNAMLRDRKSFISQSSFV

SEQ ID NO: 342238 - protein, 378 aa, unidentified
MVTVLLEPSDGQLQESTREFGTFRADRLALAQWLNSLNVERVVMESTGIYWRSIFSTLEAAGLKAHIVHARHVKQVPGRKTDVKDSQGLASLARCGLLRPSFIPPPDLRELRLVTRYRLKLTHTLASEKNRLHKVLDDAGIRLGGIVSDINGTSAQAMIAGLIGGRPLTELIDCARGRMQAKCEPLRQALDEPLSERHRLVLQELHHHIDFLEQQLRSFNQRILAAMAPYQQQWRLLQTLPGVDTIAAALLIAEIGIDRERFGRGEQFASWAGLCPGNNESAGKRKSSRLRQGNPVLRQVLCEIANAACRTNSQFKGKYRALVIRRGHKRTIMAWAHKLLRVIYALLKHQPPYRDPGIDYEALIMQKNAPRWIQALKK

SEQ ID NO: 342239 - protein, 385 aa, unidentified
MGRAKKRGPGPSSLLMTPDRAGNAVGIDPHKRTLSASVVDARGGVLGSGHFRVSGEGHRELEAWARQFGQIARWGIEGSASWGRHTAMFLAGRGHDVRDVCANRTPRADRARQRGKSDTLDSERIARETLAHPLLPKAFKRADADSSPDEQQQLLALWHNRRRSILTGRQHLVGEAEYLLCELPLELRDELPDTKAVRPRLAALARRNRRRRYDAPTRLRLQLLDDYRAQIKALDRQERQVVAQLRALVRQSGSTLGELCGLSTRSVAELLVEVGDVRRFTEGGFARFNGSAPLPASTAEGPGEPIRHRYNPGGNRRVNAILYRMAITQLRCEPRAQRIYENARAGGHTKKEARRVLKRHLSNVIYRRMLRDLQVQLTDQPLLAA

SEQ ID NO: 342240 - protein, 332 aa, unidentified
MYLGIDVHKQYSQVAVMDESGEIVEEVRVQNANLDDLAQRYAGAEAAIEATSNYYHIHDTLSEHLDVTVAHPGKLTLIADTDKKTDRVDAKELARMLRLDSVPESYVPTDEIRQARALVRGRQKLVETRTEFANKIHGLLSDHGITRDIKPLSVSGRESLRDISLPTPWDTMLASYVQMIETLTNEIDRLESAIEERAGSLKETQLLMTIPGVSYYSALMIYAEIGEIDRFDRDKEVVSYAGLNPVIRESGDSRIEGRISKRGSRQLRWILVQSSRTAVHTCQDEYLGQFYDRLEGRKGSQKAIVATARKLLVSIYHMLDREEVYDPPGVSA

SEQ ID NO: 342241 - protein, 415 aa, unidentified
MRSGDKEKERIHIYNKRNICFVGVDMHKEKHCAVVIDCWMEKIGEVNFENRPSKFPAFVEDIRKICGTRDFVFGLEDTRGFGRNLASYLTGRKFEVKHVNPAYTSAVRLSNPIVYKDDSYDAYCVARVLRDMVDTLQDAKHEDVYWAIRQLVKRRDMIVKNNVMNKNQLHSQLSYSYPSYKKLFAQVDGKSALCFWENYPSPEHIWSTTSEKIYETIKPVHQALKIERIHAIIDMIKKDGNTQKGYQEERDSIVRNIVKDIKNNQELIKDIEEQLRKLLPQTGYKLQTMPGIDLITESKIVSEIGDINRFPDSDKLARFMGLAPVHFSSAGKGKDERCRNGNRELNAIFHFLAIQMVAISPSGKPRHPVFREYFEQKVKEGKNKPQALICIARRLVRIIYGMMKTKTEYRPYEKS

SEQ ID NO: 342242 - protein, 342 aa, unidentified
MTVTIVGEARPVTCRTAITGGVDTHADTHVAAALDPVGGLLGVREFPATAAGYAGLLGWLAGFGTVCLVGIEGTGSYGAGLARYVTAAGIRVVEVDRSDRQDRRRQGKSDPLDAVSAARAAQSGRASGAPKGRDGAVEAIRTLMVARRSAAGERTRTINQARALVLTGPDDLRARFAKHKPAALVTGLAALRPRPGDVAGHATRIALRELGRRAQFLDGQLVRLDELIIPLVTARAPGLLLIAAGDHPERLRSEAAWAHLCGAAPIPASSGKVTRHRLNPGGDRQANHALWRIVFTRLGSDPATRAYAERRTAEGKSKAEIIRCLKRYVAREVYRQLRPAAG

SEQ ID NO: 342243 - protein, 326 aa, unidentified
MEHTSRFVGIDIASSKVDICWDTAKDLSHQTLRYDEKIFDDFLTKHPGIISNVTVVGMESTGDYHLKAARYFLDKGFSVKVINPIITKEYIRATVRGKKTDKTDAILIHKALSEGHGDCVNLNQLSDEPKELLRLSTTLSHITTQLILRLQSTKRKNLPGTEEIQKQLQEVINHLREVNKTIVEQATEDRSLEEEYIDSIPGFAIKLSAVIHHEIGDINRFHDAKALVAFTGLDPRIKQSGNLLNTTGRITKRGSPYLRAALFLAANVARQYDKDLAEYYTKKKNEGRSHKEILCMIGRKLLTRIHTVLKEQRAYRPNPVLSTKIN

SEQ ID NO: 342244 - protein, 367 aa, unidentified
MKKVSTAAAQQSRNISQQKLTIGLDLGERNSRYCVLDESGQIRLEQRVRTSAKAFQEVFGVMPRSRIALEIGTHSPWISRLLSAFGHEVMVANARKVRLIGESRKKDDRLDARTLARLARIDPELLYPVKHRSAQAQADLAVIRARAGLVRARTGLVNTARGLAKSYGERLRGCNVRNMNPEKAEALSPELQRALEPLLAEIESVSERIAEYNDRIEALAEENYPQVKVLKQIKGVGTRIALTFLLTLEEPHRFGKSRDVGCYLGLQPGRRNSGQSEPQMHISKEGDPYLRTLLVQGAQHILGPFGIDCDLRRWGLKLAERGGRNAKKRAIVATARKLAVLLHHLWVSGEVYEPLHNSNRMTVAVAA

SEQ ID NO: 342245 - protein, 344 aa, unidentified
MNYCAGFDVSLRSTHICVIDDDGELLAEGKTDSEVADIIAFLDELEVGITEVGIEAGMLTQYLTYGLQFAGYEVVCMEARQVKAALSAMRNKTDKNDARGIAQLLRSGWYSRVHVKSIESHQVRALLSSRKAVLTKCIDLEQEIRGLFKVFGIKLPPRLGHGSFDPKVRPLIEADETLSHSLLPVLDARLVLYHTYRELENRVRNLAKNDPVCQLLMTAPGVGPITALTFKSGVDDPERFKRSRTVAAHFGLTPRRFQSGEIDFDGHISKAGDANVRSTLYVAANSMLTRSSKWSPLKAWGVKLAETRGHKKAVIAVARKLAVILHRMWIDDTQFRWSTEAARS

SEQ ID NO: 342246 - protein, 437 aa, unidentified
MDEVTDEPLYRDRVCGIDIGKAGMVATIRVPSDKDPARRAAETRSFGTTKREVLALADWLRCWQVPAVVMEATGDYWKGPFYRLEAEGLDCVLADAKQVRHLPGRPKHDPGDSRWLAACFERGAVTSCFVATEEFRVIRLHTRYRRDLTDERTREKQRAEKLLESAAIKLSSVVTDLHGVTGRDIMNHLIAGEHDPKVLAQLARARARRKIAQLEAAVEGAEFFTPAHAALLAAMLERIDRVNAEISQLSEVIETLLAPHEEQLQQAESMPGWGRRAAEDAIAETGVDMTRFPSGAHLASWAGRTPLDNSSGKRAGRAKAKKGNRYLGGLLGETAVAAGKTQTREGARYRRLARRRGKAKALVAVGNTQLKVYHKLLSHPGTRYTDLGPDYYERQASTRRQIAHHVGKLGALGFEVTLCRIPGPDPDPGQAASTQAA

SEQ ID NO: 342247 - protein, 420 aa, unidentified
MKVYNVNDFAALIGIDWADTKHDICEHPKLTKKYQYTIIKSKPEALHEWAMSLKQRYPNQQIAVACELKKGPLIYALAKYNHLTLFTINPSTVAKYRKAFTPSGAKDDPTDAFIQVEILTLHMDKLSVIESESAAIRSLAQLVEYRRSLVQDSVDLSNKITAALKNYYPQALEWFKEKDTFIFCDFVSKWPSLVHAKKAKKQTLLNFLNTHNSHYPDVNEARILSIKNAMSLTDDTGVIEPNQMLVEVIITQFKVLLKGIETLDKAIKLAYKAQQDNIIFDSLPGAGPQLAPRLLVAFGCNRDRYHDASELQKYAGIAPVIERSGKKMWTHWRYSCPTFLRQTFVEWAGFSIRYSFWAKAYYDQQKSKGKPHNSIIRALAFKWIRIVFICWKTKTPYDESKYLEALKRRGSPLLKYAINS

SEQ ID NO: 342248 - protein, 313 aa, unidentified
MAMHATRPVIGIDTAKEELVIQHDDEKRHLALDNTPAAIRQWLAGLPKGCDIAIEATSTYHMEITERAHAKGHHVYVVDGYRLKNYREGVGGRAKTDLTDAQLLARYLRKEKDELRRWAPPPKAYRTLQSLLRRRAALVKARTALRQSLSAEPLLKTALANLLKQIDRIDHLIQKRLREAVHAAGLRDQVQRCQAIDGIGELTATALVMAFLRGDFQNSDAFVAFLGLDVRVRDSGKLKGKRRLTKQGDTEVRRLLHCSAMSGARHPTWKTFYQRYRDRGLKTTQALVILARKLARTAFALMKRQEDYCPARL

SEQ ID NO: 342249 - protein, 391 aa, unidentified
MIYVGIDVSKDKHDCCILSSDGQVLVKPFSILNNLDGFNYLYSTICSYEENSDKIKVGLEATGHYSFNILFYLLDKNLNCFLFNPLHSNLFRKSLTLRKTKTDKVDSVVIAKMLLSEVDSKPYSKALYHNEQLKSLSRYRFSKVRERAVLKQQLSRLVNILFPELEKLVPSLHIASVYALLEEFPSASLVASAHLTKMTNLLSASSKGHYKKNKAIEIRNAAISSVGCVMPAKSLELKHTIHLIRILSEEINEIELHIQEILSEIQSPITSIPGLGFRMAAVILSEIGDFSRFDSPDKILAFAGISPSTYQSGKLDNAYAHMEKRGSRYLRYALYNAAIYVCNWDKTFADYLHKKRSEGKHYYVAISHVIKKLVRVIYHLQLTGDIYKTVV

SEQ ID NO: 342250 - protein, 455 aa, unidentified
MTGAKSPGSDALSMVNPGAAAIDIGSTMHLAAINPQADDNPVRAFGTFTGELHDMARWFKASGVTSVAMESTGVYWIPAYEVLEEHGFHVILVNARYAKNVPGRKTDVSDAAWLQRLHSYGLLRGSFRPEAGVATMRSYLRQRERLIEYAASHIQHMQKALMEMNVQLHHVVSDITGVTGMRIIRAIVAGERTPVTLAEMRDVRCHASVEIICAALSGNWRDEHIFALCQSLALYDFYQTKILECDRKLEVALKALAIDKGHDIRRLPKVRTKRRQVNAPAFEVRSALYRVLGVDLTQIHGIGPSLALKLVGECGTDLAAWPSSKHFTSWLCLAPGNKISGGKLLSSKTRRSSSRAAALLRLAATTIGRSDTALGAFYRRLAARAGKARAVTATARKIAVLFYNSLRYGMAYHDPGATQYEERYRSRVIGNLQRRAKAFGFSLQELPPEPDMAVS

SEQ ID NO: 342251 - protein, 351 aa, unidentified
MRIMALDLGGYQATVCEYDTNSGAQQFSKSRSTPQELHDLLAEHRPARLVFEIGPQAGWVHDLATELGIEVQVANPNHEGWRWRRVKRKTDRGDALKLAQLSAMNQLPLAYLPARPVRQWRSLIRHRHKLMNRRIAVKNLIRSILLREAVAWPEGKRGWTQESVAALKELARPIDTVEVDELWRAQLWLALEELAGVEQLISAADRRLDAIGNLDQRVKRLQTIPGVGPRLAEVVVAIIDKPERFRRANQVAAYAGLTPKQLESGTVQISGRITKQGDPLLRTLLVEVSWLGLLHNPWARNIYHRTRKGSVARNKLAIIAVARRLLIRCWAMLRDRSDWRSPEPVAVAVGS

SEQ ID NO: 342252 - protein, 346 aa, unidentified
MAYYVGLDVSVKETSVCVKDDKGGVVARTDISTDPDLITNFISNHAPNVERVVHESGILAIWLTRELEKRGVPIICIDARLAHKALSGRINKSDQGDAEGLAQLARTGWFTQVHIRSEASERVRVLIGARERLIRMRKDLEGHVRGVLKVFGVCMKPVEKGKLRKNFRDQLVAAADMDPAIEMMSETFIPLHKTLCIARDALDEEVRILARESDLVRRLMTVPGVGPIVALAYIATLDDEKRFRKSIDVGAFLGLTPKRHQSGEMDWSGKISKCGDCDMRRLLYAAASTLISCTRKPSRLKEWATKLAERKGHKKAAVAVSRKIAVILHCLWRNETVFEPGMEGPS

SEQ ID NO: 342253 - protein, 401 aa, unidentified
MFAGIDWASEEHAVCVVDADGRIVQGRRCAHDEAGLRALCVLLVELEVQLVAVERPDGLLIERLLDAGLQVIAVHPNQVAAMRPRFANSGAKSDSFDAFVLGELARTDRHRFRVLVPDCDATKALRALSRAREDLVGHRVALANELRAQLECFWPGAVQVFSEIDSPIALAFLKRYPSPADAHGLGEQRMARFLARHHYCGRKPADELVGRLRAAATGRADTLETEARRQIVLALLAALEPIVQRISQLTSEIRSALADHTDGHVFRSLFRDPKSVVTAAALLAEIGDCRDRYPTKAALAADAGQCPVAVESGKSKRARFRWACDHRLRHAVGTLADTSRHTNPWAADIYRRAIARGATHQHAIRILGRAWCGVLWRIWHDHDVYDPARHNALQRLLATTG

SEQ ID NO: 342254 - protein, 376 aa, unidentified
MTYPEYPDRRQNEGRYFTLLFLKFIGMEKIVKQVCGIDVAQNELVVALGRMDDTLSLEVYAYKTFVNKAKGFDNLLSWVKKLTTHTVEVRFVMEATGVYYEKLAYHLSFHNYPVSVVLPNKISNYFRTLDVKTITDKTASEAITRFGLERKLDTWVPPDPVFKQIRQLTRERDQLVQNRTVAKNQLHAEQSEADPNKSTLRRINKQITLLDKQVKEVVAEIEALVKVSPEIKTYVVLLSSIPGVGRLTAATVLAETNGFDLVRNKKQLSSYAGLDVKEKQSGTSIKGKPKISKKGNKYLRKAMHMPSLAAIRCDEHFKAIFTRLVSRHGIKMKAAVAVQRKILELMYTLYKKQEKYDKDYFKDKTEEQETQISEKR

SEQ ID NO: 342255 - protein, 451 aa, unidentified
MSKKQMNLEVVNPNAAGIDVGSRSHWVAIGQDAQDVREFGVYSEDHQALCMWLTENHIETIAMESTGTYWQNLFSSLVVAGFDVILVNGKQTKNVKGKKTDIKDCQWIQKLHCLGLLSNSFLPDSTTDIIRTYSRHRQNLVRQSARTVLKVQKYLRLMNMRLDVVVKDIVGLTGTKIISDFIAGEHSGKELAKNRHYNCRKPEEEIAKALQYNGRDDYMFALKHEWGTYLHVQQQIEEVDAEIKKLLEDIIDKDDNKKQHVVDKKTYKRKNKNTIRGTDMNQIAYQYFEGIDLMAIEGVNDATLMAIISEIGLEGIKKFESAKQFTAWLRLAPNNKKSGGKVLSHHLPKGSSRLKIAFRNAANAIGNLKEGHLADFFRKINYKKGRATAVSATARKLAVIIWNMLVKVQSYNPPSQYLFLDEKRRLGLVKRIKKQITKFEIRPEQLGFTTT

SEQ ID NO: 342256 - protein, 407 aa, unidentified
MLPQKSIPIRFIGLDLHKYYLIATAVDHELNRVYGPRRVELTELQDWIKKTLTLEDAIVLEMTGNTWQVYDELQPFSHSVTVVHPPHVSLIVRAQVMTDKIASFQLARLLAKGLLTGIWVPPQDVRDLRTLVAQRAKMTAIKTQAKNRLHATLHRYHILPPDGKLFDPDNHTWWLSLSISQLELVRVQSDLDTLSFAQQQITKIESCLAVWATHDERIASLFQLCGVGLVTAVTVLAAVGDISRFPDANHLVGYSGLGAKVHVSGLTSRSGGITKAGRKDLRAALVEAAQVAVLHDRHWKSELARLEPHIGRNKAVVAIARKILVIIWHILSQHQAEKGLDLERLARKYYEFAYTVGKVNWDGCPTAAAFIRQKMDEAGVGRDFTSFIYSRKRVVLPPSKLPTALTK

SEQ ID NO: 342257 - protein, 454 aa, unidentified
MPCRAQQRMKQLHFNDKGHNYSIFFINHTKIQKEIVMTKPIDSTFIQIIHPVCCGLDVHKDKISACLITLDENGQEQYELREFTAFTKDLLEMKKWLIENDCPILAMESTGVYWRPVHNIVEGVMEVILVNARHIKNVPGRKTDISDSKWLAGLLRHGLLRGSFIPPEKIREWRELTRLRKTYTESLADYKRRIHKIFITANIKIDSVVSDLFGLTGRNLIGLLCGEAELTIENVQKCTKGTLKKKASELFDSLQGFFKDHHRFQLIGMMETISAFEKRIDEINERLDLLTKEHQSLLDRLDEIPGINKKSAQAVLSEIGVTLDEFICMSAFMSWAGLCPGNNESAGKRKNGRNGVRNHPLKTILVQAAWAAIKTKGSYYKAKYYKLKARRGAKKAIVAIAHKIGKAVFNIIKHGDTYRDLGEDYLIAPNKQKILRNLNKRAKEMGLKLVPCEV

SEQ ID NO: 342258 - protein, 369 aa, unidentified
MAEVREAFIGIDAAKLRNAAAIADAGRDGEVRFLGEVDASPEGMRRLAARLAAKYDRLHFCYEAGPTGYGLHRLLTGLGHHCTVVAPSLIPRKPGDRVKTNRRDALTLARLLRAGELTPVWVPDEGHEAIRDLVRARAAAVETLRVHKQRVSAFMLKHGRHFPRKKAWGARYLRWLQEQRFEHPAHRIVLQEAVEAVRLAKERVERLERTIEEFVPAWSLAPVVRALQALRGVDLIVAVTFVTEIGDLRRFESPRRLMAYLGLVPSERSTGDSVRRGGITKAGNGRVRHMLVESAWTYRHPPRVGAKKLAQLERVPPKVREIAWKAQSRLSARYRALAARGKRLTVVCTAIARELAGFMWAVAREARTA

SEQ ID NO: 342259 - protein, 400 aa, unidentified
MNPELRVAVDVGCNRHRVAVGLSDGGLIDEFDFTHDAAGLSLFFQRVGRHERERALPVAVAMEGYNGYARPLDRLVLGRGYRLFNVNNLKLARYKEIFPAPAKTDAIDARRMLELFQLKDRVPQAREVLQEVGPIPIEHEQLKALTRWRKQLVGERMRAGNRMQANLQAICPGLLDLTGEADNLWFLNLLSCRDDLTKLKGLRLTSLLALKGVGKLYASKVQAWQQAVIFSDTVAWMGPMIVSDARRMLELRAQIKALETQIQPLCQSSRIACQLRTIPGFGTVTAGEITGELGTIERFDSEASLAMYVGMAPLDNSSGKRTASKSPRQVNVRARAAMMIVVARHIGCVAQSRAFYDKKRIQGKSHNQALRALGRHLIRVIWSMLQHNRDYQVREPLKIT

SEQ ID NO: 342260 - protein, 337 aa, unidentified
MSQDQTSICVVDESGHVLWQGKCATTPEAIAATLRTRAPQGDRIGLESGPLSIWLCHELTALGLPVVCLDARHAQAALSLQLNKSDANDARGLAQIVRTGWYREVVVKGLDGQRMRALITARAQLVALRVELGNQIRGLLKPFGLLAGKGVGKTFAEKVRSLVPDGPLHEVAEALLRAWEAVNKEVATLSRRLVAEARQDETVRRLMTAPGVGVLVALTSVSTIGDPARFTHSSSVGASVGLTPRRFQSGETDDTGKISRCGDRLLRTYLYEAAGIILNRVSRWSALKAWGMRLAKRIGHKKATVAVARKLAGILHRMWRDSTEFRWSSKEAAVATS

SEQ ID NO: 342261 - protein, 380 aa, unidentified
MKKHITAKKPHQGLTKNEIKQFVATGGRLTVGVDLGDKTSHYCILDEAANVLSSGQLPTTQVGMSSLFGKMPSSRVALEVGTHSPWISRLLAGLGHEVIVANAHEVKLITQSKRKTDRIDAEKLARLARIDPQLRAPIRHRGAEAQADLAVIRARAALVKARTGLINCARGLVKPMGERLPSCDADGVKEGLAEKLSERTRAVIVPLLKSVEEISRQIGEYDDRMGEIAKRYPEVELLKQVYGVGTLIALTFILTLEDAQRFRHSRDVGPYLGLTRRQRDSGEKESELGISKAGDKLLRELLVQAAHCILRRGAPDSDLRAWGLEKLEKGEKKGSSRRKRKIVVGVARKLAVVLHRLWVTGEVYDPLYNRKAVAVRAVAA

SEQ ID NO: 342262 - protein, 319 aa, unidentified
MHEPIETHIGIDIAKRSFDLAIRPSGYARSFPMTNAGIARAVRLIGRHNAPKVVLEATGRYQAALVDALHEAKIDLAVINPRWVRDFARASGQLAKTDRIDAAVLAEYAERMDPHPQPPTSKALKTLRALTTRRQQLMRMQTMERNHAEAVDQPDVLASVAQIVEQLDRQIQAVETRIGEHVDSEPAFQHKAQLMQTVPGIGETTACLLVAELPELGRCNRQQIAALVGVAPINRDSGPAQRSRPTRDGRKSVRTALYMAAVSASQHNPPLREFYQRLRAAGKPGMVALIAVMRKLVVILNTMLANNQPWQNPDPSNNA

SEQ ID NO: 342263 - protein, 354 aa, unidentified
MSGEKYIGLDVHQATISVAVMDSQGKVVMESILETKASTILEFLAGLRGTLSLTFEEGTWAAWLYDLLKPHVAKLVVCNPRKNALLKQGNKSDKIDARQLADRLRLNDLKSVYHGETGVRMLRELARSYLTVVKDLSRVMNRLKALYRSWAIPCAGRDVYYTRHRSQWLEKIPEAGTRRRAEQLYQQLDMLQHLRQQARRELLVESRKHTITAKLRQIPSLGPIRSALAVALIQAPHRFRSKRQLWTYSGLGLETRDSGEYHFVKGQVQRKKPVWIRGLNKDYNHDLKGLFKAAAMRASIQPGPFQEFYQRSLAKGIKPTMVRLTLARKIAAIPLTVWKKGENFDVEKLKSQAA

SEQ ID NO: 342264 - protein, 366 aa, unidentified
MKKTNTVRVNGNMIFKGHKLTIGLDLGDRWSNYCVLDEAGEVLLEQKLATTPEAMKQTFERIPRSLVALETGTHSPWLSRLLKELGHEVLVAHAQKVELISKSNRKDDRHDARTLARLARIDPELLGPVRHRSAKAQIHLTVIRARAELVSARTALVNAARGLAKSHGERLRKCGAEQVSRELAAELSAELREVLEPLLKEIESLNERIKEYNARMEKIAKESYPQVALLKQVKGVGTQIALTYVLTLDDPHRFAKSREVGCFLGLKPGRRDSGQSQPQMHISKEGDRYLRTMLVQGAHYILGPFGEDSDLRRWGLRLAERGGKNAKKRAVVAVARKLAVLLHRLWVSGEVYEPLRNSHKAMRAAA

SEQ ID NO: 342265 - protein, 343 aa, unidentified
MGEVSTIGLDIAKSVFQIHGVDVDGAVVIRRRVSRAKVSEFFAALPPCLIGIEACPTAHNWSRKLQAFGHTVRLMPPNYVKAYLKRSKNDANDAAAICEAVTRPSMRFVPTKSEQQQSGLMLHRSRQLLVRQRTMLSNAIRGHLAELGIISAKGRNGTVELLEVIANQEDDRIPAVARFSLEVLARQYAAIAAEIGVIEKRIQAWHRSCEESRRLEEIPGVGPIVATALVAEVGDWRAFASGRSLAAWIGLVPRQHSTGGKERLGGISKQGNRHLRWLLVAGAMAVIRYARQHGTKRPWLARLMATRPIKVAAVALANKIARMAWAMMVRGERYKEPTLMIAA

SEQ ID NO: 342266 - protein, 410 aa, unidentified
MPSPLFVGIDVSCKDNKVQLLHSDGAEITRFSVPNNHPGAKSLSEKITGVMGKNKFDSLVIGLEATSVYGHPLVYFLRQEPSIKALNPRIHVLNPKQVANFKKAYPELPKNDWVDAWVIADNLRFGRITKEVCMDEKFDALQKLTRERYHVAKNLTREKNRFLSNLFLKFSALAQENIFSDKFGATSIAIIEDFLSVDDIAYMDVDKLAEFLNKKSKGHFADPHELAETIKKAARSSYRLPKTVNDSVNQVLAVSLVAIKALKKQLETLDKAIETQFALIPNTLQSIKGVGPVYAAGIVAEIGDIKRFPNHAALAKFAGLAWSEHQSGQFKAENTHMIRSGNRYLKYYLLEAANKVRVHDPEFKRFYELKYARTPKTPHKRALALTARKFVRLVYALLRSNRIYTPPKGE

SEQ ID NO: 342267 - protein, 387 aa, unidentified
MTVRIANNLPAATHDETVRCLFAIELSKQSWIVGFTTPLSEKISRRTLSGCDWKGLLELIEEVRVRVSREMGRAVTAISCYEAGYDGFWLHRQLEAHGVRNYVIDPASLQVDRRARRVKTDRIDVERLLRSLMAYLRGEPKVWSVVRVPSVAEEDARRLHRERDRLVSERVQHVNRIKGLCALHGIYDYHPLQPRAMAWLEQLRTAQGGELPPRLKSEIKRELHRLKLVVEMIATLEAERDAIVEDEASTHLNAEKIRNLHKLKSIGPEFAAVLVGEIFHRGFNNRRQLASYVGVAPSPFQSGRTAYEGGISKAGNRKGRTTGIELAWLWLRYQPDSDLSIWFRSRVGTMKGRIRRIAIVALARKLLVALWRYLETGLVPKGAVFKG

SEQ ID NO: 342268 - protein, 429 aa, unidentified
MSEEKPIELRVSVDVGYRRHSVAMGLSSGEVLEEFEIEHRPEGFAEFFSRIEKHQKKTNGAVAVAMEGYNGYARPLDSLVRQRGYRLYNLNNLKFARFKEIFPGAAKSDRIDARKGLELFQLSDHLPLAKEVLQEVSGTPRKNEILKRLTRRRRRLVNERVRVVNSLQADLQAVCPGLREITVEAGNQWFLNFLVSADTLPQLARLRHSSLMKIAQVGVKCAAKIEQWQKRSHFSEEAEWVGEMIQEDARRCLELDEKIKQLKTQIAEIAKNSKIAKRLRSMPGYGAVCSSELAGEIGTVDRFSSEGSLALYLGMATLDNSSGKYQGSKAPKQVNTRAKAAMMIAVDRHRKYVPESQRYYEKKRAEGKKHNQAIRALGRHLTRIIYKMLKEDRDYEIRPETGKGKARVSARSSLKTQIRMPKKSVSKKN

SEQ ID NO: 342269 - protein, 345 aa, unidentified
MTNDIQFSSFCGIDIAKSVMQVYKVSSDGVVSNKAVKRADFLNEFRNIPPALIGMEACGGSQHWARELQSLGHTVRLMPPKLVKPYVTGLKNDKNDARGIYTALEMSVREVPVKSAAIRDLALLQTMRAKRQREKVAKINHIRSILTEYGLVMGKSLNAFLAKAGSLIVELKDRADVSPYVVSELIALFEEVKEAIAKIKELETNIESIAKTLKQYDLFRSAPGVGPITAATMLVLLCNPAVFKNGREFAAYIGLAPKSSGSGGKNFVTHIPKKCECNNEVRTLLVQCAHSICRCRHKSDWVSSILARKPKKVAIIAIANKLARQLWIMAKKGEKFEKRFILAAV

SEQ ID NO: 342270 - protein, 352 aa, unidentified
MTVTTLARSITGGVDTHLDVHVAAALDERGSLLGVESFATTVDGYKKLLGWLSDFGPVDLVGVEGTGSYGAGLTRHLQAERVRVVEVDRPNRQRRRRKGKSDPQDAISAARAALSGDACGDAKTRDGNVESMRVLRVARASARKGRTQALNQMRNLVSTAPEPVRDELRGLNVFRLLERASAYRPGSKRDIVSLTKFTLRMLARRALTLEEEISEIDAILKPLVKETAPELVATLGIGTDAASALLVTAGDNPERLRNEAAFAHLCGASPLDASSGKNERHRLNRSGDRQANSALWHIVITRMVYDPRTTEYIARRRQEGLTKKEAVRCLKRYVAREVYGLLPHEKLGLDSP

SEQ ID NO: 342271 - protein, 391 aa, unidentified
MICVGIDVAKDKHDCFIMSSEGEVLADVFAIPNNMDGFCCLMQRIQACSTTQDKIKVGLEATGHYSYNILGFLLDNGLDTYVINPLHTNLYRKSLTLRKTKTDRVDARTIAAMLMSDVGLKPYTDTAYHNEELKSLTRYRFDKVKVRAKLKSSIARLVCILFPELEKLVSSLHMASVYALLDEFPGAKQIAAAHLTRLSHLLAESSKGRYGRDKAIEIREAARQSIGSMMSAKSLELRHTICLIRELDAAIAEIEQAIQSIMNKLHSPITTIPGISTRMGAMILAEVGDFSRFDSPDKVLAYAGLSPSTNQSGQLKNCHAHMEKRGSRYLRYAIFNATKFVCLWDPIFAAYLARKRAEGKHYYVAISHAAKKLVRLIYALEKSGEPYRSAA

SEQ ID NO: 342272 - protein, 356 aa, unidentified
MKKVVKQVLGVDVAQKELVVTLGRMHDDFSIELYAYNVFKNNDTGIIALVKWVQKLTISEASVRYVMEATGVYHQKFAYYLEEHGYDVSIVLPNKISSYIRTLEIKTITDKTCSEAIARFGLERNLDQWKRPKEIYKQLQQLTRERDQLVAERVVAKNQLHAEQTEAYPYKNSVKRIKARIRFLNQQEKEIKQEIDAIVNSNQDLKNEVDNICTIPGVAQLTAAIVLAETNGFELIRNKRQLVSYAGLDIREKTSGTSVKGKPRISKKGNRNLRRAMHLPALGAIKHNEIHKAIYARLVSKCGIKMKGVVAVQRKLLELIYILHKNKTVYQSDYEEMKRGAAAISHSPLETSSRLF

SEQ ID NO: 342273 - protein, 348 aa, unidentified
MVVGIDVHKHAHVAALLDERGGELGTLAFANSPAGMRNLCNWLEDNDAADAVVGVESPAGYGRLLVASLEAAGHQVLNVPAWRTHRERRRHGPGKTDPGDAIAVAQVVLRKRTELGPALEPELVRALALLELQRRRLVRDRTQAIQRLRADWNQIDPVGEARVVNLTRQRELRRLKRISFGSGLVEQVTTRCIRDLARDIEDLNQRIAKLDTEIAALLAEYGNPLDDLHGAGAQISAAVIAHAGDVRRFRDAAAFARFCGAAPILCGSGKTAGRHRLHRGGNRQLNAALYRIAIVQARHHPPARVYLARKIAEGKTPREARRALKRHLANVIYRRLYAWAEATPALNT

SEQ ID NO: 342274 - protein, 436 aa, unidentified
MNQTKLNRKTIVSDGGDFAALIGLDWASQQHALCLYDCATGTRESSTLEHAPEAIAQWAHGLEQRFGGRKIALCLEQAKGALMNALLEYSFLVLYPINPATAARYRQAFKTSRAKDDPSDAQVCLELLLHHREKLTPSLVNDGATRELSRLLEARRSLIDLRTLLINMLRDALKSYYPQALELAGQDLFAPLGCQFLLKWPSLGQLQKARTESVRKFYYAHNCRRMDVIEKRLHSIASMIPLCRDPALIEPAIVQVKMLARQLLQLGIALKEYDSRIEQLFVQHKDASIWESFPGAGPTLAPRLCCAFGNERSRYQRALAIQQYSGIAPVIERSGKNQHWVHRRWGRPHFVHQSFFEYASQSVLHCSWAKVFIQDQIARGKAYPTAVRALAFKWQRIMFVCWRDRLPYNETIYLNSLKRRGSHLTSKLNPELPKAA

SEQ ID NO: 342275 - protein, 371 aa, unidentified
MNFIGIDLHTNKFTCCYRDETSSTEDPRKGRAIETFTLDSQGLGMFYKTLTADTYALVEATITTCSFVRLFRDRVKEVIIANTYELKQVSLARCNTDKIDADKLCRIVKAQVLSGEQLVSPVTSPPVEIQELRGLFTTYRLFKKQTTQLKNRIHSLLKEQLHGYTQQEIFGKRDRQEIRALSPGSPMHFQVNLLLDRLERDEADVEVLQDKILVQAEPFMTQIDILTSMKGISVFIAIAIIADIIEVSRFKNSKVFTSYLRSAPRVSNSNTSTSNRGTNKMGRKLAATLIVNSLNHALDASPKLSSWYERLCQYKKPGLVRTGLRRKIFAELYQMLKKGQYHYGRDSVKHEVKMSQYRNFLKKNKISLEIA

SEQ ID NO: 342276 - protein, 317 aa, unidentified
MTKTNTIAAGIDTAKDKLDVAICGQVLRLQVANSIRGWKQLRSELAKAGVERVGIEATGGYERGVVRHLQAAGFVVLVLQPIQVRAFARLHRQRAKNDALDAALIAACAAAIEPHEIGPDQRLAALADTLTFVEQIEEDIARFKTRLEHIGEPRLKRMVLADIARLKVRRLAQLRLIAKQLRAHHDLAVRLDLVMSVPGIGERTALALIIRMPELGRISREQASALAGLAPFDDDSGKYRGQRHIAGGRGRLRRSLYAAALPAAFRWNKALINLYSRLTAAGKAHNVALVACARKLLIYANTVVARGTPWVENAPAT

SEQ ID NO: 342277 - protein, 369 aa, unidentified
MTSIIYVGMDVHTTNYTLCCYSVEKDQIFAETQVSPDYKNILKYLEQVGKNYNDCHFLCGYEAGVLGYALYNQLIWNDVDCVILAPTSMPKTIKKEVKTDRRDAKKVAKCLAYNTYSPVYVPTAEDNAVREYIRMRNGEKDTLKRIKQRILSFCTRHGEHFTEGKNYWTQKHIAWLKALDFGNAILNEAFQEQLVTFNQATDRIALFDIRIENLAQRENYATKVKKLTSFIGIKTHTALSIIVETGDFKRFPSAENYASYLGLVPGERSSGNSIVRTGITKAGNSNVRKLLIESGQSFSRATIGKKSKALLNRQAGNGPNVIAYADKANERLKKKCYRITQSSKRNIAVTAVARELACFIWGMMTDNVA

SEQ ID NO: 342278 - protein, 354 aa, unidentified
MSQSSTLYVGMDVHKESIAVAYVAQEHGAEVVSLGTIGTRQCDIDKLLRHLQSKGQQLVFVYEAGPCGYWLYRYLTKKGYVCWVVAPSLIPKKPGDRVKTDRRDARQLARLMRSGDLTPVYVPAVDDEAIRDLSRAREDTLRDLKAAKLRLKAFLLRHDIRYTGRANWSPAHLRWLSEVVCPTPAQQIVFQEYVQTVTEQTARLQRLEYELRDQVNTWRFQPVVEALQALRGVQFTVAVTTVAELGDLTRFDNPRQLMNYLGLTPSEYSSGPRRQQGSITKTGNSHARRALVEGAWAYRYPAKVSRHLQLRLEKLPAAIQAISWKAQVRLCKRYRQLMAKGKNANQVVVAIARE

SEQ ID NO: 342279 - protein, 422 aa, unidentified
MRSVALDVHLDFCEVAIVEDGEVRSAGRIETKPERIELFASSLGPDDRVALEVTGNAWEIARILEPHVAQVLVVSPSDTGIRQARAKTDRLDARTLARLLAAGSLDAVWMPDQATWVMRRRLSRRGQLVWARSRTKNQIHAVLMRQLVGRPPVSDLFGVKGRKWLAELQLAFEERETVDGAMRQIEFLDSEIAEVERLIAQDALHSPEIRRLMGVPGVNVIVAASFLAAIGDVSRFQHPRKLVGYLGLDPRVRQSGVGPATHGHISKQGSVRARHVLVEACWTAVRQPGPLHAFYERVRARRGHSVAIVAAARKLACLFWCLLTREEDYAYAQPSLTKKKLRRLEITAGAPRYSAKAAGIWSANDAVRQAERELARQGEVAYARTVRDWHAVQANKVGASATLGRASNKPSKGKAARQTTSP

SEQ ID NO: 342280 - protein, 370 aa, unidentified
MSACYEGQQQFVGIDLHRRRTVLVRMTAAGERLGAMVRFPSTPEALRREMAPALSPAGPAPQVVLEATYGWYWAVETLQQLGAQVHLAHPLGIKGFTNRRVKNDERDAADLADLLRMGRLPEAHIAPEPVRALRELVRHRAKLSRWRSGVKTSIHAVLAKRGVAVAMSDLFGAEGTALLDALCASPGGPGSAGGLRLEPEYTARVVSLRMLLATLEGEIAEFDRRIAAALAGHPGYRTLQQLSGVGPVFAAVFVAEIGDVGRFATADKLTCWAGLTPRHRESDTRVHRGRVTKQGSKLVRWAAVEAVQRSSEPAVAAIRTRIAERRGRPGQRTGRNIAKVAAARVLLKLVYYGLRDGQIRALGSASAPAA

SEQ ID NO: 342281 - protein, 315 aa, unidentified
MTNKTPSGKIFIGIDVSKAHLDIYIHPLSKQFCIDNNAKSISKWLKNHVQPGAVVIFEATGGYERTLQKEILKHSDITAQRIHPSRVKSFSRAFGKQAKTDAIDAQMLARAGEQLADSLHNTAICEVTQELRDLLARRTQLQDILHAEKCRSKMECLSKVVIRDLKTHIAYLKKRMAAIEDEVRALIAAHPALKTRSQRLQNVVGVGEKVAMTLLAFLPELGTVDRKKIAAIAGLAPITKQSGKGAGYARTKGGRQPLKKAIYMAALVGIRYNKTLKTFYQSLLEKRKPKMVALIATAKKLLLHLNAIEKNAPVG

SEQ ID NO: 342282 - protein, 342 aa, unidentified
MSITTIAIDTAKSVFQLHGVDAAGTPMLKRGLRRDELLPFFEKQERCVVVMEACGASHHWGRALIALGHEVRLVPPEATRPFVKKGRKNDAADAAAILAASRHDVKFVPVKSREQQATLALHSARTLLVKQRTMLVNAMRGLATEFGLVMPKGIERLVELAADVDESLSGEEKRGFGELHASAAELSLHIEALEKEIVEHARRDQLARRLATVPGIGPINASLISATVGGNAGAFRSARQFAAWLGLVPRQNSTGGKTRLGRITRAGNSEIRTMLVLGATSMVYRAGNWNCATGAWVRGMLARRPAKLVAVALANKLARIAWAVMSRGEVYRADGRRAIAAS

SEQ ID NO: 342283 - protein, 349 aa, unidentified
MTKVTIGVDLGDQYSQLYVVDAAGTCVETGRVRTTRAGLERWFAGQAPARVVLEAGTHSPWASRALQALGHEVLVANPRKLRGLYENDSKDDRVDAEYLARVGRLDPALLKPITHRGAAAQADLAVLHARDALVRTRTQLISHTRGVVKALGGRLPRCSTEAFARRASGDVPAELQPALAPVLAQVQQVTAAIRAFDRELERRCAEQYPATARLRQVSGVGPVTALAYVLVLEDPRRFARSRAVGAYLGLRPRRSQSGERDPQLGITKGGNPFLRRLLVQGAQYILGPRGPDCDLRRHGERIAARGGKNAKKRAVIAVARKLAVLLHRLWISGAVYEPLRHSTALAQAS

SEQ ID NO: 342284 - protein, 412 aa, unidentified
MGKVMQIAPGLKKHIREVRHMIIVGIDIASEKHDYFMLHKETGTVFSTSSVTIGNDEEGFKKLHSDIQSFCGVTGDSNVRIGLESTGIYHTNIIAFLLTQDYKVMMINPILTNMTRKASRIHSQKNDNLDAQTICKFMIDHADEFSPYTPSLYHKTALKSLSRKRFFIVEDLRKAKLAVNNLVQLIFPEFKSLFSNIYGDSAIAILKEYGSAQRIARAREVKISSLLNGHCKCSAKQIIDAAKRSVGLKDDFYAFELLDAIEEMEHIQNRIKGYDLQIKKYVDELCPNLLSIPGVGYTTAGLICGEIGDIDRFHSAESLVSYSGIDVIVYESGKYKAKHLIPSKKGSKYLRYALFQVSRIIWQHDPVFSSYYAKKQSEGKHYYVILGHIQKKVARVIYSVLKNNSVYQPRFV

SEQ ID NO: 342285 - protein, 435 aa, unidentified
MEEVEDEPLFCDRVAGIDIGKATVMVTIRVPSDARKGGRQQETREFGTTRRELLALADWLRCWQVEKAGMESTSDYWKPVYFLLEREGFDCTLYQASQVKALPGRPKTDKLDSAWLAKVTERGSLAGSFVPPEEIRRLRTHTRYRRKLVQMRTAQKERCEKLLEDAHLKLSSVISDIHGVSGRDMLRAVAAGERDPKVLAEMARGVMRGKIRRLEEALDCSFFTEEHAFILTMMLDSIDQLTAQAEVLDEKIAAMCEPYERQVAQLDAIPGFGVTTAQDLIAEIGVDMSVFPTAGHLASWARQAPRVAESAGKRKGRNATGRGNPYIGGTLGEASVSVGRTQTFLGAKYRRLNTHMPKKKAQVAIMRTQLVIAHALLSDPAAEYQDLGPDYYERRADTRRRAHSHARALERLGYKVTIEAPDPETGEYLPIATAS

SEQ ID NO: 342286 - protein, 419 aa, unidentified
MRNSNTKKLKRISEQTLLVTVDMGKVKHTGYYRFPDGTDGKTFEFCNSRRGFEEMWQQVCRAKRFRNLTEVVVGFESTGPYAEPLLHFLRRHDVRLVQVNPLHTKRLKELQGNSPNKTDQKDPKVIADIIGLGHALTVIIPEGTVAELRRLTQARERSIQRMSVLMSQLQDLIFLIFPEFMPVMKDITIKSTQYLLKRYPRPQDVVETGVKLLTQSLKKVSRGKLGKERAEALYQAAEASVGLKEGQESMVIEIKEIISAIEHIERYVKELEKHMSKHLKDIPYSRFILSIKGIGEITTAGLIGEIGDFREYSTISEVIKHAGLDLFEISSGKHKGTRRISKRGRPLLRKLLFFASINVVRKGGILHRQYLQHLDKGMPKIKALIAISRKLLSIIFALVRDHSVYIAQYSEIQQLKEAA

SEQ ID NO: 342287 - protein, 340 aa, unidentified
MFLGTNIFLGIDISKANFDAVLLDTAQAKPRHKVFPNTQAGFERLQEWINGQNVVNGQEWQDKQALHACLEATGTYGNALAQFLYERGQTVSVVNPARIKAFAQTQMARAKTDKADATLIARFCALHRPEAWKPPAPEASELQAWVRRLESLREMRQMEKNRLLAGLVASVEVSLQEHLAYLDAEIAKTEQRIKDHISQTPNLKRQRDLLVSIPGIADTTAAALLAEIVDVSAFAGSRQVAAFAGLVPRIRHSGSSVRGRACLSKVGSPRLRKALFYPAMVALRFNPVLMALQVRLLAAGKNKKLIVGAAMRKLLQIAFGVLKSGRPFDATIAMPLAAKA

SEQ ID NO: 342288 - protein, 343 aa, unidentified
MYYIGLDVHKRTISYCVKDAAGQVHQEGKIGSTRRELDAWIKTLPQPRTIAMEATIFTGWIYDHLLPHAEKVKVAHPLMLRAIAAAKKKNDRIDAGKIADCLRCDFLPECYMTSTEIRERRRTLRYRNLVLKQMVQMKNRISGLLMETGVSYNKQRLHKLGYFTELMSGNEEVDESIRPLLKLSRETIVRSQRLDYALVSSLERDPLLAERLKRLRTIPGVGPITALTWALEIGDVSRFQSVKQAISYCGLCSAERSSADKLVRMPISKQRNKHIQQTLVEAAKLAPRYSPELALVYERERQRGNRNRATLAVARKMVAYMLAVERRKQDFVLTGKFSGTAAA

SEQ ID NO: 342289 - protein, 384 aa, unidentified
MNNNSIVFIGLDTHKVSTEVGYSTDGRDQPINHLGRIKTTKQALVKLARQFQSKHPKATLHFVYEAGPCGYWVYRLLTQLGHCCYVVAPSLIPKKPGERIKTDKRDALKLTRLLKSADLTPIYVPEPEDEAVRDLSRARERTMHDLNNARYQLKALLLRNNIAYAGTANWSFKHLRWLTELILPHPAQQIVLQEMIQTVTERIARLERFDNELSHQVKRWRYYPVVKALQAMRGVRQLIAVGVVAELGDLSRFDHPRKLMSYLGLTPSENSSGDRRRLGSITKCGNSRARRLLVEGAHSYRFNANISTELQKRQEGLSQEITGIAWQAQTRLCRRFKRLILRGKPRSIVVTAIAREMSAYIWAISREVVLTQVNPKHRLARVPA

SEQ ID NO: 342290 - protein, 358 aa, unidentified
MEYGAIDLHKKESQIRIVTESGEIFDRRIATPRDRFSALFEGRRPMRILLEASTESEWVAQHLETLGHEVIVADPTFAPMYSERSRRIKTDRRDVAALAEACQRGCYRAAHRRSGSQRTVQVHLNVRRELTDSRTRAIALARAVIRGAGLRIRSGSTGSFLVRMAALDLPASISETLGPLQRQIAALNDELATADDRMASIAAQDPVVARLTTVPGIGAITATAYVAALDDAARFGRAAQVASYLGLVPREYSSGEQQRRGRVLRSAHPYVQSLLVQAAWRVWLSKDSRTADLRRWAQGIAHRRGKNIAVVALARRLARILFAMWRDGVPYDAVRTRPTRAHGGAAIEVAAAQSADPS

SEQ ID NO: 342291 - protein, 338 aa, unidentified
MNQCFVGIDVSKKQIHVCVLGEKPHPYPNCLTGFRKMMKSLREKKPHGEETFFLIGMEATGVYHLKLATFLKDEPDVAVYVLNPAQVKSFFKASFHRTKTDAIDACGIASCTEFLVKRDKVRAFETPDNEVERLRQLCRRREEILSMVQMEKNRIEALKEVPSHSGEVESSLLEHLEYLEQRLKDIEEKIKGHIRNSPGLKEQVDLLKSIPGISDTAAAGLISEIRCAERFDNVKELVAFAGLAPAERTSGTSVKGRTCICKTGSSRLRKHLYMPALVGIRYNPLLKEFYERLTNRNKPKKAALIACMRKLLHIIYGVLKNRTAFDPLWAKNRFAMAC

SEQ ID NO: 342292 - protein, 408 aa, unidentified
MERFYLGVDWADQFHQVWVSDFDGKKVVEKKVTQNIDGLAEFGRWLDEQRAKPIELWAAIEKPQGRIVDFLLDHGVEVYPVNPKALDRARDRFRMSRSKSDGFDAYVLAQFLRTDHGHLRALKPNSVQAQELKLLTGDQQRLGHQKTRLLNQLTATLKEYYSRPLEVFSDLETQIALDFLKQNPTPDDLSKLTRRQWNRFAKREHHLGAERAQELWEQLNQPQLTVPEHVVRAKAHLLRVLLGQLDPLRKAVKSYEERIKSFFGSMPAAELFKGLPGAKTGTIIATLWAELGDPKSRWESFRHLQAEAGVVPVTKTSGKSRVVQFRFSCNKIMRHAAYWLAFVSLNRSEWANHYYRDQRAKGHSHHQSLRALGAKWLKIIFVMWRDHKPYDENYHLANIARQKMRQAA

SEQ ID NO: 342293 - protein, 321 aa, unidentified
MTYVGIDVSKATFVVAYSSAKGSRTNSFKNTVKGIHEFIQTISVAEHHCVLEATGNYSALLVYLLSEAGIAVSLENPLKIKNFARVMLSVTKTDEIDARLIAMYGEKMQPTSYKLRNDTILILKQKRTVIRQLKKQLVATGNLKGSMEVLPFFDPKCKKTIEKTIIFLEKQIKGLEEELASLAQSEYKKQMDLLTSIKGIGVTLAAASIMATGGFTYFDNAKQLTRYLGLSPTYQQSGTSVNVKGHINRNGDSSLRSQLYVAAFASLRCNTECKACFDRLRSNGKPGKVALIAVANKLIRQAFAVVTQEKLYVDGFKSEKP

SEQ ID NO: 342294 - protein, 400 aa, unidentified
MLSIGIDVSKGKSTVCGMKPGGEIVYAPFEVQHTREGMSELVSLLRSSGEEVRAVLESTGSYHCPVVAALLENGIFVSVVNSLRMKRFCSQSIRKVKTDRIDAMQIALYGLAYWQELQPTRLPEDTYRELQLLARQYYQMTSLLIKAKVDFNAICDQVLPGMQELMNDHAGRHKLSDFVLRYHHTTHILEMGETRFRKDYCKWAEKKGYRNCERMAAHIFATAQNGIPVLPNAPSTQIVITEAIRVLHTVEASRDAILTQMQALAKTLPEYSLVREMPCIGDTLAPRLIAEIGDVRRFHSKRALIAYAGIDAPPYQSGKFCANNRHISKRGNRYLRKTGYEVMQSYVMHKPANDPIFTFIEKKRGEGKSGKLAMVAGLNKFLRVYYGKVTELYRSLPTIE

SEQ ID NO: 342295 - protein, 357 aa, unidentified
MKIYKIASQRAKVQGSPDLYVGIDVHLKMWHVTILHDGVILFSSGIPGQWEVLRKLLDRYKGYRIHTAYEAGYFGYGLYDRLREYGASCLVAAPSLLPQQHGNRVKTDRRDSKKLALWLSQGALVGVVVPTMEKRSHIAVIRRRHQLVKDCVRIQLRIKAEFRFHDLPFPDVKGKWSKRFVENLHTFQFKDRWLHESFQRLLAQYDLLIEEIARQTTLIEELAKTDCYRENVTILRTIPGIGLLIAMEFLVELQDIHRFRTADQLAAYVGLTPAQYSSGEHIRMGNITHIGKGRLRAFLVEASWTLISKDPAMAQKYQALKYRRGSKRAIVAIARKLLVRARRVLLDRTPYVIGKAA

SEQ ID NO: 342296 - protein, 317 aa, unidentified
MKTQVFVGLDVSKQHLDVAVRPQGRHFVTPNNDRGIKQLVKRLAALKPQLIVLEASGGYEFLATAALAEAHLPVALINPLAVRKFAGATGKLAKTDKIDAQVLAHFAEALRPEPRPLPDQDQQLLKAALQRRLQVVKMIGQEKNRLEKTFIPAVRQDIQAHLTWLHQRLEQLDRDLNDQIRRSPLWRDRDRLHQSVPGIGPVVSRAIIAQLPELGTLPAKKAAALVGVAPYNRDSGRFRGKRMIRGGRSYLRRMLYMAAVVASRWNPVIRAFYQRLLAAGKPKKLALTACMRKLVHIINAMIKNNQPWNQFHPGTLT

SEQ ID NO: 342297 - protein, 344 aa, unidentified
MYFIGVDHHKQVSVMTVLDEDGQELRNERVVNLRSHVQRFLEGYRPFTAVLEAGRASYVMADLLRELGGEVKMANPLQVKAIAHARIKTDKRDSRTLAQLLRADLIPEVYQRGQWNRRAQRVMRMRAYWVGKQTEVRNKIRALLAQQREEIRLEVEKREGGLFSPKGLEFLRLLALEGPDKLVLDDLLQGHREIQAHVKVTDGLVKALYGELEDAARIDTVPGFAQTLSVLVAVEIADIRRFPRPADLHSYAGVIPSTHASGSRTYHGPITKQGSAWLRWAILEAVYPAIKKDLALWALYKRLARRKGANVAKIAVARRLLTIVYRVLSERRNYIPGLMKQSAA

SEQ ID NO: 342298 - protein, 397 aa, unidentified
MYIVGIDIAKRKHEAAVIDGEGAVIIKPFSFTNNCSGYNRLLAMLTKAKLPLDEVSFAMEATGHYWLALFTRLQKEGFRVQVINPVQTNSIRSFYIRQAKTDPRDALLIAEVIRFGHFSESTLHPENIYELRELCRGRHAIVSMQADVKRKVVALLDQVFPEYETAFTNMFSDTSMAILQNCPTPKELSEMPLEELCHLIEVSSHKRFRMAKARELQELARDSFGFAMAGDVFSTMIRLYAKHLDFLKQQVREMDRKIAEIMDTLDTPITTITGIGPTLGAYILSEIGDINRFSSSAKLAAYAGIDPTMRQSGEYNGVRNRMSKRGSPYLRHAIWLAASSAVLHDPALKLYFQKKRDEGKPYMASVGHACRKMVSIICAVMRDNKAYTPCIPNEISA

SEQ ID NO: 342299 - protein, 381 aa, unidentified
MSKIIRIGMDTSKSVFQLHGVDADEKPVLRKKLRRREVLAFFAKLEPTRIGIEACGGSHYWARELRALGHEVVLLPTQLVKPYMGQRKKNDAADAEAICEAMSRPRMRFVPMKTAEQEAAQMLMGVRDRLVRCRTQLTNAIRGYAAEFGLVTAKGLDKIEPLLARIESDPTVPGLAKELFAAQAKEYAQLKMRIREIEAKLKAWLRQNELCRRLAEVPTIGPIGACLTVMKVPDPHVFRCARDFPAWMGLTPKDHSTAGKTRLGVITRAGDETLRKTYVAGATAVIQQVKKGRGNPSPWLLDLVRRKPPKLAAVALANKTARIVWKLMVSGERYNPHAARGATTPVSRSGRRAPLNGGSATRPSLPSCPTARDATVATMGA

SEQ ID NO: 342300 - protein, 459 aa, unidentified
MKRNTYRGKRVKVKRAEGMLSVTRANVAGIVLGSGEHDVACPPRDGQANVKTFGTTTPELAALADWLQAEGVVSVAMESTGVYWIALYELLEQRGIEVVLVDARQLKHVPGRKTDMIDCQWLQLLPSCGLLRGAFRPADAFCPLRALVRQKATLVDDQATWLNRMQKSLDQMNVRVHRAVSDISGTTGMAMIRAIVGGERDPHKLAGLRDERCFRSLREMVEELTGNWRQDHLFNLKEALAMYDGILTRIASYEEEIERVLKELVCKPDPGSAPEPSKANKKKQMRRRGQEPLRQALYGACAADLTSIDGISTTTAEVVLSELGPDLSAFPTERHFVSFVKLSPKLAISGGKPIHKRPKGTASTRVSAALRMAAVALRNSQTALGAAYRRIARRKGASVAVFATARKLAILIYRMLRYGMAYVDEGVQAYEQRFQAARIQMCEQIANQFGYKLIQQESV

SEQ ID NO: 342301 - protein, 348 aa, unidentified
MNTILGLDLGKFKSVACLYDPCTTAARFTTVHTDPAELRKMLERESPALVVFETCTVAGWVADLCGDLGLAFAVANPMHEAWQWRKVKRKTDRDDALELARMAALGELPTVPMPSKTARQYRALVQYRDRLVGRRTAAQNRIRALAQRHGVLLPSGHRAWTAAGLELIATMTCPLSDCGPEELWRGELALELRELKALMALVEEVERKLNALGARDDRVRLLQTIPGVGPRTAEVVVAYLDDAKRFRNARTVSAYAGLVPRQFQSGQMDRRGRITRRGPGLLRKVLVEAAWMMQRYNDWAVRMLKRISKGQKTRRKQALVAIARKLLVRCWAMLRHGTPWDERLAAAG

SEQ ID NO: 342302 - protein, 428 aa, unidentified
MKYNTQNSKIASITEKTLIVGIDVGSQVHYARAFDWRNYEYSRKSFAFSNDEEGFMAFKNWMNDIAEKHDKEVVLPGMEPTGHYWFGLGMFLQDMGMHPVHVNPHHVKKSKELDDNNPNKNDRKDPKTIAALVNEGRFSYPYIPTGIYAEIRNLSNLRFQTQEQITRIKNRIARWFSIYFPEYKEVYGNLDALSGMMILKMAPLPMDIVKLGVDGVNKIWRDAKLRAVGLKRAKTLVNKAEHSIGSHEAPEAARVELQILLSNYEMYNQRMDDLMQTIEEKLYEIPYIDKLLEIKGIGMITICGFIAEVGDIRRFDNPKQLQKLAGYAIVSNDSGKHNGESHISYRGRKRLRYVLYEAAISLIGKNTEFKEIHHYYRTRERNPLKKMQSVIAVACKVIRIFYAILTKGVAYDGAKMIKDIKRPALATN

SEQ ID NO: 342303 - protein, 335 aa, unidentified
MLIIGCDYHPTVERIAMVDTGTGELTERRLEHENGEAERFYVSLPKGTLVGIEATGCTQWFERLMAECGHELWVGDPAEIRARRVRQQKTDERDARHLLELLLTNRFPRVWVPSPAERDARQLLQHRHKLVQLRTSVKNQLHALAMGQGLCRKRQLWSQSGRQQLEALQLGPWASERRKELLALLDQLNPQIAALDQAVEAEAARRPEVVRLRGEKGVGALVGLAFVLTLGPVKRFQRSRQVVSYLGLNPREESSNDRQRFGHISKQGHLMMRWLLVEAGQTAARLDPELRRVYRRLRYRRGANVAKVAIARRWAVRMYWILRQAAEGAAGSHVR

SEQ ID NO: 342304 - protein, 439 aa, unidentified
MILIREVADAPVIMGISKPAGLKSPRGEVKIVNPLFVGIDVSSKNNVAYLMKPDGSKYSSFSVQNNLGGAKLLSERIVSALGSMRLCDVVIGLEATSIYGDSLVYALREDGNLGQFQRKIHILNPKQIKKFKEAYPDLPKNDWVDAFVIADHLRFGRIAKEVYMDDYRYKALQTLTRARFDVIQNLTREKQRFANYLFLKCSGMAQDKDIQNTSATTIALMERFETVGELANAELEELTAFMTETGRGRFADPVATAKEIQAAARGSYRLPKTVNDTVNQAMSVSIASMRALKEQVKVLDKAIEQQFEIIPNTLTSIPGIGKVYSAGIIAEIGDIHRFDSQTSVAKYAGLVWTQHQSGDFEAERTHLIKSGNRYLRYYLLEAANSVRRCDSEFRRYYDLKFKEVNQFQHKRALALTARKLVRLVFRLLKDNRLYIPPEG

SEQ ID NO: 342305 - protein, 419 aa, unidentified
MTDPPLQVWARYIAIDIHKHYLMIGGIDAHKRVVLQPRRVELHRWSEWAQANLHPTDAVVIEATTNAWVIYDLLVTLVGDAVVVHPAKVKLIAEARVKTDKVDVLTLAQLLRADMLPEVWVPPPHVRDLRALLSHRRRLVSLQTTAKNRLQSVLHRLNLPPPDGDLFARKLREWWEALELSTTERLRVDQDLATLEHIIPQIEQVDGELRRLSVSEEWAEQVPYLMQLPGIGLLTAMSILGAIGDVTRFGASKQLVGYAGLGAGVHDSGKSHRDKGITKQGRRDLRFVLVEAARVAVQTHPYWKHEFARLAKRIGEHKAVVAIARKLLIVVWHVLMSKSADRRADAEQVAFKLMVWSWKLTDEQRGGLSSRQFIRAHLLRLGLGEDLTHITRGGTKRPLATIEEVLALRPELRAPPSTA

SEQ ID NO: 342306 - protein, 434 aa, unidentified
MAQRNRSVSLKPVKSRAALTITHPNAAGIDIGNAVHYVAVPPDRDDEPVREFPSFTVDLNAIADWLKVCGVDTVAMESTGVYWIPLFELLESRGFTVLLVNARHVKNVSGRKSDVLDCQWLQQLMTYGLLSGAFRPTEQICVLRSLWRQRVMLLRSQGRHVQHMQKALTQMNVQLANVISDVVGETGQKILRASIDEIAKSLQGNWRDEHLFALKQAVDAFDFIGKQLAECDREIEQQMQCLQAHEGEPAKGKQRGRTRNAPKFDLRTQLFKMCGVDLTRIDGIDVTTALAVISETGTDMSRFPKVGNFTSWLGLCPGTKITGGKVMSGKTKRVANRAAQALRLAAAALRSSQSALGAYFRRMCSRMDKAKAVAATAHKLARLVYTMLTKGEEYTDQGQDYYEERYRARVLRQLSLRAQKLGMTLVATEQPGPA

SEQ ID NO: 342307 - protein, 409 aa, unidentified
MEVVHEVCCGLDVHKKSVTACVLWASGRRRQTREFGTFTKDLLEMSDWLQSCGVTHVALESTGVYWKPVWNLLEGQFEVLLVNAQHIKAVPGRKTDQKDSEWIADLLQHGLLRASFVPPTPTRELRDLTRYRASLAQEINRIANRIQKVLEDANIKLASVATDTLGASGRAMLEAIVNGEQDSQRLAEMSRGLLRNKIPQLQQALEGRVTPHHRFLLRELLDHHYFVESKMRRIEQEVAERLGPFQSEVARLCTIPGVDRVTAWGLLAEIGLDMSQFPDAQHLASWAGLCPGSHESAGKRKSGKIRKGSLWLRRCLCQGAWAISTKKNNYLSALYRRLAARRGSKRATIAVAHNLLVIAYYILRDQTCYQDLGPDYFDRLNPEGLRRRLTKRLEGLGFKVILEPVAQVT

SEQ ID NO: 342308 - protein, 323 aa, unidentified
MNKDINYFGLDISHLVFDVTDSDGNYYQFKNNGSGFKKFVKLLNFDSHCVMEATGYYHYQLAYYLLENGIKVSVENPLSVKRFIQMRLSKIKTDKSDSKLICEYAQQVDLKLWKGNSKNEIECLQITRTLSVYTKQSTMLKNKLHGEAVLGNPSKAVVSSLNRSLKQVKKELEILEAKLLILVKQTHQDLLTRIKTIPGIGSKTAIMLVVLTGGFERFTSASELCSYAGLTPVIRQSGSSVKGRPRISKIGNQKLRNLLFMCSFNACKYNKACRDLYERIVAKGKSKKLALIAVCNKLLKQAFAIAKSGLIYDDTYRSTLVKS

SEQ ID NO: 342309 - protein, 274 aa, unidentified
MKHYAGLDVSVKETAICIVDETGTVCREVKVPTHPEDLARMLKDPPAWRLERVGLEAGPLSQWLFEGLAKAGLPVVCIETRHVNAFLKAQPNKTDRNDARGIAQMMRVNLFRPVHVKTLTSQKRRALLTARKLLKEKAIAIENDIRGLLRNFGLKVGKVGAVKFEERIRELTEGMPDLAEIVEPLLDARRKLRQNYAALHRKLLAIVRDDEVCRRLMSIPGVGPVVSLAYTATIDIPARFRNSKAVGPILGLTPALHESGESRRVGGSRYAATA

SEQ ID NO: 342310 - protein, 341 aa, unidentified
MSIVGAFDVHRRQLTFDYLDTVTGEVKRGRVVPADRDHLRAWLARFAGQHDVHFALEGCTGWRYVVEELLAAGITPHLAEPADTAALRGRKRHAKTDKTDSRHLRVHLAAGDLPECWIPPGHVLEARAVVRLYKDLLDERGAWHQRIAATLFHQGVPVTASMSTASGRAAVAEMDLSPAGRQAVGTALRQIDRLTGELEPLRRQLDMISRRQPGCRALRATQFGVGAVTAVAIWAELGDVRRFPSSADVVRHTGLDITVHSSDGKGPPGKLSRQGPELLRWALYESAKCAARPAAPDYGYYTATRDRRTGGLATLSVARKLARRCYHTLRELGEEAIAPAA

SEQ ID NO: 342311 - protein, 451 aa, unidentified
MPRKRASKKNVALPVLNPDAAGIDIGATEIFVAVPAERDPESVRSYPTFTVDLNRLADWLQQCGIQTVAMESTGVYWIPLMQILEDRSLEVFLVNAKHVKNVPGRRTDVSDCQWLQYLHSVGLLRASFRPAQDVCAIRSLLRHRDSLVEMATCHVHHMQKALDQMNLQIHHVIADITGTTGLAIVDTILDGERDPEKLAQLRDPRIRASFETIAKSLVGDYRPEHLFTLRQSVDFYREYQKKIAACETEMQRLMKAFESKADPSSLPIAKDSVKKCKVMAPAKALALREQGYRILGVDLTTIPGISVLHVQTIIAELGPDLSKFRSASAFSSWMGLCPDNDISGGKVLWSGTRKVKNRIALTLRMAAQSLQQSQSALGDFYRRMRAKLGAPKAITAAAHKLSRIVYHLLTTREAYDDSVFVKAEERYRKRAENRLKAQAQALGFTLVPKNQ

SEQ ID NO: 342312 - protein, 460 aa, unidentified
MSKKRPKGKRAEPAPKVDWKALEIVHPDAAGIDVGGSEHWVAISPDRDPKPVRSFGCFTADLREMAAWLVEKGVRSVAMQSTGVYWMPVFEVLEQHGLEVYLVNAQHTKNVPGRKSDIQECQWLLKLHAFGLLNNSFQPTDEIRVARTLWRHRGNLVAEASSTIQRMQKALIEMNVQLSNVLSDLSGVSGMRIIGAILKGQRDPAQLAALVEPEVKATPEDIAKSLEGNWRDELLFVLKQQVELYRLYREKIGDCDVQLRRHLESLGSRVDPRTQPLGPKPKGKRGSRNAPEFDLRTELYRITGIDWAQINGIDVLTAQTVMAEAGDDLEDFDSEKHFTSWLGLCPTNETSGGKILKRRTRKVVNRAAVAFRNAASTLLRSDSYLGAQYRRLRTRLGAPKAITAMARKLACLYYRLIKHGQQYVDKGTAYYESRYREQQIRVLTKKAKKLGFQLVIRQTA

SEQ ID NO: 342313 - protein, 392 aa, unidentified
MRICVGIDVAKTTHWAVAVDDGGTVVLDRAVENDPGGLDDLVAALRALDGEVVVGIDVVGSFARFLEATLLAGGFALVHTPGLAVNRAGQGFAGGERKSDPRDARTIAELVRTRDLRPILPDADTVVALRLKVGRRRDLTADQTRRLTRLRGLPCGIFPGLERGLDVTCKGPLVLLTRFVTPAEIRRAGKARLIAHLKKTPHLHGLDALVDRALEAARAQKIVVPGEAATAELIRDLALEALDARTKIARIDRELEDLLADHPDGALIRSLPGMGAVLAAEFIACVGDIRRFASADALASSAGLAPVQRQSGKRNGWRRAVGGDKALKRVSYQSAFCAVATRDPLSKAFYARKRREGKHHAQALIALARRRVTVLWTMLQRRETFDPNRKAA

SEQ ID NO: 342314 - protein, 323 aa, unidentified
MATNKNVEFEPIATRCCGLDVHKVEIVATVEGEGMKRETRTFKSTTRSLTELKEWLLSLGVTHVAMESTGVYWKPVFNILECEGLTLLVVNARHIKYVPGHKTDKKDSAWICKLLRAGLLKGSFVPPKEQRELRDLTRYRRKLVQNVAAEHNRMIRVFEDANLKLSSVFSDVTGKTCTEVIDNVLAGNTDPKFLASLCTHWRLKSSQEEIALAVEGNFTEHHKFMLRAIRKSIENLESQIKDIDEEINRYMQPVEQEVSLLCEIPGIKRTSAIDILAEIGVDMEVFPTDAHIASWAGLSPGNNESAGKKKARTRTTATKRRKR

SEQ ID NO: 342315 - protein, 293 aa, unidentified
MSQEKYIGMDVHQATISVAVRDVHGKLIMECVLETKAATILEFIQGLRGTLALTFEEGTSAAWLHDLLKPHVSRLVVCDPRKNALLKDGNKNDRVDARKLAELLRTNQVKSVYHGKHGTRALKELGRSYLTVTKDVTRVMNRIKSVYRSWAIPCAGTSVYTPRHRGDWLEKLVEPGVRVRAEHLYQQLDSLQPVRLEARRELLLESHKHAAVKLLRQIPSIGPIRAALLVALLQTPHRFRTKRQLWAYSGFAVEVHDSGEYRWVRGKLQRNRERITVRGLNDPATLCYTSITL

SEQ ID NO: 342316 - protein, 424 aa, unidentified
MSRKKSDPAGLQALYARACGLDVHKKLVVACVRILDSKDGTVQSTLRKFGTMSADLMELRQWLAELKVTHVAMESTGVYWQPVFNLLEGHFEVWVVNAQHIKKVPGRKTDVKDAEWIAQLMQCGLLRPSFVPDRQQRELRDLTRQLTKLVQQRNAVDNRIQKVLETANIKLGSVGSDVLGVSGRKMIEGLLAGEKDVTVLADLARSQLRGKIPELQRALQGDLTEHHRFLLRQLLGQYDFLEKQIASVSERFGAVAPPSFRAAVEQLDVIMGVGERGARALLAETGTDMSRFPSHKHFASWAGRCPGNHESAGKRKTGKTPAANRHLDAVLTEIAHSAVRSKNSYFKAQYHRLAGRRGKKRAIGAVKHSLLVTIYFMLRDNKPYKDLGADYFDKLNPQQRIRYHVRRLQELGQEVELSPVADAA

SEQ ID NO: 342317 - protein, 421 aa, unidentified
MEVLYRRCCGLDVHKETVVACLRIVFGGEIVREVRTFETTTASLIALSEWLAENGCTHVAMEATGVYWKPVWHILADGEFQLVLANASHVKNVPGRKTDVNDATWLADLLAHGLIRASFVPDTQTQELRNLLRTRKQLVREKARHILRVQKTLEDANIKLESVITEVMGMSGRAMIEALIAGESDPAKLASLANYRLKASQEKLREALRGRVTKHHRFLLRLHINQIDALDAAIATIDRQVEAGIAPFRAAVDQVSSIPGIRDIGAQVIVSEIGTDMSRFPSDGHLISWAGLCPHNDETAGKRRSNRLRKGAPWLKTTLVQCAWAAVRKKDSYLRAQFLRLKARRGPKKAIIAVAASILTAIYHMLKDGTLYQDLGSNHFQSRSKGQQTKRLIKRLADLGYDVALTPLPTNAVPAEGAVSF

SEQ ID NO: 342318 - protein, 322 aa, unidentified
MNKNKEFVGIDISKDSFDVCYPNGKHAKFSNEIGGFKLFVKTLESDWHCVMEQTGRYHHPLAHYLKSLKITVSVENGLVIKRFSQLLLKSTKTDKADAKIIRDYAIQFDPKEWETPKIYISQCRELRSLVVLLKKQRTALKNQDHSLKSSVEPSKEVLKFLKKELIEMNKKIKHLEKVIEDSVKENESEMLTHISSIPGIAKRTATLLIINTNAFRDFENGKQLSSYFGLSPSIRQSGSSLNGKSIITKAGNKDMRKMMFMCSLSASVFNKACNAQFQRIVNKGKPKKVALIAVSNKLLKIALAVAKSKMPYDENFRSVKRA

SEQ ID NO: 342319 - protein, 343 aa, unidentified
MDHFAGLDVSVKETSVCIVDDAGRIVREVKVPSEPKALLKVLTNPAYRFKRIGLEAGPLSQWLYSALAEAGLPVICVETRHMRAVLQAQINKTDRNDARGIAQMMRVGLYRPVHVKTLRSQKLRMLLTHRKLLQSKAIAIDNDLRGTLRNFGLKVGIAGKVKFEARIKELVENLPDLAVLVEPLLIVRRVLREQTAVLHRRLLAIVRDDEVCRRLMTVPGVGPVVALTYRATIDVPARFRKSKAVGAVFGLTCSKYQSGEINRSGAISRCGDAMMRVMLYEAAQSMLVRSTRWSWLKAWAMQIARRRGMKKAIVALARRLAVIMHRIWIDGTEFRWTREVAAA

SEQ ID NO: 342320 - protein, 429 aa, unidentified
MKNSAAKKLKQVPMGYLVIGIDPHKRKHAAVIITQDFTTHSKFKFNNSKEGFEVALERIRMEMVRTGSGGTIFAIETGGHYWRNLAYFLDERGIPFRFINQFTLKRRREGKDLNCRKNDYRDSEVAAQLLCTGEFTETQLRQGVYAELHAAHNAYRRLVKERTRIINLVKGLLDGLFPEFTQVFRDPCGMTALSVLSICPVPNVIAEMTEEEFVNTIRTGHRGLLMRKKLRALHYAAQTSIGVKADAQSVSYELLFLVEKLSLIKRHIRSIDETLVRLVDETEEGKYLLSIIGLNYISVAGLLAELGSFRSYRSAKQLIKMAGSNPTESESGGKRSAHTPMSKKGRPVLRYCAWTAVIPMLRFNPDFRAWAKKLRERPVHANPLSGREIVGAALNRLLRLAFVLVKNQTFYQVPEIESIPELELLPVAS

SEQ ID NO: 342321 - protein, 343 aa, unidentified
MNAIGIDVSKGKSMVAIMRPFGEIVSAPFEIKHIASDIHSLIELINSIEGESRIVMEHTGCYYEVLAHQLSEANLFVSAINPKLIKDFDNDSLRKVKSDKADALKIARYALDKWQNFKQYSVMDELRNQLKSMNRQFGFYMKHKTAMKNNLIGILDQTYPGVNTYFDSPACSDGSQKWVDFASTYWHVDCVRKMSQNTFTCHYQNWCKNKKYNFSQSKAEEIYGKANELIPVLQKDDITKLIIRQSVDQLNSASTSVESLRTLMNETASKLPEHPIVMAMKGVGPSLGPQLMAEIGDVSRFTHKGAITAFASVDPGVNESGTYEQKSVPTSKRGSSDLRKTLF

SEQ ID NO: 342322 - protein, 377 aa, unidentified
MGEFFRQCVGIDISKDKFTACLYMYDRASDEGCCTKSINFANTKSGFNQMVRWSRKEAIKGYSLTYLMEPTGVYYEHLAYHLHKIGQTVYVVLPNKARQFCESEGIKTKTDAMDARCLALMGCVSRKLKAWSPPAAIYRELRQMTRFHADLWEVRTSVTNRLEALRHMEGLSKTVRRNCEKLIEEIDTLIEKNDKAIMQKVAEDKELEARVKRIATAKGLGEATIVCVIAETEGFHLIENRKQLTSYAGLDVEARQSGNDDPRHRISKKGNAHIRAALYMPALVAIRYNRQIRAAYGRVCQKHPKEKMIGVAAAMRRLLLLIYTLWKSGEVYDQTRDTTRTPRKKSPELEHGPKDSITTTGEHVDWNAVGENGQALF

SEQ ID NO: 342323 - protein, 343 aa, unidentified
MGEVSTIGLDIAKSVFQVHGVDDAGAVVMRKRVGRSKVLEFFGSLSPCLVGIEACPSAHYWSRELQALGHTVKLMPPTYVKAYLKRSKNDANDAAAICEAVTRPSMRFVPIKTQEQQTGLMLHRTRQLLVRQRTMLSNAIRGHMAELGIISAKGRNGTAELLQIVGDVADDRIPPVARFCLDLLARQYLTLNAEVYAVDKRIHAWHRACEESRRLEEIPGVGPIVATALVAEIGDWRAFRSGRSLAAWIGLVPKQHSTGGKERLGSITKQGNRYLRWLLVTGAMAVIRYARAHGTKRPWLTRIMDRRPAKVAAVALANKIARMAWAIMVRAERYKEPKLLLAA

SEQ ID NO: 342324 - protein, 361 aa, unidentified
MRQFIGCDQHKHYSVFVAMNETGEVGEAVRVVHDRATMREFLKRLPEKMEIAVESSGHYYWLVDEIEAAGHRARLAHALEVKKRTGRKGKKTDAEDARGLAMLLCNGTLPEVWIPPAKLRDQREMLRLRMFLSRQRTRVKNRIHGALARYQVQLDGDPYGSRWRQQLTARAAELPEHTCQSVQWQLHMLDFVETQIQQTEDRLLAVGSAMPEVDLLKTLPMVGKILSMVLALEIGTVERFPSPAHLASYSGLVPRVHSSGDHTRMGQVCGDVNRYLKWAFVEAANLIVAQPQKWRGSHVLRLYQRVRRKKNHQKAVVAAARHLAEAAYWILKKGEIYRPPQPRKQAAQRSFVDAGVSAERT

SEQ ID NO: 342325 - protein, 427 aa, unidentified
MKYTQNRKIEQVNNTTLVIGVDIAKHNHVARAIDYRGIELGKALTFKNSHSGFNHLFTWVKTLMQEYDKLEAICGLEPTGQYSLPLVAFLTKRGIKVVVVNPLHVKRSKELDDNSPTKNDFKDAKVIAQLVKDGRYSEPYIPTGIYAELRNGMNMRDRLIQDLTRVKGQIDNWLDRYFPEFSIVFKSWEGQAALMTLDNFPLPQQIVDKGVDKIVKLWRQKIKHTVGHKRATLLVETAKTSIGLTEGLTMARQELKLLLKQYRMLEAEIQELMSEIENIVKQIPGAQEMMTIPGVGLVTIAGFLAEVGSLENYEHPRQIQKLAGLNLRENSSGKHKGQTRITKRGRRRLRALLYRCAMPLVATNPEFKALHHYYTTREQNPLKKKQSLVALSCKLIRVLFAIGTKKTPYDGRILMKNSPARLLQEAA

SEQ ID NO: 342326 - protein, 347 aa, unidentified
MQFYTQQRQFYCGIDLHATCMFVCVLDDRGNILLHKNFLCKDANLFLQAIEPYKQGLVVGCESTFNWYWLADLLEEKNVEFILGHALYMKSIYIAKVKSDSIDSEKIARLIRGGTFPLAHAYPKEYRASRDLLRRRAYLVRRRAEALTHIQQIHHQHNQGVTTNIRYKSNRQGLGESLPSEHAKLMVSIDLEMIDAYTIQIKRIEDELVRSVKLTHFQSYYRLTTIPGVGAMISLTMIHEIETIQRFAGVGKFLSYCRLVKGSHSSAGKKLGAPGGKIGNPYLRWAFGEAIQLLKRESKEVLEYARRLEKKHGKARATNILAVKLGRSVYYMLRDDRAFDLNKFLQH

SEQ ID NO: 342327 - protein, 328 aa, unidentified
MTSSATPPASPQVFVGIDVAKDALDMARSDTGELLHVPNDPAGFASLLAALIPARPACIVIEATGGMEQPLLEALLDAGLPVARVNPAHVRHLAKALGILAKTDAIDAAVLVEFARKAEPRLAVKRSKVQGELEALVTCRRQLKTSKVQQTNRLGATTSKPARKAIQAVVYVLEKQIKALDKQIEARIDSDDDFRQMNQLLQSVPGVGQGLSSALIAGLAELGETGRRELSALVGVAPFNKDSGKSRGKRAIRGGRAALRCVLYMATLASMRSNPIIRAFASHLKAKSKPPKVVIVACMRKLLSLLNAMVRDNLSWQQLNVVKHAQTA

SEQ ID NO: 342328 - protein, 515 aa, unidentified
MITIPVITERCAGIDVGKRGLAVARLTGPADKEGLIETRWFGTTVPELESLKHWMLAAGVTTVAMESTGSYWIPVKNVLETDLHIMLVCSKKHHPKKGEKTDFRDAIHLAHQHRHGMLTGSYLPERGVVELRDLTRRRKKLQGNLTSEKNRIQKTLEVANVKIGNVVSDVFGVSGQEMLDVLLSGRKVEAGEIAELAKNRLRTKIPALTETLEGHLMNDHHRWLIRQSVEHIVLLDRQMEAAEERILDQLEPYRRQFDLLCTIPGVKDLNAAGILAEIGPDMSVFPEADNLCSWSGICPGNNRSAGKSRSSHVKKANKFLLSALVQAAWGAVQKKDTIFCRKFNRWSRRMGPKEAIVAVARSVLIVIHAVLRTGQPYRERDASLMNELERQKLVRHHARRLRDLGAEPAAISQMVERLLRPVTQPETPSLAEPGPTEELAARQTAAPEKQTEAACSPKGRGKVCRGKLGFRARQTKNQYSIFKDLPGQRSSTDLPGDIKPPRRLTRAKSNTKTSS

SEQ ID NO: 342329 - protein, 449 aa, unidentified
MSRPQVIDDEEHERVHERVAAVDVAKDSGVVCTRTPHPSRPGARQSAIWMVKARMGAIGKLGRQLKKDGVEIVTLESTSDYWRIWFFVLEAAGLAVQLVNAAQAKNLPGRPKSGKQDAMWLARLTEMGLLRASFVPPAAIRDLRDYTRARTRLVQERTRCWQRLEKLLEGALIKLSSVASTLTTESARDMIKALIAGQRDPHTLAALARTRIKAKHDDLVQALDGMFDDHHGELAQLLLDQIAVCDDRIAQLTARAAELAAAMPGAWGINADGTTGPGAGTGPDAPVLNAVARLAEIPGVSEDLARSIIAEIGLDMSRFPTAGHLVSWAGLCPSARQSATRTRAGKKGKGDTWLRGHLGQAATGAARTATFLGERYSRIARRRGKAKAQVAVARSILVIIWHLLADPAARYTDLGYGYYQARTDTDRKIRNHIRQIEALGFTVTVTKAA

SEQ ID NO: 342330 - protein, 350 aa, unidentified
MQGTGRWIGLDLSKETYEMCYFDQKGKVGRSGGETTKAGRSKLYAKLKAEDIVAMEVNSLAFVMEKEMRVIGCTVVILDASQLSVIYASTKKTDKEDALKLARLVKIYEKEDLPIVDVPTEKEYYRRKLTKECKTLKDDRTQEINRLHALFLQCGITTMKRSNLQTDANRQKVLPQLFGYEVGQAQRVCERLTLLEAQIKELEQTITKECKADKDIERLKTIPGVGDKTALAFAAYVGDGKRFNNGNEVANYLGLVPRVDCSGSINRYGHITKKGNRIVRALLYQAAWSIVRSKHGGALKAKYFYMTEHGKGKKISITAIARKMAKLMYLIMKNKGEEYKELPAPASRAG

SEQ ID NO: 342331 - protein, 348 aa, unidentified
MDTIGVDLHKRETQLCIGQADGTITEQRIVTSRERFTAVLGPRPPARILVEASTESEWVACHLESLGHEVIVADPHYAPMYATRSRRVKTDRRDARTLMEACRAGTYRPAHRLSAARRHVRAELAVRDAVVRTRTRYVALAKALVRRDGLRVPSSAAERVGAHLAALAVSPALAAERAPLLTLLPPLTATIAAADQRLAELEHTDSSVALLMTAPGVGAVTASALVATIDDVQRFASAHQFEAYLGLVPGERSSGELRRIGPITKAGNRRTRWLLVEAAWRILRATDAAGAPLRAWARPIVARRGSRIAVVALARRLAGILYAMWRDGAPYEAGKIRRPRSARQNPGA

SEQ ID NO: 342332 - protein, 318 aa, unidentified
MSSAAPAFVGIDVAKAELVITIRPSGEHWTIANDVAGIHTLGQRVRGHAPTLIVLEATGGYERAAVAARAAAQLPVVVATPRQVRDFARATGQLAKTDRIDADILALFAERVRPAPRALPDDAAQALDALLTRRRQVLEMLIAERNRLEHAVPTVRRGITQHIRWLERQLADVDRDLDDTIQASPVWRATENLWRSTPGVGPVLSRTLIGELPELGTLPRKQIAALVGVAPLARDSGTLKHKRLVWGGRAPVRAALFMAALVGPRCNPVLRAFYRRLLEAGKPKNVALTACMRKLLTILNAMMRTNTAWRHIDLSPTT

SEQ ID NO: 342333 - protein, 324 aa, unidentified
MSKDKKYFGIDISKDVFDVYDYLDNHHQFSNDFRGFKKFNKLLDKESHCVMEATGYYHTKLAYYLVEKNVLVSVENPLKIKRFIQMGLSKIKTDKSDAKQIYKYALQVALSLWHGESKTQQESLQIVRLLSIYTKQSTMLKNKIHGEDVLGIPSKLVVQSLNRQLKSIQKELKKLEIALENNVKTEHQESLTLLKSIPGIGPKTAMMMLVFTDGFSRFNNSKELCSYAGITPVIRESGSSVKGRPRISKIGNVKLRNLLFLCSFNACKYNKACKDLYDRIVAKGKSKKLALIAVSNKLLKQAFSIVKNRIPYDDNFRSTLVKNN

SEQ ID NO: 342334 - protein, 420 aa, unidentified
MKVVYQTCCGIDVHKSFLVATIIKTTSGVQPSYQKKRFSTFNNSILQFKEWLLQNQCRDVCMESTGKYWIPVFNLLEEDINVTIANPKWVKAVKGNKDDTKDSKWIGDLFRLGLVPGSYIPCKSIRILREFTRYRYKLTSCRSSEKNRYQNALTVCNVALDSVVSDIFGKSATSVIDYLIEQSDNSINHEEITSRLLRSLKKKSDSVIESIEGYQMTDSQKYRMRLVRAHMDYITSTINDIDTMLNSLISPYENAVQLLCTIPGVDRNSAITVISEIGIDMAPFSSSKRLCCWAGLTPGNNESAGKKKSVRITRAGVYLKPALVQVAHAAVKSDKSPYYKQKYERIMKRRGKKRAIIAIARMILTAIYQILSTGEVWNPTDLYKIDMPEPLKEKQREKAIKQAKKLLISEGIISESQLVS

SEQ ID NO: 342335 - protein, 352 aa, unidentified
MEQFIGCDAHKKFSVFVAVNERGQAGEALRVGHDRQLYREFLARLPTHSAIAVEASGSYSWLVDEMERSGHRPKLCNPLEAKRRMGLTNKTDTLDARGLAILLRNGTLPEVWIPPSELRDQRELLRLRIFLVRLRTRVKNRIHGTLSRHNVQVPGADLFGVAARLELGRRLPELPEHSREAIEQELATLDFLKIQIESAEQRLEAIMKVSVEADLLKTLPCVGKILSMVLMLEIGRVDRFPTAAHLASYAGLVPRVHSSGGHTRMGQVCGNVNKNLKWAFVEIGNLVVINQRRLGGAHVVRLYQRIKRAKNHQKAVVAVARHLAEAAWWVLTKQEVYREPQNSRLALSSTHG

SEQ ID NO: 342336 - protein, 471 aa, unidentified
MVEDPATDDHVEAGGLKPRALNGRGHELGSPTAGEQLGPPPGYAEDAGGEIKRRDDRAPREEGKRQVALTAAEVQYPRAGDDPSCAQHRLVIVDGIDQPMPDVSSIAPTDVRLWVALDVHKLSIVAATLPAAGGKPEVCRIETTDKAIRRLIERLGGPDGLAVCYEAGPGGFALWRLLTKLGVACDIVAPSLVPVRAGDHVKTDRRDAKKLVTLHRGGLLHYVAPPTPETEGLRDLLRCRDDVRCARTAARHRVSKQLLRHGRIYREGLKAWTVKHRAWVARQRLDDELAQLALEHMLIRLDGTDRQLATLDAQLEQIATRERWAWQVDRLRAFRGIQTLTALGLIAEIGDFARFSHPRELASWLGITPSEYSSGDQQHRGHITKAGNRHARRLLIEGAWHYRHAPRRPTKGPEPSARAWRAQVRLHHRYRHLTEHGKRSTVVTVAIARELVAFLWADLTNQPCREEVLAA

SEQ ID NO: 342337 - protein, 344 aa, unidentified
MERYLGIDPHRDSCTLALVSPRGKKVKQLVVPTAGSELVKTVREIRGPLHVCVEEGEWSEWISEILSPWVARLVVCRPVARRGPKSDAVDARELAERLRTDRTGHPVYKPGSEWARVREAVRLESKLTQDLTRTKLRLNSLYRRRGLTCPNGEIYLPRHRGKWVAKLPASGRPCAELWGEQIDLLGKLREKAEDQMHAAARKFPIWRTLQSAPGIGEKRASIVLATVVTPHRFRTKRQFWSYCGLGVVTRSTSDWVRQPGGWVRAEVVQTRGLNRASNRPLKAVFKGAALSARQMLAPNPFREHYDQMLEAGTKPNLAQLTLARKLAAIVLAMWKSESEYKPMS

SEQ ID NO: 342338 - protein, 343 aa, unidentified
MKIYALGIDLGKTVFHLVGLDANGQVVIRKRCSRTQLLAFTANVQAQLIGMEACSGAHFLGRALRAQGHDVRLMPAQYVKPYVQTNKSDYIDAEAIAEAVQRPRMRFVPIKTEEQLDLQALHRVRERWVMRRTAVVNQVRSLLLERGLTVPKGRRHLNQALPRILEDAELPLSGSFRVLLAQLKLELEQLAERIAQMDAVIEQEARENEACQRLTTIPGVGPVTATALVGAIGNGSAFGKGRDLSTWMGIVPGEYTTGGKQKLLGISKRGNKYLRRLFVQGARSVLQQRDKQAPGLSLWLAQLLACKHQNVVVVALANKMVRIAWAVLCKNESYRAPVLAVST

SEQ ID NO: 342339 - protein, 371 aa, unidentified
MKKDSTTKFIGLDVHSKTISVAIADEGREGEVRHYGTIENTFEAIDKVIKKLTATGVELKFIYEAGPCGFALYRYLTGNGFTCIVISPAMIPRRKNVRIKNDRRDAMTLARLYRAGELSGIYVPEPEDEAIRDLARTRDDARVAERKAKQRLNSFLLRHNLIYPGKTKWNRTYFNWLGSVGMKYPAQKVALQEYIEAVHECTGRVARLSEQIGLAVEEWRMAPMVKALQALRGVSLICATVTVAELGDLSRFQNPKELMAYLGLVPSEHSSGETIRRGGITKTGNGHARRVLVEGAWTYKHHARVTLPLIKRQRDLPKSICQISWKAQLRLCARYRKMVARKKPNNVVVIAIARELAAFMWAIAQEVRAAT

SEQ ID NO: 342340 - protein, 424 aa, unidentified
MKKNISKTTKAQKQGNGTRKRLRETKRNVAGLETAKKRKSKQRGVEQEMKEEHGNASQAVHEGEAVVEFKAGEGEGYTIGIDLGDKRSRYCILDKEGKILRESSVATLPASLKTVFSKLAGCRIAMEVGTHSPWVSRLLTALGHEVIVANAREVPLIYKSRRKNDKLDAEKLARLARMDAKLLKGIRHRGAEGQGDLLLIRSRAQLVETRTGLMNMVRGLVKSRGERLPGCTSEGFVVELLEGVDEAAVRALKPVMVLIEQMTATIKEYDKQVEEMGKKHAEIARLDEVKGVGPLIAATYVLTIEDPERFGRSRDVGGYLGLVPGQSDSGESQPQKRITKAGDGYLRYLLVQGAHYILGPNGPDTDLRRWGQKLGSSGGDRGKKRAVVAVARKLAILLLVLWKTGAKYEPLRNSDKQEKQKVAA

SEQ ID NO: 342341 - protein, 331 aa, unidentified
MNYSHFVGLDVGKKTFDASLMSAAEKELSHKSFDNTPEGIQSLLDWIAGYHLSLSKLLFCAENMGSYVTELSVSSVSMGFSLALVCPLTIKKSIGLQRGKNDRIDAKRIANYAVLHYRKLELYKLPNKDLVRLRGWIIIRDNLVKQKVSSIKLLETFSWMAKLADVTESISFLEEQLKSIKERILEVEEDMEQLIAASTSLYTNYLLLRSIKGIGIINAIVLLCVTDNFQRFDNPRKFACYCGVTPFEHTSGISIRGKTQTSPLANKEVKVYLTRAAITAISWDPQMKAYYKRKIAEGKHKASVINAVRAKIIARSFAVIRRQTPFVTLAV

SEQ ID NO: 342342 - protein, 316 aa, unidentified
MTQISRTAGIDTSKAKLDVAIHGGGGHWQVDNTPVGWGGLAAELTSAGVMRIGIEASGGYECGVVGCLRAKGFSVLVLQPIQVKAYARLHLRRAKNDRLDAVLIAACAATIDRPRIEPDERLAKLAHYLTFVEQIEEDIARLKTRLEHIGDARLRRMVVADIARLKARRSAELLRIVAALRAHDDLGRRFDLVLSVPGLGERTALALIIRMPELGQVSREEAAALAGLAPFDDDSGKHKGERHIAGGRRRLRRSLFAAALPAAFRWNKALIALYTRLIARGKAHNEALIACARKLLIYANTVVQRGTPWTERSLSA

SEQ ID NO: 342343 - protein, 318 aa, unidentified
MPLLISVVGIDVAKATLDVWFRGMSTPRQFSNDEAGFAELIAFLGEHAPPAGTVVGLEASGGYERAVCRTLHHSGIGVRVHNPACVRYFARAIGKLAKNDRLDARVIARYTEVADTQAFEFDAGMAEFAEVVAQRRRLVDDRVAISNQREILTRPDLLEQCRERLEMLERQIEELDRLIDELLQDNEANSAKAKLMCTLAGVGRVTATTLIALMPELGTLNRRQIAALAGVAPFDHESGKYKGERHIRGGRSSVRTVLYMAARSAARTRTVLGQYYRHLLAAGKSPKVATVALMRKMLVTLNAMIRDRKPWKHANALP

SEQ ID NO: 342344 - protein, 385 aa, unidentified
MGAQTFIPRDYDVFAGLDVDKKSISVTFTDHQGSLKSIRMPYSVELLVNHVRKHYGDKKVAFAYEAGPTGYGLYDGLVAQQYPCLIASPSMIPKAPGQRVKTNRLDSRGIAENLRGGQLKSIHVPTTLYRELRHLTQLRDALVSEVVAMKQRIKSLLLMEGLEFPPAPAGSQWSFMVKDKLRKLPCSSVVRFKLDQLLDNLEFNGKQVLKSTREIRRFCQNDPELFQCIGYVKTLPGIGWIVASQMMARIGDWRQIKNIRQLPAFLGLVPTESSTGERTERGSITHSGDPRLRSKLIQASWSAIRQDGELREFFRTVAKKHPRHIGPRVAIVAVAHKLSVRASVMLMKQRPYEVRQKVQSAPLTQEETVPQGTTRRRAVPGDKNS

SEQ ID NO: 342345 - protein, 479 aa, unidentified
MNDRRLVGIDLGIASAHTVRVLDGEGHTIAKRKAWPTVESLSEVEAAALRGCGPGTRLEVVVEPTGPAWLPIAVFFSGRGHVVHRVSSAQAADLRRFLSRHTKTNGIDADTLARLPLFDPAGLQPLVLPGAERAALDRRVRATDRLTQQGALHKRRIKDLARQLLPMTPLTGELGVADLAVLERYADPHALVKLGLKRLTALIEKTSKGHQGIDRARQWITAAEAAIDLYADHPAVAYADVAAEIATEVRLLRAVQAELAAHAAEREHAYRWVDPAGLARSLPGVADIGGPALVAAMGDPARFARGKQFRSFTGLTPKASETGDTDRKGQPMSKAGSSLLRTTLVRAADNARKVDPQLARLYYVQMVERGKDHLGALCVVAANLAERFWAVMTRGTPYVICDTDGRPVEPHEAKATIAQHWTVPAEVRARRRSKKAGKAPQKVPEGQSKPRARGAGTRGDPPHPASSTPPGDHVNRRTA

SEQ ID NO: 342346 - protein, 313 aa, unidentified
MQDLLEVCCGLDVHKETIVACLLKGSVNDEKPQKIIRTFSTLLEGLEELKAWLESENCHNVAMESTGIYWQPIYNVLESAFDGTMSIIVANVRHMKNVPGKKTDMKDAEWIATLLRAGLLNGSFIPPQEIRELRDLTRYRKSIIEEISSQKNRIEKHLQSCGFKLSNFLTDIFGVSGRAILNHIAEHGSITAKEVENYVRGKARAKLNDIKLSISGRMNKHQREFLKLLLKHLDEMYEHLREIEENINSELGKYKRQIEQLDSIPGIDVTAAAAIIAEIGTDMSKFKTQEHICSWAGLSPGNNESAGKKSPLE

SEQ ID NO: 342347 - protein, 338 aa, unidentified
MKTYAGIDLHSSNNYIGIINEEDQRLYGKRIPNELDRVLMALETFKDTLQGVVVESTYNWYWLVDGLQEHGYKLHLANPAAIKQYEGLKHTDDKWDAFWLAHMRRLNILPEGYIYPKQHRAVRDLLRRRLLFVRHSTSHILSLQSMITRNLGFKMSGNAIKKLKGKEVEGMFDSSNLVFMAKNNIATIQFLKKIIKDIAKKVKSQVKLRKEFNRLLTITGIGDILGLTIMLEVGDIKRFAKVGNYSSYCRCVKSERLSNGKKKGENNKKNGNKYLSWAYVEAANFAIRYSAKAHRFYQRKKAKKNGIVAIKALSNKICRASYYIMRDRVPFNEEMLFR

SEQ ID NO: 342348 - protein, 330 aa, unidentified
MEKIQHIIGADLSKRTIDLFCHLFNKHIRIDNSLLGYKELLKWILQYQINASELMIVMEHTGLYSFCFENFLQQHQISFTKVNALTIKRSIGLVRGKSDKIDARRIAEYGYEKRSKLIAEIPTISELQRLRLLHSTRERLVKQKASLLNVLKEYSNIGLTKQDSIMRSQMRIIRNLEKEISKMEAEMNDIIKSHPSLQQNHQLLQSIKGVGKVLATATIIKTKNFTRFTNARKFACFCGTAPFENTSGSSIKGKTRVSHLADKHMKTLLDLSAKTAIQYDKELREYYLRRVADGKSKMSTINIVRNKILYRMFAVIKRQTPFSENYLQTA

SEQ ID NO: 342349 - protein, 405 aa, unidentified
MNAVGIDVSKGKSMVCVLRPFGELVVNPYTVGHTASELESLARSLKSLDGETRVVMEHTGRYYEPVAQALHEAGLYVSAVNPQLIKKYGNNSLRRVKTDKADAMKIARYAIDNWVELREYIPMETARENLKLVCRQYNLYVKLRTQLKNNLIALLDKTFPGVNTFFSSPARSDGSQKWVDFAASFWHCECVCGLSENAFTERYAKWCKQHCYNFSLDKALEIHAASCGHIALLPKNESAKVLIKGAITQLNAISQTVETFRLEMHRLAKILPEYPVVAAMYGVSDTTAAQLMAEIGDVRRFTHKGSLTAFAGVDPGARQSGDYEQKSNRVSKSGCPELRKILYQIAVTHIRTKPQDEPVYQFLDRKRAEGKPYFVYMTAAANKFLRIYYGRLKEYLNALDEGDNT

SEQ ID NO: 342350 - protein, 428 aa, unidentified
MQVLCERCAGIDIGKDVIAVAVRMPGGGRDRRKTVKRTYRAFYGVLREMARWLASEGVTHVAMEAAGVCSMPVCYALLEHGFGEVLACSAGHVKNVPGRKTDLADAEWLAQLPECGLLRGSFIPAADVKAVRDLVRYRPKIAQQRVSELARPGDVLQDAGIRPGPVASSIATKPGLRMIEALIDGERRGQVLADLAIGRMRSKAADLPMALEGRFAGHHAMLCRLHLDHIARLEAMIAELDARVEAAMQPFLTARDLLVTIPGIAVLSAAAVISEIGPAPQRYFPTAAHLASRAGVCPGSNESAGKRHSGKRRRGNVRLQPVLAEIAWSAVRQEGYLRALCHRHVIRNGGYRSAPAKNKAIITVAHAVLVIIWHVLTTGRPYRDLGAGYFDRRSDPARETQRLIARPESLGHHVTLGPGTPGEPGTAA

SEQ ID NO: 342351 - protein, 348 aa, unidentified
MKIKTIGIDLAKDVFGVHGVDARGKTLVHKCVTRKHLLGLLAKLEPCLVGMEACGSAHHWAREIEKLGHTVKLMNPQFVKPYRKGNKNDPNDAEAICEAVTRASMRFVPVKSAAQQDVQALHRVREQLLKSRTALVNQVRGLLGEHGIIAPRGIANLRRLLSELLADPESSGLSGLLSETLVEISGRLRFFDERIGAYDLRIGRVFSDDERCQRLAKVEGIGPLVATAMVAAVGNAREFKSGRELSAWLGLVPRQHSSGNRNVLLGISKRGDRYLRTLLIHGARSALCRVERRRDRRSIWASRLKLARGFNVAAVALANKNARIIWALLTRGDNYRPAVSADQGNKAA

SEQ ID NO: 342352 - protein, 324 aa, unidentified
MHYLGIDVSKATLDVSDAAGVSRLSSPNSRTGTSKIIKWAQRIQEGELQFIIEPTGTYHHTLIDELSHANIPFTVINPARTKAYSLSLGKRAKTDRVDAQLLASLGQTQQIAPSHQPEKAQEKIKSLRRHRESVEGMIRSLRNQIEATTSSPWADHEVLRSLRSTIRHLEKQVESADRKLDSLVKEDERYSTLIDLLQTIPAIGPKTAQLLLSEMPPVWQCSSSRAWVAFAGVCPQPFQSGNINYSRLSRMGSRRVRAGMYMASVVAMKHNPLVAALVARLKERGKTGKLAVMAAMNKLIRICYGVIKNWKPFDPNFNKTPKTT

SEQ ID NO: 342353 - protein, 389 aa, unidentified
MKIYVGIDIAKLNHFAAAISSDGEIIIEPFKFTNDADGFQLLVSKLESFDKNSLIIGLESTAHYGDNLVRYLVTELYQVCVLNPIKTCQMRKNNVRKTKTDKVDTYVIAKTLMIQDNLRFVSFFDLDMMDLKALGRFRQKTIKQRTRLKIQLTTYVDQVFPEIQYFFKSGLHQNAVYALLKEAPSPKEIASMHMTHLANLLKVNSHGHFTKEQAKELRVLAQKSVGANDSAISIQITQTIQQIELLDSQLEKIEAEMTDIMKFNDSVIMTIPGIGYINGGMILGEIGDIHRFSNPNKLLAFAGLDPSVYQSGNFQAKTTRMSKRGSRILRYALVNAAWNVVRNNATFKAYYDAKRAEGRSHYNALGHCAGKLVRVIWKMLTDEVEFNLE

SEQ ID NO: 342354 - protein, 351 aa, unidentified
MNKKNNREISYAGKDIFIGIDVHKKTYAAVARVDGEVVKKWTTVAAPKKFVEQLLKYFQPGNIHTAYEAGFSGFSLHRELEQNGIHNLVVHAAGIEVAVNDRVKTDKRDAHKLSSLLESKRLKGIRVPTELEEENRQLTRTRQQLVEDRTAVKNKIRMKFHQLGVIEADEKRHMSHLLVEELLSRVSSKEFTIAIEAYWHIWDKLDEEISKIDKELRKQAKKDDNESTYRSAPGVGPLSARVLSNELGDMSQFKNERQLFSFTGLTPSEYSSGENIRKGHITRQGNSRVRAILIEVAWRAIEEDSSLAIFYERLFPYRGKKRAIVAVARKLIGRIRAAFQHGDAYQMGYQN

SEQ ID NO: 342355 - protein, 427 aa, unidentified
MLFVGNDWAEDHHDVEIVDEQGRRLARRRVPEGLDGVTRLHALIAQFVPDEWGALEAADAAWRVKVGIETDRGQWVQALIAAGYEVFAINPMSVARYRERHSTSGAKSDAGDAHVLAEIVRLDRSHHRPVAGDSELSEAIKLVARSHQSLVWDRTRHVLRLRGVLREFFPAAMEAFADLDAPDALELLAAAPDPDRAARLSRAKITATLRRANRRGVEDKAAQIQSVLRAPALRQPAQVQAAFAAIVTSQVRLIGTLNGEIAELGEVVAGHFGRHREAEIYTSQPGLGVILAARILAEFGDDSTRFADAKARKNYAGTSPITRASGTRKIVLARYARNTRLGDAVQQWAFGSLKGSPGARALLRLTASPQHRSPSRATPTRQPPRRHPARLPEDRHPLRRNSRLGAPQQRRRLTSKILGCLLHWAIG

SEQ ID NO: 342356 - protein, 378 aa, unidentified
MVVSVGIDVSKDKHDCFIVSSEGEVLADAFIIPNTMDGFHYLLQRIRHCTAPQDKIKVGLEATGHYSYNLLGFLLDNGLTTYVLNPLRTNLYRKSLSLRKTKTDRVDARTIASMLLSDAGLKPYTDTAYHNEELKSLTRYRFDKVKERAKLKSSITRLVCILFPELEKLVPSLHIASVYALLEEFPGAKQVANTHLTRLKALLETASNGHYKRDMALEIRNAAKNSIGSQMPAKSLELQHTIRLIRELDREIDEIEEQIQSIMDELHSPITTIPGLGFRMAAMILAEVGDFTRFDSPDKLLAYAGMSPSTYQSGQLKKFATRIWKKRGSRYLRYALYNATKYVCHWDPAFADYLAKKRVGGKTLQYCHLSRGQKSWFV

SEQ ID NO: 342357 - protein, 355 aa, unidentified
MEKAYDGRQVVGMDLHRRRSVLVRMTEDGRRLGTARITNSPAELRKEIARAGKAPKVVLEATYGWYWAADTLAAAGAEVHLAHPLGVKAFSYRRVKNDERDSADLADLLRMGRLPEAWIAPHQVRELRELTRYRIKLVRLRTSCKDQVHGVLAKLGVPVTCSDIFGKAGAAWLDGLRLPQPYSGKVTSLRHLAGELTTEITMLSEVIASLLAGDRGYQVIQQLPGIGPVLAAVIVAEIGDVSRFKNAAQLCSWAGLTPRHRESDTKVARGHVTKQGSPLRWALIEAIQRIPRDCVIGGVKDAIIARRGKEARNIAKVAAARRLLTLVFYGMRDGQIRCLSQPPAGPAATQAAQAA

SEQ ID NO: 342358 - protein, 334 aa, unidentified
MSKIAVSVGLDYHPGSVQICVLDEHGKVLTNGTRENSSQELNRVARLYGEQIQAAIEVSPGAANLADELVTRFGWSVDLAHPGYVARIKQSPDKTDFGDARLLADLTRVGYLPKVWLAPLDVRELRELVRYRQQLVRERRSTKLRVRALLRNQRLNGPGNAWTKAWLEWVRNEAALPDHSRWVMTQQLSNLERLQREIRQAEQRLEEVTQEDVIFQKLLEQEEVGLVTAVTLRAEIGRFDRFRSGKQLCRFCGLSPRNASSGVRQADAGLIKASNPELRCVLIELGQRLMNHSDKWSERSAEMRARGKPRSLIAAAVANRWLRKLYHEMKSTHE

SEQ ID NO: 342359 - protein, 350 aa, unidentified
MIIIGCDYHPGFQQIAFVDSETGEVNERRLEHREEAEKFYRDLGGQRAVVRVGMEASGHARWFERLLGELQFELWIGDAAEIRTKRVRKQKTDRQDAQLLLRLLLEDRFPRIWVPSWENRDLRQLLWHRHRLVQMRTRIMNQLHVVALNEGVRRKKALWRTAGRAELESLVLARWASQRRQDLLEFLDQLTPKIQELTRALEQEVEKRPVTQQLMKHPGVGPLTAMAFELVIGTPERFDCGKQIASYVGLVSSEESSGDRRRLGHISKQGNSLLRFLLVEAAQVTVRSDPEWRSRFFHLAMRRGRKIAKVAMARKLAVRRYWMWRKGWDYEQLQKFGSHAGEPGNRQGVH

SEQ ID NO: 342360 - protein, 407 aa, unidentified
MVSVMIGVDPHKASHTAAAIDPAENDLGQIRVRAAAGQVQRLLAWAGAWPERTWAVENAGGLGYLLSQQLLAAGERVLDVPPKLAARVRLLATGDINKNDPNDARSVAVAALRSPAVKPVAAEDHQAVMKVWAKRHRDLGRARTQVVCRLHAVLCDLVPGGGISKELSVGKAEKVLAEIEPEGAVASARYQLAEAFIDDLRRLDEQIRDTKKRITAAVTASNTTVTEIFGAGPVIAAMVKGDVGDVRRFATRDRFASYNGTAPIEVSSGPKKIYRLSRRGNRRLNHAIHMIAVTQLRFPYTEGRAYFERKLAEGKTGKEALRSLKRRISDQLYARLLDDARRQDSVSENGPGGHTGSVSASSAAGSHPATPTLRKSHSRTATKPTTTRRTRRHNTPPPTRKISRRAS

SEQ ID NO: 342361 - protein, 340 aa, unidentified
MSKVTVYVGLDYHKDSIQVCVMDRSGQILANRRCKNQVQALVELVATFGDEVHAAVESCSGAAALADELATRHCWSINLAHPGYVARMKQTPDKTDWADARVLADLVRVGYLPAVWLAPEDVRQLRALVRYRQQLVEQRRTLKLRVTALLREARVVEPRSRWSKAWVAWLRTAEGLGTQARWIIHKHLMDYEQVVILIQEAESRLEAVTAGDPVVAQLSAQRGVGLVTAATIRAEIGRFDRFATGKQLARYCGLSPRNASSGQRQADAGLIKAGNPQLRAALIETAHRLVRFDPRWADLGLRLRAAGKPTCVTIAAVANRWVRWLFHQVEGGAITLNTAA

SEQ ID NO: 342362 - protein, 327 aa, unidentified
MAKRTTICAGIDTGKRKLDVALDGSSEPLQIDNTPEGYKVLLDWLRCHRVKRIGIEASGGYEQAVVAELRRKRFVVVTFQPAQVRAYAKFHLQRAKNDKIDAALIAACTAAVKKIHPPPDARLLPFAEHLTMIDQIGEDIALLKNRLETCRNLRIQQVWKEDLARLAKRERVEFKALVAAIREHSDLAERLDLIYSVNGAGMPTAVTILVRMPEIGQLTREQAAALAGLAPYDDDSGNHIGTRHIDGGRKRLRRALYTAALPASFRWNPQLIALYKRLIAAGKGHKRALIACARKLLIFINAIVARGIPWDHEPPPNMAATALPQTG

SEQ ID NO: 342363 - protein, 341 aa, unidentified
METQRHIGIDLHRNQFTCCVRLENGRNYLTDWKLEDLPRFIKKLRPNDEIAVEVTGNTGLFRDAVAPHVARVVAVDPNQFKVISHSVKKTDPNDARNLALYLEKDLLPEVRMKDKTQAQLASLTQTRDTLVKLRTALKNKVNNILSAHGINLEKEALSSEKKLNEILAMKFDPMVKLELEVITEEIRSLNQRIAKIEKAISEEGSKLEGHKNLTSIKGIGPLTGSILLSVIGDINDFADEGKRAAYFGIVPRISNSNETERSGRITKRGSKLGRTALVQCGLIAQRYSPYLKRYYEKIKARRGTGKAIIALARKLLGIIYRTLKNKWVFEDFPNFVLAEGD

SEQ ID NO: 342364 - protein, 343 aa, unidentified
MSGVVTIGLDLAKSIFQIHGVDDAGLTKLRRRLSRHELVPYFAKLPPCLIGMEACSAAHHWARELSRLGHSIRLIPPQYAKPYVKRNKTDAADAEAICEAVARPNMRYVPIKTLDQQSVLSLHRVRALFVRQRTAAINTVRGLLTEFGIIAGKGIGRIAELRRRANETASEMLPGEARAAITEVFEHIEALTDRIDATEAKIVAWHKSSDTSLRLASAPGVGPITASAIVASVGDARQFRSARHFAAWLGLTPRLHASGGKEHVGRISKGGDRYLRALLIHGARAIVGTSFRKDVPPRPWLKQLLARRSVNVAAVAVAHKTARALWAMITREEGYRRIAVQAA

SEQ ID NO: 342365 - protein, 335 aa, unidentified
MALYCGIDLHSNNHVIVINDENDKTVFEKRIGNDLALSLDCLEPFKDEIVGIAVESTFNWYWLVDGLMEHGYTLHLVNTAAVKQYDGLKYSGDVKDAYHLAHLMRLGILPTGYIYPKEQRMVRDLLRRRMQLVQTASKQLLCIQNQIWRSTGVRVGSNQIKKKDFEITLLSGYLKLAADTNLRIYRSLQKEIQLLEQSVEAAIETPETLDLLQTMVGIGPILGLTILLETGTVERFENVGNYASYCRCVQSLRESNGKKKGEGNAKSGNKYLSWAFSQVAHRAVRYEPKVKAFYDRKYQKRNGIVAIRAVAHKLARAAYYMLKNNEPFNVNKAFG

SEQ ID NO: 342366 - protein, 410 aa, unidentified
MSSEEKVFLRYVGLDAHKYYVVIGGVNAKLEVVLPPRRIQLSELEDWLRAHLKLTDKVVIEASTNTWTIYDQVARYVGEVVVAHPPHVKLIGGAVVKTDKHDVRRLAKLLAVGMIPEVWVPPLAVRELREIVSHRLRLVRGRTQTTNRLHSMLQRHNLAAPAGDPFAAKNRLWWERLAISATEKLRVGQDLATLDHLNQQIKEVEQELCRLSTVSPWAEQVPFLVQLPGIGIITAMVILAAIGDIFRFERAKHLTGYAGLGTYVHDSGETHRHGRISKRGRADLRQAMIEAAWVAVRTHPRWKAEYERLSKRMPANKAIVAIARKLLVVVWHVLHDQEADHQAQPNKVAAKLRVWSGRLSPDQRAGLSHRHFVRWQLVHLGLGEALTHFRFGGKPCSLPSADELHTLKRT

SEQ ID NO: 342367 - protein, 412 aa, unidentified
MEVIYPCCCGLDVHKKSITACVLWAEAKGKSHKEKKRFGTFTHDLLQLADWLAERGVTHLAMESTGVYWKPVWNILAEQFEALLVNAQHIKAVPGRKTDQKDSEWIADLLQHGLLRGSFVPPQPIRELRDLTRYRVSLVQETNRIANRIQKMLEDANIKLASVATDALGASGRAILQAMLAGEQDAARLAEMSKGLLRNKILELKLALEGRMTEHHRFLLRQLFEHLRFTESKLNEIEQEIDKRMRPFEDKVTRLCTIPGVDRVTAWGMLAEIGMNMNQFPSSGHLASWACLCPGSFESAGKRLSGKMRKGNVSLRRCLAQAAWAISMMKNNYLSALYRRIAARRGAKRAVMAVAHALLEIAYHMLKRKEDYRELGADHFDRIDVNRIRRSLVSRLERLGHKVTLEPLARTA

SEQ ID NO: 342368 - protein, 343 aa, unidentified
MLSFGIDTHKATLAVSAVDPLGRQLAARTFSNDRRGHAALLSWTRQQGQPRRIGIEGAGSFGAALAELLLASGEDVVEVPAQFTDRARRSLRQRGKSDPGDALAIARLTAREPHLAAVRRPGPTADLKLLVTARDQLVAERTRLVNQLHADLLVLSPGYGRRLSNLTSARHQAAVARLLGRRAGVRSALAKGRLQRVRRLALDIGRLEARISSTLSAAHCSLPRLVGLGPMMAAKALGEVGDVRRYRGPAAFAAASGTAPLSASSGQVQRHRLNRGGNRQLNRVLHTMALVQVRCDERAQAYLARRLAEGKTRREAIRALKWHLARVVYRTMLADAVSSELAT

SEQ ID NO: 342369 - protein, 411 aa, unidentified
MQVVHTHCAGLDVHKKTVVACRIIPSAEGGWLKQVRTFGTMTDDLLGMADWLRAGQVSQVAMESTGVYWKPIYNLLESQFGIVLVNAAHIKFVPGRKTDVNDAQWIAELLQHGLLKASFIPSTPQRDLRDLVRYRTQLIRDRSSEINRIQKVLEDANIKLASVVSNVLGVSGRDMLEQLLAGQEDPSQLAQLARGRMREKIADLERALTGHVRAVHRTLLTLHLQHIDELNAMLTAISADIEHHLAAFDTSDALTRLDGIPGVNATTAQVIISELGLDMSRFPSAAHAASWAGVAPGKNESAGRNRSARTRQGNKHLKTALVVAAHAAGKRADNYLGAQYRRLAARRGKKRAALAVAHSILVIAYHMLKRGTPYRDLGADFFDRRSSQQVQHALVRRLEQLGLKVTVEPAA

SEQ ID NO: 342370 - protein, 366 aa, unidentified
MTSMLHPAQSSQADADDTEVILGVDTHKDTHAAAVLNSVGALLDSRCFAATAAGYQQLLGWAQAFGTPRRAGVECTGSYGAALSRHLQAAGVQVLDVNQPDKATRRRRGKTDAIDAEAAARAVLAGRATATAKTGAGPVEMARLFKLAKDSAIKSRTQAINQLKAVLVAADPALRESLSGLSSRVLIRRCAQLDPAAPTDATSAAAWTLRLLAHRILCLTQEIDDLNAKITAAVTAHTPQLLECNGVGPDIAVTLLITAGDNPERLGSEAGFAALCGVSPVEASSGKTQRRRLNRGGDRQANAALYRIALSRLRWDHRTRDYRNRRIAEGKTPREVIRCLKRYIARELYQLITKPQPTPIADPSAA

SEQ ID NO: 342371 - protein, 358 aa, unidentified
MRIASQVDFVVGVDTHKDSHTLGLVDRTGAEVADTTLVTDAFGYRKMLAWVKQQTTGPERRCWAVEGTGSFGTGLTTYLLEQGEWVVEIDRPARPPRRNGAKSDVLDAYRAAREALSRNHVAQPRRRGTREAIRVLLTTREGAVRARSRALCHLQALIVTAPAQLRDQLRRDKLHMLVERCARLRIMANHSIEHRATIRALRATARRIQTLTAEADDLEAELEILVSDTAPELLAEPGVGAISAAQILNAWSHPGRIRSEAAFAMLSGTAPIPASSGQTIRYRLNRGGDRQLNRALHTIVLSRIRFHPETKAYVARRLAEGHTPREIKRCLKRYVARRLYRLLEAGQPAAIEAAHQAA

SEQ ID NO: 342372 - protein, 399 aa, unidentified
MAAPSLWAGIDAGKLDHHCVLIDASGERLLSRRVRNDEAPLTALIDDVIALADGGLVQWAIDLNGGGAALVISLLLARDQHLLYIPGRIVHHASAAYRGDGKTDAKDAAIIADQARMRRDLPEFRHRDEFTVELRTLCARRTDVAADRNRAINRLRAQLLEYFPALERAFDYSHRKGALILLTGYQTPEALRRIGRTRLEKWLRGRNAYNSVAIADRAIAAANAQHVVVTGQRLGSTIVARIAQQILDIDAELSDLDDMIEERFTQHQQAAVIRSMPGFGPLLGAELIAATNGGLDSFHSADRLAAVAGLAPVPRDSGRISGNLKRPRRYDRRLLRVFYLAANNSIKTCPQSRAYYDRKRAEGKHHRQAILSLARRRVNVLWAMQRDNTAYQSTAKTAA

SEQ ID NO: 342373 - protein, 340 aa, unidentified
MEITTIGIDLAKNVFQIHGVDAHGKAVLKKQIKREEMAVFFANLAPCLIGMEACGSAHYWARKLQIQGHTVKLMAPQFVKPYVKTNKHDAADAEAICEAVTRPTMRFVPVKHVEQQSVLALHRARQGMVKARTAQANQIRGLLAEFGLVVPQGITHLYQRVPLLLEQANEELPGLFRQLVQQLLEHLKILDRQVNEMEIQIQMWHRSNPLSRKLEKIPGIGPLTASAMVASVGDAKSFNNGRQLAAWLGLVPKQHSSGGKPTLLGMSKRGDCYLRTLLIHGARSVIYALKRRPPTTGWLANLLARRDKNIVAVALANKNARIIWALLAQDREFRSDYVMP

SEQ ID NO: 342374 - protein, 422 aa, unidentified
MSYCPVAGIDVSKRFSDMCILSPDNKIFAQEKIYHDETSINRANALLQKAERLFFSKPVIVMESTSHYHLILFQFFSEHGYDVIVVNPLQSNSMKDFSIRKRKTDRVDAFKLAMMYRTKTLRPSQIPQTATRALRQLCRHRAELLNDVSSYKNRLTALLDQTFPGYDKVFSDVGGVTSCAVLVRFPTPTILLVEEESELVEVIAAASKSGYSFAKKKAGLLISAAQKAQTLGIHSCADETLIVCTIQMLRTLSESVLQIETAIDNLLAQIKEMRNNVSLPQSIPGVGSHSAALLLGEIGDISLFKKPKQLAAYFGLDPTERQSGSFRGTKNKLSKRGSPYARAALHMGVVNSICKRGKDSAANPVLLSYYEKKCKNKPAKVAQAASMHKLVFIVFAVLRDQKPFELKTPEQHAVEQGFVKAA

SEQ ID NO: 342375 - protein, 405 aa, unidentified
MITAGIDSGRRIISVSYVEDGEEIAYKEYENSFTGYRDLEEDMRDTGVEVVCIEGHGDSSRQAAVYLYEKGYKIYEINPLMLLKLKESMTEKKTDHIDAYVCGIFPFIRKDMKPLVLSIRVQDLKRLVRLYEKISKQVVRYKNQLHGELHQVFGCKYREVFPRINRTSLAFFSTFSTPEDVKEADIEEIHEVLKAGGSCMYRGKYGRDKAARIKEVLTKGYDEELKLSTDVGGTMIKTLCRILISLTKEKEEIKRKIERYVEELYPGYREHFRGIRLSSLRFGQIMAEIQDIDRFPDDGHLASYAGQAPVQKQSGDRNMMKNKKKYYNRHLAHVIHLLACSNVQKGAKYHGYYPILKKKFKKPLRALKTIKRKLIRDLYSGLVNYSSNPHQTDTPSNRPYSLTGS

SEQ ID NO: 342376 - protein, 356 aa, unidentified
MSIVGGLDIHRKQLTFDYVEVETGRLERGRIVPADREYLAGWLSRFDGRTPVAFAMEGCTGWRYVAEEMRHAGVEPHLAEPADTSALRGPTRRAKTDKADAQLLRELLAAGRIPECYIPPTPVLEWRALLELYHDLRIEHTAWAQRIHATCFHQGTTTLGEAGVIRGSRARLESIVDEQLSPVGRLQVNTALSIMDTLAEHLDRLRRRLVATSRQVNGARVLMAAIYGVGPMTSLALCAWLGGPDRFSSSRKAVRFTGLDITVHSSDSKRSPGRLSRQGPEVLRWLLFEAAKTSARSCAPGYRYYTDVKARYDANRAALSQARRIVRHAVHLLADLGEEAFTITAQPASPTTVART

SEQ ID NO: 342377 - protein, 331 aa, unidentified
MFHVVALNAAGSVIQRAKFSRDTLLAFFDAAPNALIGMEACPSSQWLARRLATMGHDARIIPARFVKPYVKSNKTDTVDAAAIAEAVTRPTMRFVEVRTPEQIDLQALHRIRDRLVGQRTALINQARAFCLEYGLAMRVGAGGFHADIRRHLGNVENDLTPAMRVLLEELLDDLAYIEGRIKAVTGKVEAYASQHDAVSRLVTIPGIGALGATAIVAAAGDGRQFRKARDLAAWLGLVPAEHSTGGKQTLLGISKRGNRYVRRLIIHGARSCFLHLNRANHALGDWLSALEARTHRNKAVVALANKLTRIVWAILTRPGAVYLPSRGAALS

SEQ ID NO: 342378 - protein, 345 aa, unidentified
MNCYCGIDLGAKRSQVCIIDDDQKVLVNRKVANDLDTIHKLIRPHGRVPTVIESTFNWYWIVDGLQIRDVPVTLAHSLKLAAISTAKVKTDKRDALTLAKLLRAKMIPESYIYPSEDRPLRDLMRQRWNMAAMRADEYRRMRGLLYRNGIFDVGSNDIRIMGEEEFNELVDHPLIRTQARYDIERVELLTKQIRSLEKDILSRVKKRKDFQDLQTIPGIGTVLALTILLEIGDIKRFAKSRQFASYCRVAPGCADSGDSHRRGRGNKQGNPYLKWALTQAAACARRSDPTFREYFAVVQRKHPGASGIIITHCIVAHRLSFAVWHVLKDGQPYNQEKLFRSNPES

SEQ ID NO: 342379 - protein, 382 aa, unidentified
MSTATTTRTTHPTAALCLAFELGNGRWHLGFTTGFGQATRQRSVAARDRESILREIDEAKKRFGLPAQTRVASCYEAGRDGFWLHRFLVSEGIESHVIDSSSIEVNRRRRRAKTDRLDLDALARLLLRYEAGERKAFAVVRVPSDAEEDVRHLHRELLTAKRDRTRVTNRIRGFLANQGLEIDLTGDVLGQLEDMRRWDGSALPETLVRRLRREWEKVQFLTAQIKELVKERRSLIRESDDPVLAKVMQLAHLKGVGIESAWLYTMEFFGWREFRSGKQIGRLAGLTPTPHQSGDLRRELGIDKAGNKRVRWMAIEAAWSWLRFQPNSALSRWYDERFAHGGPRMRKIGIVAVARKLLVALWRYLETGVLPEGAELKERVMI

SEQ ID NO: 342380 - protein, 334 aa, unidentified
MKQVTQVGVDVDSEELVCAMQRAEQRQPLATFANTAAGHKKFVRWATKGGHPARVCLEATGIYSLEFALALHQAKNVEVMVVNPRAIKDFGRACMQRAKTDAVDAGGILDYLDRMPFVAWQPPAPEVLELQAINRRIVQLNTELTREKNRRHASEFAGASADAIANDIEVNIHHLERRIERMHDSGLKLVRGVPALATKLAHLVSTKGIAEASAMRLLGELLVLPDDLAAPQWVAHAGLDPRPYDSGTSVHRPRRISKVGNRHLRAALYMPALVAIQHEPNVKAFYNKLVAAGKKPMQAVVAVMRKLLHAIWGMLKHDQDFDGNKFFKIANENV

SEQ ID NO: 342381 - protein, 427 aa, unidentified
MKKADLLSTLFVGIDISSRNNVVALLDFESQKTLQSFAVGNNQPGAVELANRLADYLRSRKDLTKLVVALESTSFYGIHVANYLSACDVLAPFHTAVYCLNPKAIKNYKKSFIDLGKNDYVDAFVIADFARANRITTKPWRGSQFLALQRLTRHRLHLAKALTREKAYMLSNIFLKFSEFSLLDAEDQPFSNSFGATASSVLTDFLSMEEIIEMPTEDLISYICEKGHNRFPNPEKTASLLQQAARNSYRLDKCLYEPLTVSIASSFTLISTYETEIKAVNKAIEKTLRGIDPNAYQSLLSIPGIGPVMAAGILSEIGYIDAFKNQEALAKYAGLVWRENQSGNFQADDTPLSKAGNAYLRYYLIEATSHVKNHCGEFAAFYQKKYDEVKIHQHKRALALTARKFVRLIFGLLANHQLYSSDRVVQA

SEQ ID NO: 342382 - protein, 358 aa, unidentified
MKTKIPAVETLTVGLDLGDRHHHACVLDASGEILAEEVIVNTREVLTAFCARYPGATVIMETGTHSPWVSRLVAALGHPVIVANARKLRAISQSQTKSDREDAQMLARLGRADPKLLSPVRHRSEATQRALVRLKVREALVRSRVNLVNSVRFLLKSLGVFVSSSIKAMAFTRKARAQLAPTDTALVEPLLAAIDALNAQIKTLDAELETLARETYPATERLRQIPGVGPLTALCFVLTLEDPKHFDHARSVGPYLGLVPRRDQSGETDKQLGITKAGHVQLRCLLVNCAHYILGPFGPPSHLRDAGLRIAARGGKSAKKRAVIAVARKLAVTLLALWKTGADYRPLPAVSAPLPHAA

SEQ ID NO: 342383 - protein, 376 aa, unidentified
MKSTRFVGLDVHAATIAVAVAEPDGEVRAVGTIPNEPEAVRRLVKKLGPAEHLRACYEAGPCGYVLYWQLTALGVACDVIAPTLVPVKAGDRVKADRRDAERLARSLRSGDLTAVWVPDAAHEALRDLVRAREAAKKDQWRARHRLQKFLLRHGQRPPAGTTVWTTRYRAWILALRFEHLAQEATRLDYLHEVDHAQERITRLERALDEAVAAAPAAMRAVIEALQALRGVAKVAAVTIVAEVGTLSRFARARQLMGYSGAVASEHSSGARVRRGGITKTGNAHLRRVVVEAAWCYRHPPRLGYALRRRHDRLDEAVKAIAWKAQHRLHSRYRRLLGRGKSKQHVVTAIARELLGFIWAIGVAVEHDAGRGSRQVA

SEQ ID NO: 342384 - protein, 412 aa, unidentified
MFKIFRNNCCGLDVHKTWIYACIGITDPNGCTEYKQARFSSFSKGLRELAAWLAKYSCTEVCMESTGKYWIPVFNILEKSCFVTLAHPKYTKPQKGNKTDRKDAKWICDLFMCDMIKPSFIPSPEIRQLRDLMRYRFKLTNMLTGEKNRAQNCLTVSNLKLDDVFSDVFGKSARSITNYILEHPGETFDVSPFVDPRCKTPVSEIQAAVDGAISPEQAVKLRQCLAHIDELEAHRKEIESEILQIAEPFSAVLDLLYTLPGLDKNPMTAIAILSEIGPDMSVFPSSKHLVSWAGCCPRNDQSNQKVKSRRISRAGSYLKPLLVQVANALIKSKKHPEFKERYHRIKSRRGHKKAIIAVCKMLLTAIWNMLSKLEPYNPEGFLEHRSVKQEKTLTVSQALELLRLRGYTITNP

SEQ ID NO: 342385 - protein, 438 aa, unidentified
MSNKVIFNLDDLFISVGIDVGADFSWMSIALPNQQFVGKPYKILHNSIDSLTTAVSKIKEAEELYSLESRIFLESTGIYHYPLFCYLRDKGFNCSVINPIITKNSTNINIRKVHNDRFDSKKAALVGLKPDLKVSLMPSALALNCRNLCREYYDLMDNRSAYVNKLQGELRMAFPQYLGIFSKVTINTSLALLETYTSPSAFLEADKQEIIDIIKSTARFGLTYAQNKYNAIIQAATDANQFGYIIDSNIKRIRLYISFIRKYDEEINNILESLHELVDANEDADFVKQIHLIETFKGAGFLSAVSIMGEIGDFSAFSKPKQLFAYFGLDPAVKQSGKFEGTKVQMSKRGSAIARRVIHTLTLQSISISRNGEAKNPVLREYYLKKCDSKPKLVAMGAVSHKVCNMIFAILRDNKPFKIIAPQEHIKQYNAAKCDIAA

SEQ ID NO: 342386 - protein, 412 aa, unidentified
MQTLVERGCGLDVHQATVVACLLMVRRDGKVQKQMRTFGTTTRELVGLREWLLSEGCTHVALESTGVYWKPIYAILEWALEIVVANAQHIKKVPGRKTDVKDAEWIADLLCHGLLRSSFVPPKPIRELRDLMRYRRKLVESQAAERNRLLKVLETANIKLANVATDVFGMSGRLMLRALIAGKATPQEMAELAKGLLRKKIPELELALEGKLEQHHRFLLELQLQRLEAAEKDLAVLEQRIRQMLEPYAAQLALLDEIPGVDWTLAAVIIAELGVDMSVFGNVSQLASWAGVCPGNNESAGKRKSSRIPSGNVYLKSGLVEAANAAARSKGTYLRDKFFRLKARRGYKRAVVAIAHKILVAIYHMLSQQVSYNDLGDLYLDKLNKNHLTRNLVHRLERLGYAVTLTLQQKAA

SEQ ID NO: 342387 - protein, 337 aa, unidentified
MSHVGIDVHSKYSEICIVSETGEVIERRRIATTEPSLRRFFGRRPTRRVVLESSSLSPWVYRLLRGMGHEAIVVSPRRIRLIAESTLKTDAIDAEILARLSLVPGWLQPIYQRSQAGQVLRARLRARSSLVRSRTALVNAVRGTLRAHGYRLPGGAVASFVTRLGALELDEELRSALDPLAQTVAHLTQQIEGIDRALAELSETDELLAQLQTIPGVGKLVSLGFVAWMDRPERFRRSRDVGACLGLRPRLRSSGGVVHRGRITREGDCEMRRLLVQGAHAAMKCRRDSQLKRWAEELEKRVGKKKAVVALARKIAVLMHRLWITGEGFEAFPAAAR

SEQ ID NO: 342388 - protein, 354 aa, unidentified
MPDPYQAVIGGIDCHTDFHVAVALDPLGRVVGTESFPATGAGYRSTYTWLASFGPIAAVAVESTGSFGAALTRSLVERECGVIEINQPHPHLRARRGHNDAIDADAAARKVLSGEATATATDATGIVEAIRRLSVARNSATGARAAALCQLGDLIVTAPAALREQLDGRRTLEAKAAVCARLRHDTDRLADPAQAAHTALRSLGRRIAQLAAEAADLERQLDGLVAAAAPTTVSRLGCGTHHTAALLVAAGENIDRLGSETSFAHLCATAPVPASSGRTSRHRLNYPGNRSANRALHMIVLVRLRYCERTRSYMDRRLAEGKTKKEAIRCLKRFVARELYRTLRADLATLTTRT

SEQ ID NO: 342389 - protein, 335 aa, unidentified
MKKYELFVGIDVSKSKLDVSFVNATDSNQWTHFVVTNTAKGLQGILTRLNKRKMDLNQVLICFEDTGVYSMPLCYFMSEKAVDYWMIPAIEVKRSKGISRGKTDKSDSKDIAFYAISHQYKLKLGSLPDETLQKIKLLYSEREKLVKAIQMFGRTTENIGFLPKKLLSDLLKSNASTIKKLKTSLKKTDQRIQELISENESLKEKDRLIQSIPGVGPQTSIYLLIVTRGFTCFENSRQLACYGGVAPFEYSSGSSIRGRTKVSHLADKKLKSLLNMCALNAKAYDHEMKLYYERKVAEGKSKILVLNNIRNKILGRVFAVVNRGTPYVNTQKFAT

SEQ ID NO: 342390 - protein, 386 aa, unidentified
MTKSTGKGKLNQTLTRDGVDASSRRHHSANVSGQGRKITEEAPMKEVTIIGVDLAKSVFQVHGAAVDGSTVFRKKLTRAQFASFMAEQPACLVAMEACGSAHYWGREMRKLGHEACLIAPIYVKPFVKRQKNDAADAEAIVEAATRPNMRFVFIKSEEQQGRGALFRTRELFVGQRTQLVNALRAHLAEFGLVVPKGIRNVKQLAEHIENPENILPESIREVGKVYLDQIEGLTQRTSELEASIKAEAKHSDISRQLQTIPGIGPITAIAVEAYAPEMGSFDRGRNFSAWLGLVPKQHSTGGKQILGRTSRMGQKDIRRLLIIGAMSVIKVAVTKGVSPNSWLGRMLVRKPRMVVAIALANKMARMIWAMLTKGEDYRDPMAETVA

SEQ ID NO: 342391 - protein, 346 aa, unidentified
MDTIARIFIDTSKSVFQLHGVNAAEEVVLRRQLSRGQMEAFFTKLAPTVIAMEACGASHHWARVLRALGHEVKLIAPQLVKPYVKRGKNDTNDAAGGCEAMSRPTMRFVPVKTAEEQAALMLVGVRESIVRERTQLANTIRGYAAEFGAVAAKGLCKVEPLLARLAADQTLPSLAQEMFAQLGQAYDQVQARFKEVDAKLLAWHRSHRVSRLLAQIPGVGPIGASLLVMKAPDPKAFRSGRDFSAWLGLTPKDHSTAGKVRLGVITKAGDEALRAVLVSGATSVIKQAMRGGKGVSPWLIALLKRKEPKLAAVALANKIARIAWKMMVSGAPYDATRSIGVAATAA

SEQ ID NO: 342392 - protein, 456 aa, unidentified
MSVMGVPEQVEDEEHEQRLERVAAIDVAKASGKVCTRLPHEVKIGKRVTLVWDVAATTNAICELAAHLVEQRIERVVLESTSDYWRPFFSVLEAAGLCVWLVNASDVKQVSGRPKTDKLDAVWLAKLNERGMLRPSFVPPADIRRLRDYTRLRLDLTRERTRHKQRMEKLLEDALIKLSTVATDIFGKSGRDMIEALIAGKNDPKQLAGLARGRMRVKHAALAQALDGRFDAHHADLARILLDQVDGLDIQIQRLTTTIDELIAAMPAAAAGDYQAPTDTNTSGGGDGSERRTTLSAIARLDEVPGIAEHTAQVIIAELGLNMAQFPTAGHLVSWAKLSPRTIQSGPRTRGGKTGKGNPYLKGVLGEAATAAAKTNTFLGERYRRLVKRRGKLKALVAVARSILVIVWHLLSDPTARFRDLGPDFHTRRVNTDRKIRSLVHQLEALGHTVTLQPAA

SEQ ID NO: 342393 - protein, 342 aa, unidentified
MKDTMIGVDLAKNTIVLHGASLTGELRFRKKLSRGQFIQFMQRQPAAVVVLEACGSAHYWARELMAYGHEVKLIAPQYVRPFVKRQKNDAADAEAIAIAARQPEMRFVEPKTPDQQAKAVLFRARERVVRQRTELVNALRAVLYEFGQTVPQGIVHIKRLEAVIADEAIDLPDIVREECRDLLAQIDEKTIRIEAKTKQLAELSRINGAARRLQTVPGVGPMIALAIEAFAPAMGTFRCGRNFAAWLGLVPRQFSSGGKERLGRVSKAGQADMRRLLIIGAMSHVRAACRKPPALGSWLARMLARKPKMLVAVALANKMARRIWAMLTKQEDYREQALTGAA

SEQ ID NO: 342394 - protein, 408 aa, unidentified
MQLFVGVDWAEDHHDVCVMDTDGQVRSKGRVSNDLAGIAKIHDLIGRAIPAEFDDDPEVIVGIETDRGLLVRALVAVGYRVLAVNPLGVDRYRDRSRVSGAKSDPGDARVLADMVRTDAHQHRAVAADSDLAEAIKLVARSHQSAIWSRRRLANQVRSALREFYPAAQLAFEDLTHSDAVSVLAIAPTPELGKGLSLSKIASALRRGGRQLNVDKKAAAVQAALRTDQLTQPPVVADAYGAIVASLAKVIAAHNTQIAELEEVLEAHFSQHPDADILRSLPGLGVVTGARVLGEFGDDPNRYDTAKGRRNYAGTSPLTVASGTRRVVRARHIRNRRLADALYWWAFNAINRSPGARALYDHRRALGDTHSGALRVVSNRLVAILHGCLRHRTLYDEHTAWAHRNDIAA

SEQ ID NO: 342395 - protein, 343 aa, unidentified
MNYIGLDLGQTSSQICCLTTEGELVERRIKTERESLAQFFGRIKRSRILLEASTISQWTARYLEELGHEVIIADPNFAPMYASRSKRIKTDKRDARALCEACKLGAYREIHRVSDEQKRRRQQITVRETLVRTRSRYITLIRSFLRAEGWHIVSHYADTFARKVRELELSNELRETVPPLLEMLEQLSEQIRAADGRLAEIAEQDEQVKRLMTVPGVGKVTAVVFVATLDEVNRFESAKQVRSYLGLVPSERSSGERQRRGGISKVGNSRLRSLLVEVSWAIMRNEKRIETRELREWAKQIADRRGKRIAVVALARRLAGILFAMWRDGTAFQSSSAVVCSGV

SEQ ID NO: 342396 - protein, 409 aa, unidentified
MNAVGIDVSKGKSMVAILRPFGEVVASPTEVAHTDSDLSKLADSLKRLKGETKVIMECTGHYFHPIAHVLREAGLFVSAVHAKLIHDYGNNTIRKVKTDKADAIKIANYGLLNWMELPEYVPEDDIRHMLKTFSRQYTKYGKVKTMLKNNFIALTDQTFPGVNALFTSPPRKGDGHEKWMDFAMKFWHCECVCGSTAKAFSCRYQKWCKKEGYKFSQDKAGDIYASACGHVSIMPKNETTRLLVTQAVRQLNAVSESIAVIASEMKRLAMMLPEYPVVSEFFGVGDILCPQLMAEIGDVCRFNSKGSLVCYAGLEAPPFQSGKFESTDRSISKKGSPHLRKTLFQVMVCYLQLAPADDPVYQFIDRKRAEGKHYYSYMTAASAKFLRIYYARVKEYLATTCTSQEDAAS

SEQ ID NO: 342397 - protein, 339 aa, unidentified
MKLYAGIDLHSNNSVIDLLDENDKVIYNKKLPNNLSTILTALSPWQSQIEAIAIESTFNWYWLVDGLMEAGYRVHLVNTAAVQVYSGLKYTDDNHDARWLAHLLRLNILPTGYIYPKADRAVRDLLRKRIQMVRLRTTNILSIQNLIARNTGGSIKGDLVKRMTTEDIALQLPNEDHALAMSCNLSVLQQCHEQIKILESTILKRIRLRKEFQALLTVPGIGNILALTIMLETGDISRFNKAGNFASYARCVQSKRVSNGKKKGENNRKNGNKYLAWAFVEAAHFSIRYSDTIKGYYQRKCAKTKKVIAIKAVAHKLARACYYIMRDNSEFDVNKAFVS

SEQ ID NO: 342398 - protein, 368 aa, unidentified
MKKSITFVGLDAHKNSIAVGLADAGRNAEVRNYGIIGGSLDDLDRLVKKLAATGKELRFVYEAGPCGYEIFRFLTAKGFDCAVCSPAHIPKSPADRVKTDRRDAMMLARLHRAGELTYVFVPRADDEAMRDLTRCREDAKKAQRVTQQQLGGMLLRLGFRYPKDNWTKAHFGWLADQKMPTPQQQVVFQEYIHAIKETTDRVDRLTNQIETLIPTWRMAPVVTALQSLRGVSIIVATTMIAELGDLTRFESPKKLMAFLGLIPSEHSSGEKKKRGGITKTGNGHARRVLVEGAQAYSYPARMTRPLLKRQEGLSQEVRDIAWKCQVRLCARFRRLMAKGKSRNAVVTAIARELAAFMWAIANKTPITA

SEQ ID NO: 342399 - protein, 334 aa, unidentified
MENIALIGIDLDKNSFHVRCQDRHGKAVYRKKFTRPKLIEFLATCPATTIAMEACGGSHFMARKLTELGHTPKLISPQFVRPFVKTNKNDFFDAEAICEAASRPSMRFVQPKTESQQAMRALHRVRESFVQDKVKTTNQMHAFLLEFGISVPRGPTIISRLSTILEDNNLPLYLSQLLQRLQQHYHYLLEQIKELETQLKQKLNEDEVGQRLLTIPCVGTLTASTISTELGDGKHYASSRDLVAATGLVPRQYSSGGRTTLLGISKRGNKKIRTMLVQCARVFIQKLEHQKGKLADWVRELLCRKSNFVVTCALANKLARIAWALTTRQETFAS

SEQ ID NO: 342400 - protein, 475 aa, unidentified
MNIKGSKKKNQVLSVNIFEQQGIIAKADAIKAGLKASTWHELETRGKFDKNDKLSFVSDDMLILGCDIGSETHYVRAIDIRGRELSKSAFGFSNTAEGFESMLDWSTKLAAANDKKQIVLGLEPTGHYWFCLTTWLVAKGISVVQVNPYAVKQTKEVEDNSQLKDDKKDPKLIANLVKDGSFGMPYLPEKLYADIRRLSMFRDQLNEDRIRNLNRLHREMKIYFPEYKDAFGKIDGAFSLELLKAAPFPDELAALGTEGMKQIWHEAKLRGRGYANASSILEYARKSVGIKDGADAGRQAVKWFVSRIIELDGQLSDIENKLNERCMEIPHAKNILAISGIGENILSGILAEMGDISRFDDVKEIQKLSGLGLVACSSGKHTGETKISHRGRKRLRYWLFQAAKSAVAHSGEFKELHVYYTTRKQNPLKKMQSLIVIACKILRVIFTILTKGTTYDPKKLLGDIIRPNQAIPQAA

SEQ ID NO: 342401 - protein, 383 aa, unidentified
MRHGGILIEANDSEGEAMKKHTTINQSLSADVVACTTVAVDLAKRVFQLAGEDALGRVLFEDRIKSREAFQAFLHKLPASVTVLVETGPGAQAWGRLLQTQGNPVRILPAQLVANHRSGPKNDRNDALAILRAGRDIKISAVPLKSAAALAMQALHRARQGYVRRRTAVGNQMRGLLLEHGVALAQGETAVSQLVPRILEDATQPLPDLLRELIAELLGEWSQLGERVNVLTGRLETAAKEDETAKRLMTVRGVGPIIATALLAKQTQPERFANARLFAAYFGLVPSQHSTGEKVRLGKMSKHGDAYLRSLTIQGAHAVLKQLRPDSQQPDDQRLQRWISRLGRKEAAVRLANRNLRILWVLLQNDQTYRRQPGAEPEAAMSH

SEQ ID NO: 342402 - protein, 355 aa, unidentified
MDKIKTNFSGQTIYVGMDVHKESWNLGIYLNDIFVRNLHQKPNPKMMADYLHKNFPGAIYRSAYEAGKFGFWIQRQLTSLGVECLVVNPADIPRSQKDSLQKTDPRDARNIGLRLQSGFLRGIHIPDEQQEADRVFFRHRKKILKDLNRCKNRIKGLLAFTGIDIPQAYDNANWSHNFINWLKALDCKQAPRRRALDYKIRNMEFLRKELLSISNDIRKMMREQRYRTNYYLLRTIPGIGPLTAASILVEIGDVKRFNTFCHLNSFIGLLPMEHSSGQSENKMSLTVRKHRQLRSDLVESAWTAKRTDPAMALYFQEQAKRKDPKIVIIKIARKLLNRIRYVLINQQPYEFGVLK

SEQ ID NO: 342403 - protein, 304 aa, unidentified
MNGIGIDVSKRQLDVGTTDGEVLQVSNSASGFAELDLWLRKHPVSQIVLEATGGYEQSVLNFLHNAGHAVVRANALRARRLAQGMGQVAKTDRLDAYALAQMAALVKLPAYQPLEPWQQKLREFVRARRQTMEALTVARQQQEMVTDRELRRLLQASISRLQRMVGRLGQQIAEQVAQQPQLAVLKSMKGVGPVLQAVLASYLPELGKISGKAIASLVGVAPMSHDSGTMRGKRSIHGGRAEIRQVLYMASMSAMRHEPRLRDFYQSLRARGKEGKVAIVAVMRKMLVILNARVRDAQGGSIPA

SEQ ID NO: 342404 - protein, 584 aa, unidentified
MLPPPPSAPPAPRRFGVGIDTSRYGHYAAFLRDDLQPAAPELPFAESAAGYAQLRRQLDRLAQQHGPAHFVIRVDSAGQYADNLLHFLHGLGTPSAATPGGAAPWRASLSCGDPQRNKDYRAAIFGSQKSDPIEARAAARFALTERPKSDLPLALELRTLRQVAGRLQTVVRQRTRLRNQFHHLLALTFPELALLTKDPAGWVLELVHRYPTAPLLAAASAADLAAIPYLPEQHRAALLEHARHSIGSLRGAVAEELVRDQVRQLRDSAARQKRLENLLVTAYRALPRANHLDTIAGIGPVTAAVLTAFLVDIDRFATPGKLVAYFGVLPIEVASGVDRDGQARAPRRWVMSRRGNDLVRRYLWMAALSALRCNPAVRALYARVVAKHPQQKAIAVGHAMRKLLHLVFAIWKSGRPFQADWYPWEAGATRVTSDRPLSTDGQAAGHKADTKPARSVVAAACTDTVGEAEAIGESTAVDFAHLKRQLPLARALDQLGLAERLRGSGPQRRGPCPLHRGDARGRTFSVNLDANVFQCFEAQCRQKGDVIDLWAAVHGLTLRAAALDLVRTFGLEPVRRTGTEKRNG

SEQ ID NO: 342405 - protein, 418 aa, unidentified
MKVVFPTCCGIDVHKSFLVATIIKTQQDSLQPSYQKKRFSTFNSDLNRFADWLHENDCLDVCMESTGKYWVPVFNILEKRGIRVVIANPKWVKAVKGNKDDTKDSKWIGDLFRIGLVKSSFIPDKDIRILRELTRYRYKLTSMRSSQKNRFQNAFTVCNVALDSVVSDMFGKSATAITDYLTSDEDFDAQHCISLLQRSLKKKADDVLQSIEGYEITAEQKTRIGIIRDHLHYIDALIARIDICINTMVDKYEGYIVLLRTIPGVDRSSAITILSEIGVDMTQFGSSKRLCCWAGLTPGNNESAGKKKSVRISRAGVYLKPALVQVAHAAVKDKLSPYYALKYERISKRRGKKRAIIAIARMILTAVFVMLSNLEEWNPVDLYRVDMPEHLKEKQLSKAVKQAIHFLKAQGLTVLDSA

SEQ ID NO: 342406 - protein, 350 aa, unidentified
MIIIGADYHPGFQQIAYVDTETGELQERRLQHREEAEKFYRELAAQQMKVCVGMEASGHARWFERLLSELKFELRIGDAAEIRAKRVRKQKTDRQDAQLILKLMLEDRFPQIWVPSWENRDLRQLLWHRHRMVQARTRIMNQLQAVALNEGLRSKKRLWREAGREQLLAIRLAPWASRRRQDLLELLDRLNPSIAKLTEAVEQEAEKCPEAQRLMTHPGVGPLTALAFVLVIGTAERFRCGKQIASYLGLVPSEDSSGERRRLGHISKQGNSLLRFLLVEAAQVTVRSNQEWRSKYYHLTMRRGRKIAKVAMARRLAIRLYWMWRQEWNYQQLTKFGSHAGQPGNPHGVQ

SEQ ID NO: 342407 - protein, 313 aa, unidentified
MPISTPALRCIGCDVGKANIVVFDSLTQKITTIENQPQALASFAARLDASCFVVCEATGCYESGLLAALVTAQIPAHRADARKVKAFIRSFGTLGKTDAIDARALAQYGHERADRLLRWQSPDKIREKLQRLVLARRDLVAEHQAYTNRLAAPGADSAKPFLGPVQSCLAEQIVAIEVAITALVSADESLKADTKSLSGVGGIGQITAVSLLALMPELGHLSGKQAAALASLAPHPRQSGASDAYRRTKGGRPLIKAVLFMAALSASRHNKTLKAFYDRLVAAGKKPIVAITAVMRKLIVICNAVLRDAHATI

SEQ ID NO: 342408 - protein, 438 aa, unidentified
MSNKVIFNLDELFISVGIDVGADFSWMSIALPNQQFVGKPYKILHNSIDSLTTAVSKIKEAEELYSLESRIFLESTGIYHYPLFCYLRDKGFNCSVINPIITKNSTNINIRKVHNDRFDSKKAALVGLKPDLKVSLMPSDLALNCRNLCREYYDLMDNRSAYVNKLQGELRMAFPQYLGIFSKVTINTSLTLLETYTSPSAFLEADKQEIIDIIKSTARFGLTYAQNKYNAIIQAATDANQFGYIIDSNIKRIRLYISFIRKYDEEINSILESLHELVDANEDADFVKQIHLIETFKGAGFLSAVSIMGEIGDFSAFSKPKQLFAYFGLDPAVKQSGKFEGTKVQISKRGSAIARRVIHTLTLQSISISRNGEAKNPVLHEYYLKKCDSKPKLVAMGAVSHKVCNMIFAILRDNKPFKIIAPQEHIKQYNAAKCDMTA

SEQ ID NO: 342409 - protein, 348 aa, unidentified
MVTIGIDPHKDTHWAVAIDEVGRQIADRECRAVSDGFGEMLAWARTLGGQRTWVLEDCRHVSGPFERFLIDHGERAARLAPHLMAQARGTVRERGKSDPIDALAVARAALKEGLDNLPTAQLGGIELDIRLLHQHHQRLVRQRTALINDLRWNLHDLWPDLKLPARALNSLKLQHQLARRLARAATSARVKIARDELRRIRELTRAIHQLIHDLHTTVSEVAPQLLAETGIGPITGAQLIGEIAGIDRFANDSKLARLAGCAPIPVSSGRTDRHRLDRGGNRQLNNAIHTIALTRLRHDPRTAAYIARQRQTGKTHREAIRCLKRHLIRRIYQLLTHPNQIRRTACLT

SEQ ID NO: 342410 - protein, 428 aa, unidentified
MEEIREEPVQVVARVCAIDIGKAGLVACVRIPHASRPDRRVQEVREYAAHTPALLALADWLRVERVELVAMEATSDYWKPVFYLLEAEGFACWLLNARHVKNVPGRPKTDRLDAVWLAKVVERGMCRPSLVHPKPIRQLRDVTRYRRSLVREQTREKQRLEKTLEDAQIKLDSVISDLHGVSGRQMPQALIDGQRDPRVLAEMAHGSMRRKIPQLREALTGHFGDHHAFICATMLRRIDTLAADIAQLDTRIEEMIAPFARAVEKLDEIVGIGVRCAQEIIAEIGVDMAAFPTAAHLVSWAKFSPIDAQSAGRKKGNSTGKGNPWLAGAIGEVVAGLARTNTFLGERYRRLARRRGKKRAIVAVGNSVLTIVWHLLSDHDARYQDLGPGYHESRINQQRRQRDLIRQLEHLTGQKVNLQPQPELPTAA

SEQ ID NO: 342411 - protein, 337 aa, unidentified
MELYSGLDLHSRNTYIGILDTDFKRVFKKRVSNNLDLILETLEPFKDQLKGLVVESTYNWYWLVDGLMDAGYGCVCLANPSAIKQYEGLKHSDDQHDAFFLAQLLILGILPQGYIYPKEDRPVRDLARKRMFLVKHKTAHILSLQSLIARCCGQRVSSNQLRKFTSADLKQLLKEEYLLLSAQANLNIIAFLIQQIKALEKAIKKKVKLDKAFEQLMTVPGIGFILAMTIMLEVGDISRFAKVGNFASYCRCVSSQRLSDGKSKGSGNRKNGNRYLGGAFVEAAQLGRRYSQRFCRYYDRKAAQTNTIVATKALSNKLARICYYIMRDQVPFREELF

SEQ ID NO: 342412 - protein, 377 aa, unidentified
MTQFPVSTSSEQSIYAALELSKNSWLLAIQVPGRDNPSLHPIRGGNAEGLMAKLDAARERVAQVTGQTPKVTLCYEAGYDGFWLARFLEQRGIECLVMEPASLQVNRRARRVKTDRIDVENLLHTLIAWCRGERHVCSMVVIPSVEEEDLRRSHRERGRLVRERTAHINRIKGLLFGQGIRGINVLKNHKTLAPAELVTGDGRPLPKRLGREVTREIERLALVQEQLVETEHERDQAPTPCAATERKRHDLLRLNGIGPTFSAILAREVYYRRFANRRQVASYIGLAPSPYDSGDGRRSQGISKAGNSLVRYSLIQAAWLWLRHQPNSALTLWFHRRTEGESKRMRCVMIVALARKLAIALWRYVETGLIPEGAVVK

SEQ ID NO: 342413 - protein, 341 aa, unidentified
MKVSTLGIDLAKNVFQLHGVDHEGHTILRKKLTRAKFVQFVIQLEPCLIGMEACSSSHYFARLFTRYGHEVKLIPPQYVKPYVKTNKTDAADAEAICEAVTRPNMRFVQIKTEEQQAVLALHTERGILIRERIACANSLRATLAEFGITIAAGQNHLTRELPAILEDGENGLSPFVRTSIYRQSKHIRELEEQVKQVEEALASWYRTQEACQRMAKIPGVGMLTATYVVAAVGNARQFSTAKQFASWLGLTPKEHSSGGKQQLGGISKRGDGYFRYLLVHGARSLTAWVNRNGAVEENSWLQGLLERKHYNVAVVAMAAKTARIMWSILSHNTEYQPRQLA

SEQ ID NO: 342414 - protein, 392 aa, unidentified
MVVSVGIDVSKDKHDCFIVSAEGEVLADVFTVPNNMDGFHCLLQRIRDCTAPQDKIKVGLEATGHYSYNLLGFLLDNGLTTYVLNPLRTNLYRKSLSLRKTKTDRVDARTIATMLLSDVGLKPYTSTAYHNEELKSLTRYRFDKVKERAKLKSSVSRLVCILFPELEKLVPTLHMVSVYALLEEFPSARKVAAAHLTRLKALLETASKGRYKRDMALEIRDAARNSIGSWMPAKSLELQHTIRLIRELDNEIAEIEGQIQAIMDELHSPITTIPGLGFRMAAMILAEVGDFTRFDSPDKLLAYAGMSPSTYQSGQLKNCYPHMEKRGSRYLRYALYNATKYVCHWDPAFADYLAKKRAEGKHYNVALSHAAKKLVRLIFAMERSQKPYLPTS

SEQ ID NO: 342415 - protein, 407 aa, unidentified
MLFAGDDWAEDHHDVELQDERGRVLARARLPEGIAGITRLHALIGQFASADTEPGEVAVGIGTDRGLWVTALRAAGYAVYAINPRQVSRYRERHGTSGAQSDKAGAHTMAGMVRADSGQLRAVAGDSPGAEALKVAARAHQMLVWERTRQMQRLRAALREYFPAALEAFEDLDAPDALELLAKAPDPARAARLTRAQVAAALKRARRRDIAGKTDAILAALHGEQLRQPQPVADAYAATVRSLTVIIAALNGEIATMEQQVTGSFRGHPDAAIYLSQPGTGQIPGARQLGEFGDDPHRYASARARKNYAATSPVTRQSGKKKTVLARYVRNGRLAGALHRQAQSALITSPGARTYYDEQRDRGLDHDAALRALSNRLAGILHGCLKTRTLYDEATAWSHRVKLPAAA

SEQ ID NO: 342416 - protein, 429 aa, unidentified
MNSTRNKKIEQVKETTMIVGIDIGSEKHYFRAFNWRGIELTRKPVAFSNSMEGFNSFYNTIVELIQKSELEEALVGIEPTGHYWFDLGQFMGEKNIKFVMVNPHHVHKSKELDDNSPSKNDRKDPRVIAGLVRDGRYFYSYMPTGVYAELRNASNRRFVLVEEQTRAKNRLQKWIAVYFPEYKGIYTRIDAKGGLLVLKQAPTPEEIVRLGVEGIIKIWKDAKLRGNGHKKAMLILNAAMKSIGLKAGLTEARMEIQDLIEDYELQTKRLERVNDLIKELCQQIRYADKLLEIKGIGITTIAGFIAEVGDITRFDSAKELQKLAGLELVADSSGKHNGKTKISKRGRKRLRYLLFEAAISVVGKNKEFKEIHRYYTTREKNPLKKMQSLIAVACKLIRVFHVILTKGVSYDASKMLEGIRHPGEQLKAA

SEQ ID NO: 342417 - protein, 418 aa, unidentified
MSVVVEIVYPTCCGIDVHKNFLVACIAKTNERGQTTHVMRRFSTNTGDLRKLADWLSTHHCKDVCMESTGKYWIPVFNILEKTCNVCLTHPKYVKAIKGKKTDKKDAKWIAELFKCDLVRASFIPPFDIRQLRDLCRYHAKLTHMVSSEKNRSQNCLTTCNFKLDAVFSDVFGKSATRILDSLIAQGNSDFDVAPLMDKRCKATIEDVRAALDGNLSYAQAEKLKIIRLHMENLDNLKNTLENLIYRLAEQYQPQITLLLTVPGISSKLTAIRILAEIGTDMSVFETAKKLCSWAGLTPQNNESAGKKKTTRITRAGVYLKPLLVQIALAVSSSAKHPEIRDKYYALKKRRGHKKAVIAIAHRLLAAIWHMLIKNEAYNPYLYNKADKPPANRVLTPEQAFALLRSKGFQIKEPDLVA

SEQ ID NO: 342418 - protein, 411 aa, unidentified
MEVLHEHCAGLDVHKKTVVACVLHSGRDGITRRETRTFGTMLSDLEKLRDWLKQESCDCAAMEATGVYWKPVYNVLEEHLQVLVVNAEHIKAVPGRKTDVKDAEWIADLVRHGLVRASYIPERPQRELRELTRLRAAFIQDRSRAVNRLQKTLEGANIKLASVLSDVTGVSGQRILDALLQGEDDPEVLVGLVHSRLRPKLEALKQALMGRLQGRLRFVVSQELAQIRSLDDQIVACDEEVGSEMRPFDVDLERLDEIPGIARRSAENIIAEIGVDLSRWPTLAQFSSWAGACPANKASGGKRKRAGVRRGNPWLKRCVTEAAWAASRTKNSYLGARFRQLKASKGHKRAVVAVAHEILTIIYYLLTRNRHYEDLGVRYLEDRNKEEVQRRATRQLQRLGYNVQLVPLASE

SEQ ID NO: 342419 - protein, 385 aa, unidentified
MFKIFRNNCCGLDVHKTWIYSCIGITDPNGRTEYKQARFSSFSKGLRELAAWLAKYSCTEVCMESTGKYWIPVFNILEKSCFVTLAHPKYTKPQKGNKTDRKDAKWICDLFMCDMIKPSFIPSPEIRQLRDLMRYRFKLTNMLTGEKNRAQNCLTVSNLKLDDVFSDVFGKSSRSITNYILDHPGKTFDVSPFVDPRCKTPVSEIQAAVDGAISPEQAVKLRQCLDHIDELEAHRKEIESEILRIAEPFSAVLDLLYTLPGLNKNPMTAIAILSEIGPDMSVFPSSKHLISWAGCCPRNDQSNQKVKSRRISRAGSYLKPLLVQVANALIKSKKHPEFKARYHRIKSRRGHKKAIIAVCKMLLTNLSLTTRKDFWSTGLSNRKRL

SEQ ID NO: 342420 - protein, 347 aa, unidentified
MRFYTNTHQYYCGIDLHTRVMYLCIISSDGEIVFHRNMKADPKSLLKAIKPYRPDIVVGVECIFTWYWIADVCAEEEIPFVLGHALYMKAIHGGKAKNDRIDSGKIAAMLKGGMFPLAYVYPAKMRATRDLLRRRNYLVRRRADLLSHIQNTNSQYNQPGFTFHIIHKCRREEVLSHFKNPDVLASVKADYALIDQFSIQIRALEQAALDGAKKHDPQALYLIRTIYGIGKILSLTIFYEIGDINRFPRVQNFASYSRLVKCARESAGKRYGTSGSKIGNVHLKWAFSEASVLFLRCNPEGLKYKKRLERKHGKAKSLSILAHRLGRATYYMLKRGNAFDMKKFLSA

SEQ ID NO: 342421 - protein, 412 aa, unidentified
MYYVGIDIAKRSHVACVMREDNRLEIRPFEFASTKSGFHKLQMQLQSLACDVSDILIGMEATGMLFDNLYRFLKSLHYRVVLLNPYQTAKFRQMDTMKRVKNDNIDAQMIAALIKSGRFSEGYVNDDQLQSLRTLYRHRASLDDQLKSIKRQTQTILGVVFPELEQVVSDPFNVTGLALLEKYPTAKHYEYASTKRILKTFRDIKGNNFNEAKADKLLRLAKESVYSGAGKEGYESTIRSNIRLMRLLKEQMQEVEAAMLSLFEAKEATEEERQEMRELIDNLRTIPGVSDKTILALLAECGNLDRFHSAKALTGYLGLYPTLEQSGDSHKNGRLAKRGARLAKKAIYLAAIAAIRHNKELRQVYMNYRSKGRAKKECIIITARKLLAIIYSIYKHNVPYDPQRVFVSSPNT

SEQ ID NO: 342422 - protein, 359 aa, unidentified
MQHIGMDTHISNLDFAVVNDAGRLMKKTSVATSVKNFMEFVRKVPPPRIIYMEEGTLAGWVLEICTDFGEKLIITDPKENHWIGSSGQKNDPLDALKLAQLGRGGYIKEIHHPVGDRRRFRELMEAYHDNVRGTTRIKNKIKAKFRQNGIQCTGSTVYLAAYREEWATKLPDDTARLIVKGLWQQLQQFEQTEKQLLAAAKIEAKRYPEIKLFEDVPGIGFISAATISAILVTPHRFADKRKVWMYAGLGLMKRSSGGKIYTEKLSNNYNRLLKYTLKQAAEVAIRTSDNPFRRKYLNKTVLHGVAPHRAKLTVARDIMTTLWVMWKKGERYDPKIREKVACKQSNGPVSPTYLSMPPH

SEQ ID NO: 342423 - protein, 414 aa, unidentified
MHQSSTLYVGLDVHKESIAVAYVAQDHHAEVVSLGNIGTRQCDIDKLLRQLQYKSAHLVFVYEAGPCGYWLYRYLTKKGHVCWVIAPSLIPKKPGDRVKTNRRDAIKLARLMRSGDLTPVYVPQVEDEAIRDLCRAREDAIRDLKAAKFRLKAFLLRHDIRYTGRATWGPAHLRWLSEVVCPTPARQIVFQEYIRAVNEHTERLARLEQELTDQVQTWRLAPVVEALQALRGVQFTVAVTIVAELGDLTRFDKPSQLMSYLGLTPSEYSTGDHRRQGAITKTGNAHARRALIEGAWAYRYPAKVSRHLQLRLEKVPKAIQDISWKAQVRLCKRYRQLSARGKHANRVVVAIARELSAFMWAIAHQGACDPIASGYLVTLQRTDNHVDSPSEEAQPRFGAILVGVMRLQETLGPK

SEQ ID NO: 342424 - protein, 417 aa, unidentified
MYYLGIDVSKKKSDYLILDEKGERVQRAFSLENTREGFETLARKLAEFNLTPENLLSGMEATGSFWENLYSFLTEKGYKVVLLNPYQTKKFHQALGQKATTDPLSALVIADLLRSNRYLSSYIPEEMVESLRELVKLQFHLEEEKKRLSRRILALVSVVFPEYEKTALKNILSLASRKILENWPTAKDLSQAKPRQIEKVVRSIKGNNFNLSEIEKLIETAKNSIYSGRVREVRSFTIRLLLAQLEKTLSCLEKVKVEIDKILSPKDEGGSPPGSNLLSAPAIGKNTLAVFLSVAGSKGTAFPSAKKLIGHIGFFPQIYESGETRKDNIIARRGPNYVRKALYLAAVSSLRHNREMRTLYNRKISQGKTSKQALIYVAKKLAQMMLSMLKSGQSYRPERVFVSPTALPHFQEASPAF

SEQ ID NO: 342425 - protein, 343 aa, unidentified
MQSISTIGLDIAKSVFQVHGVDATGQVVVRGQLKRRHVLGVFTKLQPCLIGIEACASSHHWARELQAVGHIVRLIPPAYVKPYVKRQKNDAADAEAICEAVTRPNMRFVPIKTIEQQGCLVLHRTRHLLIRQQTATINSIRAHLAEFGIVAPVGRRGVEQLLGVIADANDIRVPEVARACVAILGVQLKQLKAQILELDRRILAWHRSSEARRRLNHIPGVGPLLATALVASIAEPKVFRSGRDFSAWIGLVPKQNSSGGKEKLGSISKRGDRYLRSLFTAGALAVIRYAKIHGTKHRPWLVALLARRPTKVAAIALANKLARIAWALMTKGSRYRQPAALMV

SEQ ID NO: 342426 - protein, 326 aa, unidentified
MQVKAVSKKRTDDKSTAGIDVSQEWLDVHVLPAGQSLRVANTEVGIRQLKRLLLSLGTDLAIVEPTGRWHRLVQRSLHADGIVVAEVNPFRVRSFARAEGVLAKNDRLDAKVLAMFGVSMSPTARPPRSESLQELDELVCARSSAVAERTSLENQKATATTRFLLLQLRQRIAHISKVIDGLEEEIQRRIKAEPVLLRKFQILMSIPGIGVVTAMTLVVRLNELGTISSKAIAKIVGVAPLDWDSGKMKGLRRIFGGRKDVRRVAYMAALSASQFNPSLKAYFERLTDNGKSFKQAIVAVIRKLVILANTLVAEDRLWEKEAPKAA

SEQ ID NO: 342427 - protein, 469 aa, unidentified
MSLTLGAALGPCIVAASTRARFFSVPAGSPGSHVVVRRGERIDVEETEEPVELVERVCALDIGKASVTACVRAPHDDKPGRRRQEVREYATLARGLLELADWLRSQSVTLVAMEATSSYWKPLFYLLEAEGFTCWLLNAKHVKNVPGRPKTDRLDAVWLAKVVERGMCRPSLVHPKPIRHLRDLTRYRRSLIRERTREKQRVEQLLEDAQIKLSSVISDIFGVSGRQMLQALIAGQRNPKALAQLARASMRSKIATLEEALTGHFDDHHGFLCQLMLERIDATTAKIDQVTAQIDQVIAPYAHQVAQLDAICGVGVVAAQELIAEIGVQMGRFATAAHLVSWAKFAPIDHQSAGTKKRGATGRGNPWLAGTLGEIVAALARTDTFLGERYRRLARRRGKHRAIVAVGNSVLTIVWHLLADPQARYQDLGPDFYWSKVNQRRRERDLVRQLEHLTGKQVILQPPPEQPAA

SEQ ID NO: 342428 - protein, 393 aa, unidentified
MLACGSEIGNNLGAAVSGSERSEEPETAAAGVRSLHPGSDCETVQEPGRHRSFGKSPNSRLSRGGDTSSSHLQGRDTSKMSFECFIGIDVAKAKLDVAFNASSKVHQVTNDPQGHRELIQLLPKPGQCLIVLEATGVYERAIVLALVDAKHIVSVVNPRQIRDYARAVGKLAKTDQIDARVIADYGEKVRPRALDKTTEKQAEMNALVARRRQLIQSRTSEKNRQLQADSKIIRKSVQRILDSLNKEIRRIEIEIQSLVKSDDDWRQKLELLKSAPGVGDVTSATLIAELPELGKLNRKQITALVGVAPLNRDSGNKRGQRTIFGGRASVRAALYMATLTAKKHNPVIAHFATRLLNAGKSPKVVLVACMRKLLTILNVMIRNNSPWQNTKTA

SEQ ID NO: 342429 - protein, 408 aa, unidentified
MIVNTESLIIGVDIGKYHHRVVGLRPDGFFTKPVKITNDLNGYRELLELIAEWKKECKTEKVMVGMESTGHYWEIPARWLIEKGVTVVQGNAVHTKRAKELEDNTPGKTDQKDARIIAGLIRYGKYCSCMLPEGTYAEIRELISIRQRLIGELTEKRNYLRRLLDTVFPEIFILFKKSDSKTLLHLLTEYPLPDDIVSAGAQKIKTTLQQKRQNLVTKRVQTLWSLARDTVGIGVGHLSYRMAIRTTVARILGLKESLSEIEGDLTSLLSRIPEAPYILSLKGLGIVSAAIIIGETGGLSRFGYAEELLKLAGINLYEISSGTHKGKIRISKRGRPVLRQGLFLAATVMVKKMPFHEKYSRLRNRGMETIKALTAISRKVCRLAFALASDKRLFTQEAPDRIQKQKAA

SEQ ID NO: 342430 - protein, 333 aa, unidentified
MRLEPCRRRQGRVSFRQRLDEPEAETAVLQRLRRWKTAGQFVVEAQGLNRWFVNACQASGLRIIVAHPATLNLKRSGKKTDRRDAYELARRLWLGDIEKHARTYYPADEEYGKRKVVRIRHKCVALRQHVINQLRGLFGAYRLPAPQTVLYTPTSIAKLERVEFPTPELTVCVQTLVAALKALQQAIASLTRQIPQCAEAPRVAALKEQLPSVGAQTALTLDAELGDLKRFGNAKQLCAYAGLVLRVADSADRQSHGPLTKSGNTEVRWIVGQWALRLLASNPEVQAWATRRARRLHTNKARVALERRLLVGIYVSQRKGEPLSLQRCLAMGV

SEQ ID NO: 342431 - protein, 478 aa, unidentified
MATERNAQSEKAQTVRFSKKLEISNPYCAGLDLHKETIWACTGPFKDGLAPEVVTFPTHTEGLQKLVKHLKERHITSVAMESTGVYWLMPYLTLLDANLDPCLVNPGDIKNIKGRPKSDRADSVWICRLHSYGFLRASFIPPPTILNLRNLCGTRNKLIVQAGSAIQRMNNELVKMNIRLDNVVSDINGKSGVLVTEAIIRGEQSPEALYDLLATRIKNKGKSKIIPYLTGRRDEFSLFNLETWHIHHKSIEQNIERVNEKIFQILQSLPKKASTSHLPPAQKNYKEDYLDFPYPLRPLFYEIFGVDLTQLPGVGAELLLSLVSTVGTDLSPWQDASHFVSWLALAPVNRESAGYRKSGKTKRTGNPLANAFKMSAMAARRTTTYLGQTAQRLSNRITPKKAKVAIARKLAEIVYNIIRHGMPVYVKTLEEYESRRKKREIQHFVKSLNKFSSGDGFIPEVIEEIQRHNAKFTSTVTI

SEQ ID NO: 342432 - protein, 355 aa, unidentified
MTHIIYAPSDFDIFVGIDDAKNNLSFTVMDHNTFTLSKTIPSNPENVYNYMQRRFPGKRALYAYEAGPTGFRLYDFLAAKGARCIVTSPLSLLKASNQKVKNNRIDSVKITEQLRSGSLQSIRVPEDSYRELRHLIHLRENYAQNQRTAKQRIKSLLLYTGLYTSLPDIDMRWSNQYIKLLDELSCQGAVRGKLNMLLMDLNYARNQTLSVLKQLRVFCQTHAEVNTYREYLQSIPGIGFITSLTILARIGNPVNLRNPRELSAFSGLVPIERSTGDNIKYGPITHLGNPMLRSLLVESAWVAIRSDTELRQFYDRIKNRHHPSIGAKKAIVAVARKLTQRIYCVLKEKRPYTAH

SEQ ID NO: 342433 - protein, 355 aa, unidentified
MQGQISSKNYELLDVYVGIDVHKKNWKVCVLGPTYEFKTFSQDPNAEQLYEYLNRHFPKGNIKAVYEAGFCGFNLARELLSLGIDCVVVNPADVPTQHKERDQKSDKIDARKLATSLRGGLLQGINIPEEVQRADYSLVLQRKTLVRDITRWKNRVKSYLDFTGIPLGVTEMQSRHWSKNYIEWLKGLQVGEHHKRVLNNYVEIGVKLREHLKQVNKQIRELSRTTRYGKDVELLLSIPGIGPVSAMLILTKIGSIHRFKTSDQFRSFVGIAPSTRSSGEKEVTVGLTSRGTRELREVIIEASWTVVRTDPSMMLKFEGLVKRMNKNKAIIRIARSLLNRIRTVLKNQTPYTLGI

SEQ ID NO: 342434 - protein, 456 aa, unidentified
MKTMNMNFKHNQLTLCFVADVHSQKHHFLVSIKETRTILKEFIVENSTTGFIQFITLVKLFSAKFRTQNVIFAFEPTSVYWMNFAYAFYQDISTSFLNKQILFVSPEIVAYQRKVDDPAGNKDDHKDPLTISKLVWDNKTSKAILLPEKIFNLRELTRQRNSLVKIRSSLKTQLRNKIIIIFPELLNIFSDILGASARYIISNFTTPENITKLPIQTFTQFLLKISKKKLSTHKIELLYSYAQSSLGIKGNKNGLISNIKYILEQIELYDKLISQIENEIEYYLKSIPQTLTQIKGISTILAASIIAEIFPISRFSNSSQLVKYAGIDPTHSTFGISLKKLSYIAKKGDVYLRLLIIQTAFSCINHNQYIKRYYTNLINYGHKPKRVAIVAVANKLLRIIFNLLKYNIKFDPSKIGMGPKKIVEVVPFKFKQNNFHSLEKAKTKFLLKEKASEKLF

SEQ ID NO: 342435 - protein, 346 aa, unidentified
MKYFAGLDVSLEETAICVVDEAGAMVREARIPSEPEALVAFFQGLGLVMERIGLEACSLSAWLHESLVAAGLPAVCIETRRAKAAMGAMPNKTDRNDARGLAQIIRTGWYRAVHVKSPACRSWRALLTARRLLLNKMRDLENGLRALLREAGLKLGTPTRKEFAARVRELTAADPVLSVLAEPLLTIIAAMTHELAQLTKRVLDIVREEPVCRRLMGVPGVGPLTALTFRATIDQPERFRHSRDVGAHLGLTPKRYQSGETDVQGAISRCGDELARTALYEAAHSLLVRSRRWSALRAWGMQVAKRRGMARARIAVARKLATILHRMWADGTEFRWGKEAPMPAAA

SEQ ID NO: 342436 - protein, 382 aa, unidentified
MHQTRRSAVHPPGRRVPSPDLGRETAITTIAHPESARVTVGVDTHGEVHVASARDQLGRRVAITLVPTSPAGYQHLLDWARQLGEVAAFGIEGTGSYGAALARFLRANGQQVFEVNRPDRATRRRKGKSDPLDADAAARAVQAGDAAGLPKAGTGTVEMLRVLRVARQSALKARTQATNALRALLVTAPAELREQLRGLSKTALPRTAAALDPGKLTSPTAATMLALRTLGQRHAALSAELTALEAEINRLVARHAAPLLALFGVGPDSASALLVAAGDNPERLCSEAAFAALCGVSPVQASSGKTRRHRLNRGGDRQANAALYRIVLVRLRWHQPTKDYMARRVAEGKTTKEVIRCLKRYLAREVFAVLTQTGQTNHSDAA

SEQ ID NO: 342437 - protein, 462 aa, unidentified
MSKTKRPATLENLAVVHPNAAGLDIGAREIWACVPPGRDVETVKRFNTFTPDLQALADWLVACGVDTGAMESTGVYWIPVFELLEARGLKVYLVNSWHLKHVPGRKSDYLDCQWIQKLHSLGLWNGSFRPDGEMVTLRGYLRHRAQLLEHRAPHVLHMQKALQQMNLQLHHVLSDITGETGLKILRAIVAGERNPVKLAQFRNPACKSSEETIAQALTGSWKAEHLFTLRQSLELYDFYTQQVTACDAEIEKQFAAMKPRWDGPEEPPDVPRVKPGSKSKNQPKLNVRREIIRLTGVDLVAVEGISASLAQTILSETGTDMSKWPSDKHFGSWLGLAPHNDISGGKVLRSRTLKTHNRAGQAFRQAAASVIRSGSAFGAYYRRKRGQLGPMQALVATAHKIARTVYYMLKNRVQYHDIGAEAYEQKQKEREVAYLKKKAAKLGFDLLSHDSTAAIARAVAMV

SEQ ID NO: 342438 - protein, 312 aa, unidentified
MRIVGIDVSKDKIDAAIVAASAHRSFANGEQDQMLSWLGEHNVEKAVMEATGGYERPWAKLLQKDGIAVQIVDPRRVRHYAQAAGQRAKNDRLDAEVIALFGETFADAPGQLHDEDGSELDQLVGGRARLKAMAWQLGTWTEHAPPQEIAEAYEAVAALLEQRVERLDKTIAGKIEQTEHFAERAAIIESVPGLGPGSAAGLIAWLPELGLVDNKAIAALVGVAPYDNDSGKHHGPRSIRGGRAKLRQLLYLPTVGAATRHNPVLKAHYQRLIDNGKNPKVALIACMRKLIVILNTMIARGEKWDPTKHTGP

SEQ ID NO: 342439 - protein, 340 aa, unidentified
MVHVGVDLHKRTSQIAVLTEHGELMRHRLINDVERMRRFFAELPPKTPVAIEASGTWWWLVDLLESLGHHPVLSHPKQTKAIASARLKNDRVDADRLVLLLRGDLLPTVWIPPAALREARELIRHRVQLAWVRGEIRNRVAALFARRNVQPTAGKSWFTTRGAQELEHLPLAHIPHRVREDSVALLRLLDAQIRQLDVEITQQWGSDPRVQRLCTIPGIGPFIAIVLVLELGHIHRFPHAKQVASYVGLTPRIRASADRIRTSHISKEGNSLLRWVLGLAATQAARRPGPLRAWFYAVRKRRGKKVARVALARRLAEIVYHVWKQECDFFTVVRHGVVRG

SEQ ID NO: 342440 - protein, 342 aa, unidentified
MQGRFMMSMKSANNELDKHYVHFVGIDVAKKSFVLATSLSPKTKNYDNTAQGIDQAICFIKEEHKQCDNGKTLVVLESTGGLEVPLAKAIHLAGICVMIANPRQTHQFAKSQSLTKTDNKDAKMLAFYAKMMAQRDDLATLLYCPPSQSQELLTALINRRNQFVQMCVAEKNRLEQSHHSQISSIQAHITYLTEQIHELDKQIKTHLDDDNHPDLKQTSSVIQSVKGVGQTTTATLLAMLPELGTISHKQLASLVGVAPHPKQSGETKFKGLCQAGRPEVRKALYMATLVATRFDEKIKTFYQRLRANGKPFKVAIVACMHKLLTILNARVRDELQKQVVVR

SEQ ID NO: 342441 - protein, 410 aa, unidentified
MGYETLIRRAHVMTRKNTLKFLPTDTEFRVVGLDLAKSDVSVAAIPVDDNTPSLVDRMTYADLLDWAGKISPTLFAMEPCNGYSLLCLQLENLGHEIKVISGSTVSMWINTHLSGQKTDLNDAIALARLAVSDAELTPIRHKSITEIRIQTVQAVRQQLMSQRSKSIVSFKALAQQWGIPCAAGHRNLKKLRESIEAKVDLITRPVANAMLFLLDAVKSLDRQIGQLNQTLQELVMSDERGRLLQSVLGVGTQISARVITVVGNIERFNSPRSLVAYVGVAPRNFITGHKNLTKKKHGNCPDLSHKGQGKISRRGDKLLRSLFIQGAACLYMQFCKDQLPECQLKRWILKQLASQKPYGKLIVSLAAKLIRIVWAVLTYGEKFNIQKAGMTRSMWSEMALETPLNKEVPA

SEQ ID NO: 342442 - protein, 357 aa, unidentified
MGKSIQKLSCVTRVGLDLAKKVFQLHGVDANGEIVVARKLARGRLVGFFSELPRCVVAMEACSSAHHWGRQLLALGFEVRLIPPAHVKPYVRRNKNDTVDAAAICEAAGRPGQRFVPVRSIENQAELMRHRARELLAGQRTAALNALRGHLAEIGVIAPQGVQHAYDLKRLAVDGFDEYGEVVVPDCARVALRPLVSQIDALDEAIGAIDNEIAMSVKADETAKRLMTVPGVGPVTASAIVATIQDMGDFASGREFAAFLGLTPRQSSTGGKARLGRITKMGDRYLRKLLVVGACATLSHRKGHNDALRLWASGMLERKTVKYKFKLTAVALANKVARIVFVLMTRGGQYDDRPVAA

SEQ ID NO: 342443 - protein, 458 aa, unidentified
MSQAKRPRGRQELSPVHPNAAAIDIGATMHVAAVGPDCDEQPVRTFQTFTADLHRLADWFAQCGVKTVVMESTGVYWIPIYEILEQRGFKVMLVNARDAKHVPGRKTDVSDAQWLQRLHEYGLLRPSFRPQAEMAGLRAYLRQRERLLDYAAAHIQHMQKALTQMNLQLHHVVSDITGVTGMRIIRAIVAGERDPAILASYRDVRCHASVETVRQALVGNDREEHIFALTQALELYDVYQAKVAACDGQIEAVLARLKQSAVPPTEKLPAARHKTRQPNGPAFEVRGALHAILGVDLTQIHGLGPYLALKLVGECGTNLSAWPTAKHFTSWLGLAPHNKISGGKVLSSKTRRTSNRAATLLRLAAITVGRTDTALGAFYRRLSGRVGKAKAVTATARKIAVLFYNTLRHGMSYADPGASYYEDRYRQRVLGNLQRRAKSMGFVLQQQAEPAGAQAGVS

SEQ ID NO: 342444 - protein, 342 aa, unidentified
MYYIGLDVHKKSISYCVKDASGQIHQQGKAGATRWELDIWMKTLPQPWTAAMEATIFTGWIYDYLKPHAAGVKVAHPLMLRAIAASKKKNDRIDASKIADCLRCDFLPECYMDSTEIRERRRTLRYRSLLVRQVVQLKTRAASLLMETGVSYDRQHLHRLGFIPELLARKDAIDQSIRPLLRVSHDSILRLRHIETALIRSLQRDPLLTERVRRLQTIPAVGKITALTWALEMGDIARFPSIRQAISYCGLCGDEQKSADKTVRTPLSKKRNKHIQHVLVEAAKLAPRYDPDLALLYAREKQKGNANRATLAVARKLLAYLLAVDREKRDFVPIREFSSTAA

SEQ ID NO: 342445 - protein, 425 aa, unidentified
MKIQTIHSKTISDNKLVVAFDVGKEKLHAYCEYDRHCFKDSFANSTLMIEQKLITFSGIAESSGYEGLRIIAEPTGVYHHKLFRTARRLGHQTALVNPESVHKFKVVESNDAGKSDEKDPRVISLLAKYGKTLIDRNIRDEYLLLRQLNAMYIDEEKAYVSTRCKIHCIIVELFCDYSFNNEYLYTNVGRIFMKKYHANPYRIVQKGYSVFYQRMKKAASRIRRTTIQRLWQDAQSSVRHQLPADYVQVMESRLNYLWEELLLRENRMGEIESAMTSILDELHTKDSNIPKPVKGVITKFRIAQILAETGPLSDFDSIEQLMRYAGLNIRERKSGYYTGNNQISKKGRSDLRRVLGYIVLPIVKKKSLYGKVYHAKKNSGMSGNKAMVAMMRKFLRMFYGWYKSRLPFDKNRVFIDESNYVNINR

SEQ ID NO: 342446 - protein, 336 aa, unidentified
MRYIGVDLHTTQITVCYLTEKEEHTIEKYQLCEIERFASGLSPSDEIAVEATGNTRWFVEQVRQMCSRVVLVNPRQFDVVKNSVKKTDRNDAINLAIFLKADMLPEVRVKKEEADKVQSLVGTRTKLVRLKTSLINKIHALSVSNGRKLRKTSLAWEKGLEKVLEEEWTQIERIELDIIIEQIRSLKAGIKKLDTAIAAESEKLAGYRNLVSISGIGSLSAGILLSVIGDASDFANADKLASYFGIVPRVSNSNETVNHGRITKHGNKTGRTTLVQCSLAAIKKNDYLRRYYEQVKTRRGHGKAKIALARKYLKIIYSTLTNNWVFADFNNFELAE

SEQ ID NO: 342447 - protein, 351 aa, unidentified
MLIIGCDFHTRFQQIAMLDPTTGELVERRLEHETEEAEKFYASLPGPARVGVEATIGAQWFENVLSRYGHELWVGDAAEISAARVRKQKTDSRDALHILDLLVTNRFPRIWVPSPSERDVRQLLRHRHKLVRYRTSVMNQLHGLAMSQGLCRKKKLWSQRGRRELEALQLDPWASRRRQELLRLLDQLNPWIEDLDRAVQKEAERRPEAMHLMKQPGVGPITALAFVLTIGPVSRFQRSKQVVSYLGLNPREESSGGKQRLGSISKQGNSMLRYLLVQAAQTASQSDPELRRYYQRLKFRRGFSGVAKVAIARKLAVRLYWKLREAAQSFPPARMQGSPSYPMVDASPSIS

SEQ ID NO: 342448 - protein, 333 aa, unidentified
MNHLIRIGIDTSKSVFVLHGVNAAEQPVLQKKLRRRQVIPFFAEMPATQIGIEACGASHYWARELMALGHQVRLLPPQYVKPYVQRGKNDMADASAICEAMSRPRMRFVPVKSVEQQAALMLVGVRDQLVARRTQLSNMIRGYAAEFGLSAARGFDKIEPLLARLTQESGLPALAKALFAALATEYAELKPKLRKIEAELLSWHRQNELSRRLAEIPAIGPIGASLLAMKVTDPHAFRRARDLAAWLGLTPKDHSTAGKQRLGVITRAGDEMLRRVLVAGATVVIQQVSKGRAPASPWLAALIRRKPPKAAAVALAKQDGAHCLETDGQRRAL

SEQ ID NO: 342449 - protein, 342 aa, unidentified
MYYIGLDVHKKTISYCVKDVSGQVHREGQIGATRRELDGWMKTLPQPWTAAMEATIFTGWIYDHLLPHARQVKVAHPLMLRAIAAAKKKNDRIDAGKIADCLRCDFLPECHMASTSIRERRRTLRYRHLLVRQMVQMKNRISGLLMETGVSYNKQRLHKVRYFRELLTTNEEVNESIRPLLRVSRDSIVRLQKTEYALVSSLQRDPLLAERIRRLRTVPGVGPITALTWALEMGEVSRFPSIREAISYCGLCGDEKSSADKMTRTPLSKQRNKHIQRVLVEAAKLAPRQDHDLALVYETAKQKGNGNRATLAVARKMVAYLLAVDRGQRDFVPAEAHRSAAA

SEQ ID NO: 342450 - protein, 429 aa, unidentified
MNYTQNEKIEQVTDSTMVVGVDIGSQIHYARAFDNRGRELTKRVFSFHNDLEGFNSFNLWAETLKTENKKTAVLIGCEPTGHYWFAFAKYVNDHQKRLVMVNPFSVKKIKELDDNSPKKTDSKDPKTIAKLVVDGRYSIPYMPEGIYAEIRDLVYSRDRIMKQHNISANRIQRWLAIHFPEYLGLYTRFDTISGLAVLEKAPLPKDVIALGVNGIRKIWHDKKMRGRGVTEDRAKTLVEAAHNSVGLDGGIGTKSELYMLLEEHRLWTSQLEAVNKVLEEMILKVPHVEKLLAIKGVGSITIAGFIAEVGDIRRFDSPKQIQKYAGLELVENSSGKHKGRTRISKRGRRKLRKILYQVMVPLLARNKEFRGIYDYYVTRVKNPLKRRQAMVAVSCKLIRVFYAVLTKGVEYDRFKMMSDIHRKSDIIAA

SEQ ID NO: 342451 - protein, 345 aa, unidentified
MELQTIGIDLGKTVFHLVGLNRCGEVVVRKKFSRKQLLHFTANLQVELIGMEACGGAHFLGRALQEQGHAVRLMPAQYVKPYVKTNKSDYIDAEAIAEAVTRPRMRFVPIKSDDQLDLQSLHRVRERWVMRRTAVVNQIRGLLLERGITIRKGRCHVDAALPGILEDASTKLSGALRLLLAQLRLELDHLQTRIDEADAVIQQTAGENEACRRLVAIPGVGPVTATAIIAAIGNGAAFRKGREFSAWLGMVPGEYTTGGKQKLLGISKRGNAYLRRLFVQGARAVLQQSAKQSSGLSAWLTQLTARTHPNVAAVALANKLARMAWAVLAKNEPYRPPVLADAATD

SEQ ID NO: 342452 - protein, 366 aa, unidentified
MKKIITVAENRNEISKQQQLTIGVDVGDQISHYCILDEIGNVILERSVPTTPKGIQQVFSKISRCRIALESGTHSPWLSRLLTQLGHEVIVAHARNVQLITESTRKDDRLDAQTLARLARIDPELLGPVRHRSAQAQIHLTAIRARATLVSARTALVNAARGLTKSYGERLRKCGSGQMSRAIAKELSPQLRDTLEPLLKEIESLNDRIDEYDRRIEQIATEVYPEVALLKQVKGVGTLIALTYILTLDDPHRFRRSRDAGCFLGLRPGRRNSGMSEPQMHISKEGDAYLRTLMVQGAHYILGPFGQDSDLRRWGLKLAERGGKNAKKRAVIAVARKLAVLLHKLWVSAEVYEPLRNNHKVVSAVA

SEQ ID NO: 342453 - protein, 428 aa, unidentified
MKNRNTQKLEAITPGTLIVGVDIAKETQWAQFVNYRGLELRKFLKFKNHKNGFDSILASIEAICKNRRLDNIIVGMEPTGHYWKPLANYLLKNKVNVVMVNPYHTKRAKELDDNSQTKSDKKDALTIARLVRDGRYYEVYMPQDIFAELRVLSNSRISLMKRSNALKNTITAVMDEYFPEIVTVFKHPLKGKAAMQILKSCPFPSLILELGIDGVLVEIKKAVKKTVGRKKASQLVKTAKSSIGVGYGLVSVKLKLGLMIEELELLTKQLKQLEKAMEKALTDTGHDELILSIPGTGVVTAASFLGEIGDPMRFDHPRQICKMAGYNLIENSSGKNKSRTVISKRGRKNLRSILYQMAITMVAVNHEMKELYRYLKTRPHNSLKKKQALVVISKKIITVIYNLIKKQTEYRAELVLGEFRKNQIKQAA

SEQ ID NO: 342454 - protein, 368 aa, unidentified
MQELITGFVGLDAHAESTAIAVAEAGRAAPRFVGSVGARLAELTKALSKLGAPQSLCVVYEAGPCGYVLARELTSLGYRCEVVAPSRIPRRPGERIKTDRRDALNLASLARAGELVPVTIPDERDEAIRDLSRARVDAVRARLKARQQLKALMLRHGQRYSGKTSWSAAHERYLARVSFAHPAQDIAFTEYRQAVGEGEARVQRLRESLTREVEHWRMHSLVSAVMTLRGLDLVAATTVVAELGDLRRFAHPRDLMGYLGLVPSEHTTGSKRRLGAITKTGNGHVRRVLIEAAWNYRFPARISPALQMRQERQPPDIRAIAWRAQLRLNHRYRRLKARGLHHNKICVALARELAAFVWDIGRHVAPSP

SEQ ID NO: 342455 - protein, 458 aa, unidentified
MSRKGQRTKGLEKVHPFQGMSRVNPNAAGVDIGAVEIVACVSGDDDTTQLVRAFGNYTVDLQALGSWLKNYGVKTVAMESTGVYWIPLFEELEREGFECLLISSRSMRRVRGRKSDITDAQWIQTLHSYGLLESSFRPQAELIALRTLLRHRAQLIEHRAPHIQHMQKSLLQMNIQLSQAVSDITGVSGLRIITAMLNGERSPEKLADMREPGCKNSAEEIGKALTGTWREEHLFILKQSLEMYAFYSGQIAACDEEIEQTYSGLRMENDPGELQPLSRRKRNSHSKNKPANAEEIRQHLKRISGVDLSVVDGFGVSLAQTVIAEVGTDMSKFPSEKHFCSWLGLAPKHEISGGKVLKNNTLKTKNRAGQAFRMAAHSVKQSDCVFGVMYRRMRARLGPAQATVATAHALARVVYRMLKYKVEYETISVEEYEKKYQEQQLKYMQKKAAKLGYQLIPA

SEQ ID NO: 342456 - protein, 353 aa, unidentified
MFKIFRKNCCGLDVHKTWIYACIGITDTNGLTEYKQARFSSFSKGLKELAEWLAKYSCTEVCMESSGKYWIPVFNILEKICFVTLAHPKYTKPQKGNKTDRKDAKWICDLFMCDMIKPSFIPSPEIRQLRNLIRYRTKLTNMLTSEKNRAQNCLTVSNLKLDDVFSDVFGKSSRSITNYMLDHPGETFDVAPFVDLLYTLPGLDKNPMTAIAILSEINPDMSVFPSSQNLVSWAGCCPRNDQSACKVKSTRISRAGCYLKPLLVQVANALIKSKKHPEFKERYHRIKSHRGHKKAIIAVYKMLLTAIWNMLSKLEPYNPDGFLEHRPINEKKILTRSQALELFRLSGYTITDD

SEQ ID NO: 342457 - protein, 422 aa, unidentified
MNTERIDSGEIAAFVGIDWADGEHEVCLMVADGGPPERSCLKQSPEALSEWAHALRDRFGGRKIAVAIEQRKGPLIYALMSYEWLVLYPVNPKSLARYREAFSVSNAKCDQTDAELLMEMVRSHRDRLRVWLPEDEDTRLLQMLVEERRRVVDQVTRLTNRLTSVLKEYYPQALEWAGELKSEQALDFLSKWPTLEDLKRARAATVEKFYHQHGVRNKEKLQGRLAGIGAARHLTRDRAVVRASTMKMRVTVEQLRVLLKATREFDVQIEELFEQHPDASLFKSFPCAGKVLAPRLASAFGTDRQRWDDAAEVQKFSGIAPVTRASGQTRVVEKRRACPKFLRQTFMEYAAQSVKKSLWARCYYKAMRAKGVKHRAALRALAYKWIRIMFRCWKERIAYSEEAHQAALVRANSPLASRLAGA

SEQ ID NO: 342458 - protein, 340 aa, unidentified
MSKRSVAGQAVMFCGIDVSAATLAAAVQPESQEGFQQREFANSATGHKALIAWLYKLGATARVSLEATGIYSLDLALALDGAEGIEVAVLNPRRVHQFAQTLGRSKTDRADALALAEYSRRMPFVGWRRPNRGALELRALSRYIATLTEEHARLHNRLHAAEGSRTTPRCVREDLKRSMSGLRKRLLRLRRQAVSLIGQDPELERKFRSLTGITGIAETSAVQLLGELASLDPEMSVRQWVAHSGLDPAHRISGASVHLPSRISRHGNRYLRRALYMPALVGVRFDRHMKAFYQQLQTRHKTKLQALMAVARKLLHAIFGIFKTNTPYDGSKLFPTLLPI

SEQ ID NO: 342459 - protein, 323 aa, unidentified
MGAVVNQTQSSCASALFVGIDVGGEFLDLAFHGSNECSRVPNSPDGIASLLDTLRPLKPQLIVLEATGKLERAVLEALCQAGLPAVAVNPKRVRDFAKSTGTQAKTDRIDARVIAHYAALIKPEVRPLSDEQTQQLQAFILRRTQLIHMLTSEQNRRKRAHKSSWRSIDEHIQFLKQRIKDADRDIDAFMNANELWRKTETLLRSMPGIGRGTAAALIAFLPELGTLGRREIASLVGLAPFNADSGKQKGQRHIMGGRSTVRRALYMACVAAQRANPDIKAFCDRLRANGKKTKVAFVAAMRKLLTQLNAMMRDELPWQPPKA

SEQ ID NO: 342460 - protein, 374 aa, unidentified
MEEYTRFVGIDQHKNSLSIAVAYAGRDKEEYLGRVPNDPAVIARWIRRQGLVWGGLSKTLWCYEAGPCGFGLHRQLTRMKLDCQVVAPGLTPRKPTERVKTDRRDAEKLARLLRSGDLTPVWVPDEEHEALRDLVRARETARDDLARQRHRLQKFLLRQGVHCPEGINAWTGRYEGWLNTVKFGWVTHQEVWAEQRQAIREAEGRLARLSKALEEAIESSRWRPVVESLQCLRGIKVVTAATLVVELGERAEFCGPEQLMSYSGLVPGEDSSGEKIRRSGITKAGNAHVRRVLVEAAWHYRHRPAVGQVLKRRQQGQPVEVLEISWRAQQRLHTRYRKLLGRGKDKNKVVVAVARELLAFVWEIMQVVPMSTSV

SEQ ID NO: 342461 - protein, 343 aa, unidentified
MQGVTTIGLDIAKSVFQVHGIDAEGTVIIRRQLKRRYVLAFFRKLPPCLVGLEACASSHHWSRELKTLGHTVRLMPPAYVKPYVKRQKNDAADAEAICEAVMRPTMRFVETKTPEQQSCLMLHRTRHLFIRQQTAVINAIRAHLAEFGIVAPVGRNGVEQLLDVVADPSDERVPEVARACLAALGAQLRMLKAQILAFDRKIMAWHRSHETSKRLDEIPGIGPALATALVASVADPKAFRSGRDFSAWIGLVPKQSSSGGKEKLGSISKQGDRYLRSLFTAGALAVIRYAKIHGSKHRPWLTALLARRPTKVAAIALANKIARIAWAMMARGERYKEPAALAA

SEQ ID NO: 342462 - protein, 361 aa, unidentified
MRKSTNAELSFKDIDVFVGLDVHKKSWKVTIRSMGLEIETYSMSPSAERLAQHLKTIYPGGIYHSAYEAGFCGFWIHAALLKRQINNMVIHAADVPTTNKEKVTKTDKIDSRKIAKCLENGSLNPLYVPSVNEQQLRSLVRLRSKMMGHQTRLKNRIKGHLHFYGIELDDERAAQYWSGAFIAELETLAEAPNAAGTYMRLCLSELRDQRCRLVKITLELRLLCRNPAYADTMHYLLSVPGVGFVTAVTLLTELIDIDRFKGLDELCAYVGMVPSEHSSGDKTRRGGLSPRKNRHLKHLIIESAWVAMRRDPELTQTFARLTTRMKKTDAIIRICKKLLNRIRYVWKNQTPYQIQASSQVA

SEQ ID NO: 342463 - protein, 405 aa, unidentified
MSLFAGLDWGSTGHAVCVLDERGALVLRLEVRHDAAGLAELALRLRRLVPPGELAVAIERPSGLVVETLLAAGHPVVPIHPNIVKACRPRYRAAGAKSDPGDAFMLADILRTDGHRFAPLTPVSDAIKALRAMVRGRDDLVATRVGLANQLRSLLEGFWPGAGLIFADVDSPIALAFLARYPTPESACRLGLRRLAAFLAQHRYCGRRSPEDLLARLRAAPRGFAGAAEADAKGEVVRALVRALETIVAALRELSSRIEHAVEDLPDGRIVMSFPRAGRICAAAILAELGDVRERFQTDAQLAAEAGVSPVTHASGKSRGVLFRWACNHRLRAAVTCWADNSRHASPWADDVYRRARARGCDHPHAIRVLARAWLRVLWRAWTDRKPYDPTHHAAAQNILSPVGG

SEQ ID NO: 342464 - protein, 367 aa, unidentified
MNMLFIGLDVHKETISIAVAEEGRNGEVRSQGTIENKPANVDKLIKRLAKPECELHFCYEAGCCGYGLYHQIKAAGHLCTVIVPSLIPRKPGERVKTDRRDAMKMARLLRAGELESVWVPEPAHEAMRDLVRARAVAMEHSKKSKQQMQSFLLRHGITYDGIKYWGRQHFSWLSNIKFNHPAHQIVFQDYINAIHDSEQRHAQLVEQIENLIPEWSMKPLVDALCVMKGINMIAATTILATTGDLRRFPTPTKLSAYFGLVPTEHSSGNNVRRFGITKTGNTEARRVLIQSAWCYRFPARVTKQKEKVRAAVEKNIRDIAWRAQVRLCARYRRLVACGKRAPVACTAVARELTTFIWEMGQVVMINH

SEQ ID NO: 342465 - protein, 356 aa, unidentified
MSEGSWVGLDVHARSVVAGVIDQGSGEVRSLRVPPGNEGTVAWLKTLPTPVRVVYEAGPTGYRLARACAGAGISCVVAAPSRIRPAADRVKTDRRDAERLARLLRLGEITPVRVPGPEEEAARDLVRAREDARGDLMRARHRLSKLLLRHGMVYDATAWTRAHDAWLRRQRFQGGPLAVVFDECYGRMLDAKTRRDALDRAITELAGAPPYVDVVERLVCLRGVSTLTAFALTVELGDWNRFRPTSLGAFLGLTPSENSSGERRRQGAITKAGNSHARRLLVEAAWHQRRPPRLSVTLERRRTGKSLAVRAQADRSARRLHGRWHALERRGKPRTIVVVAVARELAGHCWALATME

SEQ ID NO: 342466 - protein, 358 aa, unidentified
MNSVGLDVHKTRCVACVKTQEGRIVEEFAFQNTPHGHEELITHLKAYPETQVAIESTGNLWIPIYNRLEDEHIHTVLTNPKKTRLIAEAKIKTDKLDARILADLLRANLLSASYVPPPEIREQRSIIRERARLTQLRTIIKNRIHTLLDKHAYKSPFTDLFGKHGLEWLAKLELPAGDRILLEVNLEQLNSLNHSITRLTESIAASAIENPEVKLLMGFTGIDYYSAMFLINEIGPVARFSSPKKLVSYAGLAPSTHQSGNHTTHGPITKEGNSHIRWILIEAAHQAARHDPRLSQFYMRIMKRRGHNRALVAVARKMLVTIYHVLNHHSQYRGLRPELFENKIRRLERITNSSLQTA

SEQ ID NO: 342467 - protein, 334 aa, unidentified
MERQYVGIDLHRRTSTIHQMAADGTVLGTARVKSQPMELAQVMADAGPEPEVVLESTYGWYWAADLLQELGANVHLAHPLGNNWGNRRVKNDERDAQDLAAMLRLGRLAEGWIAPPRVRELRELVRYRFRLVHHRTSCKAQIHGVMAKNGVLPARGFMWGPGGAAQLDALELPMAYTLRLESLRDLLAYYDREIAMLNRRIHQEFEHDAGYNAIRRIDGVGKVIGAIFCAEIGDVTRFASPERLCSWAGLTPKHRESDDKVNRGPITKQGSPLVRWAAIEAISKYRGGAKLRDDYLRIAARRGKFKARVAVARKLLTLVFYGLRDGEIRCLQTA

SEQ ID NO: 342468 - protein, 482 aa, unidentified
MNHRRLVGIDLGIASAHTVRILDGQGTTIAKRKCWPTKESLAEIEQAALEGCPPDTRLEVVVEPTGPAWLPLAAFFIGRGHRVFRVSSQKAADLRRFLSRHTKTNGIDADTLARLPLFDPDGLRPLVLPTADAAALDRRVRATDRLTKEMSLHKIRIKDLVRQLLPMTPLTGELGLADLAVLERFGDPRELLRTGEKRLCALITKVSHGHQGVDRARQWIDAAQSALALYSDYPAMPFADLAAEVATEVRLLRALQSELAHHQPERERRYVAVDPDQLARSLPGVATVGAPALVACMGDPARFSSAKAFRSFTGLTPKASETGETDRKGQPMSKAGSSLLRTTLVRAADNARRSDPQLARIYHQQMTERGKDHLGALCVVAANLAERAWVVLRRQSPYVVRDTDGQPVTHQEAKAIIAEHYTVSADVRARRRSKKVGKAPQKVLTGHLESHARGVDKRGDLPRRPSSFPASVPVKQLAEAAP

SEQ ID NO: 342469 - protein, 309 aa, unidentified
MTEHCYCGIDVAKDRLDVQVLPHRQHVSVANNGTGWAELVERLHALPIAAVGIEPSGGYERGIIRVLLAAGVSVRRINPSKLRQFARARGILAKNDRLDAQLIAEYVSIMPTRVVQRAATAERLAEVVTMRRQLCDEHVTIENQAAHVEDAILRRLNKRRLARLKADIHLLDKRMAEIVAADTILAQRYELLTSMRGVGPTLAFTLIALLPELGQMSRKQIAALVGLAPYDFDSGKLKGHRCIYGGRMPVRNILYMAALSAARYNPALKVFHNRLAAANKKPKVIIVAVMRKMITTLNAMVRDNACMAA

SEQ ID NO: 342470 - protein, 346 aa, unidentified
MIICTVGIDLGKTVFHLIGMDANGNVGLRKRLSRSQLLAYMVNVPQCLIGMEASCGAHYLGRELRKCGHEVRLIPAQYVRPFVKSQKNDYADAEAIAEAVQRPTMRFVPIKTDEQLDLQALHRMRDRLVERRTSLINQMRAFLLERGITARTGRELLRRELPALLVVAEQSLSGRMYRLLERMVEEWNEIDEHIEQFSGEIEAVAKSDDACQRLLTIPGVGPLGATAMVAAIGNGAAFSRGRDFATWLGLVPQQHSTGGKPKLLGISKRGNEYLRRLFVHSARSVVTRMKRDKLPFGDWITGLEARAHRNVVITAVANKLARIAWAVLSKHTQFTNNRLNGIPAAA

SEQ ID NO: 342471 - protein, 370 aa, unidentified
MKEYSEAFIGFDTAKKKHAVAIADVGREGEIRYLGEIDSSPLTIERMIRKLAGRYEKLHFCYEAGPTGYGLYRQVRGLGHDCSVVAPSLIPKKSGERVKTNRRDAVSLARLFRAGELTSVWVPDTVHEAVRDLVRARETASQDLRRKRQQLLSFLLRHGRIFSGRQHWSRAHLRWLAQQKFDHPAQQIVFQDAVDAIDDAAARLRRLDEQVAAIVPSWSMAPVVEAYQAMRGVSFVVAVTFVAEIGDLRRFDNPRQLMAFLGLVPSERSTGERVRRAGLTLAGNKRARRVLIEGAWSYRYPARVSQTLQARLEGLPKAVREIAWKAQIRLCARYRRLTAAGKKLPVVIAAIAREMAAFLWAIARHVAPAA

SEQ ID NO: 342472 - protein, 323 aa, unidentified
MFQTIMGIDVSKHTLDVVMLRPKGQWHKVIDNSPQGHQWLQNWIVRTKQGTIHACLEATGQYGEPVAEFLYAHGHRVSVVNPARIKRYGESKLHRNKTDKADAALIAEFCSKEKPAPWMPSPPAQKHLRCLVRYLADLESMCRQEQNRLASGLQDEFVIHELETHIAYMQQRRTVIREAIQQQVETHTDLKKQQDLLVSIPGIGKFTAARLLAELGDISAFENAPQLAAFAGLNPKGKRSGTSVYRKTHVSKEGRPFLRSILYMPGIVARRHNPIVHTFCDRLAAQNLPKKAVISAAMRKLLHIVYGVLKRNQPFDPNYLSTA

SEQ ID NO: 342473 - protein, 318 aa, unidentified
MTQQQLAVAIGIDVSKAQLDWAAVGVEAGGSVANDPAGQAALVARLRELRPAWVIVEATGGLERGIVGALGGAGLPVVVVNPRQVRDFARALGKLAKTDRIDAQVLAQFGLAVKPVLRPLATPQEQALRELVQRYGQLVEAKTAEQNRLKQAVGPKVKKSVQATLRFLAQQIQAIEKELDDTIQGSPLWREQEQLLQGVKGVGPVTTRMLLSQLPELGRVSRQQIAALVGVAPLNRDSGKYRGRRTTWGGRAPVRAVLYMATLVAVRHNPVLRAMYQRLVRAGKLKKVALVACMRKLLTILNAMLRDRRPWRTSALPA

SEQ ID NO: 342474 - protein, 344 aa, unidentified
MKITTIGIDLAKTVFAIHGVNEHGRVVLKKLLKRDQMAAFFANLPACLIGMEACGSAHYWARKLQGMGHTVRLIAPQFVKPYVKTNKNDAADAEAICEAVARPNMRFVPVKNVEQQSVLSLHRVRQGFVRARTAQANQIRGLLSEFGLIVPQGIHNLAGRVPGLLEDAANDLTGSFRLLIQRLLEHLKELDRQVRELEAKIQVWHRENAISCKLARVPGIGPITASALVASIGDAKSFANGRQLAAWLGLVPRQNSSGGKAVLLGISKRGDTYLRTLLIHGARSVIHAANRKEKKEGWLHSLLQRRNRNVAAVALANKNVRIVWALLAHAREFQSDYAAIRSAA

SEQ ID NO: 342475 - protein, 379 aa, unidentified
MRFVGIDIGGESHAVAVVNDGGALLVKSTLFGEDAVGYQRLRELLGNHDDCLVAMEATGHYWRNLFAFLVSHGFEVALLNPLRTRRFAEEELERTKTDSVDALGIARFAAQKRPAPTPIADEVTAELRELVRLRTRYVDELSDRMRQLHRAVDLGFPEFTRHVRIKTLLATAILARYPTARSFARVSIHKLARLAYDGRHHVGEALARALVESAKISVGTHHSEAYQLQVSYTCSDIELLRGRVKQLEQDIERKLQDHEVGKLLTTIDGIGARTAACLIAELGDPSRFRDAGARACVIGCGCRHWSPSGETLGCARTTTACWLPGSGRRSRSWPACANCSLPSTASPEIAARSCRFSQPAGLRSNEERLIMSNGRAEMV

SEQ ID NO: 342476 - protein, 341 aa, unidentified
MEQATTIGLDIAKHVFQVHGADAAGHVLFRKRITRAKLLNFLAAQTRCVVAMEACSGAHYWAREIAKLGHHVRLIAPVYVKPFIKRQKNDAADAEAICEAAQRPSMRFVPVKSEEQQANGIVFRARDLLVRQRTQCVNALRGHLMEYGYVFPKGITHVESLVALVEDLQSALPNSVRVILKLLVDTFTALEAQIAALDAEINQRSKSDPTARRLMTIPGVGPIASTAITALVPAAEGFPAGRDFAAWLGLTPLQKSTGGKQKLGAVSKRGERTIRRLLIIGASAVVQQASRRGAPQGSWLAQMLARKPKMLVTVALANKMARIVWALLVKGGTYRTPAAAA

SEQ ID NO: 342477 - protein, 416 aa, unidentified
MNFNKLLSGNITKYQKEGFIMISVGIDVSKGKSTVCIMKPCGEILESPFDIGHTADELDSLISLIKSFDEETRVVMEDTGHYHLPVATYLSSHNIFVCCVNALRMKKFCSQSLRRAKTDKIDSIKIASFGITYWNELVKAYPSNVIYDELKFLARQYYQVTGMLVKSKVNFSNLLDQVMPKINDVLSNQGENHKLTEFVSRYIHFQNILDMGEMKFTSDYCKWAKKKGYRLNERKAAEILALAQNGIPTLPNSQSVKIAVSEAVKLIHSIEESRNTILAQMQDLCNTLPEYSVVKEMDCIGDTLAPRIIAEIGDVRRFKNKHSLIAYAGIDAPPYQSGAFHASERHISKRGNSYLRKTGYEIMQSLIKHKPADNAVYDFIQKKRSEGKCGKEAMIAGLNKFLRVYYGKVMEFYSEH

SEQ ID NO: 342478 - protein, 340 aa, unidentified
MSATPSPVFIGVDVANAQLDWAIDGQKRPWRAHNTAAGIAALVAHLALLAPAKIVLEATGGFEGPLALALAEAGLPVLIVNPRQVRRYAQAEGVLAKTDQLDARVLAAFAATTRLEPRPMPTAEQRTLAALVTRRTQLLTLRQAERKRQPLADAAVADSLAASVAFFTAQLATLTTQIHACIAAAATLRAQAALLQSVPGVGPVVAATLLGALPELATLGPKPLAALVGVAPFNRDSGTHRGRRQVWGGRAPVRQALSMAALVASRHNPVLRTFYQRLVAAGKPKKVALVAVMRKLLTILRAIVQQGRAWGDRPPARARATPAPALPPPGSRVPALAGVG

SEQ ID NO: 342479 - protein, 354 aa, unidentified
MSQTPNTVIAVIGIDIGKNSFHLVGHDARGAIVLRQKWSRGQVEARLANIPPCLIGMEACVGAHHLSRKLASLGHDARLMPAKYVRPYSKGQKNDFNDAEAIAEAVQRPTMKFVATKTAEQLDLQALHRVRERLVSQRTGIINQIRAFMLERGIAVRQGIGFLRTELPTILATRTDALSPRMLRVIEELAGDWRRLDQRIDGLSGEIEALARQDQACSRLMTVPGIGPIISSAMVAAIGTGDVFSKGRDFGAWLGLVPKQISTGDRTILGKISRRGNRYLRVLFVQAAWVVLVRIKNWERYGLKSWIEAAKRRLHHNVLAIALANKLARIAWAVLAKGRAFELTRTDDAGVRPA

SEQ ID NO: 342480 - protein, 338 aa, unidentified
MEHYAGIDVSLECSSVCVVDANGKILREARVASEPEALIGWFRSVGFGLERIGLEAGPLSQWLFAAMRQAGLSVELLETRHVRKAFEAMPVKSDRNDARGIAQLMRLGWFRPVHCKSMSAQETRTLLTARKLVQSKLHDVENSLRGILRGFGLKVGKTTELKFAGRIEELVAGHPHLQVVTKALLSVRAVLRTEFAAFQKQTRKMAQSDARTRLLMSTPAVGPIVALTYASAIDDPARFTSSKQAGAHFGLTPKKYQSGETDYTGRISKIGDSSVRTALYEAAHIMLTKPLKGCTQLKSWAMRIARRAGMSKAKVALARRLAVIMHRMLADGTPFKAA

SEQ ID NO: 342481 - protein, 412 aa, unidentified
MKLIRDKVAGLDIHRDTVVACCRVHHQGRRVALTKGTFATTTKGLKELVDWLSEASVTTIAMEATGVYWKPVYYSLEGHFEELWLCNAQHVKNVPGRKTDLNDAEWLADVASHGMVRPSFIPPTEIRQLRELTRYRKTQVDMRNQQIQRLEKVLQDAGIKLSSVASGVWSKSAKEIIEAMIAGERDPAVLAQMAKSRMRAKIPQLEEALSGHFGAHHATVSREIIDHIGYLDATIASLTTAIGILLIPYEAAFTILCSITGISEITAQILIAEMGVDMSRFPTPGHLCAWAGVAPASYESAGKRRAAGTRKGGTWLRRSLIEAAHAAVRVKGSYFSAQYIRIARHRGPNKAVVAVANSMLAVAWHLLTNGTLYEDPGADYFTKRHDPTIEAKRLQRRIEALGYEVTVSANVA

SEQ ID NO: 342482 - protein, 340 aa, unidentified
MSTQFFCGVDLAKHHFSLHAVDDHGKVILHKSVSRAKLLATLANMPTMCIGIEACSGAHYWAREFNKLGHDTRIMAAKYVGPYRTKGKNDLNDAVAICDAVQRPNSRFIPVKSPERQAILAIHRVREHWVNERTALINRIRALLAEFGIIIPTGRAAVHRQVPLILEAAENGLPDIARAVVADCFDHLQTLNQRIDDTEQCFDMVTKASPNAQRILNVRGIGPQTATAIIATIGKGEQFDSGRDFAAWLGLVPKQYSTGGKPRLGRISKRGDKYLRTLLVHGARAVITNLGDKQDRLSVWGRNVLERRGMNRAIVALAAKNARIVWALLHHQTDYQDYAA

SEQ ID NO: 342483 - protein, 337 aa, unidentified
MKRYLGIDLHKDKFTVCYLDQQDKKVIKEFKLISLPRFKKTLNQEDEIAVEAVTNSRYFCEELLTLVEKLVLVAPGNFKVISQSSKKTDKKDAETLAEFLKMGKLPEARIMNKQQAYIKSLLNTRDKFVKQRTQCKNKIHNILSSLGIPYDKNKIFTQKGFKNLRTMNFDPLVEVEIELLVKHIEYLNESISKIDAELKKPDNQLPGHKNLISITGIGDISASIFLSAIGSIEDFPDKKKLNAYFGVIPTVRQSNNTTHYGRITKRGNRLVRAALVQCTLIIIKYNPILREFYLRLKMRKGSGKAIVATSRKLLELIYLTLSNNIIWEDSNYAIIKS

SEQ ID NO: 342484 - protein, 391 aa, unidentified
MIYIGIDVAKDKHDCFITNSDSEVLFKAFTIFNNLDGFNDLYQKIESVMDDVTKVKVGLEATGHYSYNLLGYLIDKGLPTYVINPLHTNLYRKSLSLRQTKTDKVDARTIASMLMSDVNLKSYSDTSYHNEELKSLTRYRFDKVKERAKLKTSVSRLVCILFPELEKLVPTLHMASVYALLSEFPSAKHVATAHLTRLTNLLSESSKGRYGKDTAITFRDSARASIGSNMPAKSLELKHTIKLIQELDSEIDEIENEIKIIMDEINSPILSIPGINYRMGAMIIAEIGDFNRFDSPDKILAYAGFSPSTYQSGQLDGAYAHMEKRGSRYLRYALYNATKYVCHWDPTFAAYLAKKRAEGKHYNVAISHAVKKLVRVIYHLEKTKQQYIKVA

SEQ ID NO: 342485 - protein, 413 aa, unidentified
MVDLLVERCAGLDVAKEEVVACVRTPGPGGGARRQEVRAFPTFSADLERLADWLAAEGVTQVVMEATGQYWKPIWYVLEARGVELLLVNARHVKILPGRKTDVADAAWLAELLEHGLLRGSFVPPPAIRELRDLTRYRKKLIQAHTAECQRIHKTLEDAGIKLDSVAADVLGVSGRAMLKALVNGERDPQVLAELARGVLRKKLPQLRQALRGRFSDHHALLVGLSLGHLEHLEGAIAQLDTRVDQVIAPFVVARDHLDTITGVGKRAAETIIAEIGVDMTVFPTAGHLASWAGRCPGNNVSGGKRRSGRPMPGNRWLADVLTECAWAAARSRDTYLAAQFWRLARRIGRKKAAVAVGHSILVIAWHLLAGDCDYHDLGGDHFTRRNDHDRHKTQLVKQLQALGYSVTLQPAA

SEQ ID NO: 342486 - protein, 351 aa, unidentified
MNTQITASPKLFIGIDIHKRSWKVHCATDLSSGKTFSMPPDAELLYEYVAKHYTGYEVSTAYEAGCCGYRAHRCFVGYGWRSLVVNPADIFRRGKERHTKTDRIDAQLIARELKDGRLSGICVPDKCREQLRSLFRRRNDLVKDMRQIKSYIKMQLLYYGIRIPQEFDNDHWSHKFRDWLDELDFGYDTGNEVLRSRMRSFRFIDREFREVSTLLRRYTKTHFKKDYMLLRSIPGIGPIVASGILSELGDLRRFGNIKHLAGYVGLAPGIYQSGDTIRHTGVSMRAHRLIRSYFIEASWQAIRTDPVMQGYYRKHHGKNVKSVIVKVARKLLSRTLAVIKTETPYEIGVLE

SEQ ID NO: 342487 - protein, 340 aa, unidentified
MKLFVGLDVSLAKTAVCVPTEHGKIVREVDVASEPEPLITLLRDLDGTAEAVGLEAGPLSQWLHRAMTDAGLPPVLMETRQVKGALKAMPIKTDRRDAEGIARLLHLGWFRPVHCKSISAQEVRALLAARKSIQNGMIALEMSLRGLLRNFGLKVGAISRGRFEARIRELVDGNTMLEAATKPMLRVRSALRLELAGLEKRVRQMASEDPICLRLMTMPGVGAVVALSYRSAVDDPSRFHSSKNVGPWAGLTPSRSQSGEREVSGGITKAGDVNLRRALCQAATVMLNRARGNALRTWASQVAKCRGRKRAMVALARRMAVVLHRMWVDGTSFRMEAATV

SEQ ID NO: 342488 - protein, 366 aa, unidentified
MAEFTRFVGLDVHKDTIAIAVAQDDRSDPAVLATIPHDVPRLLRRLQRLGPGLLVAYEAGPTGYGLCRALQAAGIACQVIAPSKTPRASGDRVKTDRRDAISLARFLRSGDLTVVHVPDEATEALRDLVRARDDAKRAEKTAKHHLSKFLLRHGRHYPRKTAWADLHFKWLEEQRFVLPAQQRVLDDYLHTVLEARARVERLTQQIEELLPSTPVYPLAKALQALRGIKLVSGATIACELGDLRRFSHPRQLMSFLGLVPSEHSSGQSIQRGRITKTGNGHVRRVLVEAAWAYRFPPRANHELGQRLAAVSGAVRTIAWKAQHRLHKRYWALTAARKSPQRLVVAVARELVGFVWAIGQQPQLLAH

SEQ ID NO: 342489 - protein, 362 aa, unidentified
MSDGICFAGLDVHARKTAAAAVVLGSGEVFRAQIPGPPVSAIDWLRTLPGPVRAVYEAGPTGFGLARAARAAGIEVMVCSPGASPRQPGDRVKTDMRDALKLARLHAAGQLRPVVVPEPELEALRDLVRAREDLRGDLMGARHRISKLPLRRGLVFAGPGDTWSQRHLAWLGRVRFDEPLADTVFGEYLACHEVLLARRDRLDALIGQQAELEPWASTVGRLRCLRGIDTLTAVGLIAEIGDLHAFTHPRLLASYLGLVPSEHSTGEKRRQGAITKAGSGHARRLLVEAAWHYRRPPRVSLTLRRRQQAQPPATVDAAWRAQLRLHKRWAHLDAARGKRRTTVAVAVARELSHYVWEIARQA

SEQ ID NO: 342490 - protein, 434 aa, unidentified
MENEFAAFVAIDWADQEHVWALEAPNASGRQTGSLDHRPESVDVWAAELRLRFSGKPVAVALEQSRGPLAFMLTKYEHLVLFPIHPTTLANYRKSFRPSGAKDDPHDAGLLLDILTRHRDQLRRLNPDTPETRTLQFLVEERRKLVQERTRYSNRLTAHLKMYFPQVLNWFEEIGSSIAADFLIRWPSLEILQRARSSTIERFFVDHNSRNRERIRERLEQIRKAVAATHDQAVVTSGSVAVVAWAGLLTPLLKAIQSYDVQIARLARQHPDYALMNSFPGAGPVLTPRLIAAVGTQRDRYQTAHELQCYSGIAPVVVSSGKQRCVHWRWSCPKFLRQTFHEWALHSVAYSPWAREHYQEQRAKGKSRHAAIRSLAFKWIRILFRCWKQRQPYDELVYQRALATRRPQLQSAAQPVELQWKNVAGFSKIAVAGG

SEQ ID NO: 342491 - protein, 424 aa, unidentified
MISASIERCAGIDVGKKFLAVCVMVGPLEGEPRVEIRRFGTIRAELQALRDWLRQEAVSHVVMESTGSYWKPVFNALEDVVKVYLANPQEVKNRKGHKTDNKDGWWLAHLLRHAMIRPSFIPPRAIRELRDLTRRRKRLLSAGTSERNRVQKVLEDANVKLGNVLSDIFGTSGQLMLEALLEGQAIPEQVARLARGKAKKKIPQISAALEGHQMSDHHRRMIHYSLEHMRFLECQIEELDQEITVQIRKADLEPQWQLLQSIPGIQETSAAAILAETGTDMRVFPSEKHLSSWAGVCPGNNRSAGKNKSSDTTGGNRWLRSTLTECAWAASSKKGCFLKEKFWRITTKSGGKKPPAVMAIAHTLLILIYQVLATGKRYQDRQAPILTEQQKQRIIQHHIRRLGKLGVTAGVSTCRPKAAKTQRM

SEQ ID NO: 342492 - protein, 347 aa, unidentified
MTIVDTRVVCGGVDTHVDFHVAAVLNHIGGLLGVESFETTEAGYRKLLDWLEGFGVVIRVGVEGTGSYGTGLARFLNDRGLEVVEVDRPNRQLRHRRGKSDPTDAIAAARAALSGEACGRPKWRNGPAEQMRVLLVARRSARDQRIQTLNQIRQLVFTAPGAIRERFIGRPPTAMLTEMAKMRPRPSSDPVAYVTRCTIRDLARRIKGLDAETKQIRAKLRILVAEVAPSLLELRGVGAETAAMLLVAAGDNPQRIRSEAAWAHLCGVAPIPASSGKTIRHRLNRGGDRQANAALYRIVLSRLSCDQETKNYMTRRLAEGRTRKEIIRSLKRYLARQIYKHLPRDSH

SEQ ID NO: 342493 - protein, 339 aa, unidentified
MTIQSKQIAQEAKLPFAGIDVGAEELILIIRKNGTPFKAQKFTNTPADRARLVKKLAKMDGVTVCLEATGVYHFDLSIALHDAGVKLMVVNPKASHNFAKVLMKNSKTDAVDADTLAQYAERMDFVAWTRPSDEKIALRCYARRIDALTCQKAAAKNQLHALTASQETPKAVLRDVKLGISQMEKRIDRLAKEALTLVGKHPDLERAFTLLVSVKGIAQTSAIALMGELLLLPPGLSHREWVKFAGLDPRAFDSGKSVHKKARLSKAGNRHIRSALYMPALSAKQHDPHVKAYFQHLLDNGKLPLQAVCAVMRKLLHAIHGMLKHDKPFDSARFYALPA

SEQ ID NO: 342494 - protein, 458 aa, unidentified
MKIKSIYPARNSSQLREVLGKYSPGELLYAPIDVAKYNHKACAVNFFGDILTPAFEFSNNAHGVKFFISKITEAARNAKAKKIFIGLEATGHYHQNLTLHLKSLGYEVAVINPFDSWKERLNKSSKTDKIDLGSIAKSLISRKFSSSTVPQGVYYNLQRATRTRRKFVNRRTSSKNIITGLLDNLFPGLWDKEDTIFSDRWGKASLSVLEHYPTPQMILRLGEKRLTRFLKKGTTKLGEKTARKIISAAKVALTRSPYEQTMDILALRSHLQAYRLYEEIIFHLEKEIAYLLVQTPGTYLLSVPGISVTYAAEVTAEIGDISRFAYANQIISLAGTCSKKDQTGEHDPQNLPISKKGNKFLRTVLNQAGLSLNTWCPDFNAYYSRKVEEKKGRCGIARTATGNKFARLAFALMKHESLYHPHSFNTLVQDPGNYYLLSLWRNTEEVKGFLFREDPSSE

SEQ ID NO: 342495 - protein, 362 aa, unidentified
MNKHIFVGIDLGDKNSVARIGVDLEKSERFGFVNTNAGRARLILEVKRRSEQMGAAVVVMAYEASSCGFVLRDQAQAAGIDCKVLAPTKMEKSVEQKRNKNDDRDADDVLEKLRGHVLAGNRLPTVWVPELETRDDREVLRTRLTLSERQTQIKTQIQMLLKRHGLEKPSDLGSTRSKQYRHWLESLSQWESLGWGTRQSLASLLRQLSGIEAEMENLEKLIRQLGSQPRHKPIVEALMKEKGVGLLAALVYRTEIGQARRFHRGRHVGKFVGLTPTSHESGQQKDRKGHISRQGPPRLRKVLCQASWVHVRHDPHSREAYQRLVAKNPKKKKIALVAMMRRLAVRLWHRMREAESLQQTSS

SEQ ID NO: 342496 - protein, 347 aa, unidentified
MLHVGLDLSRKRLDICAISDQGELVDELAAPFDEEGLCRLSERMAEKHAGRVRAVVESMNGARFVHDTLEAQGWDVLVADAQRVKGLAPLACKTDKIDARVLAELSFRDLVPAIWLPDPQVRRERELARFRLHLVRHRSSLKNRIHSTLITFGKPCPVSDLFGVAGRKLLERLDVPEPWRENVEASVVLIDQLDRQIDAVASELKYVGADHPYVPVLMSAPGVGWLVGFSIACEIGDISRFSSPTKLCGYTGLCPRVIQSGESDRRGPISKHGPKYLRWALFEAALNACDHPLYKERYERTKKRLGRQRGPKVAQIELSRKLAEAIWHMLTRNQPFAPAGAPFRLAA

SEQ ID NO: 342497 - protein, 352 aa, unidentified
MIVLGADMHKRSHTIAAIAASTGEALGDKTIQVGEAGCIALLDWARGFGDDRAWALEDCRHVSSSFERFLLASGERVVRVATKLMSEARRAGRDRGKSDRIDALAVARAALREGLDGLPSAQLAGVELDIRLLVDHRERLIRSRVALNNDLLWHLHDLWPDLTLPKSALVSKKWSTRIARRLARAEQTARVRIARDELRRLRELTVAADALEAEIADLVTQAAPQLLDEPGFGPLTAAKLIGEIAGVQRFATEAKLARAAGIAPIPVSSGKTNRHRLDRGGDRQINTTIHRIALTRARCHPETQDYIARKRAEGKTGLEAMRCLKRHLARRIWHLLQPPTPGQATTLSTSIS

SEQ ID NO: 342498 - protein, 427 aa, unidentified
MKKIKIDYLSTLFVGIDIGSRTNVISALNFDQDFLIKMVPVANAQGGAEQMEEMVAEVLSQHHEFKTVIIGLESTGFYGVHIANYLSTSEKLAPFSTKVYCLNPNEVKQYKKSFNSLDKNDGIDSFVIADFARVGRIHTEPWRGAQYLALQRLTRHRLHITECIAREKTYMLNNIFLKFSEFAMLNKDEHPFSDKYGATAEAVLTDYLSTEDIVDASVDDLVAFISSKSRGRISDPEQTTYLLQKAAQDSYRLDKCLYEPLTVSIGCSFNCISAFEKELKAINGAIQRAVKGLNPTEYQILTSVPGIGPVYASGILAELGTIKCFKSNDALAKYCGIVWKENQSGEFQAEDTPMNKAGNRYLRYYMIEAAGSVIQHCPEYKAFYDKKFAEVRTHQHKRALALTSRKLIRMLFGLLANGKLYSVEKSR

SEQ ID NO: 342499 - protein, 312 aa, unidentified
MNDKKTSVYAGLDIAKASLQLHLQSKSYDLPNTAAGHAQLIKRLAAIPGVHVICEATGGYERAVVAALHVAQIPVSVLNPARVRQFARASGELAKTDPIDAAMLTAFGQAFAPEPTPPRTTVEIKMAALVSRRAQLLELRVAEEQRADTCTDPALCKLFTAWLAQVKKQSAKVEALIEELLKEQAPLAKQVQRLDDIMGVGRITAVTVLANMPELGQLNRHQAAALAGLCPYNRDSGQWAGKRCISGGRAEVRRALYMAALSASRSNHLLKPFYDRLIAAGKPAKVALTAVMRKLIVLMNHLLKNPNFSLAY

SEQ ID NO: 342500 - protein, 347 aa, unidentified
MYYIGLDVHKKTISYCLKDVPGHVHREGKIGSTRRELDAWINTLPQPQTMAMEATIFTGWIYDHLLPHAEKVKVAHPLMLRAIVAAKKKNDKIDASKIADCLRCDFLPECHMASTEIRDRRRVLRYRNLVVKQMAQMKNRVSGLLMEIGVSYNKQRLHKVGYFGELMSTNEDISQAVRPLLNLSRGMIRRSGKAEYDLVSSLERDPLLKERLRRLRTVPGVGSITALTWVLEIGDYTRFSSNKQAISYCGLCADEKSSADKVMRMPLSKQRNKHIQRVLIEAAKLAPRESPELAMIRERELQRGNPNRATLAVARKIVCYMMAVERRQQDFVTAGELVPTEAAKNLS

SEQ ID NO: 342501 - protein, 339 aa, unidentified
MRETCCSQVRFGLAITCPILGIDVDSKYLVVHLLLLDGTNRTRQFKNGPAGFKELVEWLAQLKASDALICMEATGRYGEKLAKHCHGLGFKVVVANPNFISRHKESLNKHNKTDPTDALAIADYARCFEGRLRAWEPLSPVREKLRDVLGQIAKLKKARTMFSNRNHCGLNDVLVRDSNDESIAFVSAQIDKLSEYRDSLFEELPALKVARAALMQTVGIGKEIATALVVRVQMQNFASGRELGAFLGCASAEWSSGKQKRRGRQPKAGDSDLRSLLRLGAASALRTSFYRDFVDRLTKRGLSKGQVIGAVARKMLLIAHAVLRSGKPFDRNYKSPLAT

SEQ ID NO: 342502 - protein, 343 aa, unidentified
MVSHYIGADVHSNNVELAVERKGQIVERYSLPTSIRAIREVLDAIPSPKYLAFEEGPLAGWLYRNLKDYVDGLVASDPRRNKWIASDGDKDDRIDAAKLAALLRGGYLRPVYHSDDLQRLWLKRWVALYHDRVRAATRAINKIRALARLEGQRIPGPALRDLAARRSWLDGLEDDLAEALRLRWASYDRHRTEVRIAKRQVIRRSQAFPIIAYWRALPGVGPVRSATLFAYLDTPWRFKKKSQLCKYCGVGLQRASSGQDRRGRDRPTRLELFWQVNRRLKDAVMGMTMSAIRSRDNVFRDHYEERIRHGALASNARHATARKMLTVMWGMWKCQRPFDAAWC
